United States Patent Application Publication US 2014/0057251 A1 - sequence listing, part 191

SEQ ID NO: 390344 - DNA, 734 bp, Cannabis indica
cacattatatgtgtgggaaaaactcctaatttcttgtagtgttggggcctgcttgagaccatagatagccttttgaagtttgcacactttgtgaggagtcgtgcgatctacaaagccaggtggctgaaccatatatatttcctcttgcaaatcaccatttaaaaaggcattgttgacatctagttgcctaactggccaacctttggtgagagcaatggttagcacaattctaatagttacaggcttgataactgggctaaaagtttcattaaaatcatacccttcttgttgatgataacctttagccactagtcttgctttgtattgaatgacattgccttcttcatcttcttttattctgtagacccacttacaacctataggttctctgccttcaggaagatgaacaaggatctaggttttgttcttttgtaaagcaagcctttcattatccatggctttaagccatttttcattttgcatagctgctcagacagtttttggataaagagaggccattaataccttgggtttccttataccagactttgatctagtacacataggatgcttatttgttactgttggtatactgctggaacccgatgcaacagtagcatcattggttgtatgagttgttgttgtaggtacagtagcagtaggtggacagtggacagtagaagcaggtggtccaacggtaatatttgattgctgaattggtgcaacaaggtcag

SEQ ID NO: 390345 - DNA, 605 bp, Cannabis indica
agagagagagagattcgtggtggtaggttccatcgcgagtttgaagacaagagggagagagagagtgagatctgaatgcttgaacaaaataaaggtttttgggtttttatatgtttaacacgttatctttgacggtttaaaactgtcggctatagtatgcccgacgatttaaaaccgtcaagaataccgttttaactcgtttttgaattttaaaaatatgattgttttgtacagtgaagaattctaaaatgaatgtttaaaatcgttgaaaatagtagagtattcctgacggttccccaaaaaaattgacttgaaaattgaggggaataactttttttagtagtgataagaaatattggtgatggtttgagaataaatttgtattggtttatatttgtatgggatggatattaggtagtgtagtgtgatgatgttgataagttgataagttggatgattggtgggacaaggaagagttatgtgtttaatttttatgtgtgtagtaagagaggagacaaggtagtaagttagtagtaaaagacttgatttggcttactcaagcttagttacaatttggaacccttgatggggtatttatagttgct

SEQ ID NO: 390346 - DNA, 1111 bp, Cannabis indica
ttagtgataattaaatcatcaaactatattatattttaattttaatatttttgatatatttttaaaaaataatatgagaactattttactaaacttttaattttttttactttagaaaaatattttttttacacaacttagaaaaataaattaatattatagaaacttcatcatacaatatattatttaaaaaatgaaaaaaaaaaaaaaaacagttatcttcaaatattgtagtaaacatatattagaagttgaagaatcctaacataaataaaacataaaaaaaataatatatttaaaaattttcctttattcaattaatgatgatgtacatagattctaaaagaaaattatataccactaaaataaattgagccaaagagagaaacatgtgagtaaatgactaaaaatataatagagtaataattagggttaactaattagtttagggaaattctataatgcaccctcttaaaagggatacatcgatacatctctatctatttttgtatccgaaagaattttttagtcaaattttttctcatagtcatgtaaattatagttatttaaaacatcctacaaaattttaagaaattcgaaaaagtttaacacgccgaaaattgcgtttaagtagtgtgctgcacgcgtgactattttattttatacgtgtgtgtgcatcagtacattccttttaaggagtgtattttagaatcacccattagtatatttatacctgatatttttctaaaaaaaattaaagaaaataataagtaaatataattatatgcctaggtagattgttttattaactaatatttaaagatttaaacgtataaaggttaaatatctactaaaattataatttaaaatttaatttcaaaaatgtagattaaaataaaattttggaaaatattattttaactaaaagtatagataaaaaatatatattttttaatttccttttaatttattttggtaaaaatattagactaaatagaaggaaatataattttagagtgttatgtaaccacctcatatcaaagctttagtttgttataaaataagtagattctattacaaacacaaaattaattgttattttttttttttt

SEQ ID NO: 390347 - DNA, 979 bp, Cannabis indica
gaatgtcaactgtaaatctccaacggttccaagctatgactatcttcccacccgcatgtcacgctatattagtagagaaacaccaatttgcaaacacatttgagtataaggttccaaattttggagccttaactcttgtttcgagaagaccaacaaaatcaacttttttgaatattgacaaattactttatcaactgttgtttttgttgattgttggcccctcgaacgttccaacaaagtaacttatccattagacagagagggtgctcccccctctcctgtcttgactatctcagtaggcatattctcctctgcattttctgtgatttcatcttcttcaagcccctggaatgagttcttcattatcaccccattagtttcagttgctcccttctcacggttagcagtattttttctgctatgtactttggtaaagccctcttcatctacctgtggctgcttcctgttgtcttttttaataatccattgctgctgccctcccaccttcttcttacaatctgctgcagcatgacctataccagaacaatgtgagcaagaaattggcttccattcatatttgattcctaccgaagtgatcgaaccaaattcgttctcaaactgtaaaaaagctggcaggttttcatatatagctaaacatatatatatatataaacgttaataatagtataatatattaatatattaataataataataataacagcataataatattattattataatatatattaataataatttttattaatggttatcctatcatttcttagccactaagaatttctacttctaaggcattaaactaaattcggcacactcttaattgttccaatatcagcattattaacttatcacaatattcccattaattctatcaattgaatttgttatgacatttttagcacccgatcgagtctccaaggtcgccgaacctgaaaaatatttttattccaca

SEQ ID NO: 390348 - DNA, 892 bp, Cannabis indica
aattgatttttcttgaatttttatctaccatctaatactcatcacatggagctcatatttggatctcaaagtttggccatgcacgtacaccgtcattactgcatggagctcaaatttcacgtgaaaccccagctgtgcactacttagaccatcgtgagctgtcaacaaagatggcaggtccttctcaagattcaaactcgtgacctaccattcccgttctcattcactagggttgttcgaccactggatgacatcatacagcagcccttgaccgtcactatgcatggaggagctttgactatagctaggaccaaaggtccttcggtcatgtcttgaagaaaggaaccctaggtcctttctctcggccagaaaggactaccatggtctggtcgtcctctcacatgaatgcatgtgacgacatgcaagagggattaacgccactcttcctgtgtgtatggaagacaagacctagttgggtctttgcgtcatttgacacgtgtgtattattttcaagccccttggctgccaatggccatagtggctcttcccgagcctccagtcatggtaggattggcttttcaggaacttctttacatcttgattcttgaaatcatacaacgaatgacgctagacttgactttctttttaaactatgcccaatcagggaagaccctaggcctagtgcctaagttgacaaagaaggtgatttatgtgtcgagttatatactcaagattcttgagtaatgtgtaatgaccgctttagtaatttggactagtaaaggaaattagcactaatttctgatatttttataattatttatgaatttaattatttatgggccccattgttagaaatggcattagagttataatttctcaattctggagattt

SEQ ID NO: 390349 - DNA, 799 bp, Cannabis indica
ttaaaaaaattgaaaaattggggtcatagagatatagagaaagattgaaactttgaaagagttaataagaagagagagtgagagaaaggttgtgtttttatattaatgaaataaaaatgtgtttcttttttctattttttttggacataagtaaagtaagtaagcaaagacttaaaattgatagtgttgggtatgtggggttagtttgctttgggattgactgttgtctttcttcttcttcttttagagagagaaagaagagagagaaagatgcagggtggggggaccttgaattgaagctactataaaccagaacacccagaagaaaaaaaaaaaaacccactcgtggggtctttcacttcagtcttctttaatgtttaattaattaaaattgaaactttttttttttaaaaaaaaaccaatctttatttttttaggacacaaaacaaacttacatagttgaattttatgctgtggttgaagtctggacattctccacaacttttgggccttgaaaacccaacatatatgtactattatcaacacttccatgttgctctaatctaatctaaacctagatctaggggtatttctgtctttttacttgagagaactgccatattcctatcatagaggcgtgctaattacaacttcttagttaacattcacgtctgaaattatatgttagagtattttgtttcatatagtttacattactgaaaatataagtctaataattcagtttaacattaaaataaacttcaaacgcatttttgtataatattaaaaaaggtaaaaa

SEQ ID NO: 390350 - DNA, 767 bp, Cannabis indica
ttgcgttcaagcagtgtgttgcacacatgacttattttattttatacgcgtgtaaaatatactgtttgaacattgttctctatattgtaaattattccgaattttttaaaaattttgtaagatatcttaaatagctataacgtacatgaatatgaaaaaaaaattagactaattttttttttcttggatgccgaaacaagtaaatgctgcatcagtacatctcttttgagggggtgcattgtagaatcaccttaaaattttaatatcagaaaaattaatctaaatttttcattctatctaaagaacatctacaaaataataaaaggaatgaattaatattaaaacttttgtaaataatatacatcttttattttatactttaaattaatttattttatattatatttttatagaaattcacaaaaaaatttacatcgatctaatagatcaacttaaattgtaaatttttttctaagaaaaaactaaaaataatatataaaataattcccatatataaatcatattaaaataaatatttcagcaaaatttgctaaaatgtaaaagttagaacttcttattgtttattttgatttatttatatataaaaggctaattagtaatttttcccctgaattttgacatgtatcaaatcgtgtcctctgaacttttttggctgttaaaaattccccccgaactattgagattgttaaatttaaggatatttgtctaatttcattcaattttactatttcagtgattgtttatgt

SEQ ID NO: 390351 - DNA, 842 bp, Cannabis indica
gtttggatgatttcaatcttgggttttgggataataacaataataacaacctcattcagcatcagcatcaacaaccatgggagctgaactctggagatctctctgccatgatcagtactactagtagctcaaataataataataacaatatccctttgagtagtactgatcaaggagctttttatccactcattgacaactctatgtatggtttcatgtctggacctacttattcttcttgctctccttcacttcctcctcttggtgatgtagttgacttgggtcattctctcttttgactatatattaatgtcaactctatcttttgttgttagtgcatctgtatttatatatatataggtgcaccaatatatatatactcatggttccatatatttcatatatatatatatatatatatatccatgcacttaagtttgagttttctttctactctctttactagtttctctgtaattattaatggtgatcatcaccatccaaagtctaacaattaagaaaaagattattggaaatggtgtctctatggttttaacaagattttaatgcaagccttctatatttttagtacaatagtatattatattagatatggtatttacacatatgatcatatgtgtatcgtttatatagcatagcatgtcattttcagctcattattattgcttattatatatacaatggagtactctcttttcagatatgtgctttatctttttcaggcaacccaggtaacgaataggatgtgtaaattaataatgatcaaaaccaaaaatatgatcatactatacatatacatcataagtatatatatatatata

SEQ ID NO: 390352 - DNA, 512 bp, Cannabis indica
aaggatattcttaatggctaaataattctcaggggtaacagtggtgaatagcagactatcatctacaaaaagtagatgggagatcaccgtggcagctctagaaatggagaaactcttaaagaggtaagcattcatactggcacagatggcagtaaagaggccctcagagaccaacagaaagagataggggagagggggtccccttgcataatacccttggaaggatggaaactttgagaatgacaaccattgctagaatattgaaaaagacagtaaagacgccgctaagaattagggaaacaaacctagcagaaaaaacaaaatggagaaggatggatttgacaaagttccactcaactcgatcaaatgccttttccatgacaagtttgagagcaacccaacccaacttaccacttttccagttattaatagcattaaccaattcattagtgataagaatattgtcaaatataagtgtaatatcccaataaatataatgatatttaattgag

SEQ ID NO: 390353 - DNA, 1280 bp, Cannabis indica
aaaaaaaaaaaattcaattttactggaataagttttaaactatttttttctccagatatcaaggtttgattaagtaaatttattatttttttatgttttaattttctttttcattttaaaaaataattttatatttttatttatttttatttttaagatataattttgtaaatataaataaacttgatttttttttcttcacaaaatctaaatttattggattttaataacttttgtttaattatttaatatatgtgtttatgaataagataaaatttgaatatgttttttaaggtataatttatgtttctttaagtaaatttatttttaataattaaaaaaaatcgttagttttttaataattttatttttactttttaatttttaattttttttattttcgtggaaaaaaattataattttgattttaataattaaaatagtaaaaaggttaattattactggtaaaataagaaaaatatttttaacaaatagtataatttatcgggagtgatctgatggtatcaaaagtttagaggacaaaaatattaattattctaattattttagaacaaaaacttttttaacccctaaactataatacttgtaaattcttgctccctaaattattttgtttggcaaaagtacccccgaataatagcacttgtaaacaatttagcctgtttcgtctaaaaaactaacaactatagatgcaaatgtgaaacaaaattataatattctttattaattaattaattttaattttaaaattaaaaaataattttaataataaataagcaataactaaacaaattacttctactacccattttagcaaaagtacaaaatttattattctatgtcatctcgttgattcgttcttcttcttcatccttgtacccatccattctgagaggctccttcttcttttccaaactagcaaattacaataataataacaataataataataataataacaataataataataataatattatgttagaattattattgtggactaacataatcatgagcttaatatcataaacacaatcattaactatgtgcccaatatttattttctaccataatgggatggttaataattatatattatgttagagacacatgagagcacccttaaaactataattggcccattaaattatagtataccattattgaaccacttaggcccaattagtgaataactctttagggttataagggtatgggatatatatatatatatatatatgtgtgtgtgtgtgtct

SEQ ID NO: 390354 - DNA, 1338 bp, Cannabis indica
tgcagaggtttgtctttctttcctaaaaagattacttaatagtctcacaagaagttactgtctagagaagggcttttaatatttctgcgggttggtttaaaagtcaaaagagaagtaaacacatggagataaaaattagcttgctttaaatttcttggttatctgcttgttggtattaaatacacaaggaaatttatactgtcattttcccactctcttccccgaatgtacaggttgtcaaagaaactattgattcaagtgcaactatagaattcaagccgaatactgcagatgatccacacaagaggaaacctgatattagcaaggcaaaggagctgctgaactgggagccaaagattccactaagggagggtctgcctcttatggtgaatgatttcaggaaccgcattttgaatgaagatgaaggcaaaggtctcaaataagagaagggaacgtagtaccttatgtatagtgtgtagtaagcgcatatctgtatcttatcccattccttaatttttctcagcaatctctgccttcattccctgaaaaatataatcaatctgccactctaggaagatatttctggtagctatcttcattttgtgcttcatttgcactatagcagtggtttacattttgtttttttaatcaaattttggacattattttacactattcttctggcactgaatcagatgtaatggatatacttgtattcatttagtttgtttgttaaaacacttggtcatcgcaagagcttctgggctgaaaaataatgataaaagttcaatatgaaatattttaccctgcttgactaattaaatattcagagattatgattgactaattgtctagttcaacgtttagcataagaaaaaattgtcttttagctgactatctaagagaaaacatagatttcattgtgagagctttaagaaagaaaacactgcattttttgttcttgagttaatacaatctaaggggagtaggctattaccgaactaaagggaccgaacctcttttaaaattttgtattctttactgtttattggttcttaccttatcttaattacatttcttatcgcttattaattgactcattgtcgttggctaaaagcgagatcaatattttggtgctttcattgagagtaataatccaaatttgctctttactttaagttttatcacacacaaaatggtggtgcaaattcgcagagacatgtttgatcaggttgatccgctattggcagatcctacactgcaaactcctagaaatacaatggtcccaccaatcatcgaccttgagcaaccaaacacgcaaccaccaactgtgggtca

SEQ ID NO: 390355 - DNA, 532 bp, Cannabis indica
tctctctctctctctctttgaaagaaatgtaaaattcattaagaaaaatttactgttacaaaaaaacctggtcaccaggtctattggacatgtataagcgaggcttcagcgaggtaaaggcgtagcccagtttggcgcgtttcgaaatgtcttggccattttaagaaaatccatactcttcccaggagtcgatggccttagtttgtggaatggagggagacgttggctcacggataccctttgtgtggctagcagtcggggaactcctcttcacggagactcttctcgcaaagttggtacgtactttatctttttggagcaccaatcgaggagtctggaaggctatgacactttttccttcctcgattaaaacccatgtgtcatgctcacgaaaatgtggataacaactattttttaacttttttaaaaatttatagtttgagttgctcgagtaatttctcttgtggtttttatgtgggttgatatgtagattttaattgcgatttaggttgctccgttagttactataaga

SEQ ID NO: 390356 - DNA, 686 bp, Cannabis indica
aaaaaaattgaacgtaaaaatatcaaaattttataataatttgtgttttatgtaattatcctttttatctatctataatagaaaagtagataaatataggtgtatatataaataaaaaattttcatatatatataatcaatttttatggtgaggcatttaaaaaagaccccattagggcatttaatatcttcttctaattgggcaattgcatggtaatacggttctcctaagtgcatcgtattaaaactggaatcgatttaaattttttgtcttattaaactattttttgccatctgctatttttgtcttccatatcaaagatgagagtcaatgagtataccttccttaaagatgcgatttgaatgtgtaacacgtggcaagcatcaatgttaatacgactgggctatcggttggccaaatctgaagttaacaaaatatatatatgttaggttttgtgccctaaataaaatctatttaaatataatcagatttaataattaataaagatcagaaatcgttttatgttgcttggttcacatgatttattttatgattatgttaaatgtataaattctattaagtccagaacatatatataaatatatatatattcatgattatagtgtcgtcaactgttaggttttatgccctaaataaaactccatttcaatgtaatctattttat

SEQ ID NO: 390357 - DNA, 521 bp, Cannabis indica
cgagccgtgtgtgcatgtgggagggagtgtcatgtgtgtgtgtgagcagtgggggctcacatgcgagcccagtggggggcttacgaggcgagccgatgcaagtgtgtgaaaaaaggcgtctcaaggggctataagcataaaatgagaggtatgtacacatcgataaggatgatattgggtgaggactcaagggataaggcgtctaagggaaagcatacaaccacgccttctgaagcctacaaatgtgaggaagtactagtagcatcgtatacggacctgtaaggtttgaggactcgacatagagtacgcaacaacccctctcccgcaacctgcaactggggacaacaagcttgcaaccatgggccacaagcctgcaaccagggatcaccagtgtaatgaccgttatacatagacatggcattagtgggacacttagcactaatttatatgactatgtgattatttatgtattttatgctttatagaccctattttcatgaaaatatgtgttatgattatta

SEQ ID NO: 390358 - DNA, 923 bp, Cannabis indica
tgaaacctctcgccgcggctactagctccccccaaaaccgtttcactgttctcgagttatggctacggtcatggttaggctcgccgtggccaaaagttcaccgagcatcaattttgcatttttcttggctccacttgtcctttattgcacttttgtaactcgggacttccataaattcgagaaacctaaaaacatagaaaataagcgtaattctgtcctaaaacgtcgaaaatcgaacataattgtgatccagaacataggctaaaattagcctaacaacaaggggaaagaaaaagtaggtgaccctcagaaccctgctccccccgtacctcctcggaaaagtacgaatctggccaacaagccttctcaggcgtagaagaccaccgatgcctccgggctcgggcagaaaggccctgttgcaccaaaagggactagtacgaaagtaccaaagcccaagggatggaaaaaatgccctagtgagtctgctaaccaggaccttggtaccaagggacaatattccgatgacaaccgtgttggaatatgtttttccaagatctagatttactaccatgtatgttatttaacatcctaaatacaaatctctaaaacaatgtaaataaacacatataaagtttcgaaaaccttacagtgggtgcagcggaataataatggctccttctactcagttcgctaacccttgtatcctgtctgtagtagagtatcacaaagatctgagtccgactctccttctcttaaaactaaattcttcacagccttacagactatgattgagtaccacttgatgtgtgtgggcacttcctcaatcactatagggtatgaaaatatgaagagaggaagagagaggagtggttcgaaataggtcgaagagatggcttagaaaatttgactgaaggcttgaattt

SEQ ID NO: 390359 - DNA, 2079 bp, Cannabis indica
acccaaacaaccagggattacaaactaatcctgttgatggagaggacatccttgttatttcaggagggccacatattgcaggggaaagcaacaatgccaagaaaagatatgtgatatagatcaagcagtcgacctttggcccagaaccttccaagaaggtgaaaactgaggaacctcccattgtattcacggaagaagatgagaaaaacgtgaggtatcttcacgtcaatccattagtgataaccattcaactcgtcaataaaaggatcaagagagtgttaataaacaatgggagctcggtaaatatcctttataaggagatcctaaagaaaatggggctcgaaaaagccaaattaatgccctttatggtaaacctttgcagattcactagagacagcatcgctagccttggcataatcgatctcgcgttaaccttaggcgaggcacctttatctgctactgttatgcaagacttcttatttgtcaacctaccctcaacttacaacatattattgggtcgtccagcactgatcgaactaagggttgtcaattcgatcaagcacctattttttaaattccaaacactaaaattgtgagggagtggtgtgtggaaaccagatgctggctcgtgattgctatcgcataaagatacaacatagaaaagtccatcattcgttgatggcgatcttggtagatgaaactgagcagaaagacgaagatctggacccgagttcaagatgagagaaacctgttcaaaccaatcgaggaattggaagaggtcattctcgacctaggaaatcccgaaaagtgtgtatatattgggaagaacctagacgagcagctcaaatagcagctagtaagcttctgaaggcgaaccaggatcagctttcttggagccatggacatatgatagggatcaaccctaatattatcttccatcacttaaatgttgatccaaactacccagaaaggagacaaaaaaggaggcccttgtattctgagaggcaaggggcacaaaaacaggaagttgacaaaatggtagcaaacgactttatacgcaaggtgttttacccctcgtggatagccaatccggttctcatcccgaagcccaacggaacttggagaacttgtattgacttcttcgatctgaataaggcgtgcccaaaagactattttctacttcccccgatcgaccagttagtggatgcaattgttgggcatgagcttatgtcatttatggatgcatattttggatgtaactagataaaaatgtatgtcccagatcaagaacatacaagctttgtaacaaacatgggactctattgtaataaagtcatgtcgttcagactgaagaacgctggggcaacgtatcaacgattggtaaacaaaatgtttgcaaaccaaatagggtgaaacatggaggtttacgtcgatgatatttcgtaaaattgataagaagtaaggatcatacctcagacctcgcggaatgctttaaaatattaaaagagtataacatgaagctaaacccgaaaaaaatgttcctttggagtttcctcaggaaaatttttaggattcatagttaacgtgagaggtattgaggcaaatcttgaaaaaattaaggcattaatagacatgccatcatcgacaaagcctaaggaagtacaagccttgataggaagaataactgcacttaacagattcatttcaaagtcaactaataagcgagccaacaaaaagttcgagtggacaaaagagtgcaaggaggcctttcaaaacataaaaaggcatctagcaacgcctccagttttggcgaaaccaataactagagagatgttattcttttatttagccatctcaaaagatacgattagtgcaactatagtgcgagaagggggcaagcaccagcaacctaattactacgtaagtaaaaggttactagggccagaatccagatatccccctctacaaaaaacttacgttgtgcctagtccatgagtctcatcagctacggccatacttccaggctcaccccataaaagtgttaaccgatcagccatgagacaagttttgtcaaaacta

SEQ ID NO: 390360 - DNA, 1045 bp, Cannabis indica
taacaaaataattatataatcttgctataagaaaaaaagaaattctatatattaactaagatcccttaaatataatatttttttggagattttgggaactagattccgatatgtattaagccaagactgtcattttctccaaatcaaatacgattcaacttttttaaagatacgtatattaaaagaattagttaaagtgaatattttcttttggggaattaaagtgaatatttataatatgtcaaatatatatacatatttattaatcgtcaataactatctatatataattaatatatattctagcacatgataattttggtctatctatttccctaactttatttactttgctaaatatgatctttatctttattgtaataacattcttcttttattaattaacatcttttatttttcttgtcttttaattttcctctaaaatatctcattattgtagatatattatcccacattgaataaatagtaaaatattgagtcatatataagaacatgggttactctacttatcaccaattagttttaagatggagccccataattctcaacacgtataaatatattgtgagggtaattgaaaaatgttatataagaaaggtaattttataaaaatgaatataaaaattagtatttttataatgtgcggtacaaaaatttaaactacaatcgcactgcaaagaatttcaaactgcattatttttgcggtacggacaattttagcgaacacccccagttctaagtcctagtgctgatttatttgtatatgaacagtatgatgtaattgaatgtttgagcaatacaatttccttattcataaaaaaaaaatcgcccaagtagacatattgccaacctcaaaaattttaaccagcaatttagaagaagtcttctaaaatttgtccgaaattcaaaaaacttaatagtaatagttcaaattttttttaataacttgaaaaattcaataacataatttaatacatgtaaaagttaaaaaaaaaatacctaaaaatatagagcttgtttggct

SEQ ID NO: 390361 - DNA, 1741 bp, Cannabis indica
ctatggtatagagttatttttagtgcctttaaactaaaattatcatgataagagtaatgaaagtgtgtttgtttgcttaactttaactagtttatatcttcattttctatttagtaagctagctttttaagtcttgtaaaaattgttattttagttgtgtttatttaattaaatgctgcttgtttgctgttgagaaagaagaattaaattatcaagaaaaagaaaaggatacgaggacaaagttggcataaaagctaaaactgggctatattactgaagcattgctgcaacaaattcagcattctgggcagtgacgtgaaaaaggttgaaaaaacaaatttcatttgtccacatcagcatgtacgtatcaacccctcaaaattacgccagttggctgttgtggagggaggagacaaaacctagtggaccaggattggaaatgaattgggcttctatttttagggtattatattgtaccctatatacctaacaaaaactaagtacaattaccataaagaacatgagctcaactgccatttttggaggaaagtaattgcagaaaaagaaagtaccgaagaggaagagcttaaaaagaggaaattgcctgaaaaagaagaaagaggaggatacaagctccatttgtttgaatttctattccctttcttctgttttcttcattcctttaaatacttgaagttttatttttaaattgtaaaaaaataaagcagtaaccatggttgaacaacttttagtttggattttattttctgaattgaacatgagctaagcttcttgaggcttgaatggctacgaatccctatgtttggtatgcttgattttaagtattttctttagcaactttgcttttgttcattcaagtaagcttgttgttattgattgttatttcttggccatgagtaataacttacaaagctagatatggttctggaaaggctagatctagtagttacaacttggatgaagcaagtgaatacctagatttaggtttttcttagtaaatggaatatgaatatttcatttaccttgtataacataagaattgatgtttaaatatttttctccaaattcgtttgatataagaatatatttatctaggtggtagaacttaaactgtgagttttaaaaaattctcataagcacaagaaaattctgttgtttctgtgtgaaaatgctgaagtaatgctgtagcaactgtgtagcatttgggaaaatcctgactaggtgagattagttattcaagccactttttaatacaatataaattcacaaattatacgttgtgatagactcttgaagagtttttgattatattataaatgactgaagaatcaacttttatttctttttgtatattaaaaaatatttaatgtatatagtttgttcataagtaatagagaagtcctgaaatacttcatatgcatcaagaattatagatatatgataatttgatatgaaaattaaaatcatacaataagaataaaataaatatatggtcttggagtaccatcattatcgtaaataaaaatttatattatcattaatgtgttatgttcatattacttatttcaaacttccaaatgaaaaatattgtatatacatatgcatgaatgattcaataagttggatgaatattgatgttctaggaacccatcatccataatttagaggtccacacatactctagaagagttataataaatatatggtcatagataatata

SEQ ID NO: 390362 - DNA, 1516 bp, Cannabis indica
aactaattttaagataatttctattacgaatagaaaatataaccagttttgtcataacatctttagattagattattattaagttttattttgacaaaatcagttcatggtcctatttgtacaattttaaaaaatatagagtcaatttgtcatttaacaaaacaaaaagttcaattaataacttttgtaaaatacaatgtacaaattattacatttttattttccctcttattttcataaaatttcacatatttttttttttttaaaaaataataactctacaaattatattgatggtctcaaattacattaaataattaatgacttgttttggtcaaaggtaattttttatcaacaaaaaaatataataaaaaagtaagaaaatattaggtggctatagtttatactgagtaacattttacataaaattagtcttgaaaattaaattacattgcatatgtagtaagaccactctaataggtaattaccccattagagatgctaatgataaatctttaagagtgtcaaaaaatttcataccaccttaaaatataagatatattttttcatattatttttagtattttttattctaaaaatatctcaatgataaacacttttaaaaatcattaatattatttaatatatattaaatgattaatttttcttaatcacaaaattttagtcatttatttcggtaaatttcttatttattttggcatttaagaaaaaaaatttaatcaatttttaagtatgttaattatttaagactacacatgaaattatttcgaaaatttcaagtagtttattatactgaaaatataagatttatatattttattatatacacaactattttttttatacacatggtaagtaattatttaaactttatttttgatattataaacaattcaaaattttttaaaaatttacaaataattttaaataattacaaagtacccaattattaaaaaaattagactaaaaaaattatctaaatactaaaacaaataagaatctacaacataaatttccaaacttttatataccaaattaagttacatagtgcccatttctttttaattaaaaaaagtttgctttttacaattcttgataagtcggctatcttatccaattgttttattgctttttatttgttttgttttaaatgtagaattcaagtaaagattcctatactttatgagaatgtatacattaataaaaggataatatattctatatatatatatataaataattaatttataaaaattcgtctatggttgtgttaatcgtgatgcatggaatttaacatgtgaaattttatcgggacataaaattaaagtttttgtatttttagaaaaaaggaaaatatatataattgattctctttaatataacgtaatttaatgaagctaagggttaagtaacgaatatatatttatcgaaatattatccatgtatgagttacgtaaagtaagaatatatatatatatgattttgtcccgttatt

SEQ ID NO: 390363 - DNA, 465 bp, Cannabis indica
aatgttaagcgtaacccccgcacggtgcacctccgatcaccaaccacaccgcatggcgcacctccgatcaacgaccaccctgcaccgcagcacctccgaccagaatcccaccatcatcgtcgaccagagcaacaataggtatttttttaatttatttttagtcatatatatatatatatttataagataaagagaatatatatgattatttatacagtttttgcaaaagaaaagtattttaattaatttatatgtaaatttaggttattataattatcaaaattagtccatttaaaaaaaaaaaaagaattaatagttagattagatttaaatttgtgtgtgtattttttttttgttaatttcttctctgaaattgattaatatttatttttatttatataaatatatatttgcgtatatatatttatgtattttatgtatatttatatatatttttgtgtgtat

SEQ ID NO: 390364 - DNA, 1305 bp, Cannabis indica
gtttttatgctccattagtttgtattgataatatatctatttttatttataatgttgattttttaagtatgacatatattgctttttatatattaataatgatttttttttaggcctatccatgtagtcaatcttgatttgattcaatgcatcaagtagtggccctactctctaaaggcatggatgagaattctacctttaattgtttggaacaataagatttcacggtaagtgaactcaccctcttttgatttctacatctattgatataaagaagaagtaatttcaatctaaatagattgttatcatggtaagatgagatcgtttctaataattacaaaaaataatttataattgtatatttggtatagttataaatgtatttttttcttttgaaaacatgtatagttataaatatctataacaactatcttttatccttttgaataataattaattagtttacaatatgaataattaatatgtctaaagaattttattttattttgtttagaaaattcaactgctattatgaaccacaaatcgtttacaacaacagaaaaaattccagttttttcttattttattataacaaatatgaatttactaatctatatatataaatgagagatatgaagcgatgacatgacattctaaaatcgctttaaatggctctttttcttctttgcataattctcttactttttgaattttttaatttaattttctaaatattttaattttttattaaaaaaaaacagtaatacatatttaataatttttactttcttaaaaaaaaaattcaaatatacggcatgtttatctcatttaaaattttcatagttatttatatagtagtatgatatatctcttttatataaataatcatgataatattattattgtagattcatatattttattgttaatctgttatttttttaatttattcttttactttgcattgtaaaggttattttattcctactttattgagtagaatcaattatattactttgatatttaattttttttaaatgggagattacattttcatgtgttgttcttataacctatttatacattagtactaatgtccttattagtgttttgaatggagaagagtggtgggtattgccacaaaaaaattatataaataatttatatagaattttttatgaattcaactacgatatgaatttttagtagttaattaggtagacatatttatctatctatatatttatatatttatatgaagttgagttataagatagtgatgtgatgatatggtgatgatatcaa

SEQ ID NO: 390365 - DNA, 522 bp, Cannabis indica
ttacacaaatacagacatgcacacttgaaagatttaattaaattgaattgaatcgtgcaaattaaatttgattgagtaatttatgaagaacatggaagaatgtctaatatttcccattagttcaaagggcaaactgtcataaatctgaatttaaattactatgaaaatcttacccaattttcttaacgtctttcaaaaacccacccaaatacaaaactttctcaggtattacataattgatggaaagggagtcatccacgaggctgggattgatagaaaagctgcgagtgaaggagacacagtgagagaaggatatgaagaaagggattatttctaggtcacgattgattgcgatttatgttaggagttttgaatcaatttttaaatataactacagcaattttgttaggatggaaaaaaaaaacagaaaagccaagatgtttatgtctgggtcagatttgttttttcattcttcaaaaggaaggtttggttcaggaaaatgcttatgaaagaatacaatat

SEQ ID NO: 390366 - DNA, 2656 bp, Cannabis indica
ctctcagatgctttcaaaaaggactttcgagccgtgagaacccgcaagcttgaatgttcctccttggccaatgtgagataattgccaagagaaagtttgaagacctacatcaaccgcttcaacattgaagttaccaaaacccatggcgttaacgatagtgcaagactaatggcactgggggcaggcattgcccatggttccatattttagaatagccttaaaggcaagagcgcaagcaccattgaagaattcatgaagcgggcacaaaaatacagaggcaaggatagcaaacaacctccctcttcaatccttgcagcccactcaagccgcattagcaccgctagaacttaccaatgccactaaggctgctaaatctttaaacaacaacaaaagagaaagcatagatggcgaggactgaagtctcaagaagagtaggagtgatggcccttatcgcccaatgtatttaatctacactgagttaataaaaacccaagagaccatccatgtggcgaatgagcactgagttctattccgagttcctaaacccatgaagcatgatcgagccaagagagatgcctcaagatattgtcaataccataaggacatcagccacacaaccaatgagtgtccaaacctcaaatatgaaattgagactctagtcctaaattggatacttacccattatgcacagcataattttcaaggggggacatgtcaacgattcagaactcatgcatttctagggtgacaaattatatgggacacaaataactggccacaggctataagagttgctcatgttcccaaatagattaaaaccataagtagccaatctgagcctgacatttttaggtttgatggcgaagtacggatgaagccagtcaaaccacttccattctttagcattcataggatgccttagtacaccgtcttctttcagtcactgtgagtaatgccatcgcatgtcctcagcggtgtgtcttgagcaatataatcattttagtctcggtgtgagtgggaagtaccacataactttgttaggaattttttttcccttaccttttttttcactcaatgtgattcgccacatatagggcaaaactctttcttctcattctccttccaaaaaatggcacaattatacttacacacatctattgagtcgtaacgcaaacctagattgcgcaattgcatctttgactcatagtgtgacttcggtaattttgttacctcaagaaatagttcaattaagatagacaacaacatatcaaaagagtagttactctacctattaaaaaccttgcagtgcataaactttaccagcgtattgagggtcgattttctgcgcgcaaccaggatacaactcaaactccatctccttaaacaagccatcaaacttattgttgttattgattgggggtttattgaaagaatcagtagtcctagcaaagtcgtcaaactcaggatttcctcttaacatgtctgccaacacatctggcatttcgtctttaccgttttcaagaagttcaacagcgggctgagaaaaagtctccccgtggaaataccaggggttgtatgaaggttggatcccaatgagaaataaatgaacccttatagtttctggtacgtaaaaattcacattcaaacaccacatgcaaggcattgagataatatgatagaatttacgtggttcattgcaaccgcaataaactcgtcaacgccacttcaaaactcagttaagcactggtttgcctacatccaacttcggttggtaggcatcttcctttacaaagtaattaataaaaaagtttaaaatacaacaagaaaatatgcaagtgtcctaatccaccttctcactccattagtaaaagtgtaaagaacctatcccattcatgtttgtaatatacatatagtacaatctatgctcttaagattatttcattaataaaaatttcggtagcacctctgcacagttctcataagtagacaaagttatagtaagttttccaacatacaagaacacgtaaggagacgatatgtcaaaatatctactaatgaaacaatcaaataagtaatagatcatactataagtataaaacaattccaaactatctatgtagacaaaaaagtcctggataatttggagaagcgtatttaagagtcttttctgactcagtctctccaaacgggtctaaggtatttcgtgcatgtgcaaaaaattaaataaaaaattatcactttttgataatacaaatacagttattctatcctatctttggtttataaccaaagagatcaagctaatataaaatttcagtttatcctattttataatattttatgctcatttttaatatcttatgctaatttaaatgactacctttgattcatattattcattattaaattttaaattacatattgatattaatttataatttaatttttatttcatttataattttaatttaaattacttatattctaaatgtataatatcactttatttaattttaaattacatattaatattaaattataattttatttcatttgttaattaaattaaaaattactattactaaatttataatatcacatattataattaaggtataatttattttattaatatttaaattataattaatttttt

SEQ ID NO: 390367 - DNA, 1102 bp, Cannabis indica
agggtaaatgttattcgtgtttcaggatgaggaacacgtggcataaaatgagaagcacaaccttaaatagtccctaattaagtccccataattaggtaaggtcacaaagaagctatacgagtctgaaagaagactaagctggagagctactcagagatttgacccacaacatacctacatccgagacccgaaggccctattgtctcttcgaaacctagaaaagactaagctaattatttgtctaagagacacctagagggcactcaaagagtttaacacggacaccaatcgttcggagaaatctgaacgtctatcaagaagagagacccaatcgctccagcaacggttataccttttctaacacaagattagatcttgtctcatgtgtcagactatggtagtgcgcacaccccacctctgaatatacctttttgcttgacagtttgtctaggtgtctccttttcaaggtgaacctttaggcgacacgtgtccaataccaacaatggtccccaatatccaactacctctccatacgagcaagaaccttttgggggcctaacaattaattctttacatgtattttaccccaatagtgagctttttgtaaaaatcctaagagggtcatgggtatgtccatactcgcaatttagcctataaataccccttgattttcatacaaagaggggatcagaaaaaagagggttgaagctttgccaaaattattctaagctttcttcttcttcaagattaaccaagagagcagatttagagttttcttgtaacaacactataaaatatatacaagcctcataaggataataaaatgactcgtggactagggctcattaatgtctgaactacgtaaaactctccgtctattttacatactgcatttattatttcttaagcactattttaattagttttcaaaaatctcgataaacagatagatatgagacggtgatatgatactctaaaatctctctaaatagtactatttgttctctcctaaaatatctataaagatttgtatgtactatactgttatgttcattctctctctgtaaagaccgcttagttttaatttggagattagcagata

SEQ ID NO: 390368 - DNA, 1484 bp, Cannabis indica
  modified_base (89)..(89): a, c, t, g, unknown or other
ttctattccagtagtcgtacgtaaataaaaaaaacacgagggttgttgcttgcacagtactgaaagtgagtttcgctcacttgcaaacngtatgcagacttagagatcacttttcctctcactgagctacacatcacatttgaaccactatccaatttatctgggttgataaccagagtgctactgcacttgctgccaacccagtgtttcatgcacgctcgaaacacatcgaaatgacttgcactttgtgagagctcaaatccgtgccaagaaattatcagtcagatatgtgcctgctcataatcaagtagttgatcttctcacaaaatcattgcctacagatcggtttaactatcttaatgccaaacttcaaatgcttgctcctcttttcgtttgaggaaggatgttgctattacttagttagttgattaggtgttagttaaaggtgttacagttagttaaatcttttctattataactgtttctttaacagtttgatcttgtaataattgtgtatataaattgtggttcacatcaataatatgcaagtcttttagattcatgttctttctttcttcaattctgtgctctgcacctttattgctttacaggacgacacttcataataatgttagatactttagtgccccataacaatattcttttcttaaacattaagttttagagattatttttattactatataatgattaagtttctttattttttattaataatattgttgttagttcaatatgagatcatgtttgtattcacatagatagattaaagacatgagatatatttaggatataaagaataattaatttaagcagttgtgtaagtatagtatatttgaataaataagaaaatagagacaataaaattgtcgaagtcgaaatgcttcaaagagtagttgaaagtaagagaataatattaatatataaaaaaaaatatttctaaatttgatttattttaccattcacgtgtgtagtatgtatctattcaaaatatatataactatatataataaaatagaagttactttatgtaaagtattttttatgtataagatttactatatattatttaactcacaacactctataactatatagttagtttagttagatcatatatattatttgagtaaatagttgaaaagatagggaataagtgaagtgagaatagttttaattttaatcagtcatgaaacttgtacacacatttcatacatattatgtggcaagcaatttcaacatattattattattatttaaggggtacttatcaaaagtgatttgcctatgtgtgttaggacaattagttagttaggcagttaggagtttgttagaactaactgtttagatagttatttgccctaagtttagctgtgttagttaatctcagttaattctattattaattaatgtgtatataattgtaataataagaatccatcttcttcactctctctctctct

SEQ ID NO: 390369 - DNA, 832 bp, Cannabis indica
ttgacatgagtaaaacatatgactaggtagaatagggactcttagccaatatgatgcaatagtttggtgttgctgagggctggattagggttatcatggactgtgtgactaacccaaagtataatttttaaatcaatggtcatcctaaaggtcgagtcattctgacaagaggattacagcaggaatgtccttttatctccttatatattcctcttctgtgcaaaatcattgtcttccttgttctctcttttagaggccagatctgaattgatagtgtttaggtgtactagagggaccacgtgttactcacttattttttgcggatgatagccttgtgtttggtagggctaatggaggtgatactataaagtgtatcattctatctctctggtcaaaagattaactttgagtagtctactatcacttttagtctaaatgtgcaacaaatggatcgagttgtggttctacgagtattggggttgacatcagtggctactcataacaagtatttgggcttgcctacggtgattggtagaaacaaaaagtgagtgttttaggggatttgtgagaaggttaggaagcgtgttcgagggtggaagcagagtttcttttcagttggtaggagagaggtacttatttaatctattcttcaagctattctaacttatatgatgagtgtctttgagcacccagtggtaacttgtgaaaaacaaagtttattgtcagaaaattctggttaggtccatgttttgggttttatgccctaaataaaactcatttcaatgtaatcagatttacttattaatatagatcagaaataacatttaatgtt

SEQ ID NO: 390370 - DNA, 1425 bp, Cannabis indica
taaaggcaattttatgtacattcaccccagactattgatagtacgtgcgaaggtgtttaatgttccatgcacatgaaacttttgtgccatcaaggtattttaaatggtaggtcccaaggaatactgttccgtcaatctcataaaaatattttcagtttggacctaacactcccactctaggatcttgtttggctggaaagacccatctcaagactaagtctccaagaccaaatttgtgatctttcactttggaattaaaatatcaagcgacattctgttgatatacttccaactgcacttgagatgagtcccggagcccttcgattagatcaagagattcctagagaaatgtataatttgtagttggatcataagtgttatgctgatgcgaagagactagggtctcaaccaagattatgaattcacacccatatgtcatagaaaaaggtgaatgctcggtcgtggattggaatattattttgtaagcacaaagtatttgtagtaacttttcagaccaattgtttttgcaagcatggggcttctttctaagggttaccttgagatcttgttaactgcctccacttgtctgttggcctggggcctagtgacaacaaaaagagttttgatcactcttgttcacagaattcaatgagctaaacattaccaaattgcttcttattatgtgagacaatgttttgagatatgccataatgaaaagcgatgttttttgacaatgaaatctagggccttgttggttgtgatggtagccattggctcgacctccacctatttagtaaagtagtcaatagtgactattacgtaactagatcaattctccacgccacgaatggctagaaacttgttatgagagtaaattttattagggaagcttgggaattgtggcaaacctttgaaaatttatttttatgagattgaaaagttattgttaaaaaattatataaatatatctatatatattttttataattgaatcactaaaaagtacgtttagtttattggttatctattgtaaaaaaaaataaatacacatttttttacatatatgtataaaaaaaaatagcttccgtttaagcttatctatctatatatatgagtgcactcttaatgagtattaccgatgaatgagatgtaatattagaaaaatttgagtttttatggttaattttctatttaattaagaaaatttctcatttttatattatatggactggggttgttccatcagctgaaaaaaaaaaaaaaaaaaaaaaaaaaatttcgacaaaaaaaaaaaaataaaaaaaaatagttgagtttcacttgaatatttttttatataaatatctctttgatagagtaaaaaaagagatatttttttatatttttttaaaattaagtagctaaattaagcataaaaaatcaaaa

SEQ ID NO: 390371 - DNA, 1175 bp, Cannabis indica
ataaaattcaagtttgtcttcatccctgtaatattggatgggtcggaaaatattctttatttaataacttatttatatattcaaataattacaaaaaaaaaactatattcaaatatttttatttgaatttaaatatttattcagacaatttatcaaaaaaaaattattcttacaaaaaatgtatatatttactcaaaaaattccactttaacgcacattttttatttgaatttcacttttttatttattttcttgatatgaaatgagctcgaaatagtttaaccactaatatattttcacaatatttttgtatcaaatgacattaagaataaaagtttagacatatattagactttacaaaataaaattttagaatattattaacaataaaatatttttgttattaattatatataaattgcgctcgctactaattcattatttttaaaaaatgaaaattttacacttcttttgataatttattggatcttttactcgttttaattaagggttattgttagatttttttctttttttaaagggatttcgttaaatttattattgtatattcagctctttgagcaatttattattatgtaatagaattttatttgatttataaatttcatttttctcttaaaaatataagagaaataaataaaatggtgtttagatataagtaatatagagtattattattgggtagtaagtatttttttagacgtgttattttgcgattgactagtattaaattatatgatttgatacttagttagactaataatgatattaacacgtaggaggatactaggtaccactggtttcttttagtatttctcgcaatatataatagagtattgcttttggataccaataatgttctacaccttctaaatatggctccttatgattagttaggaatattatctaaaagtaaaagctattatattaaattatttaacgatacactaatgctgccttttagcatttctcttatggtagatattgtttaacataaaataaatagtaaagtattaagctatatacaagatcatgagattaaggctgggattaaggctaattaggattttcgtcccttaaactttgacatgtatcaaatcatgcccattaaatttttttttaccgttaaaaattcttcctgaactattgagatt

SEQ ID NO: 390372 - DNA, 1223 bp, Cannabis indica
ggagaatatacttgtattcaaagaattctcttgttcttgaagtgtattgtatgtataggggaggacctttttatagtgggtacaaggtaagggggaaatgcatatcatagaaaaataaaggccataatgatctctataaggtcatgaggttcatgtgactataaaggcctcgaattcttaattatgttaaagcactcactcaccatttttttttaactttctcatatagaaaatcaatggtcaatatatcatttaacatcacaacatccgttatatattaatcgtatggctaataaattatctccataagattgggccctagggttgcaaccacactgcataataataaaatgttgataagagagaatctttctgtattgtttttccttacaacactcctcctcacatctatcctttaacatatatcattcaaattttaattttttttttctaatttataacataattcttacattacactatacattaatcttttttaatatacatcacaaaattttatctttttaaaaatcttattatattttattcatttaaaatatataatattaaggctaattaggatttttgctcctaaactttaacatgtactaaattatgcccctaaacttttatgactattaaaaattctctctgaactattgagattattagatttaaggacttttgtccaaattcattcaattttactaatttaatgattatttatgtactaaatcatgcttcccagattttgatatctaccaagtcatgtctctcgaactttaacatgtgtcaaatcatgttcactaaattttcatccatgttagatttttcttactaaaattggacaaaaatccgtaaatttaacaattccaatagttcatgggggatttttaacaatcagaaaaatttaaggggcataatttggtacatctcaaggttcgaggaataaaaatcctaattaccctaatattattatatacacatattcagatacataaaaaattattaaaactgaaaacaattgataaaatatgtttagagcaattaataaatagtatgctataaatttagaacatgaatagtgtatttaaagaatttttaaaatgaaaaaagagtatagagcatctgctatagtatattcttagtactaggggtgttcattggatcacatccaatggatttggacccaatcgatccaatccaattatttattagatatt

SEQ ID NO: 390373 - DNA, 1070 bp, Cannabis indica
tgagtagcaagaggaggtcccaaagatttcttccaatgtttaagacatgaagagcaattatgcaatttttcagtgagtccaatcaacggggtatgattatgaatctggttgttcaacatccaagtgtcacgaagacaatcctcaaaaccaggctcagacatccaaagcttatcaaagatgaatctgggggcaggattagcctgatcagctgggttatgcaaggtgataattaaaggccgatgatcagagccaaaaaaaatctccatgaagaagacgaggattagggaaatttatatcctaatcagtattggagaggcaccaatcaaatctctcttgggtgtgagatgactgtttttgtcggctggtccaaatgaagggactacccaaaggataaagagggtgaagctcgtgggtatcaacaaaagattaaaattgagtagacggactacgagacatgtcacccccgattttgtcagaaagagaaaggtaatcattaaagtcacccatggtaagccaaggttgtaaccgagggttagttccaaggcgatcaagtagttgccatgaatgcggcttattgtgagggtttggcgcaccataaaaagcagtaaaggtaaaagcagtgaaattcaaaaatttaatataacagtgaaagtgacttatattataagaaagtaaagttacatccacatccatagtaatagctcacttattcctgaaaaaatgaacaatttttatgtacattacactcttaccaaatcatatatatataaaaaaaatttctgtagtaagtatacaataggaacattattctaaccgttgatatccatgatttttgaggaaacatatgatttagtatagacttatgtgtattaaattaaaaacttggaaaaatctccaacattggtattataaaagtactgacacaaaaatattaggggttttgtcattattacactttaaaacagttttttttttagcattttacgaaattctacatagaaattcctattgcaactagcgctgcaacctaaattgcaataaaaaatcgtatagaaacccctattgcaact

SEQ ID NO: 390374 - DNA, 1148 bp, Cannabis indica
tttttttgttaggagatttgtttttaaagtttacgttcattatcttttgtattattattatttaaagattatctaaattttttaatacgtaacttatgttatattaaaaagataattttcaatcaaaaaaattatataattacatttgtattataaatgtttaaatataaattaaaaataatcctagtagaattagtattctctttttttttttataaatatacaagattacataattaaattctataaattctcattttcatcaagcaagctttatactgcaaaacaatcatacaatcgtgagttcattaaattcatgtgctgcatactacttttattagcattcttataattttttccttcatctcactttgtaatggtagacctactactactacttacgtagtccaagattttaatcccaataataacaaatctatcatcaattatagttatgatagttgtagaggtaaaaatttgcttaatatttgtgatatttttgagaagtccaatatgcaagtcagacgagcccataaataatggatccaacaatattgggcccaataagacagtcagacggactcactagaccttgaaatagactaacgagtgagcctatgggccacaagccggatcgtcccgcaaccgggtccgagcccggccagtcagccaaacgggtgaaatcaagttaatatggaaccagtcaggaagacggttactactccctaataattagggaagtaaccaatttgaacgagtccaacgggtgacgtggacagagggcaacggcactgagaacacacgataaaaggaaccatacgatagacgctggagagaacacattcgatactcacactactcactgactcaagcagacagtcgttttttctaagcttttctcttaagcctcaccatcggagttactcttttagtccgtctgtccgcttgtccactcatccgtccggctaccatttatattacatttattttccgttattataattttttactataatcgtactgacttgagcgtcggagtccctttggctgacaccccaccggtgctcccaattgaacttttgtctctctctttgttcttgacaggttgctggtgcccaaattccgtattgtagatttcaccctctaca

SEQ ID NO: 390375 - DNA, 779 bp, Cannabis indica
ttttttaaaaaaaaagtcactttaaaaattcttttaaacattttgttcttttttttatcaatattttggactccaaccccaacctagaccatggaacttggatcccgatccggacccaaacctcaaccctcgacccaaaccccgaacttggaccttggaccccgacccgagcccaaacctgaaccccagacccgacccgaccctagacccccaacctcacccaaaccctgaccccaacccgggccttggacctcaatgctgacccgacccggacgtggaccctaaacccaaaccacaaaccccggacccgacctagaccccagaccccgaacctggtctcagccctagaccctaacctctaccccgaccttgaccccgtccctgacctggacctcgtccctgacctggaccccagaccctaactcgaaccctgaccccgatcttgaccccgacctggcactagcccaagaccttagactcggactcggagttggacccaaacccctacctgacactagcccaagaccttagactcggagctggacccagacccgaaccccagcctcggatccagtcgcagacccaagcctggactcaaactcgaccccagactcagctctagaactaaacccagacctagcctcgaacccgatcctagccccgaccctcggcccggacctagcgcaggccttgacctcggacatggaccctacttaaataatattaacaaataaaaatgagaatgaaatttgcaaaacatatttttattttttattttt

SEQ ID NO: 390376 - DNA, 1237 bp, Cannabis indica
tttttttgggatttacaaatattttaatatattactaaacgtgtttacactactatgaatgtttttttttttttataaaataccttctattttctaaaaatttaattcagagagagaatgtagtgaaacaaaatttttgggaagttattgaaccattgccaaaaagaattacccatattttagtaaaggaaactcagtcccagcctataaatgtcgattctatggttggtttattagatacaaaatactatgattgattaaaaattttaataacctttagcatgtagtttattcaagaaaaaatgacttcgaaaaaaataaatattaccaaatcatccttgcacaagatcaattacatgccttgaatgattattcgacaagtactccaagtaattgtattctcactattcattcatctcctattaatactattatgacagttatttttgaaccaattccaattgcatctgacttagatgatcttcccattgctcttagaaaagaaactcgtaattgtactagatatcctattgtcaaacacatatcctatgatcctttatctgaaatctataaagaatttgccactaatatttcaaagcttgttgtgcctagaaacatacaggaagcatagagtgaacagaggtggagcatggttgtgttttcggagatgaatgctttgaaaaagaatacgacttgggaagttgttaaattactaaaggagaagaaaattgtaggttgtaaatgggcattcactataaagatcaaggctaatggtattattgaaaagctacaaagctagacttgtagcaaaaggtttcactcaaacctatgggatatactatcaagagacgttttctcttgttgcaaaaattaattctattcgattgctaatgtcactagctatcaactccaactggtcattacatcaacttaatgtgaagaatgtatttctcaatggagatcttgaagaagaagtatatatgagtgttgggattttatgccctaaataaaacccattacaatccaatctgatttgttatcaataagagattagaagtgatttatgttaacatgtagttttcatgtttatagtttaatatatgtacaaaatctgttaagtccagaacatatagtcattcacaattacagtgatgtcatcaacacagtggaatgtgattatgattataggattcgaaaaagtccctgtttcatcagtgctttggatttacactgatgt

SEQ ID NO: 390377 - DNA, 1098 bp, Cannabis indica
ttcccccgtcgggtaatccccactccgcctccactttaatttaaataggtattagagcaggtatgaggtaaatttaagaaacaggtatgagagtgggggagcaatccccgcacccgccccctgtttacatccctaatcagagtagttgtatctttaggacttgaacaacaacaataataataatgaagttggcaggctagggtggtaggccattttcttgcttacataataatttcacttaaattaaatattttcaatttgaataaatatgaattttgtgtctaatactatattgatgtggtgcattgccattagttagtagttatattatttattaaatcaaattttgtagaacctgatattaatttgcaccaatagcgatatataatttattgtggtatttgacaccataagatatctcaatatatttttatttcataattcatcattagactgttatttatacatttattctttatctagacttgaattgtgttacattagtgctaaatcaacaaattcaagtcattgaaacaatatttgtaatttaagaggaattttcacaatgaataataattcaaaagtaaaactctacaatgatcgtagttttaagaggacgaatgacatttattctttcaatttttataataaatattatttatttatttattcttttttaatatatttttttgaacaattctttcttaatttatttggacaaacaagtgaaatagtaggtaaattaggtaggagaccaaactcaggtgaaaacaatgttttgtctctcttttttttttttaacataattcttatgcaaaaagaactcattctatttattatcaatgattagaattatctctaaaagcaagatgacataaacatgccatactccaacgaaatcttgaccatcaataggataaagtcctatctctaagccagagtaatgtaatgttgactaaaaagaaatgatcaactattgaacaattaagggaagtgttttcagagtataataataataataatatttgacttgtaatagcagtttactaataggtaaacattttttttttagaattaattagttataattaactattt

SEQ ID NO: 390378 - DNA, 1052 bp, Cannabis indica
tctctctctctctctctctctctctctctctctctctctctctctctttgtctcagacatctctctctactaagaggattggtgtttttgtaatctcctttatagtgtctcatgagatgagaatacactataatcagaaagtttgttcatcttgtcaaatctataagtctactcgtatcttgagtgttaagggtgatataaaagctctagtgtggactcttcatcaagaccataaagctatggattggatgtttgaacatttatacgaaaagattcaaggattccctgataaccatgaagaagtaaaatccttatttcatgtaattaaatttaatttatgttatattgtgttaagatctaggatttctggttaatatctgattcaaaaaaattattatttttttttaaaaaaaattgaatctgattttacacttccgttgtgactttgatatgaaccctaaaaccaataaatagtatcaaagccatctccacaattacataaattaaatagtatgttgggtgttatatatgaatatattgatatattatgaatgggtgatttaattttcatgaatgtgaatcattaattatatggttaattaaggttagagtactttatatatctttattataaaatatgtacaacataatttcgtataggaattttacattgtaataaaaaatttatttgcaattttttgttgtacaatgtaatctcaaattatttaaaacctccattgatatgtgagcttggatttaaggtgtgaatctcggactcattaagatggtgatacaagcatcacatgatgagccacaacctcgaaggttgcgactgcaagctaaagtgagtaagtagttcatgagtgcatgggccacgcgtgcgaatcaaagcaggtagagaaggaccgattgggcccgtgtagcttcaactagccgctgaagggactcctggtcccgtggctgctcaagcgatggttaatcagaccctctggttccgtggttgacgttgaagacaggcaaagaaggatcgtttggtccaggagcttttggtc

SEQ ID NO: 390379 - DNA, 1113 bp, Cannabis indica
tttttttttttttgaaatttacatttcgatccaagggtttcattatgacaggcctcctattaaagaaaatgtaaccaccatttaggacctggtcccggttttttatcgaacaaaagcgaatgatgaagatgccataggaaagcatcttcacaagatccactttgtccttccaaactctcttgacaaatcctttaaggatgtgcagtagaggattcaatcctaaaacatagcacataatcgaaggtttccagaacaagacttcattccatcataatcttcaccttattacttctttgctcagaattcttaaaagaattttgtagattacgaaccactaaaccagatctcagaataagagggatcgaacacataccttgcttaatttcactgttacattactcatttgctaggagaaattgcacaaagtcatgccttacttcatcttatttcagaatcgacttcaaagatgatttgggagataaaggagactggaagacatcagcaagagtaggatcatctcctttgggtacttcctcatctgacatctccagtggttaatttcatcagtttcatcaatcgaactagtttgaattgcatcagacaccagattcgcacctttcttcttcgaattcttagtagcagatctagttttcccatggattttttaccttgttttagccatggagccagcttctcagctgcaagagcaagaacacgcgggaaaactacgagaggaatttaacatttaaataaataaaggttattaattaaataatcccaatactaattggacctaaataaaactatcgaagtgattattttattttaggaacctagttcatttaaatatctaaaataaataggtttcctatatgcatctaagctcaaaaataaacagaaagactcaattaaataattactttagatgagccctatcatgttactaggtttatcacagattaaagaaaattataaaattaccttttacaaattatttatttgatatattgacaattgaactatgattaatttagattattagatctatcaacaagttaatattagcaatttaaatcaaataaataatatgtttattaaaataaattaaataaa

SEQ ID NO: 390380 - DNA, 902 bp, Cannabis indica
gtgaaatccaatctcaagtcaaactagttcaatctttccctcggcccactaatgaccaattagattggggaagaactctcgaaagggaattaaacagcttgttacataaggaggaagaatacttgcaacaacggtcccatatcacatggcttcgccttggagataaaaatacttggtacttccatcttatcgctttcatgagacgtcaaactaacaaaatccattctctccaacgctcagatggttccacggcaaatgatactacttctattttgtcaaccattgagcattatttttcccaactatttcaaagccaattacctgaggacgatatcatcgactctttcttatcaggcattacagagtgtcttactgaggaataagttgaacttcttcaggccactttttctgctattgaaattaagaaagctacattccaacttgcaaacgataaagcgttggggttagatggtttcaatggttgtttctttcaaaagaattggcatttgttgggtatggatgtcattaacgccgcccaaagcattctgaatggagatgcggacataggggagatcaacaatacgctcgttgttcttatccctaaaaagccaaaccctgagcagataacggactactatcctattagcctttgctccacgttctacaaaataatatctcgagttctggtcaaccgtctcaaaccaattcttagtcgcataatctccccctctcaaagtgctttccttccaaactgtttaatctccaataacattatcattggtcaagaggttatgcactcccttcccaccgtaaatcgggtcgccttggatggatggcattaaagcttgatatggccaaggcttttgatcatgttgaatgggttttttgttgggttttgtgcc

SEQ ID NO: 390381 - DNA, 598 bp, Cannabis indica
tttggtacattgtttggagactacttataaccttgtccacacgatcaagcaaaatttcttacatttttacaattctttcctagtgattttggctatggaatcaatgcttagaatccttgtgatttttctgtagaaatctagaagaaacaaggagtagaaagtttccaagtgttcgacaaaggaggtaaacacctcctctcaagtttgtggatatttcttgatattgttcatgtttaattctgttctatttatggtgaattagttgatgtttagattaaaaggatgtcattttatgatagagtgattctaggtttgatccttgacatcttagttttgatttggggatgttttgggtttgttgtgttggtaacagaagatgaaaaacactctttgtttattagctatctcacacggcagtaatgccaaaaagtatttaatgtaaataaaaatggtctatttatagagaagggaagaaaagtaaccctagagaaatgggccgaaaataaaggctcagtgggccacaaaaactaataccctcccctcaagatgaactatatatgttttttaagtttatcttggttacaatagattgaaaata

SEQ ID NO: 390382 - DNA, 672 bp, Cannabis indica
ttctttttttagtgcacccatcttacacacaatttctcttttgtttgtaatctatcaagtataaccaaccaaaaaataaatcgatgtttttgaaagctaagcctttcccacatctccttcctccaaataacttttaatagacattattaaaagctagggagtatggaaattattaattttcctagctatagctatttgtaaattgctcaatattctatattaatatattttaatctctctttctctaaactatggatcatttatattaatacctcaaataatgtgacaaggtccattaattaatcagtcgacatgaaataatataataaattgggaaaaaggtacggatgttatgatgaaaccccaacttagacattaaaatattaaagtaaaatatacaacaatattactattatgcatatatataagtgttcattataatggagtagcaaataataactctacggtgggcaaaagtctaatttttaatattttttctttgcaaaattttagaattcccagtgcccaaattaacgtgtaaacaaataacaatggttataatttggtatgtaaattaattatcctgaatttcatacaaatttcttgctatgattatactgtcataaaaaagtatatttcaaatattgccttaattaactatatatatatata

SEQ ID NO: 390383 - DNA, 884 bp, Cannabis indica
gtcgttttttgtagatggacttgttgctgtgtggagttgagttgagttctttcatgtctcttcctcttgatgatgatgatgatgaataagaattatattgctttgagggcacttctttggtgtagacaaggccagcatattcaaccgatgaaggcttgtgaccttgttggtgtaattgttgttttttcttagtgccattgatatgaaaatatatatgaaagaaataaataattatcccttaatttgtttgaattagggtttgatgatttgcttctatatatctatctatatatatagtcatagccagtttggaagggttcaatcacttaaaactgaaataaatctaaatttataaataattttattttatttattgtaatttatatacaagtaaataaaataatttattacattaatgaccgatataaatgtaaatttattaatttaatttaatttcttattaacattttcaagctagacttctcattaacctagcggctttaatatacattaaaaaaaatattcgatatgaaataaataaaaatacatatatttatagtagttttttttatcaatttaattatttaatgaagaaaaagaaatgatatattaaaaaaaaatcagatatatgatgagatacgtaattgatgaggattgagatatggaagaattgttacgcaatgcatttattatgagtattcatatcaatgaattatgatacctatatataggtacctactctaaccattaatatataggctaattagtaatttttccttttgcccttaaaaatttccttgaattattaagattattaaatttaacgattttgtctaattttagtaaaaaaattctaacattgatgaaagttcagaggacatgat

SEQ ID NO: 390384 - DNA, 1169 bp, Cannabis indica
aattacactctcaaattctcgtgatccctgagaattgggtataattacacaatattaccatttcttgataattagtattattaagttgtataattactaactcatatgaaaataggaatttatatgcaattactatttgacatccaagcacatattgtattttaaaatgtagtgcaactactttcatgtgtaattaattactatcctaataattacattacctagtaattatacagatgcatctaaacgcatgtaccataagtaaattttgtctgacgctcctttatagatgcaaactcatctataatggaatcaatactaaatgttgtaggaatatctttctcaatacaaatagctaagcaaccatttagagagttgttttccatcttgtttctatgctttgtcttgataattttcatgattgagaaaaacaagcttaagtaacctatcaataagagggtacaaaattattttccttgttttcaccaagccttaactctagaatttggaaaaaaagaaaagccttgaagagattatttgtttggacaagtgagttagtgtaatagtattaatgagatgagaattagaaaatccgtgagtttagaaagaaagtgaataagtaatttggcccattctagtagacaaaataacatatgctagataatgataagccacattttttgatatatttaatttgattagaagtctttttattatagcttcaatttaatattttttgttcaaaaaataaattcaataaatacttgtttatttttttattaaattataattaatatatgtatgtaaaaaaaatttgaggccatggccacctccggccccttgtctctgtcattgactatggagttgttatatcttgtcttccaaatttttctttgagaaaaatctcccaaattatacaatcattacaaaggtgcctctccaattacatttcattcattttttagttttttaattagttgttattattgttatatattaaaattggaaaatcgatttaactaacttaaattagctaaattctattaaatatataatcacgaggaggattaataacaatttatagagggagtaaatttatccttttatttaatatatggggtgtgggtaagcttcaccagatttttttgcccataaatatagaaaaaaaa

SEQ ID NO: 390385 - DNA, 1887 bp, Cannabis indica
attattattattattattattattattattattattattattattattattattattattattattattattatttctttagttggagttatatatatagtactattatattaatttaaatactcatgaattaataagcttaaattcaattagtatatatggaaaagtagtcgaaatgggggctagctaaagcctatagctaagaaatttccttagaaaaaaaaaacaatatatatagatagatagatatagataaataaaacaaaatgtcatatagaaaaatttctcattcaattaccaactatatcatacaagacttttcacaaaatttcctagtctttatcgataattttcccagtttccttcaaatgaggttacatatatatatagcaaaattataattttcaaatcataatatataaatatatatatgtcacgagatacaaaatattaaaggtccatcaacatttaaagttgcctaattattcaactacatttataaatttctcctttattattggatctttaattcttaaataaagatttcaaaaagagaaatgttataaagaaatcaaacaaattgttccaaaatggttggcttgatatgaatccacgtcaaccatttgacctataaatatatatgacgtaatataatatactatattctctcttctactataatatatatttatttaaataaataataataataaattatcaaactgttttttttttttttatttttttgcaaattatttttttgcaaattaaactactcgattaagatcttgagttttctctatatagacatatatcgatctaataatataatattaattaatgaataataataatatataataacgtgcatatatattatgtatatttgatcatatatatgactaatgtagtaaaattttatatggttaaatattacttgatctaagctaattaattacacaaatattacatgtaataataacaaccaaatatatatacttaaaataatatatatatataaaaatatgattgagagtgaaatatattgatcatatatatatatatgtatgtatatgtatatacctgaagtttgaggcgtttttttccagcttcagctcttttctgaagatcagcgaccatgcgaaacctccggcgacgattcttgacgacggagacggcggatctccaccgtatcaaagcttcctcggagggtctctttgcttccacgtcaaaattcttccttaaatatttctccatctatttattatatgatcttctaactctctacatgtagagaatagttctctctttatatatatataatatatatatatataatatagaaaaatatatataggtctgtagtgtgtgtataaatgtgtgtatatattatatataaatttaagtatatatatagggatgggatgggatgggatggcataatagggccaagtctttggctattccttgaattaagccactcgttttaaatctcactaagtactattaattaactcatcacctcttctaattaataatatatatataaggaaattaatatttatatttttaattattatcacatgtaatttaaaatggtcaaaattaatctacgtattctttacaaaatacttaaaatggaatccattgatttgaaggaatcaaattttttttcatcttctttatcggaaaaaagtaagttaaacaataataaataaatctcctattattttgtagataaattattaattaatttcttaaattatattcagttaaacaagactaattctattaaatatacttatacataaaaaaaaatcgtacaaaaactgaaaactactaaatgtagtagtttttttttaaattaaaatttttttgtaagggtac

SEQ ID NO: 390386 - DNA, 1793 bp, Cannabis indica
ttttccctccattacagttttctctagtttgctaagttttacgtttttgtcgatggagatcttttcaccacttttactattttatttcaagcacgtttttgtagtgaattgttttgaagttttgtatctttaagatttagttatgattatttattttattttttgtttatttttattacagtatttatttcctttttaatgccataatttttgttttgatcttttcttttatttgtttttatgattaatttagtttgtttattttggtgaagactaaaagttttttctttgattgctgtgattattatttttatactatatattaatattttaagaaaaattaatttcgtaattgttgtataccatatatatttaagagcgattcataggcacttgtattgctaccatttataagtatttaaagacacgttttaatttttacagtttttgttaaaagtcaacttttttgttttcttattatgttctttattatttctatgaatgttgatttgtttctttttactaactatccaaagagtattattttaccactcacttggttaatgaaagtttttttactacactttctatttcatgtcttatgaaaaatattatactttgtgaggaattgatgagccacagtttgttggtcttgctgcctttgaaggcttttgcgcctatttttatggcttacctttaattatttagggtagtatggttaaatattccatatttttatggagaattaaagtcattcaaataaaataaaatttaacattttttcaaaaaagtttgtgatatatttccatcttgttaattggcttattgctactagcaaaaggtaatatatttggctagttattattaattttttttattagtttatattttatttgattgaatcaagtggtagactctaagaatttaatttttttgatatatttatttttctttgtagatagacattttaatacaatttattttttggttgttattttgagacctttcaaatagtttttcaattttacaagctaaatttccaactcttcttatgtgttgtttgagggcgttataactttattgtctaacttataggagcagtttcatcccatgttttgttcgcttactttaacagctcatggtcttgcaaagtgtgcccttcgattagacgatgagcgatcctgattcgaggaaattcctgtgcgcggtttgcggatatctgtatcgtaaattttatgagtgattctaattactacgtcaaaaaataaataccaagcattgaagcacaaaagaagcacgaagaatggatatccaatccaaatgaacatgtgacaaatcacacatatcaatgatcattagttaaagatctgtcaataaaaattgagtaataacaaccatagcaataacaattataatgaacaatctcaccataaatcatagggccaataaaaatttgagaatctcccatatctaaacatgcatggacaaagataattatactactaaaacaaacatgatttgagctaattgaaattcttccaatgtaaaaaaaaaaaaagactaaaatctcgtgctgtgaatgtggataaagcttactacctttcatcataacaatagtaaggtggtgtagcaacaccattattgtaatgaccgcttttataatttggattagtagaggaaattagcactaatttctgatatttttataattatttatggtccccattgttagaaatgggcactagagttataatttctcaatttctgagattttattaaactctaggggtatt

SEQ ID NO: 390387 - DNA, 953 bp, Cannabis indica
ctaatgtccaacttttaaatacagccttacataggtacaataaaattgctttttaaatcacaattatttgttttataattatgtttgaaaattcacaaaataattagtgtctttaaaatttaagaaagaaaaagtattagttaggcagagtgaaaatttgacaattaagagatgaattatggtataaaaatatgggaaggatagtatctcgctggctaactgaactattctgcatttaatgtgtaccgttcgatctaacggttgatattgaatattctagtacatgtaggtgcagtagtgtcttctcatttttttgtttcttcttcttcttcttcttcttcttcttcttcttcttctcctgacttcactcgttggcattttcttctcatcttcttcgtcttcttagtcgatggtgtagagaaagcttaaagggtcggagcttcaaaatttatcgccgaccaagtggaaagaagaagcacgtgagagttaataaaggtaactgttctacaaaaaatctcctcatctgatatatatattctctaatcttccaaggactaagtttagttcattgatatgtaaatgagtatagtttcgtgtgctatgttattttttttacatttacggtgtttataagaattatattttgctgattataattttaggattctgtgctatattaataatctacaaacttagaaaattaagggcttcgattttgttgtataggtactatttgttgatagtttgttgttagagaattaattttggaagagagtttttgccataaaatagatgtagttgtggaagagggagagagggtttgtacatttccatgttggtctgaattttgttaattgtagtaataattactgtctcccaacaatcacttatgatgaaattatataaaatagagaaatttttaatatttattttgttaataaattaataataat

SEQ ID NO: 390388 - DNA, 496 bp, Cannabis indica
aatctgtctaattctagagctaattttgttcttgagcttatacatactgacttaggggactagctcccatctcttctaatgtcaataatagattctacattcattttgtagatgacaacagtagattcacttggctttaccctcgaaaatttaaatttgatgccttaaattcctttcttaaattcaaagtctcagggagaacaagtttgataagaaattaaagcatcaagtctgacttaggaggtgaatataaagccttttctgagtttgtctaactcatggtattgagtttcgacattcttgtcctcatacctcaacccaaaatggtcgtgctaagagaaagcattgacacattgtcaaaatgggcttaactctccttgctcaagcaagcatgcctttaaaatactagtgtgatgccttcaccatagctttatttctcatcaataggctcccaacaccaattttacaaaatcaatcaccctatgaagtgatattt

SEQ ID NO: 390389 - DNA, 892 bp, Cannabis indica
tttgttttttttttcttttaaaacgtattattatatgttaataattaggtagcatatatggcgttggtgcgattattttaaacacactaacaagttgtgttacatgcatccttttcaattattctacacagtattattgtagagaatccttgtcttatttctcacaccatgaagatcaaaaggctttatacacgtaatagatcttgaagtactatttttgcatccaataaggttatttgtgatgaaatctcgttaatatggcatgaattccttgaatttttctttcactgccactatccttttaaatataatgaatctaagtcaacaattgtggcatggaaggtcaagaagtgcaaagagtattggaagccttgagatttagtcaaagctcagtgttgtttaattatttgagtattccaatatatgctaagaaacttttagcaaatgattctaatattagcattccattcattcctagtagagccaaatcatgattattccaaagaaggtgttgaagcaaactattacctttgtcaaagctttcttatggaaaagttagcgtatacacactctggttcaggatatgtggcgtgggaaatatacttgtaaactaaaataagagggacgtatgggctgtcaaaatgtagtagcatggaacattgatgcaattagaaaataaatgtgggcaattgccaaaaaaagaatttaagggtgaaatgggtgcatcaggtattacattatggaggctgattagatggcttctgttgtccccaccaatattttttttttgagtggagggtgactcggaagctaaaaatgatatggaaaggtatactttcataccaagtccaagtcttatctaaccctaaagaagcttgggcaaggttatgtg

SEQ ID NO: 390390 - DNA, 1782 bp, Cannabis indica
accattttctatttatactaatctttagtggtaatttatctccctgttaagacaacatagcatgtttactatcgcaatcgcagtgtaactaattgggcgacgttaatagtgttaccaaaatttttgtggtttttttgtttaagttattacttattttgtaccttgtttggtagtggatatatatgtgccttgtgcggcttgtttgatactatatataggtgctcgttttagatttatcataaggttgatgtgaagttgtagtgacacagtattcgctccatatatatcaaagataagttttttctttgtaaaatattatttattgcctttgataaatttggtgggaaatattatgtcattttgacatatctcaatcgtaaggctcttataaaggaatcacataaaatttattagataagtcttcctttgaaagttaaatttgagatttttcgtaatgtcgtttgtttatttatttattaagttcttcataattaatagattgtacttattatattttggcaagagtggatttatcgattgggggttagtaggtcatagaatcatcaaggcagttttattgtttaattttttttactttagaagagagatccaaaagttagagtaaatagtttaacttcgataaagggtgacactggctttcaagaagcttcaaagataagtttttttttcaagccatatgatattttctttatttttctaattaatgttattttgttcaaccaataagagaggtttatttagattcgctttcttatgtaacaactatcaacaaaggaaagcgtgttttttaataagcttaggatactgtttgaggatattataattttattgactaaattttcggggactgttttatcccatgtggcttgcaatatgaattttgcagctcataatttggcaaaactattaggacagaaacgaaagagagagagagagagaaatagaacaatcttgtattgttttattatctgaatgaatggaattacaattagaaaatgccttaaataggcaagtgaatgtgataacagaaacaagaaaaggaaaataacaaaaataactgacttgaggataagcctaactagaatcggttttaacacgccccctcaagatggagtgtaaaaatattttacacccatcttggatacaatttcgtgaaagagggagggatagagaagcttattgaggatgccagccaatttttttttggaaggaacgtgattcatcttgatgttgccattgtttctttttcccgaacattgtgacaatctatttcaacaagtctcattcgctcgtgatagacaggattttcaacaatgtgaatggctgctatgttgtcaaagaatagtagggaaggtgtcttgatgttaatatggaaatccttaatgatggagtgaagccaagtaagctcgcatgtggcattagccatggccctgtactcggcttcagctgaggatcgtgaatgtaacaccctaatctataaaaatgccacgtgtgtgatttttatacactagtttaatactagtagaataattaattattaaaaaccgtgaaaatattaaaaatttatctaaaacaaaatactaaaaacggacattataaggacataaaaagtatgttccgagaatctctattataaaaaaagttctgctaaggaaatatataagaaaaccatttaaacacaaaatcaaaaatacacaacagatacgaccagcctaaaataactcctagcaactcggcacgcaggccggcgaggtcaatatg

SEQ ID NO: 390391 - DNA, 778 bp, Cannabis indica
attattagcaatagtagggtctttcttttagccactataccataaagctaagcttaaaataatagaaataataatgaagatgagaggtgtaactctctctctctctctctttctctttctctctgtacgtaatgagttagaaaaagtggatcaactacaggacactactgatcagttttttttttcccttacctttaactcaataatattattagaacttgttttttctcagaggcagagacagaaatgaaattatgtatagtttaattaatgtgatcagttgatcttttggcacagcttttgactggcaagacaaagcctaaggacactgctccattatatccttatagttatagccataactattccctactttcctttttaaaaaaatatatactactttacttattataactgcgccatgcaaagtgcttcctgtttttagttataaaactaatcataaagttttaatgccatgcataacctactaaatatcatatcccaataataatatataatatgcatacattgccttttatatttttttaaaaaaatattttttcttcttttggcttttcaactcccattgaacttttcctaattgcatggaatctctcattaaaatgaaaagaatatagcaattaattcaagagcactctaatacataatagattcttaatttgtagtgaagaattcttcattttaaaactatttgtataaatgtaaatatattttattaattttttagggtttttttttagagcattgctattagaca

SEQ ID NO: 390392 - DNA, 1199 bp, Cannabis indica
gtaagattttttgtagtgggagaagctaaaacattattttaagtgatcaaatgattaatatttatcataaattaacaaaaacattaaattttattcaaatatattaattttatattcaaatggttctattaaaatataataaatttttgtaggatatatgtatataatttccaaatatatgcagtatattttgttaaagggtatatttttttttatatttgttgttatttaaaagagttttttcgtttatttttttttcataatcgcataagttgtggctatttaagattacttaaaaattttcataaaattttgaatagtttacacaatcaaaaataaagttcaaataattgcttaccatacgtataaaaaaaacagttatgtctgcacaataaactattctaaattttttaaaaatttatcaagtataaccttaaataactataatgtacaaattatttatgaataaaaattactgaaaaattcttccagatgcctagataaaagatctataaaaacactattttaggtggggtatatacctataattttaaattttaaaaagtaaatgatataattgtatttatatacactatatatatatgatattgtgttataacttaatcaataaaatttagactatactaatttatttatacacacttatatataggatatacatttttgtataaaagttcaaaagttgaggtgggcccacctggtccttcccttagcttcgtccttgtgtatacatactaactactcatgagtgatgagtttccgactggctatggcttcaaatttgtggataggatatgaagattgtcttcatcaatatgatgattactctcaatattttaccaactttgggctatctttattgtgacaatcatgagactatattgttattgggggccataattacatatagatctaggtaattagttacttattagggtctacagagttcacatttaattcaaaggtttcgagtcacttctacttttgacctacacctataaaactaatcctctttctttggttataggtttcatatgagtttatattattttggttctgtctattaaaactaaatttcagaatgaacaatgagtatatataaatatatatagagcaaaataataataataaaaaataaattagaccctacatacttggtcagagacaaaactatagtc

SEQ ID NO: 390393 - DNA, 1253 bp, Cannabis indica
tatatttacaaacaaaaaataataaaaaaaaaatgtttacagtacaatgaaataaaagggaacaaggaagataatgacgatgttggcgacgatggggtaattaaacagatgtaatgcatatcaatttgcaatttctcgtagatatactccaacataatgcatctttttatgatacccttttagctccataacaattaatcttattatagtcataaactttgctaagaattctttacagcattctttgcctaagcaaggtattcaataatctttggaatagagagtacgtcactcatcaaaatcgagtatgcatgtaagcatgactacatctcgcgaacaacctaccgcctaatgattcaataatataattaatagcttgagagagttaatttcataacaaaaaagtgatcattccgtcctagaatgaagacttttggtttcatctgttaaagtttttgttatttcctctttacatattttctagagagaaaagaacttattgataaattaaaattaaaaatgtgttaaaattattaattgaatttaaataaatatattaatataatttataagtaaaaaaatgtataatcatctatgcatttatcatgtgggatacaggatacgaaaactagaaaaaacaaagccaaaagtatgttatgatcatcacattcaataacctcctagctttgaaaaaaaaaaataacaataacctcgaacttgattaattagattgaattgaatagccattaaaaagttacaagttcaattaaataattagtggaaatattaagttaaataatttaatacttttcaaaaagagcattgttatttagggatgtaaacgtgtgagacgggacgggaattgctcccctatcctcatacctattttttaaattcacatcatacccacctcgatacccgtttaaattaaagcggggatgagctgggtgagaattacccgacgggagaatgattcccatcagttacccattacatatatatttttgaaaataattgatgtttcaaagagaattaaaaaatccataaaaactcgttaaaccaacaaacataagtagaatagtgtgtataataaatgaagttagtaaatacaaaattggtaatcgaaaataaatggttaagttttttttttcaaagtagttaagtgtgattattaatatgtatcactgcagatattttcatgaaaactgaaatatctcattagtgtaatcaataaaaagcctaaagtatgaagt

SEQ ID NO: 390394 - DNA, 2056 bp, Cannabis indica
tcatgtcaaaatctaccaccatacgacaagtgtatacaaaagttggagaatgtgttcccgaaactttttacagagcaattggattagaagcaactagaatgttctcgatatgtcgtttggccaaggcccgcgatatgtctagattggtcgtccccttaactgccaaaacccccagaaattactagaaatttcacctcaattcttataaatatattcactaaacccccttgacttgatcacttcaaaaatatcgactcttcatttcaacaaattttgtaactcaacatttatacaatcaattctctgtttcagcgtcctttccaagtaaagatgtcgctcattcctagcttctttggtggccgacgaagcaatgttttcgaccctttctctctcgacgtttgggatccattcaaggatttccccttatctaaatcatcttttccaaaactatctgaggaaaactccgctattgtcaatgcccgagtggactggaaggagactccggaggcccatgtgttcagggccgatgttccggggctgaagaaggaagaggtgaaggtagaggtcgaagatgatcgagtcctccacattagcggagagaggaacgttgagaaggaagataagaacgacacgtggcaccgggtcgagcgaagcagcgggaagttcatgaggaggttcaggcttccggagaatgcaaaaatggatcagatcaaagctgccatggaaaatggggtactcactgttacagtccctaaagaagagatcaagaagcctgatgtcaaatccattgaaatatctggttgatcattgttggtgtgactgtgattttggtgccgttatgggtccttggttattgtaattgctttgttttagattactgttttgtcatttgtgtagatataccaggtgtgatatgaacttttgatccagcgtggaaaagaaataaaatcaggtgtggtcaattaaatttatgtaataaataaagttgcaattatttatttctatataagtagtaagattcttgtgaactttatttgtcaattcattaaggtgagtattaaaatgatattttagaatgttttttaatatttaaataaaaattcctatattaatttaatattatttattaaatagtatgttatctaaattttatagattgtggtcataggtatagttagtagctccatatttctcctcacaaagaagaggtgtaagttcgaattctttctcattaaatgtcaaaaaaaaaaaaaaaaaaatactctttttaaatgtaaacataacaaaagtgtcgtctagccactaacaaatttgattttatattgtttcaaagattcaaacacttcagatttaactatctagatatgtataatcttgagttgatagactaagtaagaaaaatatataacataaacatataatcaggcgcttgtacacctactcgcacgttcttaaataaaatatgattgttgttggagaaatttggacaacaccaaattatgtgtaaacagtaaataaaatgaataaaaaaatgaataagaaactgtgaacattcatttagagtagcgagtactcaacggaagctaccaaaacaatagaacaactaagaaatataaagaacacaagggatatagtggttcagtcagatcacggtgtgcttagttcactgttgcaaataatgtttacttagtttatttgatttggattacttttttatatagaaagcaagtgtccttttagttttacataactgataggttatagaaccgttttacaataaataatagtattaaattagaataaacataaaagaataaatgaagaaaaatttaattcattttaataataagtgcagcaacgtatacgacttattaagtgtgagtttactgttcaatattttcgcacaagctcgcatgctttaggtgtattctacattcaaaaaacagctaatgaatctaccactagaatatctgcaatctattggagtcgctttgttggacatctcgtgtaggggtgttcacaaagtatccgatccaatccaatccgcacgatccaa

SEQ ID NO: 390395 - DNA, 1547 bp, Cannabis indica
aaaaagtgtgaattttggctatcgtaagtatcgtttcttaggcacattgttagtaaagttgggatcctggttgatctgagaaagattgaatctgtcaaggattggccaagaccaaaaacagtcagagaagttaatagttttttgggttcggctggttattattgttgtattattgatggattttccaagaacttaaacacccttaacagaattcactaaaaagaattagcagtttttgtgcatagacaagggtgacgcaagctttcaagaacttaaacagtgactgattacagctccgatgttagccctaccatcggataaagaaaagtttggggtttactgtgatgcatccacgcatggtctgggatgcgtttttatgcaagcagattgggtaatcgcttatgcctcttgtcaattaaaggaatatgaatagtgatacctaacgcatcctttagaacttgttgtagtagttttttctttaaaatctggttgcattatctctacagggaaaagtgtgagatttacactgaccacaagaggttttaaagctggtcaatctaaggacttttcagtgtcaggtaatgagatgttgttgtacaaaactagagtgtgtgttcctaacagtgtagaacttaaaaatgaaattcttgaggaagctcatatcactccttattcactgcatcctggcactacaaaaatgtatcaagatttaaaaccctattctaggtataactagatcaaaatgcatatcgcaaattaggagcatactagtttctagattgacaagggtatgtactgctataaggtgatgttgtttggactcaagaacgcgggggccacgtattagcaaatgataaatcgaatgttcaaaggacagttagggaggaacatggaggtatatgtgcatgacatgctagtaaagtctaaaacctccgaagagcatggctatgacctggaagaggcctttttggtgataagaaaatacgagatgaagttgaatcctaaaaagtgcaccttcgaggtctcctccaagaagttcctaggatatatattgtcagctcctgaggaattgaagacaatccagagaaaactaaggccttcatcaacataccttctcctaaaaatcataaagatgtccagagcgtcactggacgtatcactgctcttagtcaattcatttcaaaatctagcgacaagtgtattccatttcttaatgtgttgcgaggcaacaaaaagtttgtgtgggctgaagagtgtgaggaaacttttcacaagttaaaggagcatctggctaaggctcctattttatcgaagcctatggagggggaacatttgttcttgtaattggcagtgtcagatcatgctatgagcgctgcactcatgcgagagaagtataaagtctagtatccggtgtattatatgagcaaaagattgctgggtacagaatctagatatccaatgattgaaaaagttgaccttttgcttattatttgtgtcacgcaagctgagaccatactgttggatattattttacaaggatcttagat

SEQ ID NO: 390396 - DNA, 577 bp, Cannabis indica
gataaggtgaaatttgggatttggttgggtttcaaattttagtaatagttggattctctaaatcttacctaatttagtaaataaaaaaaggaaaaggaaaaaaaatgagtggtgtaattttgaatgaatgattacaggaacaaatggtggaaccagctgtgaatggaacgaagaatgtaatcaacgcagctgtggaagccaaagtgaggcgcgtggtgttcacatcatcgattggtgctgtgtatatggacccaaatagaggacccgatgttgtggtcgacgagtcttgctggagtgaccttgacttttgcaagaataccagggtaaaattacacaaataccccttatttatttatttttccatttctaatattaatatatatctttcgtgaatgagaactttggtgagtcaccaaataaatgaaatgaaatgattagatggatgatcatgccttataaaattaaattatctggttaaaatctcaccaccctagctttaataaaattatattaattaaaaataataaaataatttacgatataaatatttaaatttaattcttaattaaaatttaat

SEQ ID NO: 390397 - DNA, 1756 bp, Cannabis indica
agatccacaacaactagccaacaaatcagcatcacgccagtcactgaagctggaactgagactactcattgcacctcatgtgtcaggaggaggccctaaaactagctccacaggtcattccccaaggccactaaatgcttcttgtactagaaccgacaaacaaattccacctagagagccacgcctcgagttggaagaccccaaggaggccaatccccaagctgtatagcttagctaaactatggctgatctacaataaaaggagcaagactcactcgacagacaacacaaatagatctaacaatggttcatggagaactggcagagcatcgaaagccaatgggttgaataggaatatcggagagctaacctgtctcaacagatcagagaagcttgtcactctaaacgcaaaactacccctttgcaagggtctttttgagttggtgagagagattccatgtcgaccaacatgtcacgtgggaattatagtgctcaaggggaaacccttaatgcacagaacacaactaccatgcctaaaaacagtgcaagcactaagaaaacaccgggtgctaaggctcctcgaaaggaagcaaatttcaagcaagagtctgaaaggactcaaacccttaaacacgattgtcagagtaaaagaccattattgggtggtttattatagttgtttttcttagtcgatccccatttttatttatcattagaatgtttataggcttataatggtggtaaaagaccattattttcgtgtttatttgtaccatacttggcacaatttctcaagtgacttagggcataatttcctattttatgatggatttaggctctctataggtatttgttggaatgtcatttattccttatttatgacttgatggctcatttatgtagtcgtcgattgatgtatggaggatcgtgaaattagagaataatgggcttaaacccttaaacactcttgttagcgtaagacatctgatgttcatcctcatgatgcattaaattcatatacaatgtcttcatccttgagtgtcaggtcatcttccattagtcctcatgtgccatcctctgtatatagttcactcacgaagaggaacaaacgagagatgcttgcagtccagttggatatatttctagagatgactaatttgtcattactcttttgaaataatggactctgagagtactaaggagaaatgtcctgtaacgtggctctcattgccacctaactttctcttgaagtgccacatattttgagagaaattttaggcaacatcgaagtttttgactgttgtctatactatagctgactgttttgcactgttggctatagcatagccaacaatcaataatacataataagcttaaacaaaaataaaaaaaaatccattaaacaacaaaatcaaaacatggggaaaacttggaaccagagatttgagagagaactggtaaccatatgtactaaacacgtagaggaaaatatataatcaatagtagctactaggcgtgaaaagtttaaacaattaagaaaattattatgtacacacataagcatgaatctcaagtatccaccctcacgatttcaaaatataggtacaaatatgtatgaatgaagcacataatacgaatccttaatttaatttaaaaatcaagttcaaaattccactatgagttttcactttattgttgcacatcttggtaagttcgagacaaaaaaataaaataaaaggttagtgcatgtttggca

SEQ ID NO: 390398 - DNA, 2129 bp, Cannabis indica
gaaagtttagaataagacataaatttggatatgggataagcagtagtagttttatcctgaattaaattgtagcattcaaaatcctttaagtagctcggtggacgagggatgcgagtagatcgtcttggtatagcagtaggtggtgtgtcaagatcctgctggtttgtaggtgcagaaagggctgtgtcatgcgatctgcttgatgttgcagcaggttgcgattcgagatcctgctgctggtgtgaagtttcagtatctgcaacttcagtagtttcttgcctttcatcaagttcttcctgcaaagtcgggttaggagaaaaaatgcaagagtcttgtgtaggatagtcattaatatgagtgtgagtgacatgtgtatgaggaagaacaagtagagaaaaaggatctatagtactgttagtagtgtttagtttgtgaaaggggtaaacattctcatgaaaaattacattgcgtgaaatgaatatttgtttggattgtaaatcatacaatttataaccctttatacctctcggataaccaaggaagacacatgcttttgcccttggttcgaatttggttctgtgtgaagttatagtagaggcaaatgctagacagccgaagcaccttaaattgtcatattctgggggcttactaaacaacacttcataaggggtctgcttttgtagattcggtgtggggattcgattaatcaaaaaaactgcagtgagaagacattcggtccagtattgaatgggtactttcgattgaaaaaatagagctctagcaacgttaaggagatgttgatgctttctctcagcaaccgcgttttgttcgggcgtttctatgcaagtgaaatcatgtaaaataccatgttttgcaaataaatctttgaaggagagctcaggtgcattgtcagacctgaatcgtttgaaaatgcaatggtattgagtttgaatataagcaataaattcaggtattatggtaagaacatcagacttttgtttgagaagataaacccaagtaaatcttgagtgatcatcaaccaaagttaaaaaatatctatggttagaatgtgaagtaatatgataagggccccaaacatcacaatgtataagatcaaaacaatgaggagaaaaatttgcattatttggaaaagggagccttttttgtttggctaaagggcatatgtaacaaggttcagcagtatgcagattcttagtgttacaatgtaaaaaatcttgaagtaaatctaagtatttattcgataaatggcctaatcgcttgtgccatatttcagcggaagtaaaggcattgatagaaacgggtgtggtatccaagatgtagagaccatttttcgaatcacctttgccaatcatcctcttggtgcgtgtttcctgtatgtaaaatttatcagtgaagaactttattttgtaatcattatcctcagttagacaactaacagatatgatgttgaatttgaagttaggaacatacaatacattatgaagtatgaaatgattattaagagaaacattaccacttttatacaccatgagatgttcattgtttggcaaaattagtttggtaggacaaacaatgtgtatattttggaaagaattgatatccgaacaaatgtgtctagtggcacccgaatcaattatccaagaattagttttaggcaaaggagaacagtttgtaagaaccatacctgacttacctgttgatgtactaggatcggcaggaggcagattgttggtttgagcagcaagaagagacagcaactgttggtactgagttggagttagttgcggcaataaggtgttattttcacctgtgctgctggaaccgatttcattagaagtctgtagctgatttgctgcagcttctttgggtttattatttttgttgtaccccggtggatagccgtgtattttgtagcatttttctatggtgtgtccatgcatattgcaatgtgtgcagaatggtcttcctcgttttggtggctgagtttttgttggttcagattttcccgaggttctttctccttgaaaagcaaaggctaagttgccatttggatctgcagaagtattctgccttcccctttgattttcttcctgtgaaactagatgaaa

SEQ ID NO: 390399 - DNA, 767 bp, Cannabis indica
gtctttgaaagtgacgaattttgcagcaaactttgtttgtggtactgaagagtttttcatagtgaggatttgactagcaagagggccttcacaagtgtacggtcctgagctaaggtttatttgtttggatcaataattctgcttcttcttcgtaatgtccatcaccaccctcttgccacttcaccagccacttttcccactatacaaaaaaaaaaaaaaaaaaaaatacacatttaatttttgctcaaaattgtatagataacattcggtgccgtggaatcttttactctatatttaagaatttttggctacaatattaaaatttagacgttcaagtacagattcgaagaaaactacacagtttgatagattatatgtacgtatgtttggtcttttttattttttggggttaaaacagacagaattcattgaaattattcctttagtatacatatacagctctaatatcaccgtaccattttttttcaatgcacatgtggtggtgaagtgatatatatataaagttgagtgcattatttacattcgacatatatattgaatcgattgcagtttgacaagaatatgtttggttgttgcttcttctaaaaataaaataaagtacttgaatttcttttttacaactaattttgactttaaagtagattatgattgaaaatagttactacgtgctagtgagtaatcatgacgtcacatagatacgtattctccgtataaattttaaaaaaattttaatttcttgatcacat

SEQ ID NO: 390400 - DNA, 1317 bp, Cannabis indica
atattttaggatgggtattgcccacgtcacctataaattgaaaaaaatattttttttatttatcaattaaccaaatttacctctaatttatatttaattgaaacatatctctttttatatactgtacccaaaataccatgacataagagagtcatatggagagtattttaaagtgacaagggcaaaatttgtacaatatttaaaaaaagaagtaaaaataatagatttaaaaaagagaataaaagtaaaaagagacaatataaaaatagtattgagtctaatttcttcccataaatctctttagaaaaaagcccaatttatttttaaaaataccatcttttagttttgtaacactatttatttaataaatatataattattttattgaaaagacccatttatttttaaaaatgctataaatataattaaatattcaaaatacctattttaaaattttaccattatataccaaaaaaaactagtttgttaaaaggaaaaactcaaattaaaatttttgctccaaaactcctgatgaacttgggtgggcctgcctgaaggctgaaacaatagccacttgaagagcatcttgcagcacagcccttcttctctagcattaagctgcaagaattattattataattttttaaataatcattgattttttaaaataaatggtataagatttttgtcattattattatattttttttcttaaagaaagtatattattattcaaaatgaacaaagaggatttttttttgaaaaagatgaacaaataggattaatcattattatttatcattgactaaacatacaatccaataagtaatattcaattgaaccaagccacttgtacataaggtattggaccacataatttaattgggttcactttcaatttattatcatttttttattaaataaaatacttgctctccaattgcattgacgttggatagcaatagacaacaacttacaagggcacgccatacaatatataatttttcccaaaataaatgaataaaaatttgtgaggactttctttatcgggaaaaaaaaaaaatatttatttaagagtaaatatcattttggaccctatgttttgtaaaagttatcaattggaccatgtattttgttaaatgacaaaatggaccctgtattttctaaaatagtacaaataagaccctgaattgatttttaaagtttaattataattcaatctaaaaatgctatgacaaaactgtttacattttttatatctgttcgtattaggaattatcttacaagttggttgtattaaaaaaaaagttgtcaaaa

SEQ ID NO: 390401 - DNA, 637 bp, Cannabis indica
cacaacaacaaggagtacattctactgggtaatgacaagtagaagtttagggtgaaatgtaaggtaaaagaatgcccttggatgctctatgcacatgtcaaacaagatgggacaacattcagggtaaacaaatataagcctaaatatgaaaattgtggtattgtcctggataacaagcatttcaatgcacagtggcttgcaactcacttcaaagacgagctcagattacatccaatcatgaattacaatgcatttctagagatcacaaaggacaaaaaatattcaaaagtgagtacttggtagttttacagagaaaaagcctaagtcaaagaggaattagaagactcagtcattgagcaatatgctatgctagaggactacttcaagtaacttttggagaccaatccaagtagtactgctaatattaaatgtaagatacaaggtggcaatagaatctttcaaagctgttatgcgtgtctacatgcttgaaaagagggttaaataaggatgtaggccacttagagggttggatgggtgctttttgaaaggatactgtaaaggaatcttacttgctacaattgggattgatgcatcaaatgcttgttgggctttgtgccctaaataaaactttatttca

SEQ ID NO: 390402 - DNA, 1026 bp, Cannabis indica
aaaaaaaaaaaaaataaaatcatgtctacattccccttaaaaaaaaggaaataaataaataaaacaatgtctatctatgatataataaggcttctaattaagatgtgtctagtaattattattgggggatgcgtctaagacaatgataagtattgtttaaatcaaattgatttaaaatctaaaattattattattattattttagaaaaaagaaaaagatgtaaacatatgaagatatattataattttagcaattaactcgatttttgcactatttatcactatataaaattaggaaaaaagaaagcgtgtaattaaatgttatttgatattaaggtgtgtaatgatcgtttgttgatattttatttcatacatcagttagcaaaattagttgggaaattttattatttgcccttaataatataatccatattaaaatttatactcttttataatttgtacaaattgattcctctaattttaaaagattcctaaaatacccctaaattaaactttccctctctctcagacgttccctctctctctctctgtcctcctctcttcacgcaatcctcacgagtcgaaccagtcgaccctccctcttcaccaaccttcgccaccaccaatctccagccgacctcactcctcactcctcacgaacccacgaacccacgaacaggcctcaccccacgaacccacgaaccgacgaacccacgaaaccaaaggcgaccgacgacgacgaagaggacgaagagaaccacgttgatccacgacgacccacggcgacccacgaccacgaccacgaaccactgatccaatccaatccaaccgtaagtttttttcttttaaaatttagaaatttcatagatttggatgcgaatttgtgtatgttcttcagataacattgttttagattgtatatgcgaatctggatgtcaattattgcatgttgtatatgttggatatgtttcaatggtgtttgtgtgtttttacagggttatcgatgaaatgtcgataggatatcga

SEQ ID NO: 390403 - DNA, 1357 bp, Cannabis indica
gtcctactctcaaatgtaaaaatattacattttgtgatgcttgccaaataggcaaaatgcaccaatttagttttacttctgtcaaaaataaaaccactactccatttcaattagtgcacaccgatgtttggggtccttcttttcatacttccatggatggatacaagtactatataagctttgttgatgattttagtaaatttgtttggattttccctatgaaaactaaatctgaagcaccaagcttattcaatcaattcaatgcctttgttgaaagacaattccaaacaaaaataaagagtatacaatctgaccttggcaaagagttttttcctcttaaacaacaatttcccaatgctggaattgttcttagaaactcttgccctcacacacatcaacaacaaggaagagtggagagaaaacataggcatgttgttgatgtaggtctaactcttcttgcccaagccaacatgcctctcacattttggtgggaaccttatgtgtctgctgcctatctaatcaataggctccctacccctgtgaataactacctatccccatttcagaaattatataaagaagcaccagattacaatcttgtgaaaatctttggctgttcttgcttcccattgttaagaccttaccaatctcataaagtgtcatttaggtcttctaaatgtttgtttattggctatagtatgacacaaaaagggtataggtgtcttcatcctagtggtaggatttatgtggctcgaagtgttcaattcaatgaggctgaatttccttatcaagagttattttccaactcaactactcaaaatcaaaacagtcagcatactcctattactcctactgtctataccattcctcaaacacatattttcccatctaccaatcacaatcaatcaacctataacagtccagtagcatcccattcacccaacatcgtgcaccattctgaacatactcaaaatcctgaaattgatgtgtttacaccagcagcctctcaaaactcctcccacagcccacctgcaccacctacagtcatcttaccacaaatcccacacacagaaaataaccccaatcccagaaaccaaaataatcatccaatggttactagatccaagatgggcattttcaaaccaaaggtgtacttggctgatttaagaactgaaaaagaacctaccacagtcaaagaagcattggctaatcctaagtggaataaagcaatgaacaatgagtacatagccctcaaaaacaagaaaacttggaaacttgttccccctacaccagatatgacaattgtcactaatagatggcttttgaataaagtataatgcagatggatccgtgaaca

SEQ ID NO: 390404 - DNA, 969 bp, Cannabis indica
atatgctcttcccgcttaggttaaataatgtaattaaataatgaatctcatatgatttattattttaatataataacttttatatgctacttcttgatggtactagacaacattagtctctaatagtttaacttcacattaattttaaagttttgattaaagaaataattgtgatttttttatatttaagtgatgtaatttgaacacacttctccttaactatattgttttttttgttaaggaaaaagtatttattataaaattattatgaataaataaaaaagataaaaagagaaagagaaagtgaaatgagaatttgtcaatactttagttcaatagtaatctattatttatagaaatatgcgagttatagattaagaaactaatgagtgaaatagtaattacaattaatggtaattaattgttattcaagttttcggaagagggacacgtggcattcccaattcaaaaatcaatcaattaaggcctagttagaaggcctaccaagaggacaagcctaacatgtacagagggatggatctaagctcatcgaaggcccaagatatacacctccaagaatggttctttctggatacgaaagggccactcgctctcatgagaagaagtaattgaaaccctataaataagcatttgggacgcatccagagggggcactccaagaggtgcctcgaaggcatggtacaggatgatgtggcagccctctgacactagatcccatagaatcaaggcattgtcccttgtgtcaagcgatattttttattttagtcacacatcgctaaatatgcaaacatttattattttatagtcaaacatcactaatcatcgctaaacttcatgcttaacctcaaatttggtttattattgtaaatatattgctaaatactgcatattattgcaaaaaactgggaaaccacgaaaaaaaaggaaaaaattcaaaatttaattttt

SEQ ID NO: 390405 - DNA, 696 bp, Cannabis indica
attattttctagtgtgatgacgatatatgtatatattggtatgatgatgatgaaaaagtgtgaaaacatgtattatgtattgaaattaagtccacatgagggtaggacgaaaactatctttcgattataattaataattgtgttaattaattatagtactatatatattattaataattaatgttcaatcattcgatgtatgtgtaaaatctaggtatgtattatctctaggttgaatatatatatatatatatatctatatagatatatttatatatatatatatatattatttttgattagatctgtttggtagattttgtttggcctccaagttggactctatatatatatatatgatcatctatcactataccaatatatacatatacttttgaaaattttgctaattatttatataaatatctctttatatttattatataaaataattaatgttggtaatatatttaccggcatccattttttaaaatgaaagttttataatgtatcatgggtatttgtacatttcaaatccaattttataaacctattcacattgattggtttatacaataattagtttcactccacacattcatttttttttttcatttttcctatatctagtacttttattattattattatttacgaattaagactttaattattatacactcttatatatacgta

SEQ ID NO: 390406 - DNA, 1061 bp, Cannabis indica
atatatatgctgcccaataattattgttcttaatcaaatataaatacaataaataatcaaatccattatcttaaatatactagagaaaatgttttatttaaaaataacttctaatttaatataaaaagatcaagttttaatttaggctaattataaataaaaataacatttaaattgtacatttttaaatcgtgtatattcatagtttataaatttatttatgtaaaattaataattttttaatataactctatttaattataatctcaatataatttatttggttttaagtatatattcttaaataaatgttttattgtatatatagagaaattggattttgttatgatcaaattatggagataaaactattatttattttatctccatagttgtaagattataatagagttgatttaccagttgttaattatcgaaaattagaaattttactatatatagaaattgaattttgttatgaacaagttatggagataaaaactatttatttatctcaatatttattggatcatgatcgaattgatctaccagttgttaattatcaaaaacaaaaatatattaaattaagtttagaataatacatttaacattaatcaaagtacatcaaacaaaaagaatactcttttttaatttcgtataagaacaaagttcattctctctctctctctatatctatatatatatatatatatacattcttacatagatattaattgcaagtaaatatttttggaccaataataaaattcataaagaaagatgagtagagcaaagaatgataaagtggtgtgtgtaacaggaggatcaggttacatagcatcatatctaatcaaactcttattacaacgcggttacactgtcaaaacttctgttcgtaacattagtaagttactaatcttttaattctccacttttattattattctatattttgctatgaaggagatgatgagttttgaataggggtaagttgaaaaataccccttttattaatcaattaatcaaatttacctctaattttatatttatttgaaacatac

SEQ ID NO: 390407 - DNA, 829 bp, Cannabis indica
taactaaaaaactaaaaaaaaaaaaaaaaaaaataagtgttaaatcgttaaacaataaatgagatatttttttatgaattaaattgaataatttcaataaagtttttgaaaaataatcaataatataataataaacacaagatatttacgtggttttgtagttaaatttacatagtccacgattctttcttatttctgatattttgttaatgaaaagaaatacaaagaatcacatttctttcaaagtaattactagatcgaaaatcggccctcctctacatagtgattaacccctttgtttataggatttctctcatggtagtaatttcgtttagatttatcttaataattattcataaaacgcgaataatcctcacgtttcatacaattacaacgcgtgataaaatgcataaccaccacttagttttatccaataaacatttttaatttttctttgagaaacgttcccaaattatactgctcgcggataacttttatttcttcatgtgagtttctttaagttcgtctcgcactctaaatatttttacattgtgtaagttctgtactcagttatctccaaaataattttaacaaatgctattttattctcgatggctctatatttaacaatttatatcttttgactcacctttaattatctttcaagataagacttaaatataaaattgctaatagttatttttgaggcatttaattaccatatttatttttcttaaatacattttatttttgaactcttgtccacgtgtcgtgactatatttgttgctcgaaatatgagcataacaataaataaatattttttttttt

SEQ ID NO: 390408 - DNA, 568 bp, Cannabis indica
cttgaaacaacataaataacgtaaaaaaatatcagcagaaaacaaccccgagcaccataaattcaaacagcaacaaaaactcccaaaacatgcatgaaaaccttacttttctctaaattttttaaaggaagaaggaggataagagcttacctttggttgaaatcttgcttaataatcccttaatttggtttgaatcaaatgaagaacctggttttcctcttatttttggtttgaccgaatagaagagagaaaaaggaaagagatgttgtttgattaaattttgttggataatggctaacttattcaccttagtttcatactaatactaaagaattttgctattcgaattcccatatttgccactaaagacaaaaaaaatatcaaaagacaaaaaaactacttttactttactaaaatgtaatctttccatttagggataaaatagtctaaaaccataatcacgaacaattatgacattccaaaatatttaactatttggcctcgctaaatctaagatatactaccatatctatgtggggatattggcggctaaaccacttgaacttta

SEQ ID NO: 390409 - DNA, 940 bp, Cannabis indica
ctaaaagactttggcatcaatcactccaatcctgctctgctttactgtgacaacaccgccgcaacccacattagtgagaatccggtctatcacgaacgtaccaagcacgcggaaattgactgccatttcattcgcgagaaggttcaacaaggctccgtcaagctacttatgtctcttcccaaaacaacctccccgacatattcaccaaagctcttctcccaactactcacaaaaacattgtctccaagataggtttaattaacatctacactccatcttgagggagacttttagacaagttgaattagttagttaggatatgttttggttgttagagtcttgattcatgtagctaattctgttacagttggttattcctccaactgattatcccttgttgtaaccgagctatataaggctcattccttctttttgtaaaacttaatcgagcaataataaagaacacactctgcttttgctctgttctctcctttctcataataagcaaatgaaaaaatgcaatagtattctctaaacatattaatattatataaataatatttattctttcaagtgtactttaacaatatacaaatattaatatgttatggtaagtaagctgattatattgcactaaaaattaattatatatgtgcatgagtttacaattggagaacccttgatcctttaccctgatacaattataatctctcaaaccagcttttatctttgtcacaaaatttctgtatattaagactatgtattctagccttcatttacaaactttacattttgaataaggttattaacagtttatatttccttttaattcccacaaaactttgtttcaagctcttcgagcattcagcacggttgaaatgaagggccccatttggaggataaaatcaaaaggaaattatattgtatacccactttactt

SEQ ID NO: 390410 - DNA, 1018 bp, Cannabis indica
acaaactttgaatatgacacaaatactttaaagctaatacttcgtattaaacccatttcttgcacaacccacatgagaaaaggggggaggaggagggaaatgaatggcaataacaatttgtctgatggatttgaactatagcttaaagttttctgcgtaatcaaacagggaataccttcaagagggaaatcctggaacgtggtggaagtgataccctggacgaactctctcaactcctcggtcactccgaacgtttcgagatcctcttcaagtgtacttgtacttgttcccaccggaggctccgtgaggtcttgcgccgaagatggggtgatcacagaggccaattgcttgatatcttcggctcgtttgagggcttcagagagaaactggtcggctcgcttggaggccgcggcggcaatctccttggagcgcttggcagtctcagaaacaacgtcgtagagctttgaagtgccgatggtcaacccctgggttcgttgagcggcgtctttggctagctcttgagagcgcttcgtggcttcttcggcaaagctttgggctttgtgccagatttccatggccagttggcagactgttttttttttttttctcaaactctttcttcttattctccagccaaatagtagattttaccctttactaaaaaaaaaaaaaaaaaaaaaagtaagattttacaccatacttatgattttgtctgtttttttattaattagttacatgggtcaatcataccagtaaaaaaaaaatatcaatcgtaccagtaaaaaatcatagataatggacaacgtaaacaattggggatattaacctaaataaacttctttcaaaattacttttgctaaatagtattatattaagtattatattatgaattcgaaaggaaataaatgaataaaaaataaatagtatttaatttagagagatttgaataataaatttaaattaaagttttatgtccagtaaaaatatattgaaaacaataataataaggttataatat

SEQ ID NO: 390411 - DNA, 989 bp, Cannabis indica
tttcattctactatacatttacacattcctaagcagcaatagatatttatccatttttttcataggctaaccaattataacactaattaactccatagtatatacacactagtcaagcatattaactccatagtatatagtcaatttttttttttccttttcttactttttcccggaaacgagaaaaaaaaaaaatcaaaatcaatgaaagagacagaagaataaagaaaggaatgagaagtacagattgctgagtatcccaggcgagccaaacagtagagaaatgtccccaaccaagcttactctgaacgacatatcgaccactcttaaaggcgtcgccgactcgaacggcgtggtagccaccgcggcggtagtcctcggttccttcgtcatccgatgtgtaatcgctactctccgttcgatcaacatcatcacgcttcccctccatcttcccccaaattctagggttttggagctttgattttgtggttatggaaaaagagattaagagataaataatttttgaataaataaataaataaaaagggtggaatgtgaggaaagatgagtaaagaaagaagtttcttttcttcttcttaaatttcgcagcttttttgtcttagcaaagtggggagttattaggtacaactggactagcgagagactgctttggaatggattggatcaaatcaaatcacatggtccagtgaagtgtccttctcatcttcacatatcaatttctattctttctttttttttttaattttttgggcttaactaattttgtgtttatttatttgagaaagtagactttatttattttggtattaatttaatttttttttatgattattgtgttgttgactggtgtattaaaattcctaataatttataatgtaaaatatctttatctttatatattaaaagtgtctatttaacggtattttttggtttaacagaatatataaatattctattaaatttaacga

SEQ ID NO: 390412 - DNA, 1319 bp, Cannabis indica
ttattaattttgttaaattgtaatatgtattatgtaattgcaaagtattgataatgatcataaaaaaagagttctaaatccttgagaaatgataattataaattgtgtaattttcctctccatattatcattcttaaattgtaaaaaatattattaattatttatgaatgtgagtgaataatagctattgaaaatatagttgttgaagatttgatttatttatttataaagtgtataaatggttcaaaatcaagtaagagtagtttggaacaccttagataagaattgaccaaagttgaaaaatggtaattagtaactagtaaatgtttttttttagcatatatttgcatgctttttgaacgtttggagggcttttctaacacctcaaaactcttccaaatcacccaattaatactataaataccaaatttatggttgataacatccaataattgtatggtggtcatttatatttatataggagtgaaaaatctataaataaagatcatattattgacttgtgatacacttttttttaagcattactctctaattatttatgtgcttgaaaatgttcaaaaaaaaaaaaaattagaaaacactaatcttaatttatttattgttctataatttaaatatttctatacatgccttttgctatatctatgacaacctcaatttagacttagtttaagcaatcaaatcataattcacaaacaagagaacaaaacaatgctgagagaaaaaaaaattgtagaaattaaagaaaaaaaataaagtagagaggtttgaactttcctctataatttgtagagaacttattcctctttaaactccttccaaagaatccttatttcaactataatgatagttgtgttttccaaaaaaaaaaaaattaataatgataattgtgttttcaacaacaaaaaaaaaattataatgataattgtgttacaatattcagatcaagacacttgaacttttacattaatgacgattaattttccttaagcaatatccgaatgacaatgaacactttgaaaacacccttaaagacctccttgcttccctttagtttctcaattcttctctcttcattcctaattttcttgctacaatttacattcaaatctcatcatactcgaaattcaaatttatttattacttaatagaatatctctaaaaatagctctttcgtgtgttcactcaactttctttctcaaactattttcggttgcattacaaaagaacaaagcatccttttatatagcctcaatcttaggcataggcgggttaggcctgtgcctaaggcccaccta

SEQ ID NO: 390413 - DNA, 2019 bp, Cannabis indica
atttttttttttcattttactcttctaattatctaattttatatttttagtattaataattcactaataacactaaaaacaaagtttgagttttagggaaacttctaataataaaaattgcgcctaatagccttgtcgctcctaataattcgcacctaaaaatgttattaggggtgacaatttttgtcaaatttgttgcccttaaaagtaatagtcaaattttaacttatacattaatttaaggatgacaaaagttgcccctaaagtaattgtcaaataaaaattttgacttttaaggcgacaatatcacctctaaaagtcgcccctaatgtaattaatatttgttaacgataaaaactcgtcaactaatctagtagctggaaaatgcaaagtaacccagagttaaatgacgataaagataaaaatgaagatgaaatgatgtctgaaaattattttctctctattgcattcaaggcctgagttacaccaagtaattttccaaccccctctcatatatctgagatggtggtatttgtaggctctaatggcttggtgtaaaaagtggtcccatgggacaaaacttcgctttctcgctgcatgctgcaggtgctggaggtagtttggtacctcatacccttgtctggtgtcaagttgtccccaattgcaggagagtgatcctcggttgtaggcatgtggtccccgattgtaggggagtggtccctgattgcaggttgcaggagagtagttgtagagtgtggtccccgattacaggttacaagagagtggttacagtgtatccttggttgggtcctcaaaactcataggtccgtacgttatcgccgctacccgtatttccttgctctcagagttcttagaagacgtagttgtacgctttctccttgcatgtgttatatatgtgtgttcacctctctccttatatttataattcccaaaatacatttacacaacacacacacaacgactcgcatgcgagacctcccatgggctcgcatgcgacaccccctatgggctcgcatgcgacaccccccatgggcttcttgcgagcctccaacagtcaacacacacacacagatcacccccccccccttactacacacacggctcccatgtgaacccccacacacatacacacactacacgctagcccccacaccactacatgttaccccccccctcccctacacacacggcttgcatgagagccctccatgggcttagactacacacgcatgctccaaactcggtttgccttggagcctccacgtgggctcacacgcaggtcttccactcatgcacacatgcatctttgtaggattcacgtgattagttttgtgattgtacgaacgtatccgatatccaaaaatactcttctttgagaaacatgcatcaggtcagtaggttgactgagtgcactctcacttgtctctctgctcttaggtgaataatcctgatgattagaagcgaattcttgctattaatacttgcctccaatctactagaattcttttaagtattttggtagactgaaagaattatggagtttgtcctattgcaaggtaattattatctccatcgtgtttatcaaggatgagcctactatatatagagggctccccttgtttgagttctcacttcacatcaacaccttaacgttgtggcaagcttctttctctttgtccaagtggtcttgagtttgattcctctcaagtcacttcttatactttttatttctattattttggcatatatatcttccttcatttttgtgttgaagttataatgtgattggatatcttttacccttgacattggggtgatgctcaactgttttcactttggtcttagcaaacgtctcccctaatgttaaatgtcaaaatattacatattttatagtgtaaaaatacaaaataaaattaattcgttataatattttcaagaaattaatgcaatatattattatgttaaaaatattttttttagatttaattttatctttgt

SEQ ID NO: 390414 - DNA, 1085 bp, Cannabis indica
ttaaaactttaattgatgttattctagtgattggtgaaaaggtgttacagaaatctacattctctctttgtctataacccttggctactaaacgaaccttgtatttgtcaacagttccatcaggtttcaatttctttttcaaaatccacttacaacctatagccttgtagctaggtggtaagtttacaatgtgccaagttttgttggtcacaagagtgtctatctcatcatctatggcatgtggccacttctctacatctaaagaagacaatttcttggaggttaccaggatcctcctctaaggtataaacatagaaatcataaccaaagtctttcgtcactctattacttattctaggtccagtctctacatcctcagcatgttcattactcctaatcactagaatattgctagtttatgcgccccactatttcacaatataaatggaaatctatcttcaaaaaaatcagcgtcattagattccactatcacatgcgcattaagatcatagaacctataggattagcaattaataacacaccctaaaaatacgcattcataggctctaattgctagcttaattctcttaagataaggaatacgaacataagctaaacaaccccaagttctgaaataggaaatgtttggttgtttatttttcaaaatctcataaggagaaattttgcctttcgatttcggtaccctattcagcacatagcatacagttaaaagaatttttccccaccaatgagaagcagcacatgaattaagtaaaatagcaaaaatagattcggtaaaagttctattctttctttcaactttacaattcattttaagtgaatacagtgcaaccttatcatgtataatttcacgtgagttataaaaatcaacaaaagtggaatcatattcagtgtctctatcactacgtagcttcttgatcttgttactaagttgattctcaatttcatccataaataacataaagatatcaagatcttcactgttatttttttattaaatgcgcataggcaaaattagaacaatcatcaataaaagtgataaagtaactgttggaaattatttt

SEQ ID NO: 390415 - DNA, 1515 bp, Cannabis indica
taaacttttaaaataataagaataatattgatttgtttaatgtccttctagatgatgttgtttagttagactaaacaaagtgtagtcattattattaatctaatcaaatccaaaaatacttctaaattaatttaataatttcatgactgaagtaataacatatattctaaatacaatataactttcgtatattattaacaaaatatacaaaagttaacatatgccacgagactacctgagcaaggtaatttgggtgtttatggttagactgaacttttctgatgctttttgcggcgaagcagttgcggtttgcttggcgcttgaggtggcaaaggacaaaggacatcagtttatcctggtagaaagcaattcaaagatagtgatcaacactttcaacgatgtggaacccgatgggaaattgaaaactactatttattttgtaaaagaatcgttccttccttcattaccggtttattttatgagaatactcgtctgctgggttctcttatccagaaaaccgacgaccaccaagaaagacccaatattattataaatcaacagtcatttacaataatagagaaaataggataaggtatttctcttatccaagatacatcttcatccaactctagagcgtacttagccaagccatgggcagctttgttagcttgcctacgagcatgatttatagcaactctagggaaagaggataaaagacaacgtatatcatcaattagatcattaaaacatgataaatctttatgagatgagttcagagcagaggaaactcttagcgcatctgtttccacaatatcaattgaaaacggacattgtgaagcccaatttagactatgaaaaagcgccttagcttccatttcatcgctacgaaagcagccttgtacacgtttggagagagcagcaagaacatctcctctatagtttcgaatcacagcacctatgccgagtgtttgttggctgaaattagctgcagcatcaacattcattttaagcatatgcacagctggaggagtccatgtgatattatccaagcttcgtggaagtgtgttacttgcagctgcatccaaattattctgttggttccttgttgtagcagcaggttgctggtgcaaggttgaagaagatcgaaccaaaccagtgtgacaagtggatcgggtaggatggtgtggtgctgttggaggtggcaatgctgaagtgttaacagtagtgttgtgttgcctgttcagctgttcatttgcgattccagcctgttgaaaactcgcttggtgagctactggttgctgcaatttattgcagagagcatccttagcacatctgtattttttctatgtagcttaatgtgaatgatgcaattgtaactggatctctctctttgccaccatgaaggactttgttcctatcattccaaatgccccacatgacacatatgagtgcttcaacatcctttttttccatgttgctgccaaatgaattagatagtctccattaaaacattcc

SEQ ID NO: 390416 - DNA, 432 bp, Cannabis indica
cacttttataactctaatatggattataaaaaccaacatgttgtacagtttactaatacgcccgtaaaattagcaaggttgcctgcctgtagcgattatcaatcgctgcttgttgggcactcatgatatcaatcggttgattcatctactcatgcaattggcattttattgtttggacgatacattcacagcagctcaggtatcctcctgatcatggtgaagatttttggtatgttcttgcatttgtcgtaaggcatctcacaggttttgcactcagtaacatcaccaatcaccactcgaggttctccaataaatgaatctccattactgtaacatcgtacctagcataggcgtattacgtgatttttaaacatattgtgcagctcgttgctaatcaacgaggtttatggaaatcgtgattaattaaaattt

SEQ ID NO: 390417 - DNA, 794 bp, Cannabis indica
ttgttatttcaaagtttgttctataaataaggagcgacatgacaatgttagtctctctcgagagcttgtaaaaaaagctgatttggttgacaattttctatgcggttctttagtccaaacctaactactcctctcttgttttgatggctttccccttaccaaaatggcacaaattgtattatgattatacaagttattcagtttataaagatgtcattacctattttctaataataaatctgccacaacataataatgtacttaaaataaatcaataacagtactcatcaatttagcatagcatttacaaattttaacaaatttcaaataatttatcattttagtttcaaacagtttataatgcacctacaaaataattatatataccttaatttagatattatagattatctagaacttttttaattgttatagaaggttgacttctataaccataataaatacctccataaacacaaattgaggggagaaatattaaaaatggctttattaaattgtactccatcagaagtattattttttacccaatatagtaaatattttgtatgtaaaataaaataataaaaaattatattgcaattattatgattttgtagacccaagaatcagaagtaagaaatgatcaacaagctatatgatgatgcatggtataatagctacatggagaatatattatatatttttcatttattataggtagatttatgtactcatatgattatttgaaccacataatttaaaaaaaaaaaatcaaagatttccatttctaaaaa

SEQ ID NO: 390418 - DNA, 895 bp, Cannabis indica
gaattgcgtgagcaacggtaatattttgaattattcaaattgttggacggcacgtttatgtccccacgcactgttgaatattgaatgtgccaatgcccaatgatcatgaaaagaaatgatgaaatagaagtaccaagcagggacgaggggaccttactaaaataatactttttctattttttatagctaaattagagatttggtttttgttatataaaaaaaaatggagatttgattgtgtgttataaaaaagaatggtttatttgcagtccaaggtttttatattgaaggtagagagtagagagtagagactcgagaatcatatttgtctcctaaaaaatatattcggctgtttacttattaatttatgacaatattgattttttattttttaaaataagcatgaacatttattaatcaaataaaacagttagacctcgcagttattataaaatagattttccggtaaagaggagatcagaatagagtcatacagttggtaggaaaaggcccacttagccacattatgggcaacatagttacaagacctactaacattaaaaaagatacaacaaataaaagagggagatgactcgatacaaaatgaggcatagttctctagagcccaatgggacatcttcccattgagcgcattaataacttgtctcgagtcaatctctacaataacatacttataccctaaatccatagccagcgaaacagccaagcaacaggctgcaacttctccacataacgcatccgagaagtccaaccaagacgtgttaacccgaaccaccttgcccaaatgattcattgctacaacaacaatgcacatagtctctaagcccactcttacatcacaattcagtttaaatccaatcctgaggaggaggat

SEQ ID NO: 390419 - DNA, 1768 bp, Cannabis indica
agcttgcttcaggaaagtcatctatgcaaagataagcactaagataagtataaatccatattatgtaatattccaagtatactcgatgtcttacccgatgttggtcgtgaggtttgtttggatagacgcttgtctattctctccttttgtttctcagagggctccttgtacactggttctcgatgaaggctgacgtcctcggggattagcttatgttctcgcagctttatagttgtgcacaacaatcgccaatcgcgatcttgaacgggtaggctaccaagaccttcagcaacttctttgcgagtgggatccagaacaggtcgagttggtctatctgcgatcaatgagaaataagcattaacgacttcataaggtaacacaaatataaactaagtgtttagatatgcgacgtactaggtcgacagttgaaatctgtcctaacccctggtactttgaatacataaaaccacttagatttccaatcccccatattggaaaccatgccccattgatttcagaagtggcccacttactgaagcagtagaaaccattgtcgtgacccacactttttatatcataaaaataacagaaatcctccattgagggctccctctgagtatattccatatacatcgcataaaaccctaaagctatgtgatactattaggggttaattggaaggaagagacgtcattgcgtctgaggatagcttttatgaaagggtgaaagggtatcaaaaccccacatcgaagaatgggaactgaaataaccacatcctctctagggataatcgcaggattggtgaaaggaagatgaggccttttggatgcccgaggatgcatggttgcaagtcgcaacaaattcaacctcgtgaatgtatggaggtctgatttggtaactcgcgagaccaggtcctcacatgaaaaaggtttgttcagctgggtgttgtcaatcgaatctgtctcgcttccctcggcattctcttcttcccctaactcgcgatcaggaacctcccaatcttcccccatctcctcgacttcgatgtcaggggcatgccccgaatgggtaagattctctcaggcggacaccgtggattcactatcgcgaatctcgattgtcccaggttcggcgagttcctgcaccatcctctctatccgtcagaagatagtggacccaaacccgcagcttttgcaataggaacttcctcctcagagatcgaggttggtatgaagctgtcgctcttattctgtttgtcaatgaaagccccacctcttaagttgagcatctgactactgataagtcgctcatctgaaagatagaagatcttttcagtgtggtgcaagtgcgagaataacataagtgacctcacccgtataaaagaaatttagaaaatatggaggtctaacccttccaaggtggaagtctcaaaaaatggctgggagttttccagtgacccaagaggcgtgcatttctaagcatgaccatagagtcactgggacatactcacccttttgagaaaatttggtcaatcaaaacatgcgactaagaaagcaagaaaagcgaaaattggctgcatgtcccgaatggctgggtgtatcacagtaacccacggagtatgcatacgctcgcataaacattgggatacggtgacacacccaccattcgaaggactcaaccaatattcgcaacaaaaacatatgataatctacaacaagagtttacttgcatttggagaaatgctatgctctttccagaacattggttaaag

SEQ ID NO: 390420 - DNA, 1812 bp, Cannabis indica
cgtcctttccatcataccaagttttaacacaccaatcaaaaatttaattaaattatatatatatatatatccatattttttgtatgaatttttttatttttacattttaattttttattttttttttactttttattaaaaattcacataaaaactaacgtagcaacctaaattgcaacccaaaaccacataacaacccacagagcaatattcacctgagcactaaccataaaaatgaaaaaaaaaaatgatatattgagtgatttcccttttttatattaaatatggttatataacatgcataaatatttttttttaaaaaaaaaaaataattacaacttaaatttaaactcattacatttatctctcttatgttttatcttatattaaatgtgactacacaacctaacatgtttttttaacactgtaaatatctatattatattaaatgtgattatagaacataaagtatttgtttttcttaaaaaacattacaattcaaatttaaattcactacacatatctctcgtatttttttgatgaatcagtatattcattgctctaatatctcatttgtacatcttaaaagcacttcaaagaaagccttaagtttatctatacaataatatttacaaaatctgaaaccaatctctatcatgttgtttaactttttttggcattacaaacattattctatttttaactacccactttagctactgcacaaactcagagacctgcttctagccgaattccaaaagcatgtcattcctagctctccaaatcatgtagacaagagctgcaattgcagctgccttaacactcttctggaattcagattactttgctttccttatccattttagtagcccctgcaatgaattagcagtagtgtgccaatttagcaaagatttcagttgtttaagacatttgtaggaagtctcacaactgaaaaacaaatggtcaactgattcatctccattgctgcaaaaaatgcaaggagagtcgaccaccgattaaggctcaaatttatacattttaaatctttaattatgcatataaaattaatataaattaaatattttaatgataaatttatttttattagaaatatttaatttactttaaatttatattatttctcagaaaaagtggtaaaaggaaaatacaaaaacccagtttcaaaaggcccatcaaggcaatgcaatctcatcttttagtcatcaacatggcctaaggcccataatttgctacacgtggccatggaaattcaaatgggctttattcaaataaatcaaattataagagcccaattttttagttgctgcaacaattatactgctgctactactacatgtaactagccgatcctattacttgacggaagcagcaagagatgctacgtggctgcttgttcccttgacctctcttacgcatgccccactccagttgagagtctccctcaacgccacctctgaaagcttgtccctctttcccactccgcctgacgcaaatggacattttgtcccccacttttctcagctttttgtgccatttatcccactaaatggtacaccaaaataccatatttgaagagcaaatttacactataaatatgactcaaattcaatgtaaatgcatcagattttagaatagagaacactttctcatcttgttttctcttatttctattttattttacttatttgagtgacaaaaataagtgaactattttaaaaatattggtgaggttagagtatagcttttgtattccttatttctattattgatattgattcttttgtgcttcat

SEQ ID NO: 390421 - DNA, 1096 bp, Cannabis indica
aaaaatgttggccttcaatcaacgcgtaccaaattttgacatatcatgtatgtggtcataccgcaatgaagataactatataagacaatgaaatttttatctaatgagtgtaaagaaaatgattgagttattatcatctaatgaagtaagaatttgagtttaatttttattatttcttttctacctatacttaattataatttatatcttcaataattgaaaatgttactcttattgataaatttaattttctcgcatacatatggtacgtagcaaggtcaaatcaattctttatttttctctttatcgttttcttattttatttttactgcaatcaatattataatattgaaaagacgacagtgcattattaataataataataaaaaaaatgtatgccttagtcgggcccttttgtctgaatcctaacaatatagagattctacaaattgacactgatattcttttttctggtaaaatgactaatttatataacagactcaacataaactcaagtggaatagttgatataattttcataggattaagacttcctatcaatacacataattatacactcaaattacatgtattaatgatccttttagaaaaaataaaaatgttgttccatatattaatgataagcagtacttgtttaattttaccgaactaataaagtagctaatattttttttttctgaaacgagatattcttgtccttttatagaatttagtagtatacacacattcttgtaacaaaatgattatataataatagtaatatatattgataatttgagtagttatgcaaaactaaaggcagcaaaatcagaattgtatacgattacgtcgattgggaaaattgtatataaaaatataaaataattaatatattgtagtgggaagcatgttcatgagaatgactgatctacttttatgtgtctagatttatataaatatttatattccggattcttcaccatataatgtattgtcttatttactaataagaatataagtcatgaaaaatatcatatactatatatggagtgactgcagcgttatattttttctatatataaataataatattaat

SEQ ID NO: 390422 - DNA, 853 bp, Cannabis indica
tatatggttgagatttttaaagattttaattgtcattagtagtgtccaactgtttatgatcgagatctgtaaacactaaaaaaaattaaagttatcacttgtctataaagagtagagctcagctgtataagtcgagatttgtaaacattaaacaaaagtttagtaaattgttcaattgttattagcccggctatatgtggtcgagatttgtaaacactaagcgaaattcaagttattgtttgtctgtaaagtaaagctcaactatataggtcgagatttgtaaatattgaacaaaatattagtaaagaactaaacacaaattactaagggtcctattgttgacaaaaatatctactgtcatcttccttctgtagaatgtcattctatcatctggtaggctttcaaagctaagaccagccatgtcgaactcaatgaacttaattgtatagaccgcacaagctcccttgttatgagaaatttttaaaattaataatgcatatatatttgcaataaatatcgactaagaaagcatgtatgaatagacttgtaaatatacttacgttgaattttatggaacatcaggtaattgtttatatgtccatggattgtgaaggcattgtgctatcccttgaaataggtaattgttttaattttttctttaagtcgtcaatggtgatgcatgaaggtcttttacgaaagtgtttatctttgaatgattttgactcagcttgagattcccaccctttagggtactttgagtatttcagtccaaatattaatgcatactctatcaatgagaatatgattggtatcccattcacaacaaaccacatctctgaatctctgtaacaat

SEQ ID NO: 390423 - DNA, 1262 bp, Cannabis indica
acctgaattgtttatatatgtgcagcctacatattcccaagtatgaaagcgaatagaataataagtctgtctttgtcatagcacagatggaaaatgaaagtttgcaaacctcaacaaaggtgacgatgcttttaaatttctcatcattttttgtttcgttgagtttgttttagctcagctcgacggtccaattcatattgtcctttacaagacccatctgtaatctggtaagcaccgagtagagttgctgcgacacagcaccaacacctcccttgttgtagagcaccctgaacgaacaaaccaaacaaaaattacaaatttgaaatgagttgtaacttgattgacttcatgtgaagtgggagataatcctttcttgtatgtctgcatttttcggcactatggactataaatctttattttgaactgaagataatcaagtcaacaagttggaaatcgcatgcgtacaggtattggattagggtggttaagaactactttttatcttctaatgaaatttctctcgtggtatttatgttgacaaaacactcattctaaagcatttacctttcaccgcgataagtaatacttcccacaggagatacaacaacagctgttcccgtacagaatacttcgtccgcatcgagtaactcatcaacagtcacaagacgctcctcaacctgcattttatttaatgaacattggacactgaaatgaatcaaaacttgcaaaccacacacatttggatcaagacaaactcatactgagaaattaagtaaagcaaactaacagtgatccatgtcgggagatgcaaataagatattggcagcaaaatcaaaaggtaaaaaattaggtgatagttaaattatatgtattgtaaactcagcaggtacataaaataaacatttgaaaaaggatctggcatgtgtaaacttacaaagtagaaaagaatttattttgaaattaagtttctcgattgacccaacaataatttatttatttgaggaatagaaaacaacagcaattgttctcatttttatctgagaaaaaaaaagcttattttattacttcgaaaagaaagaatacctgaaatccttggctacgagcaacatcaatgatactctttcgagtaataccaggtaagatcgtccctttaatttcgggagtagagataactttaccctgaggaacagatcagaaatgagattataatcgggaatccctaactatgagaaagggcaaagtgataaatatttccatatata

SEQ ID NO: 390424 - DNA, 1702 bp, Cannabis indica
gttatcaattgaattaatcttaaaataataaacaaaaagtattaaatgagatattgactgcaaaactacttaagttttatcattacaaacatttaaccatataaattgatttttaggtggtaaaattctctaaatcttacttttgttagctatttacccactctgttcaaaatgctcagttaagtgtcacgatgtacatgtcatagtgtacaaaagtgtacacaggaaaaatttttagttagagatattagtggcaaaactatctaaactcaattaattattagtgacacttaaccagataaactgatttttggttgtaaaaccctccaaatctcacttttgttagctatatttatcccttctgtctaaaaaattctgttaagtgtcatagtagacatgcatttgtgtacacaagtgtacacgtggaatatttttggtccacataattttaattgattaaatattttaaaaataacaaaaatatatatttttttttcttttttcttcttctcttttaagtttttctcctgataaccctaatttccacctgcactccctctctctttcgttctccttcatgcacaacttcagcaagtcacctccgccaccttcaacccaaacgaaccccaaaactagcttctagaccttacaaacccaacccttcaacctccctctaagccccgagaccccacccttctttaaagtttctctttcttacctcggcctcgctactgtcccgtaactcttcgccgacaccaccacatttggagtggtttgcaggttcatccctgggctttccatggtctagtaagttgctttaaaatttaagcaatgacttctgttttaaagacaaaagggtgaaacatcactaggcgagtgacagacttcaaacagtcctttttttttctgagtaagagggttaaagtcgtatcaaacccctagtgatctttctcgcacgaaaaaatgacgtgcatgccagattcatgttgaattttatgtggaaaacttcagcttccgtgaggaaaggctaaatgtgaactaaaattcaagcgatgacttcactttaaaataagaaagggtgaaatataattgggtgtgtgataaacatccagcagtacttttcttctgagaatgagggttgaaaacgtatcgaacccccagtgatctttctcgcactaaaatttacgtgcatgtgagagtcattttgaactttatgggggagacatcgacttccgcgaggaaatgctaaagttgaatttaaattcaagcgataacttcgctttaaatgaccaaagagtgaaacttcacacggcatgtgacagactttaagcagtccttcttttctaagaaggagggttgaagacgtatcgaacccccaatgatctttcatgcacgatgaaactttgtgcacgcaagagtcatgttcaattttaggtggcaaacttcaacttccacgcggaaaggctaatgttgcacaaaaattcaagagatgacttcactttaaaagaccaaatggtgaaacttcactaggcgtctgatagactacaagcagtccttttctttaagaatgatggtcgaagaggtatcgaaccccaagtgatctttctcgcacggaaaaattacgtgcatgcaagaatcatgtttaattttagggaaattctagtaaatggccccatatcataggactatgttagtttatgtc

SEQ ID NO: 390425 - DNA, 1594 bp, Cannabis indica
aattagttttaattaatcaataagattcaaagtaaaactatgtcttttttatgaattttactaaggaagggtatttttgagaaaaaaaatagaatttagagtttgtttgttaattaagagaccttgaagggtttaattaataaatatatttaaatggtagttttttttataatttattttaattattaaatagataaagttatcatttaaataattagaatagataaataacattattgaagaaaggaaagatagttttattatgaaaacaaaataataaaaaaaaaataaaactcattaaccttattgagggttcgactatgaggttaatttaaacgtcattattgtcttttatttagcccatttgattgtaaatataaccctagactcagtctataaatataacaatatagcttttgtcagacaatattatatatacatatgatatattagtatattatctttgtcaaacaaaaattatattttatattatatagatctcgaaaattatatttgaattcgtgtcccaaagtgctgaattattacccactcatatcaaggcaatactcaacatagtgtgaaagattatatagtctttcacatcttgaaggagaatgccggtttagttcctaccaactctgtaacagaatggaacaggtgtcgtagaaagatacaacggtaattttataatagatttaccaatatcaatagcggtcccagtctaatgtatactctatacatctgataccagcatactttgccaatgtcttggaaagaacataacacttatccaaggtataagtaaactttatcgctgactaccacatcagtgtaaatctagtgcactgatgaatcatgggacataagcttttgaagcatataatcacaattacctttcgctgtgttgacatcactataattgtgaattactatataatttggattaaacataattgtatattaaaccataaacaagaataatacatgtaagttaaatgacttctattcttttattgataacaaataagactatattgaaatgagtttcatttaggacataaaatcccaacactctctttgggttctatcttgagccaactgataaccttctagaccggtttatttgaacccttctagcatggtcttcgttatcttgttcttctggcgccacaatagcttccagctacacattgtcttacagttccacactatctttagtatgtgaaccttcttctatgagcttttggtactccatttgcatacttgcagtgtctttgtttcctatttttcttgcatcacacaaggacacactacctttctttgaggtcaagtgcggatattccaactcattaaaaataaatttatagcaatcacaacgtttggtttacccttattagaaatgtagattttataccccttggttcctaaggcatgacctaagaaacttcatgaatctaggttccagcttgttaatggattggtgtacatatgttatacacctaaatattcttatatgcgttaggttggggattctgctataccacatttcataagttgttttttttaagtctatcactctgtttgggcttctatt

SEQ ID NO: 390426 - DNA, 664 bp, Cannabis indica
gacttataaataatttaatccatgtgctttttcttgataaataaatgcatatgatactcatcaaatattgacaatatttaatgaacccaaaagaggcaacctgtctcgagaccgtgccagaattgtgttgtggattgctttcaagtcttttgcctactctaatcccttaattgggaaaacagaagcttgtgtgctatggaggcacaattttattattattgagagcaattctaaaattgttatcaaagttttgattgggaatttatttaattagcctattaataattttattcttaattgtaatagattattgcctagttttttgggttgtaattttaattttatcttgagactatgtattaggtggattttttctaagaatcttatagatatggttaatgtctcaactattcctgaaaatattatctataatgattataaggtttaattttttttgtttaatgaatatcttttttttttaaaaaaaaagtgatataaaatatatatgttaaatttttattttaaatgccatctttttcatgtaaactatgtaaatacccgagtacatattctacataatctatatatctatctatctatctatctatttctattttatataaagtgtatctatataattggaattcttgatttatgagaaatt

SEQ ID NO: 390427 - DNA, 500 bp, Cannabis indica
agaagggtaactgtcaaaagcatacgaatagttggcgtgtctcgaggtacgatttaattagagcattaattagtcaaaaattgaagggactcttggttagaattacatcggatcaccaacaggcatatcgaacacgtgcctcccgttcagatacggaattgagatgagtaaagtctacacgcgactttggaattcccgtgtagacttgggggcaaatgtttcccattttttgcactatgacgtggcaacacatactggtgacacgtggctcctattttctacatatggatgaagagatattccgaacagagctcagtatacatctgcacaaatagagtctgcctggacgagcagggcaagggtagacaatcctaacaatgtatcaagacttagtagttttaagacttacatcatgaagcaaaaaatcaatcctataatctagggatcgtatcaaagggttatgacaagctgtccgaatccctcaatctatgtattctaaa

SEQ ID NO: 390428 - DNA, 821 bp, Cannabis indica
taattttagtttcaattttatcatctaaacccaacttgcagacacacttttaaccaagttagataagacatgggtcttttgttagctaggcctgaatattcatcacctttgatatcatgactatcattatagttgttataacatgcattatcattgtttttattatcctaaaaactgtaatttatatatatatttaacatatgcaaaggatttttattttatttttatagataaaatctgaattccaagaatttttctttttaaggaaaacaaataaaggagtcttgatcatcaacaatcattggctatacctaattgtagcaagcaacacagaaaaaattctgttgaaaatcagtcctaactaaaaccaccattaaatgacatggcagacttagatcaatacgacaacacttcaacattgacttggacagttagttaaattagtttgttaaccaatttgaaaaggcttatcgacttgtgatattaagttattagttagattacttggtttgagagagggaaatctgagaattttgaggaaccaaatcgagaagctaagggaagaagaagatcattcttcaaggtgcttccaagggtattcatttctggctttaagactcattccaaggggacttaaacaccatcttaattctcatattttgtaatttttaccattgacatagtttagggaattcttaagggagtcttgtaagagtactgaatttttacagtactcgagcttgagcaagataacaatggatgagagagagagagagagagagagagagagagagaagtagggtttgaaaaatgagaggggt

SEQ ID NO: 390429 - DNA, 717 bp, Cannabis indica
tgtaatattcaattcaaataatccctatgttatttgtgtgatataattatgcacatatttatttaattaaataagtatgatggtttatataattatgtaggaatatatttcttttttttgtgtaagcttaatgataaaataaatatgtatatatatttataattgtacgagtagatatgcatgtccatagttaagttttaatttattaaagatttaatcttctattttatataggaatcaatttaaaagaaaaaggctatagtggtgataatatatgtatagagagtggaagagagagccacgtaataatgtgaaattgagtttaggtatttgacttagtttgattttaaattatgaggaatggatattagtaataaaggaatattttattcttaattttaggttagataacagattgaattacatgaagagtgatatttttattagccacatatttctttatacggttattttaaagaggttcatctagatcggttacgaaacctaaacctaaaaatcaacttcagagtcatcttcaaccttagccacttgaatctctgctacacttacaatactcagccaagctcgtagtcgatcagtaccctcccgtgcctcttagtccaagcatcttgaattatttgaggtatgaaacaatttctttgtctaataatgttaaaagttggctaaggattcgtagctattcatgattctcgtttt

SEQ ID NO: 390430 - DNA, 1046 bp, Cannabis indica
aaataacatttgactttttaatatgaaacattttattggtacagctataggtcttcttcatttttttttttatggagattactgaaaaaaaaaatggaaataaataacaaacacattaaatggataataaaaagtaagttttttttttttattattttttatatttttaaaataatttttttatattctttacgaaaattttatatagaaactcacttaacaactaacataataatttaaattacaactgaaatcaacatagcaacttatatacgaaataattataggtgcaacttaaattataaattaaaaaaaatatatatatgaagtaaaaatgaaaagattaaaaaagatttttcacaaaatatatacactcaaaaatagtattttttttgttaaaataaaaaaaaaacagtatttctcttttcctctttcaactttttattttattttatttttgtattttttttatattggtttctcaaaatttaattcatatttcgttttctactttggtacgaacgaacaagacacaatacttggcttctacgcaactttattttctataagagagcatctatttatatattcatatagaagattgcattagattttttcaagcttatactgatttacttatatttatataatcttaattaggacgacttctcacaggtcaagattcttcattctcttattttatttattattattattttccttttaaagtcaggaaggttgtccttctattgtttattttgttgattttctatcgtgaacgaatagatgataaacatttaatatgtaacactgaatgtatatatacatatttaatgtagtaatcgcgctactacattactatataacataacataacataaatatcattttacataactaaactatattagcacaacgaggacgaccccatgtatacatgtagtgtatatgttacatattaaatttacaaaccatattaaatttacaaaccgtccaactcgaataaacctttaaaactaaaccgaataaatcgataaaaaatacaa

SEQ ID NO: 390431 - DNA, 1117 bp, Cannabis indica
taccgttgttgtgacgtagggccgaggtcatcaggtattttctccactcgggttggccgaatgcataaatctagattaaatgtaagaaaaatatatttgtaccacataacatgccaagtacgattacgatcatttgtgaattaaatagttatgaaaataacaagacggtcattactgttatgaaagcaagtgacagttattatcgttatgaaagcaatgtgacgattattaccgttataaaagcaaggtgatagtcattaccgttatgaaagtaatgtgataattattattgttataaaagtgagaaagtggtcatgactgccatgaaagaaagtcatgactataaactagaactgttgttaggttctaggggtgttcacgatgcagatagtgcgagttgtgacattttttcaaaccaatttgcatatgtagtttttataatttctcacactgcaaccgcaaaatcttaaaattgcaaaaccacaccacgaaaatgcagtatagtgtggtgcgatttgagtagtttacactatcattattatcaaatattataatgaaaattcaaaaatcaatctcataatgctttaacaacaacaaaaaaaaatatatattaataaaattttaacatcgaaatatatatactaatcattaagttattatattaaattgtccctaaaaaataatgtaatatacacatattatatatatatatttgttttttatagaaaaaaaatcatattgtaaaaatcgatagctttgtaatatatagtatagtgcgattagaaccgtgattattaaatttaaaattgcaaaatacaccgtaccacgtgattttcggcaaaaatacaaattacaaccgtgcaaaaaatttcaaattgtatttttatgtggtgtggtgtgagtgatttgtgcagtttgatgaacactgcacacccaatagcacacttgttccatttatttttgtaagggtaaataaaggcataagtacctaaagttttataattgtaagcggcataaactcaatgtttatttttaacggtcataagtacccaatgtttgcaaaaatgtaatttttctttaattttgttcagtacagattctgatattgtcttaaaca

SEQ ID NO: 390432 - DNA, 1609 bp, Cannabis indica
aacttttcaaatcgatattgttaattccattagttttaaatcatgtccttattttaatagtttccttattcattcacaaatcttgtttctcataaatcttgtttctaaagtgtccttatttgtttcacaaatcttgtttctataattttcttatttgatttagaaatcttgttttaattgcattccaaaatcaaatctagagtaaaaaaatcttgtttaatttgtttccttatttttgctgtgtaatctgagactgttatattgccacaaattagttggcttgtcttctcttaaaaaaagagagagtttgaaaaccctcttaaaaaatttgttctattgtcgtttcttatagtctagaggcctatttgtcaaaacaccacacaaatattccaatagtcgtcattttgtctgtgttcattttgtttgtttgattggattcactgcttgaattccctatatattactatttgattagttttaaaagagcttaaagaagaatatgagtggaaaaaggctagaggtgttagattattttagggtaaaagccatcacagttgagtgaaacacgagtggacttgagagacattttttggagtgaaaaaatgtgagggagtggtggtgaggactttcttctataactactttcatcttcttttgttatagatttcaatcatatcacatcatacagaaaaaaatacaagcaatgaaactccaccacctacgggtcaaaatttacagattcaagccttaatgtgggagacgaggaggttgttgaggaggagtgtgaacaaatacatgtgagattggatagggtagaatagggcacccaataaaggcctaggaggaatagggggtaccaaagggacgaagagaatggaatggattttgaagcagtaatttctgatgaagagtttgataggaagtcggcaggtaaccctaggaggtatggtcggaatagagaagctaggaaccaggtagataattctttaggaaatatcaagatgaaaattccagcatttcagggaaagggtgatcctaagtatattgagtgggagaagaagatggaattggttttggattatcacaactattggaaaatgaagaaggtaaaacttgctaccattaaatttactacctatgctattgtttggtgggataggttgtgcataaaaaggaggcagaatggggatcatactattgacacttgggaggctatgaagagggtgatgaggtggcattttgtaccacctcattattatcgagacatctaccttaagttgcaaggtcttcgccaaggttataagagtgttgatgagtataataagtgttgtcgagcaaatttcgacaacaccagttttgtgcgagtattcaagggctacttggataccaaaaatagatatgcgagtactcccttagaatagcgagtactcaaagaatatagtgtataatatacgcgagtattatgaatagtataaaatagacacagaaaaatatagtggttcagcaggagcttcgggcttggcctgcctaatccactgttgaaaagagtactctagctctgtttctttattcagatcagcccccctttgaatggagggggaagccccta

SEQ ID NO: 390433 - DNA, 2060 bp, Cannabis indica
caaaactatgggtgggtttgtagattcaagcttgtgttgtgcctaaaaaaaaagaactatcaaaagtaactctccattaaacttcttgttggtatatagttgatagtctataattacaaaataaagaaaaatatccaatcattcttaaaattagttgtattttcacctcttaatctaaatataagacatcaacccatatatcatctaatcatgattctttggactatagctaatcaagtattttaattggaggatataaaaatactcttactgtgttggaggtaaagaggagcagtccatcttcataatttctatctcttctctttgtttttctctcttttctcttcgtttttcagtctcttctcttcgtttatcaaattcaagcctctcttttgtaaggcggatgtattctttcctatattattccttctcatcatcttttttctttctcttttcatccatttcgttcaccaaatcaataacattagcaatggtatcattttgtctcttcttcttctttgcagcttttttctcaattggtctctgcaaattaacatctatagatggtcatatagtaccttcatctaagaactctgacatatgactatctacaactattgatcttctttaacttttcacattgctactctctaactaaagattcttttccaatttgggtggtttcgcaaaagactccaacaatcaaaaaagttgaatggagcggagtggttacttcgatagagctcttttgcttgctcaatttgaaaccaagtaaataaaatgttaaatacataataaaaagtctactatacaatgaaataaaatgatattgatcgtccaccttatcttggtcagaatatccacttggagaccttctttcgatttgagttaatgctccacaaaatttatttgtagcaagttgaattgcagaccatctattcctaatagagcatgcagtacattcagagaatgtggattttttgtttttctcataatattcatgaactctagcccaaaatctattttgattgatcaaccccattgattgggtccaaactagtattaagccaagcaaaaactagtaagttgtcctcttctggactaaaatttcattttctagatttagtttttttagcactcccttcttcttggtttggtagagtatgtcaggattctaagtcattcaaagatgggagatactcatgatagctttcttccccctcttgtaatagtgtagtgaaggaattagctccatagaattgcgaatccatccttcaaaatctataaagatacattcatacattgttgtcaagtttattttaccaatttctactataaattgaaaatttgtaataattattgactagacaaagacaaaaaaaaatactactttaacattgatgtgaagttatagtggttaattgactctatgcaacaaaacaaaaaagaggcagtagtatttaaaaaagattagaagacatcatcacaagttcttgaatgaagaaataaaattcataacctatttcatatatcaataaaagaatacgacccaaagagcatatatcacattaaaaaaattatgggaagaagtagttgtatagcactaaaatattcataaagttcataaaaaaattgttaaaaaccagaataaaaaataatacaatgcaatataacaactaaaggagcatataatagggtactagatgcaagcctgcaagaaaagcctctgccaatatttgagaacaataatcaatctattagtagagattgatttccttcctaaatccacctttcacagaaacaataaataagaactatacctgttaagagactttcacaaacacttggaaggaagaactacttttcttgctagccaacaataagattgatggcatcaaattagtataaattgaaactaagaaataacaaaatcaaagcaaaattccaaaaaaatacagtagaaaagaaaatctaaaaagtgaaacataaagtctaagaaaaaaaactaataggatattggctatatggccaaagacttccatccatgagtgaatagcttg

SEQ ID NO: 390434 - DNA, 436 bp, Cannabis indica
gtctaaattacatatttggtattctgtatttttaattatacttatttagtactttcatgttttaaaaatcatacataattagtactttaaaattctaaaaaaaagtatataaattttatcaatataattaaactatttttcaatttttataaatttttgaaattcaaatttaattatttgattacatataattaaaaattatttgttcaaattaataacattatattgattatattttattttatggtcctaaatatgtatattttaaaatataagatattaaacaagtattattgaaaatacaaaatatatttctcaaaaaaagttaaaatactgtgtattcccaaaaaattgtatgaattagatttaggaataattacataaggcacctattttttgtaaaatatttacatttttacgttcaaataatattttt

SEQ ID NO: 390435 - DNA, 626 bp, Cannabis indica
tttttttttcctggtgtttatattaggttttttttccatgtctttatgggtttgcctttttttgtacatttgttatgtgtgactatttttatagttgttttgtagttttttttcacagttttaaaactataattttttagacatttattaatgtttattcttgctcatgttctgctttagattcttcacaaattttctacttatgttctctgtggaatccacatatctaacatcaagaactaaatataataactaacttagaacttgatcttgaacgagctaaattgggctatatatttgtgatggggtttactcttttttattattattatttttatgcttttttatgttttttttttatgttttgttgtttttattaagttttgttttcatctatgtttatgtttatgttatttttttttctagttttgctatgtgtgactatttttttatggttgttttgtagttgttttacagttttgaaactttaactgtttacccattcatgattttatttttgctttcttatatgtaggactgggtttacaaattaagtcctcgagattcttacagatccaagtgtgtaactacatgcacttattttgttattctaaacataaagaaca

SEQ ID NO: 390436 - DNA, 522 bp, Cannabis indica
aaaggattgtgctcattttcgagttaagcttttcagctaataattctctctctctgtttctcttcctttttctctgagatttcttttttggtttctaccatttctagtttagcttgttaagcttctacaaatcaatccattggaatggcttggatagagaactatccattatttaattccgtcaaaaacatttattttttccacttgctaatatgtcacacggaaaatatatttgttgcctaatctccaatattacttttttactattcgaatgatatattaagttgattatcattactatatataatacacgaaaataaaattgaatataaattaaaatgtaaaaacaattattcctaatcagtaaagagtagacaccttgatttttgtttcgatcgatcagccggcgcccaattttattttatttaatttattttacctactctaattaaacccgattatttatgttttatacatattatatctttatatattaaaagtgcctatctaacggcatttctt

SEQ ID NO: 390437 - DNA, 1217 bp, Cannabis indica
ggaataatatatcaatcaataaacgtggctaaaatattatagaagatatttgattataattaatgagataacaatcaagaaaaattcctctaataattaataataacaaccttattagcccacatatattataaccaatctaatcattaaaaaaaaaactcacaaagcaccaaaatttcattatagttagatatataagtcatgttcgagtgagcttttggtttttacttctagaatcttcgaaagttgtttctgaaaaaattactcaaattaacttctgtttttttttttttaaagttaaaagttaaaactcatttattactcaaccagtaaaaaaatattttttttaaaactttaaaatgcctaaaaacaatttttgataatctaaccaaccaacaacgcaaaatatttatttacatttgtattagatcgtgacaaaaattatgttaaatacttttaaaaaagaaatactaaaatatacatttgtcatatagttattaattttttaaaaaagttcatcaatattataaggcacatcgttaaagaaaccactcaaataaaagacgcacgttacgataaataattaggcaaattcagccactaaacacgatgcaactcaagagagaaatatagttgtgtaactaaatgagcattaatattattaacccgcttacaatgagataatattaaaaaaaaagaatctcacacacaaaaaatatcatgaattataatactaaactcgtaaaaaacttattctttacaactcacacctttgtcatatcagtatatattactataattaagtatcaaatctcacataatcaaatataataattttttaataaatatcgctaatcaatcgaaaaacgatatctataattagtgttagaccaagttaaatggaacactaaaatgctaaatttattaaaattttacaccaaattcattccaaccacactctaaaatctatcctataataacattgtctatagtgtcacactaatattagtgtgacattatagactacacccaatatatttttattactttttaatatttaaataatatatttataagtaaactttttgtatttatactatttgtgtttatttataatataataattaaaaatataattttagtgtaatttttaatattgtgattgaaatagaaaaaaaagttagtgttaaaattttattatttttgtattaatttaa

SEQ ID NO: 390438 - DNA, 751 bp, Cannabis indica
gaaaatccagctgacatgctcactaataaagctctcccaacaacaaagttcaagcactgcttaactttgctacagatcacaatatgatttctatgctgaatactcatagttattggctacattaacagtctagctaggtggagaattgtaggtgttacactgttaatatagttaatcgtgggtcgaggctatccaagttatgacccgttatgtaatgtcattttatgactcttagttaaagttcctagtctataaataatgctaatagtcctatgttagcagtgacttgtatttattattacacaatcaataaaggaatcatattctctctaagttgtgttcttgtatgtatgtgacttaagatggcgtttgattgaaagtaataaaatggaatagagcgaaatagaattgaaataatttttattctatttcctttgtttaaatatcattcctttatttgaaataatttttaaagcattaaaatatcattatgagaagaattttaataattttttttattaattgtgttatgtactttaaatttaattttattctatttttattgatgttctcattctcatttatattgttctgtttcattcctttcaactaaacacaaattaaacatgttgttttgccattgatatacctggttcagaagattagtgtgtcacccaaccccataattactactagggccggccctaagcataggcaggctaggcccgtgcctagggcccacactttccgg

SEQ ID NO: 390439 - DNA, 1576 bp, Cannabis indica
gctatcgacatcgccatagcttgtaagttcttttttttttgttttttttttttttttcttttctacttatgtttttcgttttgttaagtcttaatctatatgggcattcgtttttatgagaaatttgttgtttttggttttgatttgcaggcgttcgagaagaatggtgtggaaaaggatgttgcagagcatataaagaaagaattcgataagaaacacggacccacttggcattgcatcgtcggtagaaattttggtaattctcttcaactctctttcattgatttttcttggttttctgtgatgggtcttgttcagatttagtatgtagtgatgatcaacttgttggaaagcccccttttgcttgttactttccatttggggttttcaagttatagggttgtgtgatcagaagtgtgtagatctaagcattgatcaattgtttttatgtctatccttttgtgtgagcattttcattaacttgacatgtttatccccataataaggtgggtctgtttctagagtatctaatggacatcatttattgtctttcttagattacataagcccttccttccctagctcattgaggctgtctatgtctaacaagagcatgctaggcatatatttaatacagcagtatggaaattgattaatgaaattcttaccatgttcctcatttggaagaatttaagtattaatgatcacactcgattagtggtttaccattgaatggctggaccaggaccacagggcagtttgattgatgttctatagactttactctagcacattcttgatcgcaatctcgatagcactgtctttcttttgttcctttggttcaaggtttactagaaaagtccgttcattaatgacataagatcagattcatctttttttacctaacatggtcttaagtaaagatactacctgcctataagcttttgttagttatggttcacatcaagcataatgaacgccatgggaagaggtcattcttggatcttttactctatgagtcaatctcttcaactcttcatttttgttttttttctcttatagattattttgtcagttctacaaatgaattagataagttgtatttttctacctttttagtatactcatggaaagtttataatattggaagagtaaattgatatgtgttcgctggttcaacacttcaattttatatttcattgggttgattactttttcgtgttataattcatctgctgcataaagtttgcgttcaaaatctcatccaacaattcatacccaatttttgtaattacaatcaattccttatgagtgcttatagtgttttgttatagtggtccttataattaagctcaagtaagggttattagcatatttgctctctagatttttcgatgtttggtaatgttcttgagattattattttggctaattaataattttttcccccgaactttgacatgtaccaaatcatgccccctgaacttttttggccgttaaaaattcccctgaactattgagattgttagatttaaggatttttgtctaattttagtaaaaaaattctaacatggat

SEQ ID NO: 390440 - DNA, 609 bp, Cannabis indica
gattactacaaatatttatcattatcgatgtagtttacaaaaggtaaatctctcaatgtttatttcttctaatagaaaatctgtgtaaatttattttgaaaaattgaattcatgtatgattttttatagttattagattttattcttctcattttatcttattaataaaaaaacaatagtaattaattatagtaagtatcacccatataaaaaaagataaataatcacgtcgtatttcctataatgtttcactaataataattgaaaaacaaagataattccttcaacacattaatttatatatttgtaagtaattattcatgaattgtatgtagttgtgtcttaagtcaccataggataagtagttagaaacaaaataatctaattcttgaagaattattagtgtgttttatatatgtagttgtctaccgcacacacaaaactatattaataatgatagaatcctaagtttgcttggatctaattttttatttttatttactttttaaataaagtattttaaaagttatcagtgtatgttaaaaattatttaaaataattgttactatattttgatccaataacaaataataaaagagaaattttaat

SEQ ID NO: 390441 - DNA, 579 bp, Cannabis indica
tgttaatgtcattatagattgtttcttaatcatttttcattggatgaaagtaaatatatatatatatatatatataatataaattcatatgttttaggttctttggctaataaccagaagccatagggatcacagatccacatatacgaccccatatggtttcgttagcaaataatcaaagccataggatctcttttgctttcggttttttttacccatattcctgaaacgctttcggttttttttacccatattcttgaaacgctttcggttgcgaattttattaaaaccaaagttaaagcaaataaactttttttgtaaatataaaatggtttcctaacttcaattaatggttgatcaatatttcttatacatttacatatatattattagacaatattgtcccacatggattaaatgtaaaaataccgaaccatatataagaacatgccctactccacttatcaccaattgattttgagagggaaatttgatcttctatacttacatatacataatattttatcatactcctctcaaatttcccatacttttttagtgcaaaaacattaaaaaaaa

SEQ ID NO: 390442 - DNA, 1250 bp, Cannabis indica
tttgccaattttttcaatagtacacactactcagtaaaatggccataaatcattcaatttttatccaaatgataaggttaaagtgaaagatgaaagctcttttcaagacggatctaagtgtgtctcacacccttgtcacgtttttttaagtttcggatgtcaaaattgacttgtgagttagtgcataattttttaccaaatttcatgcgaattttttattgtaatttaataggaccttatttcctataaaaggagagctccccaagctcattattcgcactttccattctctctacaaggtcagatattctctctccacactctttctctctctagaaattgtgaactgaagttagacttattcatttttccgctagttctcttgtaaggcaattttcttttgcgataataaaagatcaaggtagacgtagctccattaccatcgcgatatgggtagtgaactaatataaattgtggttttctctcttttagttttttttttagtttttttttttctgtctgtcgttattgcttatcagacaatacaaagttggtcgttttttagcatcaatattttggtactttcattaagagcaccactcaagtcccttggtcgtcttcaagttttgtgttcaactaggtgcttcattccgaaaggaattctcaagtacaagaacctaagagcttgtgaaaaaatttggtaatgagatccactagtgtacactgtgatcctactattggcgccacctcaagtggtacgtggaaatcccgtgtttcaagactacccctaggtcacaaataatggtcgggtgtggtagtgattgttctgtacctccacatgatccacgtgtgaaccttgacgaggagcctataggccttaaagaggaacacatagagcatggcaaggagttggagcaccccgaggtcgagtaactggaggagactgttgctaacttgcaacaatagtcaagcctaggaaaggttgatgagatgaacctctttggttgagaaatcggaggagattgttgctaacttgtaacaaaattcgagcctaggggaggctaacaagcttaaccccgaggttgagcacctaaaggaggttgttactaacttgcaacagtatttgcaagaatcactagacaagcagcgagaggagtttcaacactagttccaggatcaatggactagcgttgagactctgtaacgtcccagcttcaagcctccattgggtccttacacccatggaatga

SEQ ID NO: 390443 - DNA, 2561 bp, Cannabis indica
ttttttttttttctagttttacaaatcgctaaagacttctatcctttgagctcctacgacttttgatagtcttaacccaaccagtagagcttcgtactctgcctcattgttaaaggtaggaaacttaaaccacaaagctgtttggagcttcaagccttcgggtgataccatcactatccctactcccgatccattctcgtttaaagccccatccatatatatttttcacgtgggggcacatattttaggttcgtgagctgtgtatgtctttgttgcacgagaaaaggactcttcaaagaactttgtattttttttcaagttgttgagtaggtgatacacacaatatccatatgttctagggaaaatttgttggcctgctttgattatactttcatgtctattagatataacacattgttcttgtctaacaccaaatattgttcttaatttttcaaagaacaattctcatgagatatcattttttgaatctgccactcaaaaagctagtgagaatattttacttgctgcatcttgtgcactagctgttagtaatgttcccccatatgtagcttttataaaagtttcatccactacaattataggtctatatttattccatgcctgcagtgaagtgtttagtgccatgaaacaaaacaagaagttattattttcttcaatattaatgtgcactacagatcttggatttgttttttggagcatatagaaataattaggcagtaactgatatgactgattagcttttcctacaacaatgtttagagtgtgctccctactcttctatgcctttatgtaattgatttgtaatccaaatttatcattcatgtcaaatcgaatatctactggtgttgttgttgttttcatgttttaaaacttgtattcaatacaattccctattatctttgcaaatgctagcctttgatccccaaatttgatgcttagtaagaaagtgtgtttctcattgtatgtccttacaatgaaattctctgttgcatcattctttggcgctcttagtgatcacttgtaatttttatccaaacactcaatttgaaatttctttgtgcaaaatttttgatcttgtattgaaattgttgttttattgcaaagtagctaaggacactcttcaatgtttctttatctttgtacatctgccctttttcgatttctggatgttgtttatctatgatgaccaatacttcttcatcgttgatttcttgttgagcaattgtctgtctttttagtttatccattatttctgcggtaactatttgtgcatagtcaacaaagttgaatgcctcattatcttcatttgtgttttctatttgttgatgtgttggtgtttccctggctgagtttcatattcaagcatgtggacctcttgccctgtgtcaacctcaggaaaaaaatggtatttgtgttgggaattccatatttatgcacaaaggatattttttatgtccttttctcttatttttaactgcaaggcccacgctttcatcatctatgatctttaatgttggatatccagattgtacctgaaattgcatttgtaggatcgttgtatttttgttgcagttatgttttcacaacagtttgtccaccaattcagtatatttgtagtttgcgtggatgcatattctagtgtagcttcgaaaacaatgtattgattgttctcatcccaatatccatcgttttgaactagaaccagtgttgattctacttttctgtaaattaacacaacaagatttatgaaactccaattaacttattttttttttcatgtataaaaataattaaattacataaattaaccaatcaatcaacaataaacattctttattttttgtaaaacattaatttttttatgaaaataaaatttataattactaacattcaatgaacaaaatcaattttgttgcaaataattaacaataaatcaacaatttttatgtttatatgaccaaaataaattaaagtttcaaaatatatgaaacacaattttatatgtattataggtgaataaatataaatgaattacataaattaaacaagcaatcaacaattttcttattcataaaaaaataaaataaataaacattccttgttatatatctttcttttattttttcaaatcaaatttaacaatcaatagcagtcaatcctccgtatataatccaattagtaattatcaaaattaatttcaatgtattatatagtaattcaatacattgaaactttttttttgcaatttgattgggagctccgatcaataatttttcaagtcattctagtatgaaataattttaagttatatagtatagatcttaccccgttcatttcaagttttgtgcttctgatatttcatacttatttttaatataattttagatttaataaggagctccgctcaataatttttcagctctttattgtatgatttgtaatattgaaattacaattttaggttatgtagtatagatcttacccaatttattttgagatttgtgtttcggatgtatcatacctgttttaagtatattttt

SEQ ID NO: 390444 - DNA, 1181 bp, Cannabis indica
aatggagaaagctattcacttttgaagcgccaaatgagtagtgtctgtagttttctcttctaatattttttttgtgtcgatgtacttatgtttaattcagtgacaattgaccgctttcagttttatttttgtcttttgtatatatctggatgttgatcttgataacttgcccattcaacaaccatggttaacctcgacgaattgtgtagaaccatgaggaatgttaattaccagctttcggatttacaagcaaggactgatatgatggagaagagagaaaaaaatatggaagagcttggaaataagatcaaagagttgggaaaaagggtcgatgagtatagaaacccacataaaaaccactggagaaaccactttacaaacccaaattataaatttgaaaaaataataaaaaaaatattacacggggtaatttccctaaaattattaacgatgactatattgggaagataaataatgataaacttagcattttaaaatatactcttgggaaggcaaagagtttttgaaacttagaaaatatgtatattatatattacaaaatctcgaaagtggtgcttattaagattttctccaaaataaatgtgtattgtaaataaaaaaaattattaaaaactataatgagaagatacatagacaaattttttaatagttaaaatattgtctttttatttgaaagagttaaaatattatcttgggaaggtaatttgttatgggggtttggaaacttaaaaaaataaatgtatattatattagcatatggtcgaaattggtccttcttaaaatattatatataagagaaaaaatgtgtattattaataaactacttgttaaacagtatattaggaatgtacatagatatagtaaaaatattatctttttttattgatcaattaaaaaaactctcatattaccaattttattcctatatatattattttcttcaatgttactgtaaacatagaaaacaatattgtttacaatagttattttaagagatccaatgttaaatgaactaatgaagaatatgggacgtcacagaaggtcggcatcagattctattgtagtactttgtgttcggaatggatattgtccaatctccattgaggacccatcttctcctttccgtgcaacgaaacaaaaaagatatgaagataatgaaa

SEQ ID NO: 390445 - DNA, 1780 bp, Cannabis indica
gtgaaaattggaagcagtttgacacactttattcgtcattcattgctgatactagaaatgtgagattggaattgactacggtcaaattcaatacatttggtaatatgaaaaactcatatagcatgtggactttattttagtcccatataacctaccccatagaggtgcatgaagtcagagttatgaatgttgtcttctttgatcacccaaaataatatagatatttttatgagactattaatagatgatttgaaagacttgtgggagacaaggaaggaattgaaacatatatacataaaatcacaaatactaaaaactcaaataaagtaatatgaaatcaaaaagaaaataggaaagattggttaacctaattctaatactatattaaaataattttaacaaaaataacattaaccattagttacctttgccgagagagaagctttgtggcaagcagagaggcaaccactttacccattattttgatccaaaaggaaaacttaaaataacaaaggtcatggatcgtatcatcatacaaattatattataacatttttataatattctcagagaaagagagaatagagtgatagaaagaggcgtgagcaaggagaggacgaactctcgccttctgtctgaccaaaagaatacctatatttgatgaccggcaaatgacgactagatattggattttatcatctgatccaatctaatccaattgagtcatctgatccgatccaatatattgaattggatcggttccaactattggatgcattaattggttttctattgaattggattggatccatccatccattttagctactatttaagttggtttcattaaaaagaaaaatatataatttaaaacctaataatccaacatacataataaatattagtttagtctaacttgattctcatgatcccataataaaatcgccaaaaaataaaatttattcaataggcattgacaattttattagtgtatcgcaagatgagaattaatatcttaaatctaagattttttttaatctcagggttaaatatatattaaatcaattaatatattttttaaataaaatatattaaatatataaatttataaatgtattttaaaaatatataaatataattggatgaccattagatgataattggatcgattggattcaggtatccattgaataagttgtcccaaccaacaatcgattcgatctgattggattttcaaattttacattcgatccaatccaattctattagattataattggattagatgattttctcctacgacactagttttcccctttcttatgcaaaatagagtactttagggtttaagtctttagtgcctgtgtgaattattttccttcaagtgccacttcccttttaaattctctttaatatatatgacatcgttgacactaaaaaattttcaatggttgtgtataacactttccctttgcatctgatgatgccttcttgtcatttgtacccttttattctaaactagttaagcattgttgtccccttgttgaagttcttcttgggttatggtttcaaagtgaattaccatatcttgaattattgaaaagacaaactatttcttatatcgctttcaaaattagcctacctagctacctagccctagctattttattgaaaaagagtgttgacactaaaaaatagtcaataaaataaatgtatgaaatgtttaccgtgttagccatattgttggtgatcacttgttaatgggcttagcatctgtgag

SEQ ID NO: 390446 - DNA, 1462 bp, Cannabis indica
ctggcattgatcaaaggcagcagacttaaaaaatttcttgatcctactcaagctccacctaagtttctaacagttgttgatcaaagaatcaataatgtcaatcctaaatatgaagactgggaacaacaagacaatcttcttgtttattggcttctctcatccatgtttgagaaaaccacaaatcgaatgatcatgtgtgaaaccactgcacaaatctaggagcaattaacagagtactacacggcatcgaatgcaactaacataagtttttataagactcagctacgaaacacaaaaatgatagggtcactgtgtgattacctgctcaagatcaaaggtttagtgcatcgcctagctacgattggtcattgacatactactcaagatcacatagaagtcatattcaatggattaccattttgagtatgatgtttttgtcacatctgttactaacagaaaagatctttacactgtggcagaaatagaagatttgttgaagccatatatagtgttgtaagtttgtgtgggccatgttgattctgctcgtatttatctatgcttttttaaaaacgagttgtgtcgtgccaaaaaaaaatatagatcgtgtcgtgtcgtaccaatattttttaagggtaggcttggtattttcgtatcgtgttttgctcgtgccggcctgtatttattaaacaggtcaatctatttttgtatccgggcttaaattcgtgttttactttttcatatttttttttacaattactaaattatatgtatatttcaaaactttagttatatttatacaatttttaaacaatattttatagataatcatagaaaaaaattattaacattaaaatttgaatatttacttataaatagttaaatttttatatcacaccctataaataaattaatatataatcttagtttttcatgctttcataattttaattatagaactataatatttagtattatatttaaattttattattattttaacttatttataatagataaattcatatcttattattaataataataataatagtaataaattataaggttttttttaatatatcgtgttgtgctttatagacttgtcttgtgtcgtgtttttcatactattctattcgtccatatgtattgcactttctgtacttctcgtgctgtgtcgtgcttaagaatatatttttcgtgtcgtgacgtgccaatttataggttcgtgtcgtattgtgtccaagtgcgtattttttcttgcttagtcatactcgtaccggtttcgtgtcatgttaaaaaatacgactcatatttagaacaatatatatgatagttctctttaactaatcatcttctaataaaaatgataatttaggtaatttcattgctaatattttattctttccttttcatatttttataaagatgaatgttaattacaatctcctattataatatttta

SEQ ID NO: 390447 - DNA, 999 bp, Cannabis indica
cagtgggaagggtacgggtctagcaacatttttgtaaaattgagggctttacaagatcctgttcagttttggggaaatgatctaacgagaaatttcaaggacaattcaacggtgtaaaagacgtatttggatgctcaaaggtaacactgatgctgatttggttacccaatatcatgaagtgaataaattactggctgagatcaacaaccaaaaagaaatattttagaggtaatggtctaagcaactttggctaagagagggggatcgaaacacgaaatatttccaagctgctgctagttctcgtcggaaaaacaatttcattcatcaattgaagaatgaagagggtgattgggtcaattgggattctggcttacctcaggtaataattaattactttactgatattttcgattccttggggtctcatggtgatgatattcttgataaaattcagccatctatttctcatgaggacaatattgggttacttaaactagtgggtgaggaaaaagtagaaccggctattttccagatgcatccagataagtctcctggccctgatggtatgactcctgcattcttctagaagtgctggcatatagttggtcgtgatgtgattaatcttgtccaagatttgttttcgaaataaagtgatgccaaatgatcttaatgctactaatctggtgcttattccaagaaagaagtctccttctgttatgggggatttgagcccatagctctgtgtaatgtgctcaagaaggtcatttcaaaagttctggctaaccgtctgaaaggtttattgtctaaggttatttctgagtttcaaagtgcattcatttcggggcggcttataaccgacaatgtgcttgtttcttttgaaattcttcattacctaaagcgtaaacaacaaggaagaaatggttgcatggctctcaaattggatatgagtaaggcgtatgacagaatggagtggccttttctacaatcaattatgcttcg

SEQ ID NO: 390448 - DNA, 1148 bp, Cannabis indica
aaaaagaaaagaaaaaaaagaatctttatttttattcaaaagaaggggaaactagtggattggatacaaagaaagcttagtaatgatgcattgctaattctatatatgcaaatatatttatatagaaagagaagttgagttcttttttttaggaaataatgtaagcaaaagaggtaaactgataggttaatgatgtaagtgagggtacactacacactcactcactcactcattaataagaataagaaagaaaaaaaaaaaatctataatggagatgaacaagtctgacaataactgatttgtttgtttcccgagaaaattagcataagaaagcggtgagaaaaaagttagttgtggtgtggaaaatagtcaggtgtgtcctaacacttgtaccggaagtgactgtatattgttaaatatcagccgtacaatttaaccacgtggcatttatcagacagctctgaaaactggtcccaaatttttaatatttaattttcagaaaataataaaataaaattaagatcatcagatctcatcaggccccgcccaccgccccatattaccactcgccagctaattttttttaatattaaatattttaacatttttgggtaaacaaacaaacgaagaaaaaggtcgagagataaaatacatggaaatgtgattctacatgcatgtgatccattcttgtttatttcttcattttttttacttattttattgtttatgtcattttctttttaatgctataaaatatagtttgtgtttttagtctctcctactcctacatttaatttatactattagtagaagccatataattaatcttaaaatttgtttattgggtttgtgaaatttttacacaaaatacttaaaattatacttattttttttacttttcttaaggaattttttttttttgcaaatgttattttttttacttacatttgcaactatagaacaaagttttggcttccaccttatgaggtttggaaacaccgttaaagagcgcatagaaaatgcaacaacaattcgtccattggcatcacgaaccagaaaccacaaccccttatactcaaaacgatttgtcgcgcgcaattatagaacatgatttttaactgtcggtaattagttcacatttttttttt

SEQ ID NO: 390449 - DNA, 1244 bp, Cannabis indica
aatattgttttagaaatttaagtaatacaactcctaatgaggtattctgatagaatcctttgtttcggaattcaaaaatattaaagagtttgacattgctaatgtgtgaaaagatataatagaatatacactacaaaaaaatactatctttagagacaactttttagtcacaacataaatattttgtgactaaatatgagtaatttgcaatatatactaagttaaagttacatcatttcgtgggtgtaagggcccaatagtggcttaaagcggggacgttacactattaatttttggaaatatcatttacaagtaatgaagtgttttaagaataaaatacattgaaaagtaaaatgataattttgtccctactcgatgtagaccatctatagagaatcaataattgctgtgattgaaacaatggataattcatagtgtatctatacttggtgtatagagtgttctaagggaatcaagagttcaatttcaaatctataggggagtcaagagaaattaataagttaggaaattcactcagtaaatttcaagatctgcttattaggagcttggtttcataggcccatggtccccacattgtctgagataatatcattttgtagacttaactaattgatttaataagtcaattagaattcaaaaataactgtcttatttgagaatttttaccaagtttgagtaattttgagaaaaaaagaaaaattgaagtttatttgttagaaatagaagtaaagttttgtggctaaacaatggagataaaaacacaaagtactttcactatgaagcttcggtcagaaggaagaagactgttaacttgagcctcaaagacaggcagggatgttggcaaagatgatgatccattattgttggaaattattaaaggttgttttaataatctattcacctctaatagaccgtctaatgaagatatttgaatagctacccattttattaatacaataattactgaggaaataaacgaggtgttgatgaaaaatttctcaaaggaagaggtgattaaatctgtcatgagtatgaacccgatattgaactttaattagatatgataaatttactgtaatatctattcaatttaatatcacctagttgatcctagatcaaatgatcttaatcctgacatggttgggttcgatctcaagagtgttattcgtgttctttgatttgttagttaagcctactttttggcagggtgatacgtacatttt

SEQ ID NO: 390450 - DNA, 939 bp, Cannabis indica
aagaaagttgcaggtatgcacgatgttgatgccataactatgttgacaatccaagtcgaggccttgcctaagttggtgattgctcaggtaaaataggctcaagttacttgtgagttatgtggggggcctcacacatatgatacatgcttagtggatgtgaacaatttgctaatggatcaagctaaagccattggaaaatattctcaaaataataactatgggtacaggcaaggagggggtcatcgtaagaacaatcaagggcagtcttcaaatcagcagcagcaagatttctaccaaaagagaacttagccccaacaaagcccacaactaagttctagtggaggctcaaatatcaaagctaatttattgctctaactcatgatggagactaaagcctttatttaaaatttagaaactcaaatgggatagttggctactcaattggcaaaacaagcttaaggaaattcacctagcactagtgaggtaaggggtaaggagcagtgtcaagcaattactttgagaagtgagaagaagtatgaggggcctagtgagaaataaccagtggaagaagttggtcaagatcaacatgcaccaaaattagaggaaaagaagactaatgaaaggagcttcacacctatcaacatcaaccaccatgtcaaaatttcttatctgtagaggcttcgcaagaacaacatggacaagaggttttctaaatttttggaagtattcaagaagttgcacaccaacattccatttgcggaagctttggagcagatgctgacttaccttaaatttatgaaggagattttagcaaagaaaaggaagttggaggtgttgggttttgtgccctaaataaaacccattacaatctaattagttatcaatatagaattttgaagtgatttatgtttacatgtatgttacatgtttatggtttaa

SEQ ID NO: 390451 - DNA, 2029 bp, Cannabis indica
tagatttcttgttgctcttcctctatcgttgtcaatccaccttataccatcgaccgacgccgacctccagcccccaactttcatgtaagttctccgaacactttgtgccttttatcgtttgtttgcatgttaggatagaacttcttggttgagtgttggatttctgggaaataactctcactgagtctgttttgtaatgcgtagaatcttctttatttgtgtgtttgttattttcctccatttttctttagaaccgacccctctgtcgaaaaactgtttagggcatgggacgatttttgctcccacattctacgtttttctcttttcttctgctttcgctgcctttgggatttttgcacccgatgtttgctaaggaaaattctttgagtttcgatttttggcaaacatctggagggggcctctttccaacggttaggggactcccattcccttttttaacattagggtttggtttggggtctaactgctggattgtttcttttttcagaaccaaacatgtttacccctgcgtaaggaactaagtcttctaagaagggggcggccgctctggccacccttgaggaggttatgaagggcccggttgcccaggagaactacacttgccgttctaacgactgggaagcggatgaactccgctccaccctgatctgagctcttcagcatgagaagattgtggcagttgttaggattaagttgtccgcgtctgcggttttccatcacttacctcgggacaaagagacgcccaaccacaattatgggggttttggagcctggagcaagacccatcttatgttcggagccatgcttccccttgaggattatttcattaatttccttgtatttgttggccttgcgccttacaaacttattccccaagcttatcgcctcctctcaggcctatttattttttatgtagccaaaggctaggcttcacttagcccggctgaaattttatatttttatgaacttgtgtctgtcctcaaaaagggagacaagtttaaggacggttttttgactctctgggcccatccttctaacgagggcctggtcccttttaatttttaaaagaatgttaaggagtatcgccactgctttttcttctcttccgacttccaagccgtggatggcccggagctcctcatggagtgggtcaagatccctcctcttctccgtactgcccctacccagctgttcctccagcatgccggggttttctccaattatgactagaaaggtcttaacgtgggggacttggtcacgacggagaaatgccggaaggccgagctcatctcagggagttaatcagtggacgacttcaatctctccaaggttctctgcccaaatattcgtaccccggacgttgaaaaggcgctcagggcggacatcatcgcctcggcgaaggaccggtaccaaaagtacctctttaagagggaacatgagttggcctatatcaaggctcaggccactgccgggagaacccttcaactggaggaaagtaaagaacggacgccttctcgacctaagttgctggtcccggttcccaatactggggctcttgatgccagcacatccggatctggtaagtctcccttaacggtctatcacgttccttctgcccaagattattcccggtataggcctataggatttgacgatcgtctttttagatttaggatgccccccactcggtgcggtgatcatgccaaggccttttatttttccaacttaggtcattttctaggtcggtcccggatgggttccggacctcatacacccattcccctggatcactcagcttatctgtcttccagctggtttctcctctcgaacactttgttggggatgatgaagccagtattgtagtgcaagctttgctagggctgagttagatagtcaaggtaagactagttttaccgctttgtttcatgtgcatagttcttatggccattctgactatttagttatttgtctttttgaagtcagtcccagcctaatggaggtatctttt

SEQ ID NO: 390452 - DNA, 659 bp, Cannabis indica
tcaccacctcgagcatcttccttcccgtcccagaccttccaatgtgaagttcaacccaagtcgttgaagcttgactcaaccccgacgagtaagtttctcccagccagtcgcaagtcggacaacatccctctctctctctcttctatgtccctctctcttgccaaaaactaactttcatcgttcctctcctcttaccgacctgtggattgcacgatctccctacatagccacaacttattctctgtcatgagtttatgagtgaaatagtttggtattttttccaatgatgctccaccatgagagagagagggtgtaggtgggtcgacgtctcctgcgatcacaggtgatggagaggagggcttcaaccttcatgtctacatctcgaaccaggtttccatggtgatagattgaactaaggagatgcgcacaccaagatcccgatatttgttggagcacttggagttgtctatcctctaaacgttgaaggtctgttcccaggagaccgagtagatttttaagtttccatggtggcgaggttggaaagaatttcagagagagcgtgaataggaaaggggattagggttctgagttttttcataaaataataataatgataaattttttgtttttttattattttattttaggaaattagggtt

SEQ ID NO: 390453 - DNA, 1155 bp, Cannabis indica
ttttattttacggtctaatcaaatctttttttaagtacatgcaaagtgttcactttctaatacgtatgtatataaaatatatatgatttgatataatatattatttcttttaaaaataataacaataatttgaaattatttacttaacttattaaataataaagacgtttgctttatacatatatatacatgatagtttttttttcttaaaaataatattatatatgtgatctataataataaaaatattggtagtgaggttattttgatagattttctcttcattttggcatctaagagatttttctaattcaatgatcgcatatattgtagctatttatgatcacttataaatttttaaaaatttatgagaataatttacagaaccgaaaataaaatttaaatagttaattattacacgtataataaataagagtcacgcgtgcagtagaatatttaaacattatttttgacattgtaaattattcaaaaaaatttaaaaacttacaggtgatcttatatagctgtaatgtacacacgatcatgaaaaaaagtgaattaaaaagttctcctaaatatcgaaacagatagagagttattcatataaaattagttacataatattatttctacaacatagtattaatgtactttaaaaacaaaagaaattattttatgtacatacataatattattaattattttgtagttgaataaatagttaaatatttgaatggtttaaaaaaagattaataaatttataatattatataattattttttaataatattatacaattattaaaaaatattaaaaaatatatgttcagatgtgaaaaacaaaaagtactaatatttcaatattcagattcagagatgatatcttattatgcaaatatgcattcagattcagatgtctgaatcttaataaaaaataaatagcacctagacttagagttgttatcataaatattatttctattaaacactttattttaaatattaactaaaaaaaacataaaagaaaaactatatgtgagttcttaggatttattttagagatttttttaattaggtagtagagtttatctaaaatttataaacaacaattaaaataaattttaaatattttttattatatatgaataaatataa

SEQ ID NO: 390454 - DNA, 625 bp, Cannabis indica
aaaattccaataacgagaatagtattatgatgttggtggaacattggaataagatattcttttgtttagtttagtaatgaaatggaatatagtggtgtattaactaaaataaaaataatatagtattatcatgttatgatatttggtatttaataagtattggaatcataattcttttgcttggcttgatgtagtaatgaaatggaataaatagagtattgacaaaattatctttaatttaattaattttatatatttataaagattgagaaagaaataaggaaaaatgttaaaaaatattagcgatgtttattgtttaatacttattttaggtctaagtgggttaggtttgtacttaaagtttatttaatttaggaataactacataagacactattttttgttaaaaaaaattacatttttatgtttacagatttttttttttttttgttatttttgcagtttttcataaaaacaacacgaaaataacaaaaaaactacataaaaataacatcaaaactaggggtgaaaatcggtcggttatggtcggtttttaaaattttataaccgaccggacggttacggtttttattttacgaaaaccgtaaccgaccgtttagaaatt

SEQ ID NO: 390455 - DNA, 712 bp, Cannabis indica
gatgattttataaagtacattacccaaagagatgggctgaatttcagtcatcgaagtaggctgtttcttcttgggtacaaagacaatattagtgtcaggcaattgatctagaaaagttccattctgaaaaaaatctctaaccaactgaaccacatcatgtcgcacaacatcccagaatttttgatagaatcccgaactcatgccgtcagtccccgcggacttgtcagggtgcatctggaacaaggcttttttgacttcacactcctcaacatgtgccaatattaacgagtattgtagtggggtaatagttgttggaatacaatctatcacctaattccaatttgtaacaaagggggtaaaaagttgttgaaaatagccaaccattacatcttgaagaccattatcccaactaaccatgatgcctggatcatcacgaagagagttaatttggttgttgtgttttcttgttttggtagcagcatgaaagtatttagagttgtgatcaccttcctttagccataattgctttgatctctgtctccaaaatatctccttctgagtaagcatctcagcaagcctttcattttcctcttaatacctctttgtcgaatttgcatcacgctggccttttaaaagcttaattatttttttacactgagaaatccttgacttaaagttgccagtaatctctcttccccaatcagctaacact

SEQ ID NO: 390456 - DNA, 1663 bp, Cannabis indica
taatataaaaaattagtaaaaaaattcatacacctctgatccattttgcacactctaattacatattataatataagtaacgttagctaaagacacacaaaagttatatatattttatcaatttagttttcataataaagaattatatatggaaattacatatgattgaggattaattacactattattatgttgcaaattaagtgcatgtgccggtatttatatagggaaatttattacatggtatactaacttttgctatttttttacaaaatactgtcaggcggtattttttacttttttactgtgttttttaataagtttcatactgcagtatactgtcttaagtttttcacttgtgttctactggtgttttactagttttctactgttgttttgagttgttttgctttgtgttttactggtgttttataaaaacacagtattttttgaaaagatttccgtgtgaaagtatttttataaaagttaaccaaaattccaacatttttgtaagtttccctttatataattaacttcagttacatataattaaatataacgtgcttctacttaaaaatatttataattagaattaattacacatgataatgagtgtacaaattaaatgtgtctacatttaataatgtaaaaagttaataaattttatattttaatttaataactattataaaaattaagtattagttaaaaataatataaaaccctactaatatctattaacaacactttattcaacataaattcttcctataatattcaaattcaatcatgctccaaacccacttcacctactactatagtttatgattattttatttatatatttctttaagcatttaatttattgtgagatgattttcttaataaaataaaataaaattcatgttatatatagtacttagtatctacatattatagcagataacatgtcaatgaacaatcctagacatattgagatttacagcctagcaacaatcgagtagaggcagtacaagagaataagtgtaggaacaaatacacacacatctaacataatatacaaatatatttatatatatatatatatatttctatatataaaaatttggaaaatgttacacaatctcacaagttggtcttgagtgccaggataggtctgcgcttcgaacacaactagttcaaaaaatctaaaataatttctttaaaatttatacatttttataataatttttaaaaatatcacatttttttttcataagatttctaagaattttttacagtctaatatggtatcatcagccaaataagatttgatcaaatatctacattatcttaagatgatgttagaaaattttacattatgtgtaaaaacttaatactattaaataccataagctactcatcctaatacactttcttaaccttatttcacattctaacatgaaggtatgaatttcagtacttcccatcccaaactatatattaggtgggagggagggagagtaatatggacggagaggttagagaggatgaggagtaaaagagatggagaggtgtaatatccagattaaatagtattaattttttttgatatatgagcaggatatatcttgttcttgtgttgttagtgagttgatattattgcttagagtagttgtaccaa

SEQ ID NO: 390457 - DNA, 903 bp, Cannabis indica
cattttaacatttcttatcgtgtgtgtggatggttggatcaaaatgataatcgaaactaacaacattgtgacacttgtcaaatacgaaatgggccctttatgatgagaagggctaggctaacaaatttcaactaaatttcactacattagaaaattgcaaatataccactactattagtctctactaactactacgacgacatagaatgaatgtaaaaaaaaaataaaacaaacaaacaaaaactcacatataacccctttaatatcaataatactattattgtaccttaacagtcttaccagaaagctttctgagctctcttccctatttaaaccccaactctcatttcttcttcctataccatcatcaccatttctctttctctctcttgtcgacattgttttacttaataataacaaaatgagtggttttagtttcacaagtctcacattcatacttgtggtttgttttatggtatggtcatcatcaaattttgaagcttgcattgctggaagaggaagacattattggaacagaggaccttcaaactcatcaccattatcatcttctttgaacaataaaaagaaacccaagaaccaccacagtggtcatcatcaacatggccatgctggttcttcaaagccaaaatctccgccgcattacaaggcagctccgccaccggccattgtcaagcccggtgacgacactcctcccagtccacccaaaggtcaccagtcatctacgacgacctttaacgttttgaattttggtgccaaaggtgatggaactacggatgatactaaggtgtgttcatatttttttttcttgtttaaaaacaggggaatcctctgttttttttttaaaaaataataataattattattatttaattaattatatat

SEQ ID NO: 390458 - DNA, 1774 bp, Cannabis indica
aaatgatttcaactaatgacctgttgtttgaggctaattccaagtgggttgatcaataataaacaatttcataaaatttcatgcgagcagagttctcaatcaatgatcataactctattttttaccattcataaaccgcagtatatttcaagagagaaaaaaattacatggtaaagaaaaaaatattacaagagaaagagagatgatgtgcctaagttctagccactggctattaagaatgtcacaactcagatgagaagaagatgaagttgccgcataatgctcaaatgtaggaattgcctccgactctctttcagttcactgtttcagaactaggagcatacgtggccacatccaactaatcatcagtattcaggcccaacaaaaatgaatcaacaagaagaggtacaacagtaatttttctacctagattgactttatgttggtttaagactccattgcttcggtatccgctggtaggccaaaaactgagagtaatcacacatttacattgcttccatataattttgcattagggattcagatctaaaataaaggaaaacaagaaaaagtattcgctctttagtattgatcataagtctttttgcaaataagaggcaaatttatattttaaagagcaataaatttacagtacacgaaaaaaaaatgagtgtagaactaatggatagtacaatgatcataaactttatcgaagagaaggaagaagatgatgaaggacatctccaccgcctcgtgagaaaatcactccattgactggtcaacaatgttttattgtatctagtaccctttattatttttaaattggcggtgaaattcaataataaaggcgtcttctgaattgaaattgggttagggttttatgggtttaatatattgtatataaataaaaagtcatttaactgtattgttgggatttattttatttttattttattatatataaataaaaagttattcaataatttcttataaatcaaaaattctgttatatagtcacattttatatagttagatagaataaaagatagatcgtttaactttttatttgttattgaatcttgtatttgttaattatataaaatctaataatttagtcttaattttaataattatctccattattatttttgatttggtttgattggtttgttacaagaatctgatctctgtttaattgttgttatatgtatatacatataaatgaaaatatcatacatctatactattttactcttttctttctttttcttgttttctaaagaagtattttatggtgaatcttacataatatatagttatatttcatcttttttttttcaatcttcttcttaaacgctatctactaaattttgtcattaaaatttatagggaaattctataatgcacccatttaaaatagatatactgatacatacttctttctattttagtatccgaaataatgttttagtcaaatttttttctcatggtcatgtaaattatagttatttaagacatcctgcaacattttaagaaattcggaaaagtttaacacgccaaaaattgcgttcaagcagtgtgttgcacacatgactattttattttatacgcgtgtaaaatagactgtttgaacattattttctgtattgtaaattattccgaatttctcaaaattttgtaggatatcttaaataactataatgtacatgtatatgaaaaaaaattagactaaattttttttctagatgccgaaacaagtagggatgcatcagta

SEQ ID NO: 390459 - DNA, 870 bp, Cannabis indica
gggacatagacttacttaacccttagaaggaaagtcgtatagaaaataggtccaatcccacaatagtcaacacatactacaatccatctagatagtggggaaaatgaattaaaaaaatatatatttttacaccatataccataatttttaattttttttctttttttattgtgacgtataatttttttttaaaatagtgtatttttttcctcaaaaatattgtgtatgttttatactatgcactgtattaaaatttcactattatttcatggttgtttcttagtcgttttactgttgtttttaattgttctgttttattattttatgattgttttataaaaagacagtatttttgtaaaaaaaattccgtgtagcagtaaaattataaatttttatctaaaatccaatatttttgtaaaaaaaaaaacaacccctaaaaaagagttatttgggaagaaaagaaaaaatttacattaatatgaaataaacaattttttttttttttgaaaataatatgaaatgaacttaatgtcaccaaatatgatatttgttaaccaaacaaactaaatatatttgtttataaataaaaaaaaaatgccataaaaaacataaaaataaaatagaattaatgtttcaaattgctctctttcatgcgatacgaatcacgatcccttttctttttctattcttcgattgtttctctctcctgggttacttggatagtcctcactctcttctaaccgattccactattggtacttcttctacgattctagatacttcaaccactacaaaattcgacaaggaccgaaaatttgcatttgtataattaatttacaagaataagaaaataattaatatttttatctt

SEQ ID NO: 390460 - DNA, 1096 bp, Cannabis indica
tattattattattaaaataattttattattattcgtcaattattgttcttgacctttaaatgtaccaaatcatacttccttaacttttcaggctgtcaaaaactatcactgagctattgaaattgttagattctgacgtggatgaaaattcaagaggcacaaattgcgattggtaaatattaaagtttgtgatagaatgatttggtacaagaacaatcaccacattagtaaaatttaatgaaatttgagtacttgagtatcttgttgcctcctactataaataaatgatgtctctcgagaaatgcacaaataattcagattgagtacgcgaaaaataaaacacacatgcgtggaaaacgtgtatttgcttagaaatgacacatgtcattctcaaggaaactaaagcagtgttgcaattgatatagctactcatggacgtacatgtctcaagatagaataaaggatatcttgagcaagtctccagtacttccaagattattgcaagtgagttagaacttgaggggtaaatattatccctaaattcatgatagaacacgtgttaccatctaagcattacacaagactacgtgggacccttcgtgggaaaactccacttaatcatgtattggataacaacagtgtgggaagcgtgtagctacagaaggtagtataatcggataccctccaggaggttcttagcatcatgagaggaccattctaggatgttgcaaatgttggaaacttattttatcaaaatctagatttattaacatgtatgttgattatataactataatctaacatcctaaatatgaaattcttaaaaacgataaataaacacataagaggtatagaaaatcttacattgatggcagcagaataatatgactccttccgtttagatctataaccttgatccattctgttgcagagtatgatcaaaatctgaacctggatacactaaaagcaagtatgactcatgtgtgtatttcaataatcaaacctacttgctactctatgttgatgtatactgatgagtttgagataaagatctgggcaaagcaaagagaattcttgggatagacataaagagacc

SEQ ID NO: 390461 - DNA, 1000 bp, Cannabis indica
ggtggacgaggtgcgtgcactaccatacctggacacagggaacaagatctgatcctgtgtttaaaaaagtataaccatcactggacaatttgaattgcgccaaaggtagacattcgtgacacttggacgatcgatatccgcaataggcccttcgagtacccattcgggtattagctgggtaggcttccataattggaccactcctagtctaggaaagataatagggtctttcgcgtctgggaaactagaataaggtagggtggacttttgcttaccccagtagtcttgacttgttcccggctccgtaaggcttctccgtgataggattgtaatagaggatttcaattaatgagattaagctttccttgtatatactagtcacatactaagaaacatggataacaagaagaaacgtattttgtccgcttttttattttattaacatattatttgttctaacttctaactttgtttggtcaattttttggtatctcattgatctatgttcaaattgttttgttgttgttattttccttttagtagttatagaagatatataatagttttatatagatgcccataaatttgaataatttaatattttgtattgtagacaatgaacttgaggataacacattacctacaagagaagacttgatattcttaattgatgacattagaaatattatatgttattttatttaagtttgtagtcactatgtctagttgctctaaaaggcaatttattaaggataatttttatagttttaagacttaaattttggataactgtaataaactttgaatgatttttctttatgcatgaactttttattttctttaatctaggtataaattttttatcatattcattgtaggaaaattacacatttaacctacacaactcacacacacacaagttatttcacaaggtcaattttgacctttcttgcactgaattttgttcacacacaattgacacgtattattgcttttgttt

SEQ ID NO: 390462 - DNA, 876 bp, Cannabis indica
aaacagaaaacaataccaaacgtatcttagcttttgtactttatgtttcatattttttttcatcaatatttactttaactgcttctaatttattttttctcatcacttaaataataataaaaaaaaataatcaaaataccagttaccaaatgcattttttcaattttggtttttgaaaataaatataaaatatagttgccaaccacaattttattttatttttttttaaaaaaagtttaaaatgtatttcaatttctatgtttcaaaaatttaaaattaattcttttttgtaaaacacatccttaaatttagaaaaccatttaaaattgtttatcgggctaaaaatatattttttattttactccaacgaatataaaattaaaatataagatttaaaataatattattaagtgaagaacgatgtgaaatatgtattttagttttaatatataatgggaaacacaacaagtagcctcctacaattcgtaataataatctctagggttttggagtatatcttcccattattccaactattattaggttgtcatttcacaaacataaacactagtgtggtaatatcatactagtaaaaacacccaacatctccatctactatgtattggagatatattcttccaactaaacaaatcaagatatatacaactctagaacaagataaggataatgattaaaatatattaattaaattaaaatacggtaaatactattttaaactctgtatttcacaaaagttattaattggaccttctattttgttaaatgacaaaatagaccatatattttctaaattgtacaaataggacctgaactaattttttgtcaaaataaaacttaataataatctaatctaca

SEQ ID NO: 390463 - DNA, 1894 bp, Cannabis indica
ggctcgaggagaaccatctctagtcaagaatcagaggacttgacctggtgtgccgacctagtaggttgcttctcaataatccctgcagcagacacctcaatccctacagtagagacctcattcccttcctcgagagatttatcaacatcaatagtaagctggttcgaggattttctcatgttggccttagtcttggttcttttgggttcttttgtagaatctgagacctcatcagcttgggctaccttcctcctggatctcttgtcggctttggaaggatttttgaacatgctctccaaatctacatccattcctgcgagacaaaaggaattattaacattcattcaaaaaaaaaaggtaaaaggaagaatgggatttgattccctgcctaaggaatttaccataaccataaggagaagaagtgtcactagaagattgagtagaagttaaaatagcaggtttagactaggccgcatctcgtaagaaacgatgtttgccttcgaaaatctcttgtaggaatcgccttaaacgacaagcagtctcttcttggtttggcttaatcagatggtcttcaatcctggaatcattccctttcaatttggacttaggttcacaatatttgggtgtatatggggaggttcaatgtttggtatattctgatgctacaaattttggaggataaatttttgaaccagaatggggcatcttcacgaaagaagaataatcccaatttttggatgaaattttccaaaccatgggtttgaggaatatagccaacttaaactatgtctaattccaaaaaaaatatgaactttagatattaaaccgaatgaggtaatgaagcgtaaggaaaatcatcacttgagtaaaatcaaagagaaaataaggtactcactgtgtgacgttgaaaggctgaacgctaaaaaactctacaaatgaagacgtgacagccaacaagataagtttttcaaacaccaggagtcgaagggcaggtctaaacaaattcacaggaaaaatttcaaagatagggatggcatgcaatctcttagaaaatcagaataaaaagtcgtcagaaaacttaagtttttgagaagatggaaatggaggagaataaagtcttaccattttatactttgagcccagtaacggtaaggtcaagagatggaagacctaacggctgggaacgaacaagaagtggaaaggacgggtcattagtgctaataatgaccctcgaaaccatgaagctgccaaaatcaaagtcatgcatattttttaaaaaaaagggattatgacgaatataccctctatgatcatttaaaaagaacttttgtattaaaaagaactttttaaggggcaattgttatacttaaaattcggctagcgcttcagagaaggacacacgtcaaaatgagataatacgaatcgattaataagttgggttttgtgccctaaataaaatccatttaaatataatcagatttactaattaataaaagatcgaaaattgcattttattttgcatggttcacatgatttatctcatgattatttataatgtataaattctattaagtccagaacatatataaatatgtatataatttgtttatgattatagtgtcgttagcacagtcgaatatattcaggattatatgttcaaaagtttaattcccatgattagtcaattcactggatttagactgacatgataattagcgataagatatacttacaccttggataagtgtaatgtcctttccaagacattggcaaagtttacgagtatcggatgtatggagtatacattggaagggaacgattttaatataagataacatatcataaacttaccgttagatctttcaaagtcaatatcaatggttgatcttaggtc

SEQ ID NO: 390464 - DNA, 1721 bp, Cannabis indica
attattattattattaaatattaaatcatctcatgacttgcattgcattaatgcatgccctattaaaccaaacttttttcattgttattctataattagattagatattctcatgacttgcttacatttagttagtctaatcatagcactaaaaaaaataatgttcccttatttttaatttggataaagacttacactaattaagtcccctgataaggcttaagttttctctttattaaatggggattgtgtaattagagacggggataattaggatatgcccatttataataataaaaagaaaaagagaagaagaaaatttgagctttataaattaagaatgacacatatgttacatgtattcaaaattataattcattaggaaataagagagtataaattattcattaatattattatattggaagaacaaacaaaataaaaaatgagtgaatacatggatataattcatccaatctataaattttacaaatgggtttttcccattacaaaaaaaatcaaaataaaataaaaaagatttgcctagccctaactatatcatcttcttcaactactcttggtatatagattatcatcaacttatgtagacatccacattcaagctagttaggaatgaaatgtatattattatatatatgcatatataaaatatataatttggcctggtcggttgtatttttaaaagctgcttttacgtttctaaggctccaaaagtgtttctcctactgatcgggtgactaatgaatttcaactttcagttctaaaaagctctatgaggcgaaaacagttttggtaactttcttagaaactaacaaaagtagaattaaaagttcagccaaacaagaccataatttaacattgattaattatggcagttaccggagctatgaccagggatattagtacatggatttggacttggagtatcgttaccacccctcgggagaacctgagtaatcaaaggcttgaaccaatattgatgatgatgttctgcttttaataatggcctcatttctccaactattgctaaaccaacaaaatgcttaaaaccaatcaaactctcaacataattctcctctcaaaaaaacccatcttttgtttttcttttctcttctaaaacacaaagtatagggctttaaaaaagtttgtaatggaagtgaaactttggtaaacaattgatatctatttatagagaaatataattattaagatcatgcatgacacaatatgaggtctaatgccatgtgatttgactcatgagttattataatttgaatatttgaaggaatcaaacatgagacgtagttacaaggaactaacccaaactgatcaacttagataggcataaaattttgatagttttcttttgtggggtcaaaaatattgaaactttactaacatatatataatatgtgataccaaaaaagataattaaataaataaaagattgaaaaaattggcgtatgatttggttgattatgaccaaccaattaagcaaccatgaatgaatgaatagttttaattttgtttataatgtcagcgttgaggtcaatcatctcctttgaattttgagaatcactagtcaagggaaccataaacaattattattattattcattgtttttttttttttttagtgaattattattcattgttttttaatgctcaaatctttaagggcatgtgctcttcttaaaact

SEQ ID NO: 390465 - DNA, 902 bp, Cannabis indica
taaacggcagcggcaggagcaccaccgctctctttcttctcaatctcgagccggcaggcgatagaaccggcacatatgtcgctgtaatatgctgaaaataagagcaaggaatgtaactgtgaggtgaggggaaacaacacgttgtttgaattggaaatggggttttgtttgatttgtaaagaattatgactaagcgaaaatcgaagtaagattatattttttttgtaagaatacagctcaaccaaattgaaaataaatttgtataagagtacggaaagctcacacaagcagaggaagattattcaaaatgtaagtatacaaatcactaaaataaactcaaattagtatacaaaggcattttatataaatgtatacatcattttaattagttataaaaagtgtgcaaaaaaaaatcaattataaaaatgtacacatttgaaaacatatttatataaaatcatacaaattgttaatttaattatattagatgtattaatgaatcaaattaccataattaaatttttgtaactattttgatggctaataattgactcattttttaataaacatgtaatttatcaaataataaagatatatattggtaaaaaatatagattaattataaatataaaatatatttataactagtaaaaatatacgtttttttttctacttaattttaaataaacatagatataaattattaatacattattgtttattatttttattaaatattttgctaaaataaacctatctttataataaattaaagtaaaatggataataaacatttatactatacaaaaaaatagtatatttattatattaaacataaatcacactaaaataaatcataaacatttatattataataacaaaaactgtttagcatgtttctt

SEQ ID NO: 390466 - DNA, 1091 bp, Cannabis indica
aaaaaaaaaaaattaatgtgttgataaattgtgtctcagataatacttatttgactcataagttaagtcttgccttgtaccattggggtaagttaaatttactaatcataaagtagtaagcaaacgggaccaaagaactatgctataacctcctcagcaaacattgaacatttaaaatatggctttcagagacttgtgttaataaaatgagttcagcgagaagaagaaaagtaagttggttgcaagttcaaatgctttcatcacaagaagcaaaagagatacaatttaaaagagtttacttataaggattatacaaaaattatccaaaacctcatttgaaataaaaccttacgagaaaagtgttcaacgagccaatttatttgtgaggagcatccatatgatgtttaccaattcatccaagttaattggaaagaggacaaatgtcgaacagaaaaacggttcgattaataacagttcaaaaataagatcaaaagtgagagttatttggtgttgcattcaaatttagaagtttattattattattttcacatgttagaataacatatatgtggagaatgctcatgtttcatgaaccgtcatttagataatgaggatgaccaattttttcttaattgagaaaaaatatattaagttgtatcttgtaatgagaaaacatataaataagagtgacttgtaaaatatgtaaattgtaaccacaaaatcacatataagaaatatttatagatatataattacttcctttacaatatttattatacatccattaattgtcaaaagtcttatttatgttaacaaaagttaataataataataataataatgtattctaatttattgttggggatttaaggttttttgtttaaatattttatttgtaataaattaatgggaaattacttcatatactgtatttttaacctttttttttttttaatttacaatttgtgtttctaaagtagttgcatcactagttgcaattgtggtttctatacggttttttgttacaatttaagttgcagcgctagttacaataggggtttctatgtagaattccgtaaaaaaaaaaaaaa

SEQ ID NO: 390467 - DNA, 545 bp, Cannabis indica
agtgtattaatatgtaattatcctaattaattatatactagcttagtgttacgtaagatgtttaatttaaaattctaaaaaagtataataataatttggaaaaaataaataaaaaataatatttaaaatttaagaaaaattaaaaaagtatcaaaatgttagcaaaatatattaacagcaataataataaagttttaaaattcaaggaaagtactatttaattttttgaatgaaaacactatcctttttttttttgaaaaaagtctgttattataaatcaaacacaatcatttacaacaacagagaagatggtataataggtatctcttctaaccaaatacaatcactatccaactgtaaagcttgtttagccaaacaacttagttatatagcatcccgtttaatataagataaacaagcatgagagagagaggataaatgatatgatacatcttgaaccagatcatgaaaaaccgaatatggtgatgtacgccctttcaatgcattaacaagcaacaagcaatcagtttccacatagtcaatag

SEQ ID NO: 390468 - DNA, 945 bp, Cannabis indica
aaaattactctcactgatgttctgcgagtaagtggggttgtgtaactcctgaaattgcagaagtcattggcatcaaggaggctttgagttggataaagcgtaaaggttggcagaaagtggttgtcgagtcggatgctttggttgtggtttgagcaattaatagttcaatccaaatgccatcccaatttggtttattggttgaggattgtcgttttattttatctagtttgaataatgtccttgtgtcatttgttaatcgatctgcaaatagggttgcccattgtgttgctagggagtcttatttattgtcaggttgtacgtataatgagcttaatgttccgtctttcttgtgtgacattgttaaggctgaggcctattaattttaatgaatcctatctttattcaaaaaataaaaaagaattatacccattatcactatatgtgtgtgtgataagataatgagtagataatatacatggaaaaaatcgttggaatatatataagtaataaaaataaattgataatccgtataaaaaacaaattattagtatgaataggctaaataaataatggtaatgaattcagtaacattttatgtatttattatttatatatataaatgtatagaaaaaaaaaaacgtttctgtctattgattttcattattaactgtaataatattattagattaaataataaaatagttaaaaacaaaaacaaaaaaaaaaaagaaaaattgaaaaatttgaaaaatagaaagaatagtcatataatccgccacctcacataccctaacaataccattatataagtatatagatattgattctttgattgcataaagcataaatttatgacacttactctttctttattagtaactaggtaacaatgccgcgcttcgcgcagctcttcaaatatttttaaactatattattttttaaaat

SEQ ID NO: 390469 - DNA, 1163 bp, Cannabis indica
tattttaatttataaaataagatttagattttcttgtctcagatttttggatccttcaaaatattatattatctataataagatacacttagttatattatagagcaattcatggcgtaaatacataagtttaactttcagttacagagaaacactttaagttatatttctggaacttctgtagatacttgaccgttaagtattaaatcattattcatgtattattttttattggtaaatttaacttaaattttaaataaaaataaaaatttaatgatctggactaaggattgtcatgtgataatttacttgacacttaacagtctgtctggtattctagaattacaacttaagtattattactgtcaaaaattaaatttatgtatttatttataactgagagttaaacttaaatatttatacgcaaattattttatattataatatttttggattatctttagatttatttatttatttatttattattattattattattattattattttaattttgcaatctatttattatgaaagactgctattagccataaccattataacatggctctttataaacatttatagtgatactttttaaaaattattatattaaatcaggtagaacttattatttaattgtatcaatattaatataatagtactaaacactattaatattttttaatatttctctaatttgcaaaaccccactttatagtggtcttgtgtctaatagcattaatcttattaatctttcaaattattatgataagaatttctttttatttctaaaagtgaataataaagttatattacatacataaaattgagaaaattagagtttgtttggctgtgttttcagttttcaatttttaaaattgtgattttaaaagtgagaatagaaaagagttttttgtcattttaaaaatttaatggtgtttggcacaaatttttaaaaactgtttttaggattttttcttacgaaaaaaaaccaatattttagcaccataccatgacattaacccatccgggtctaggttcgggtatggtttcgggtctaagatccgagtatgtgagcaaaatataaaatataatatgttagacaaaaaaaattgtttttagaaaattgaaaacaacattttgatgttttatgtttt

SEQ ID NO: 390470 - DNA, 1759 bp, Cannabis indica
cgtctataaatatggtctcttcaattccactcaaaaccatcctgatccccttaatcaaaacaactcttcccataccactctatacatatatataatgggatcatcatcacaaaagaattgctcattttcccgagatgcaaagctcatccttttcaaatctaaaaagtcagcaaaagaaagggcctctcacaggtctgtttatacttacaaccaaattctttctaaacttggaccctattttcaacatgattttttaattcacccaaagtatccttttactaatctggtcctcctccagactgcatttttcactctaaaatccatatctcatattttttggtacctaacatgcatctgtacgattgttgtcgaagtccaaactatggctcttcacactactatatagttttcctcgaataagaaaaaattaagccagtctactaaatccaaatggacattttgtcttggtacgcttggaaaaaatactttgggatgaatgaaaaaaagtttgcaacaattggcacatctttgtttatccatcaggaccacatgtagtttgcaatcccaccttaatgcgaaattggacgtgaacataaaataatttgcaatcccacttttgaactatacgactcccaagaagcacctttcagagaaagttcagagtacaaggatctccaaaaggttatttttgagaaaaaccagactattccatcagaaatttggccaaaaatagaagatgatgccctaagagaaatgtttccctccgattattcacgaagcatagtaaaggctctagaaaattttcaaatttatgaaaatatcacaatcaggtccaagcccctaaagcaaagaagtaaaattcatcactattcaaagaaacagacactgtaggggtcctactctataagacaagcattttttatgattcacaaaatccacaaatagaccaagaaatcaaccaggatccttatctctttgagtacaatggactaaaatgggagattgtttattctaaatatgatgcatatccaccagctggaagtgatgaagatgatgaaccatcaggtttgcaccacttttataagataacaataagtggaaaaattcccgatagtcatgatgtttgtaggaatttttatgattgtttgtttgtcggtttgtcattttctatatttgtcagtttgtccatttgttgttagattgtcattttgttagtttgtccctttttatgtttgtctgtttttgaaaaatttctttggtatcctccctcgtgtaaatggctacatatagagtcatcattttcattgtaaggagcatcaaaaaaatattctactaaataaaatttctagtgttcttctaatttttttaagagatttctaaagtagtgatggtgtgcattatgggtcatactaaagatattaccgttatgagttagaagtatcactcaaatgtaggggtgttcataatatagctgatccaatccaatccgcacgatccaatccaatctagtccgcaaagtgcggatatccgcacttgtgcagattggattgaattggaaaattcaaaatccgctcttgtgcggattggatgttgattgacatgtaaaagtaaccgatccaatccaatccacacatatttataacaaaattaaaaaattatatatacaaataacattttaatgtaaagaaaatagtaatttaaaaatctaatacatataattcaattatattgcaaaacttaatagataaaatgtatattc

SEQ ID NO: 390471 - DNA, 775 bp, Cannabis indica
tttgtgttcaccgcatggctgcgtggtttgaactgtccgaagacttgtgttcttatagttgttgagttactaggtttccgttacccgtttcccatgtgggatattattttcacatagcttaactacaaaacattgctattacaatatgaatcaaactatttaagaatttctgtgttttgagtgaagtgcacactaggcacacctcccactcatgcttctgaatgtttactataattttagattcaaagatgattattatttattatgtgctattttctttttaaattaaagtaggtaaatacaagcttaaattatcagagaataaactgaatacttcttcaatggagcatgtgatgtgttaaagggttaacgtgtcaaaaatagttattactggggtagaggaatatttctcttgtttgttggacttatgttcctgtagtgttttctttttaggaaaccaaaaatagaaaggaaaagattgaattttgctcagatgtttaactatcagagaataaacaactgaaattctctttatgcccctctttctcttcttgtccttttcattaagcaaattgtccacacacccttcaaaataggtccttttaatatagtctttgtttatttttgtagcacgatcaacgactttatataccagatgatttgagaaaacaacttacaatcctagaataagttaaaaaaaattataaactacattatagaggcttctaataagaaacctctccaaaaaataggcgtatgccactaatagcggcga

SEQ ID NO: 390472 - DNA, 1052 bp, Cannabis indica
tttttttcttctaataaaagttcgattttaatttttcttcaaaaacttctaaactgtttgaatcaatcctaaccatatacatcttacaattcaaacgtagggtttatttaaagaaagaaattatatatataacactcaatataaaattaaaatgaaacatttttctctaatatatattttgtccacatttattgttataagtggttttttttttttcaagtatgaagtagttttcagggggagtcatatattggcaagtggcagattgaagatatcatcactctttgggttaggtgtgggtttaataatttaatttatcaagtaatgtacaaattaaaaaaaaagtttattatttggaatatataggatagtctagtctacacgaaattttcttgttatatataaatcaagatagaaatgaattaatttgtcttagtataacaagcaaaatattcttattgtctatatataacatgcatgcatacatactattggcttgaaaagaatatatgatctaaaataacaagttaaaagaaagggaaaaaaattaatgaaagaatgaaagaagagcttattgtaaattataataacactttcatgtttttacttcacatatatgtataatataatataacactatattgtagaattttacttctttgtataatttaattgcttatatatatatatatttcctactatagatatatagctatagcttaatttcgacttcttctttttcttttactaccttcccatatatctcatcattattaatattttgtagtggtgcttgactgcatgtggggaagtttggttgtcgttattatatatatatatatatatttatatagatatgacccatatatttgtaggatcgattttgtcccgtgatgtactttcacagaatgtatttcgtggtatattagatgggtctcagggtacattagatgagtgccagggtcgttactatttttaatcctaattaccctagataaattcagccctcagatcaaataactccctcatctaatggctggtgtatatcacgg

SEQ ID NO: 390473 - DNA, 1797 bp, Cannabis indica
gtactttgagtagatatttttggattcttatgttttgttattgtaagttgattaacattaacttattcttcgaacatttttactataaaacatggcagagactgttgctgctatgttgtttcgttacttatgattattttttcaggaggttatgtatcccaacaaacaatagtaaaaagggaaaatcttattatatatatatatatattaaaagaaaaaaaaagaaaatatcattggttggtgtctatcttgtagaatatcacttagcccaaagtcatatttagactttggtggaaaatcttcgatcatatctcatcattctaaatacaataaagatatgtattactattgttattgtattactttgctacactctaatctttcttcaatttgtcaattattttacttaaaatgcattatactgattttgttatgcttatttatttattcaatgtttcattagcgatttatccttatatgcatttcatttttatttatttgttatctatttctaggaaacgttgttcaagcaagagacatttaagagtttttacttcaaatatttatccatactgcccaccctttatgagtcttcttaaggggatgggatgtattgatctttttaatttgaagaaactataagggagatcttgatacgcttctatttccttagaatgacagtatcatgaccttcagggttggtggagcagtaaaatttttatcttcataaacttagtttcattattttaggtttatatgccttttcaataatcacaactttcacacttcccacaagactgataatttatgattaactatatatttcattaggtcctcttgagacatatatatctgatagtgatacttaattgtaatgcttgatcattaagaataactcttgttgtgggataactatataaacgaagaaactgatgataacctctatgatgctcacagtgttttatcttggctcttttagattttattaagtatttggaactatatttatgagataaaatttgatatgtgatagttacgcttccattcataatttttgttacatgttttgtgtatttatcttcctacttatatgtattaaagggtatatatatttttgtggagatatgctcttccagggatgctataaattgggggttcaaaatatggtggccccttgtaattggatatatatctacaaattatttttcacggattgagaatttacttggttgtttgtgattagatttaaatttattttgttatttaggtttcaattgtacaaggagctttttgtttaattgaaaatggttacttttacctttgagtaattattcttaataaagttagattatcaagatttcttcaagcgtcatacagatttattaaattaaaatcactaatatgttgcattcaatatttacttttaatgaaagtacctagcataaaacgaagtatacgtgtctcacacataactttcttctagtatatatataaatgtatttacattttaagagatttttttttcaccatgttttcttcttacttacatctttgaaaaacaacactgttttcacattggatcaatatagtataacgtaatagcaacgtgaaaataacattattttgaaatcaatataaacacacccattcatatttttgtataaaaaacatttaaactcataaaaatgttagaaaaatgtagatgcttattattttttagatttgtttgttatcatatttgggtatttatgcttattataatccctcatcaaaaattagggattatttcacaaatac

SEQ ID NO: 390474 - DNA, 1535 bp, Cannabis indica
tcttcccttaatttctttctcttactcgatctcagcttgattaaaaccgtagataacgattagatattttgagtgatatcgaaagaaataatgttatcaactttaaaaatcatcttttatatatatatatactagtaaaaaggtacgtgcgaagcacgcatactaaattttatgctaggtattttttattttattaaaaggtgatacacttaaaaatattcatctcatcttggttcaacccaactttctgtcatattgttcccataggattgtgtgttagattcgggcttagaagaatagtattcgttagaaggggtgccagtaatggtggtgctgatgtgagttttatcttctaggaataatctagctactccgacattacaattacacctagcctttcaaaatgagcatcaacaaaaattcaaggattataaattgaaaataatatcttgttaccttcggtgtgcccagcaaactctctaactggtgacattatatttcgcatatcccaaagctgtttaaaagtaaagcaatatagtaagtgtgtatgaatgtgtgtgtgtgtgtgtgttgggagattatatttatcttaaaagagactacaaagtcaatacccttaaagctggtgaaccatcctcgtctgatgcaataacaagctgagtagcaacatcaagattccattgtaaaacagaggagcgacgtctaactgaatcggagaaactgccagttgacagagatttcagattatagaaagcactctattacataaaaagacaaataataatatgtaaagaaatccacaaaattaaagaagagttacctaatcacaggtttttgcttctttaagccattatacattatctaatggctccactactatttagtctaaatctactttcagtgaagttctagataaaggagaggttgttgaagtgttttgtgtttcatattttcatggaaggggttatcgaaggaaacctgttggataaactcaaaaggaacctcaatggaaaggagagtagtaacagttccaaaatctcgatgcacagcaaattccgacacatacataattctcttgaaaaacttcttagcctcaactcaacccaacctgtgagacaacatggtcagtcttccaatcgtgccaaagctatgtatgattagttttattttaagtaatgttatctttaattttaaagtaacatatgtaagaaaatattgatccagaaagaacgattttattattcatgacctcaatacaaagcaaagccaaaatgctttacaaggagcaaactctcaacaaaaatctcctctcactatcactcattttcctttgcagaaaactataagctctgtaatatttttctcttttcatcatatttacaacaagtctgtaagtgtaattattaaaaatacaagtatatttaataaatacacatatgagagtgcctcacaattcgttatttgttttaaaaaaaacgaattaaacgtgtctataatatcgtaactgtcattcgttatttgttttctttttaatt

SEQ ID NO: 390475 - DNA, 1088 bp, Cannabis indica
gcatgaatgatttaatgagttattatagtgtttatataggtcatattagttacattttaccctctaattgggaagtttacaaataatatattagcccggcccataagacaccttatgtatgctcacgtggaggccttatcatcacgaagttaaatgttcataccgttctatattcatggataattaatgatatattgattacctgatttctaattatctagtttccctttttagcaagatcttattctctgtccaaaattttggaaaagtaatgttgagattttatatcctaaataaaatctattttaatataaacttatttactatcaatagaagattagaaattattagatttacatgtagatttcatgattattgttttaatatacaaattttattaaatttagaatatatagtactcacaattacagttttaatataatcttatttattattaataaagtattagaaatcattaagatgtacatgtaaattttatgattatagttttattgtggacaatgtcccatatggaataaattgtagagaagttagccatatataagaacatgagctacttcactcattgccaattggttttgagatggaaccccataattcttaataagttttaattatagtgatgtcaagtaattatgattatatgcttcaaactatttacaatgatatgtggaatgtcctttccaagatgttagcaaattatactagtatctgatgtattggctatacatcagactgaactgatattgatagtggaaaagatataataaacttacagttagtcttttctaagttaaaaaacaagagctgtatcagttagaagtctcagcagtatcaagtggtggcattatccacaaaagagttagaatttatggccaccactgaggcatttaaagaggaaatatgcaaggtattttacaagatctgaagttgcttaaagacaaagggactatctattcggatagtttgtcatctattcatttatccaagaatctaatttaccacgagaatgctggatatattttaacaggatctagatttactaacaagtatgtttcattaacatc

SEQ ID NO: 390476 - DNA, 1132 bp, Cannabis indica
gcacccagctgaagaaatttacaaaatctcctcacttatatcctcatgaattatgtgtaatgcaaagatttacttttattagtccaattttgtcagtcaatagattaattataatttagtagagaagcatgggtgttataatttttagcaataaattattgaccatttatttaaacaatgcaaaggttttgagtgagcgtatatttttggttcaaaaagcaagtagcaagataggttacattgtccaccatctcatatttcttttcttctttaaagtagctcatctttgcaatattgtagtatgtgtgaagtttgataataaaaatcaattttcttgctgaaacttaagattttcttataagttctatgtgagctgctgtgaagcttgggagaatatgtttggtgtgtgtattggtaattatttagagacagaagagtatctaaattatggtaaatgaaaattaaaataaaaaaaatattttatggagtatctaaattaatagtctcttgtgttgctatttctttcccaactaagtcacgaaatgctctcatccgtgcttcataaggagttttccattcttctgcacatgaatagcggtacctaacccaattagtagcagcgggcggtattggagaatcgttctgcatgaatacctgcacaaaacacataataaaataagaggaataatatactatgtcataagattaaatgataaagtagcatttaaaaattataaataaaatctctacctcaatgaagtgattattattgacgaaaccaattgtaatgattttgtataaaatagctagcaaaggattagatttaagtaggagaaatgtcagacattgttgtattgataagtgcactaagacaacattataacgagaagctataatgtgtcccatatcaggcatagtcatccaatatttgaagcatgggtagctcttaaaatataaagtatttcatccactctattaggacaaccataaagtaaattatagtcatttctatgagaaactaattcaatcttttagtcttttctaacttgcatccaactatcctcaccatgcccatcaagtctgcaatagctcgaaaaccacaatttccatcactttctacatctttaacaaa

SEQ ID NO: 390477 - DNA, 826 bp, Cannabis indica
atcatagacgtcggtgtagtattttaaaagctaataatgatcaaataaatagaaactttaaaaatttattattgggtgtgagaattaggcaattatctatattttctttttaataaaaaaggataaaagagtttgattgttggaggaagaaaaaatcaatctagcagaattttgacgtaagcaaagaagagaaaattgcattctatacccactttactttatttgttttaatttttaccttcatttccatattctttgagatatacccactttttatagataatgttcctattataccccttacataaatataaattatgtgctacacctaagtggagtttaaagatatattagacaactcactcataaaagtgggtagattttaataaaataaaatataaaagtatttttagttaatggataaaaaaagaggtattccttaacttatcccagaaaagaacacacctgaaaagtggaggttatttacttcttcaaaatcattagatccgagagagaaataataagcaaagattctatatataccaatttaattatgggaaaaaaacaaaaaaatacaaaaaaggaaaaaaaattacaaaaatactttgggccggcccattaaacatttatacagtccacatacaaatatttacaaaaataccacatgcactaagccttcagctgtacagagcgaaccatgaagatgaaaatacgcgctcgtttcaaaaccgcaaaacaaccaaaatgaaaccaaaacgagaaaaatacaactattaattctggcaaaatcaactggaaaaaaatacctgcaatgatctaaactgaa

SEQ ID NO: 390478 - DNA, 895 bp, Cannabis indica
tgaaggacttggttgtcaattccatcatttgcgtcatcatcattatatggattaataactatttagtaaatattaaaatagttagataagggtgaaataataacttattatcaagtgtgtagatatatagttttcaggaagaattacctttttgtgagttggcatttaatggacaatttacggacatatgtgtgacttcattgagagaggggcacactcttgttacttctccatgttttgctggaattattattttaaaaaaaataaagaaggttagtagtcgaaaatttagaaagatgaatattaactaacaataccaatttttttatatgaatataccgatctgaagtcgacgttttttggtcgttggttgtctgtgtctattatccactccttgattctgttgcagaagattgaaaactgaagtatagtacaaaaatgttgttatttcataataaaagttaattattttgattgatatataatatgaataacaattttaatatcaatgatgtcattaccttttgattgaagtaattaaatgtgatatgaaattttgtctaacttcatagattttgtgaaatagatcacaatttctaacatcaaagtaattctttttcttaaatcatatttgtatcgattgtaggtagtagtcacttttcgcttgaatcttgcatacttgcatatcttcttttggagaacactaagttatcggttattgttggagataggacccttaaggaatatttcttgacttgcaattttatttttctatcttgtagagaatgacagcaatatgcacgtattacacatctaatgattttcgtggcaattccattaattattaatttttattttattgttgggatttccaagggtttcagcaaaactgaga

SEQ ID NO: 390479 - DNA, 2590 bp, Cannabis indica
acataacctatgactagttgagactcgtggtgtatatctaggtggtcagtttgctcttcgtgtgctagcttgaggccagcactcaaagcttcatgttcaacatcattgttagaagctttgaaactgaccttgttgcctcatacatcagttgcccccaggtgccctggtggccatgcctacatcgggaagtggtaaatgtacatcttgggttcttggtctcgcattttcattggctcctacttttctcctgaactttgagagatttggggatgtatgcttctctgattagccatgaagctggtgagagctaggcctttgctgaccatgctctgttgagaggtgaccttctattggccgagtcttagtggttcactttagtagtcgtccggatgctctaggtttctgtagaacttgtcgcaactgttgatcggtgtacacatttatagggtgtatttggaagtatggccttagctttctggaagcaaagagcaaggtatgggttagcttctccatgactgggtgccaacttttaaaggcgatcagtctcttgctgatgtagtatacagggtgttttactccaccttcttctcttgtgaggacaacactcacaacatgttcagtgactcctaggtatacgtctagctcttctttgtctagggatttaggcaacacaggtggtcgagccaattaattctttagctcctagaatgcactttcacattcctttctccacttaagttttttgttgcttctgagaatgttgaagaagggtacacattagtctctagacttggacacaaatctgcttagttcagcaatgcgtcctacttggctttttacttccttgatggttgtgggtgacttcatttccaaaaaggcttggatcttgtctgggtttgagctaatgaagcatttgtctaggtcctccatatgcccccaacctttttggacttgacaaacatgtcgtccatagacaccttcatgttgtgactgataggatcattgaaaattttgttcacaagctctgatatgtggcctctgcattcttcaccccgaaagggcatgatttgtagtagtaccagcctaagtctgtcatgaagtttgtatgttcctgatttggtggatgcatcttctgtttctttatttggacaaggtcaagttgtaaaagtgacatgaagattgttgatctcctcttgacatcctacctcatcacgtgttgggaattttaggcagaggtggaagatggatgtttttgcctttagactgtatatggctagtcagcctatcatggcattgaaagttgagagaacattgattacgacaaactgtgccattaaagttctggtagttggattttctccaatagtgaggggaaatctgatatacccgatgggggcgatgccttagccaaggaggtcatacatcacttgactggagggtaccaagtcagcaagttggagccttatcttttcatatgttgatttgaaaaaaatgttgaaggaggctccactgtccaccatgtatcttgccacagtcatatttcagatttgtgcaataacgatcagggagtcgttgcgtggtaactgacttgggaaggatctccttttgagaaagagatcatcggatgtccaagctttggttagagtttgttcttcacctgccaaaaagtcacttttgtggtcgtgacatagtgttcgagcatagcacttcctagctttgctggtcttgcctggaatatggggttcgccaatgaaaacccctaagttttctgccatcggaggtttggatagagttgccagcacctgcccctgcctatgcacctggaaagagatggaggccagcctttgtagatggaagcaagccttcggagatggaggacatccttcggagatggtggccagccttcagagatgtaggccagccttcggagatagaggccagccttcatattgcttgttgctgactttccctactgggacgtctgggcatgctttgctttgtgagttttggtaggagagtgaagcatgtacacttccccaccttctcccttgggcttcatggtataagggaatcattgaattgctcttttctgcaataatgttggtctgagccatcattgttgcgcttccctcaaccaatctcattatttgagaatcgacagagatcgtctatgctagttggcatgtcagacagtttgttagggcactatgaggccatatgtttgttcatcattgacctaccctcttgtctcgccttgtcagacagcttcttcaaactttatgaagccatcaccttgctctaggaactcctccatgttcttagttgagattctactaatatctttctagaagtcactcaacggtaggatgcctctaaatatggatgtataacggccttattctatcaggcctttcaccttggcagcctacatcgtgaaccgttaattatagtccttcaaaggttcatcttctttttgctttatttcgacaagatcctccagttgtgaaggtatttatcttgcagcagagaactaaatatagaactctcgggagagatcttcccaagaattaaatcttcctggggccagctt

SEQ ID NO: 390480 - DNA, 2023 bp, Cannabis indica
aattttaataggcccttgctacaggacttttagtatataaatttaatgagcgcatgatttagatatggattagtgtggttataaatactaattttattattattatcatcattattgataattatatgtgaatatttatgttaaatgtaaaatgaattatttttgtgatcctaactcggtggcgatgtaaaatgcaaaagagggttatttaggtcacatgggtaaacttaaaatcttttattattatagagaattttagcatgttaaggttgagattcgagttttggcggggtaatagttttggactattttacccctaaatcgttttttttaattagaccttaagcaagggtaaaggtggaaatattgagtttgtgtctaggtggcaacttagcttcttagcagctggcaattttcggctgaattaattaatttggattaattgggtgtagaatagaaaaatagagagagattacaaagttggaaaccttaatttctcttcttcttcacttcggccagcaagtctacgggagtttttcctcaattttcagaggttttttggtggaatctaagagctcaattcgaggtagaaccctaacctaagtctattgtgaattttttgtgttgtttggtggtttctttaagtttaagtttttgaattagggatttaagtgttgagtagttacttactgattagggttgttatcaatggttattagttgatgatttttatctgtttgagctgttgttgtttaattttgtggttgagcaactcaaacttgactcaacaatggcaagttaagttttggtgcgttttctttgctgtttttgtttgaaaactactctagactagtattacaggaatcctagaaagtttgattgcatttgggaaagttttggctgagttctgagatttttgggttttactagtgcaaaccggtcgaccggttttattaggatgggatatttctcaacgtgcttctcagtacgttgagtcttttttgcaagactcttgtttcttttcttggatctccatcgactcatgtcttcgcctgggctgcaggatctacgtcttccataggtgtatctccatcccaaccactagttttgtttcaggtgagtactatagttgcaatatacaacctttgatggtatcactgttttctttagctctcaataaaagcaccaaaatgtttgccgaaatttttagaaactaattatttatatttataagagccaaagaatgataattcaaagacaaagagaataagaataatcaggattttcacgtggttgggacattaacaagccttagtccacgagtcaatattaaaaatctaaggttagaaaaaccttagggtttacaagaaaatatgaattctctattttgcatgaccaagtgaataataaaattctaaccctttgcatgtaaggttttttgtgtatttatagtgtatagaggtcatactcattacctttttcccattgaggaagtgtttacaaataatatattagccttggggttatttgatgaagcccgccccatgaggcgtcttttatatgctgttgtggatgcccatcacgataatagttgtcaaaatcgtgtcctatctttacgggaaataaagacacatttattacttgactactaattagcatttttctatatttagcgagatatgatattcaatctgagattcttggaagacaatttctaatctcatgggatctggcagtaaagggaaacatccatgggcattcagatattcgctaattacttcctctggatatatggcttaatcttatctgaatgtataccatgctggatgggattctgcttggacgggccactcgctcctcattcggatcaactggtcgcttatggatctggcccagctattttatttgggccctctgttgggcctggggtatttaagttgtattcgttatagaacttccacatgtccctaactggaaatacggataacagtatccaaccaatattttgttggaattattttac

SEQ ID NO: 390481 - DNA, 682 bp, Cannabis indica
tatatatatagatttaattataaccaacacaatatttattaaattatcaaaattttattatgtagttaaagttaaataacggctaatataataaacgataaacaatgtgagcatcaatgagttattgtggaatatttgaataagttgctagtacttaatataaatgtaattaatttttttaactggtttttttatttttactttaaatagttttttttttttgtattttacagaatttcacataaaattttttatttgaactaacaaaataacttaaatcgcaactaaaatatccgtataccaacccacataaaaactactggagaaaccatttaaaaaatccaaaccgtaaattttaaaaaaaaaattaatatacagtgtaattttcctttctttaattatattataaaaaacattcttactaatacaattaactcaataaattgggtaaattgatctatttttgcaagtgtcatatggcgagtatcttttttgtgcgggttgggctacacttcgttgtttgatcctcttttttggtctctcccacaataattttgttgaaatttttacactatatacttaaattttcactttttttttacttttttacttgtggggtaagttttttttttaaaaaatttaaactatatattttctatactgtgtactatgttaagtttta

SEQ ID NO: 390482 - DNA, 1954 bp, Cannabis indica
atattcgttcaatatcaattggcttgaaatacatattcaacatagagacattccaaactcgatcttcagtaatgaaactcgaaaccgtcattgatggagaccctgaaaaactaaaagattgaaactcattgtgacttcggtatccaaggatcataaccacttgcaatgtgaagaccattaccaatcttatattgcagccctttaatcaataattctctaccgtaacaaatactttgctatgttaaagatggtgagtggccaatgatagcatctaaaaaggatgtgtttgaaaaataccgatgtttgagcaaacagcttaataatgaatcaggcatatcaaaatcctccatgctttctttgtcaaaagttcttggttgaagtgaacaaaggagagaaaccccataccaccttcaattttcgatttgcataaggatttttatctttccaatgtatttttgttgccattctaattacttccccaccaaaagtttgctatcatactctccaattggttacaaaatttctttgtaagcctgaagcaactcataacataagtcgttaatggattgtacaactgctttcaaaagcacttccttccccccaatagaaaattttttgtcattctaagcatggagaagtttccaaactttttctttcatatgactaaacagttcctgtttctcttgccctgagtaagagggtaacctcaaataccgctcatgacattagttattggaattcgtagtgtttgagacgaaaaaaaattctaggctgttatcatggtattcggagaaaaggacatcactgatttttcattgttaagtacatgcctcgaagctttgtgataggtatcaagttatattttaattgacaatgctgaatgattcgtagtttgacaaaataataagctattattggcaaagagtaaatgtgaaacccaaaggggtgtcaaacgtaaccctttcaagttaccttcctgttcttcaaattgtaataatctcaaaaggccctctaagaaaatgaagaataagtgtgaggataggggatcaccttgacgcaagccacgatatggttgaacatgaccaaccacttcaccatttagagaaaagaaaaagatctagtggatatacacctcatgatcaaaggtgtccatctagaatcgaatcccgtcttaagcataattgcttcaagatacttgccattaaactctatcaaatgccatactcatgtccaatttgagagcagattacccaattcaaccttgtgttttgtgtcgaaaatgatgtattagctcaaaagcagctaagatgttgtcagtgattagtttaattcgaaaggaaagccaactgtgtttctgagattacaaacggtagaacttttttgaatctaatgactattgtcttggagataagtttttatataactacacaaacttataggacgatggtcactcatactggttggtttgggcactttgggaatcaaagtgattatagacttgttgacctcggacatgccaagaccatcattaagaacaccaagaacgacattagtgacaaatgaccaaataatgttccaataattctgatagaacatggtagacatcccatcactttcggggctcttgtctggactcatagaattaagcgcttcatacacctcatggcttgtgactggttcggttacggactgattcatgtcatatgttatagtagatggaatggcagaaaagacttcatgcagagattgagaatggacaccatctgaagcaaataaattgccatagtaagaacatataacctgtatcatatcttctttggcggtgacaacaaaaccttgatcatttattaaggatttgatttcatttttggtcatccttgaggtagcatgagcatggaaaaattttgtgatttggtcaccacattgtagccaatcaacccttgatctttgatgc

SEQ ID NO: 390483 - DNA, 1525 bp, Cannabis indica
catagaaactccaattgcaactaacggaggaacttaaatcgcaaccaaaaatcgtatagcaactcacatagaaactgacggagaaaccactctagaaacccaaacattaaatttgaaaaaaaaaagaagttaaaaaaatagtatattggtaatttcccaaaagattataaatattaatttctgaaaagattttattaaatattttaattaaaaatttaatttattttaagtatataattattttaagtctaaaaataaaatttttacctgttagtgacttgctatagcaggtcatcaaaaaatgtaactatcatggctatatttttactataaccattgaatataataatttttataacaaaccaatatatttattttgtgttatgtataactatcaaaattaattgtcaaatactcaactactactaataataataataaggaaatttgatttaatatacttgaacaaaacccctattacaaaaaataccctcttaattattttatacaatattatcctaataattttccaatttattcacccttaccatttatttattttctaaatgctaaacaaaactgaaaaaaaaacaaatactctctctctctctctaaccctatcagtcgccccttcccttctatctttgccacaatgtaacgctcagatacttaggcgcgctaaagtgattttccaaataacgtgccacctttgctaattaaagggttttcttaaaaattgtgtcaaattaaaacttttgatttaactattaaactttataaacttttatatatttatttacaaaagttggaaacccgaacttatacttttacaaacttaattgaaaatgcatttataatcttgttgcttagcgattgcaaaatacaaccccagatgtcccgagactgaacactccaggtcgcgtcaccttgacatgtacaatcttcatccaagcctagagctcactcttgttcaaccttcgccatacctttacctaaacatgaaagtaacaactctgtgtcaacagactcagtaaaaaaagcatacatcaaaatatatatattctcgacttatgtctaggcgcccatacacctatccacaagacttatcagatgatttaagaacgttcttaacagtaggtgctatttgaccatgatgtcacccactaccagcactatgatcgcactgcaggaccgactctatgttcgtactgctatgatagcatcaataacaaccaaaagtataattggtcaagatatcactcttaaccattacgatgcctgtactgctgaaccgatacaataattgtgtcgctatgatagtagtttggtagcacaatatgtatatatcacacatacatacatttacatatataatatgttctatactattcttgccttatttctgaattcaaataagttggctgacttgaacggaaaacttcgtgctggatggatgccctagtcacattcacgtatacgggtaaatgacatgtcaaaaccctaatccgggaaacccaaactccca

SEQ ID NO: 390484 - DNA, 483 bp, Cannabis indica
agttctcatacataaatatataatcaagagaataaaataaggctagaaaattaaacatgaaacataatatttggaatctttaaaaatcatcacaataaaaaattcttttctttttcagaagaaataaattatcatttttgtattgtatataatattttgcattttagtattaaaaaaacattgagtacttattttttaaaaatatgtatgtgttgtgttgttttgcctattatttatttatttttttattttttggtctcgcaataaaataaaagaaagtattctctctttccatgatatttctcgatggttggttggcatgcatgtcaagatttcaatatggggaacaaacacatgaaacacacaaggaaaaaaaaaaaagaaaaagtatacaatcatcagagtccaaagaatttaagtattttttagaaatttttacactaaaaatctaaaacgataaatttattacattaatacctatac

SEQ ID NO: 390485 - DNA, 559 bp, Cannabis indica
aaaataataaaaagtttacaaatataggtatctacagttgaaaacattttttatggatttatttttatttttaacaaaaatatccacaatttcaggtacattatattatatttgtgaaacatgcaaataatgtcactttttgtaaaacttttttatttttatgttcaaatatatttttttatatatttttatggtgttttataaaaacaacaagtaaataataaaaaaattacacaaaaatgatatctaaataacaataaaaatataacatgtaaataacaataaattaataacggaacaacataaaaataaattaaaagaccataatttctgtaattaaaatcataaaaataaaataaatatttaaaattttatacaactgtattttttgtatattttttttctattatttttttgtaaattttttgaaataatcccaaactataaacagccgtttccaacatgaaaggctcaggggctcagctagttaaggggtaagttgaaaaatgcatcttttattcattaattaatcaaatttacctctaattttatatttatt

SEQ ID NO: 390486 - DNA, 818 bp, Cannabis indica
ttttttcgaaatggggcccgcgtggtggggggcctaaggcggctacctccttcatcttagcttagggccgtccttgaaagtatggtgggctcaaggaaaaagatgaaacaagggatatggtgttcttggcagtcgtctagtaagtcaaaaagaaggttcctttactctccttatataggttgtagggtgggttagtgatcccccacatgctgagtgtctcactaacaaatcatgtatatcatccttaataatgaataaaaaattacaagaaaatagatttctacaaaaatccccttgtttctaggccaaaatctcacaaacattgagaaaatagttattttttgctaagaacgtacgttccaatttgaaatggagtgacaaatgatattctctcggcttggaattcatgacattggttataattattgaatacatgtgttttggggtgccatttttcacatagaatgccacatgggctgcgacagtatcctccaacaccccacacttagtaacactactcaattcttgagtaaagtgtactagtctgtcttgcgagcaaattttagacctaataacttcagaattaggctatgactatgagacaaacttagatccgccttgaaaatatttttcaaagcaagttgaactaggtcatttaaataaaaactgagagagagttatgcctattttactaagggaaatttgttatgttctgtcctagttgcgagctttgacatggccaaacggttagtgctcgaccatgcatgttctcagacccctcaaagtgtgtttttgactttttttttttttttatttgt

SEQ ID NO: 390487 - DNA, 554 bp, Cannabis indica
atttattttatttttttttgataaagtctaattactaaattttaaaaatgttattgaacttaataattatgaagcggcttaattatgttatttaataattaattttcaatactataaaacttatttggcttgatttttgttaatttaatttcttataattagttggcataaaatgttgggagactgattaagtgggaagaaaaatgacatatgtctgaaaataagtgggaaaaaaaaaaactaaataagagatctgaatcctatttccccgaaacttttaatataagtgtacctatgataatacctgataagcaagaaaatatttaattgtaatacttaaatgagataatatataatattatttgatcagttcaaaaaatatatatatttgataggtgggtattcgatccaaatctacatttttctcttcatccgatccaatctaattagtctttgaattcaaaaaattatcatctaattcaattcaattagatttcaaaatccaatctaattattaattagattggatcgattttttaattaaatatctaatt

SEQ ID NO: 390488 - DNA, 1222 bp, Cannabis indica
tattgggtttatttgttgtagtgtttgaaagcgttcaattttaaggcatggaaacaagatgtggaatttacttgaggcataatagatttagacttttgcctgcgagaagaaaaatctgttgatcttactgataccaataatgttgctcaaaaactcttcaagcacaatgaagaaaatcaaattgtcttagtcgcaatgccatgaaaagttctattcttgaacatttatttagtggtttgccaaaccccacaaattctaatgagtttttcaaaactgtggaaaaattatataacattggtgaaaatgtcgaacttggatatcgtgtggatgaaaatgatgactgttaagaatgatgaatcaaaatgagtgcaagattatattttgaaaattgtgaatgttcagtccaagttgaatgatcataatatttctcttcttgagtcttccattatcatcatgctcttcatgcacttcctacctattttcaccttatcaagataacctacaacacttataattaaacatggagcatcaatgacctaatttcttagtctgtaaatgacgaaagcaagctgtaaatggagaagaataaatcttctcactatgtttctcaactaaacccaacaaatgataggaaacattataaaagaagcaagaacagccggaggttaagggatctaatgagtgtaggttgttctccttaatgagttgagtctagtggtgaagacgactcgccaaacagacaccagaggtggccgaaaaatccattcaaattttgaacctctaaactttgaattgcgattacgggctagcggcggcaaaagaggcggcgccgcttgggggttgaggtcgtcggtacctgggggttcagtccgacgcgtggagtcagatggtttagtttaggcttttctcctcgacgagctgagtctagtggtgaagacgactcgccaaacggacactggaggtggccaaaaaatccattcaaactttgaacctccaagctttgaattgcgattacgggctaacgacggcgaaagggacggcaccggttgggggttgaggtcatcggcacctgagggttcggtttggcacgtggagtcggatggtggccggagagtggtcgctatagaaagtggtagtgatggtggttatggcttctttgaagctttgaagagaaagaaagagaaagggaaagagaaagaaagaaagagagagagtgctgatg

SEQ ID NO: 390489 - DNA, 527 bp, Cannabis indica
aataaagtatatatcacatgcaagtaagtcggtagaattgaatattgatcatgaaaaagagtaccaccacacaaatcattaataaaatggatataaaatttgagaaaagagcacatatataaataattaatttccatggaaaaaaaaagtataattgttgactcttactttaccacaaagtataatatgaaaacaactaattatccatcctcatgaaaatatattatgcacttttttaaaaggttttcaaaaaagtgatcgatggatgagatcataaaattaattaaagttaaagtatataataaagactagctagtatatagtgggatgagatattattatattttgtaagctagatattatttaaatgaatgaaggaatgtcggcatatatataacttaactttacaacatacattcatattagcttatatatctattctctataaaactagtaaacaactcgcgtttcgtttccggcagatgtttaaaaaatttaaaattatatatataaaataaattatattt

SEQ ID NO: 390490 - DNA, 1206 bp, Cannabis indica
gattttttgaagcatttttctcaaagctctcggggttgtatcatctggatttatcacttaataacacctgcaattgaatgtctctcctgactggattcctccctttcatttacaatttcttgggcttcgaaattgtaaaatggggtttcaatttccaaagtaggctaaaaaactcaaaacaatctctcacatatagatatttctaattcaggaatttcacaatctattcccaaatggttttggaatttgactgctcctttatctaatgtgaatctttctaacaaccaaatcagtggggttatagtcttgaatgattattatccatcaacaacgacatttcagttcgttgatttgagctcaaatcatttcgatggtccaataccaaatattttattcagagctcgagcattatttctttcaaaaaacaaattttcaaatctaaattcaatatgtaataatgttagtcgtgattataattactttgacttgaactttcttgatatctctgataatcaattggttggagagcttccaaaatgtttttcgaaactccaagacttacgatttctcattttgtcaaacaataagttatcaggaaaaattcctagttttgttggtaacttgttttggattacatcattgcatctgaataacaacaattttattggaaatttgccttcatccatgaaaaattgtagagacttgtttcttcttgatgtgggaagaaataatctagtggggccaatacctttgtggataggagaaagtcttcaaaaccttaagattctcagcttgagatccaatcattttaatgaaacaatccccccaaatctctgtcatttgtttaaccttcaggtgttggacttttctctaaataacatctctgggagtataccgcactgtattggtaatttttcatcaacgaataataatgaagatggaaacaactttggtgtgataagatcttatatttataattctcttggaggtttctcttatgatgaacaaattttcttgatttggaaaggaactttatctcagtacaaaaatactcttggtctagtaaagtttatcgatctatctagcaacaagctaataggtaatatcccaagagaaatctttaaacttgatggtttggtgtctttgaacttatcaagaaacaatttaagtggacaaattcctacagagattggccaattggtatct

SEQ ID NO: 390491 - DNA, 1242 bp, Cannabis indica
cagcacatagtttaatagtgacattctttattgattttttgcattagatatggaatcattagagtttcttagcggtgccaatccacaagaatatggacaagtggaactagtcaaccaaactcttaaggatacattaaagaaacgcctagagcaagcaaaagggaattggcctaaataactgcccaaagtactatgggcctatcacacaatagaaagaatagcaacaagtcacactccttttgctctaacctatgggtacgaagctatgataaccgtagagcccacacctccatcctattgaagacctacatacgaccagcaaattaaccatcagtcattggttgaatccctagatggaatagaagagatcattgaaagatttgagcttagaaaggtggtgtatcagcaaagtgttgcaaaacattacaactataaggttaaagatggaaatttaagcctggagacttggtgttacaatgggtattcctgaacacgaaagacgcagtagcaggagtacttgggcctaattaggaaggaccatatgtcgtagttaaagtgcttgaacctaaaacttacaagttggcatgctatgactacaacttgaatccagtgccgataccgaggtattagaatagggtgcatcacgacggcactactaataaaagcaactttcttcaaaatagttcgcttcataataagatttaccttaccttatgtaagtgaatcgattgcctcttaattgatggcatcaatgaagttgtacctaggttaagagatccatcgctaaggtatggctcctatattaaagagtcgaacagggcattagtatagtgatgaccacttcaactaagcttggatgaagaagaaattctacaaatactacttttttctttcaacttagctcacaataatataattgaatttaatttgatgagaaaaagcattgaacaaaattttttttggtacttcattttaatcaatcaattacacctcacagacctgacgacactctctaagcgctaagtaaagattatgagttggtcttgagataacttcaatagtttcttaagtgagttaaacactgccacccacgaatcctcaaataagtcgagaatgctcacacgtgtaacaccactcaaacttcatgatcaagaaggcccagggggtttggtttagcaagtgaccaatgaaggcatttacttaatcacttgggggcacataggttatgttatggtatacgag

SEQ ID NO: 390492 - DNA, 2914 bp, Cannabis indica
tcatattctctccaagtctactcgttccaactctactctctcacactcaaactcacataacaaacacctcactaggtggcgtaattggttggaaggaataaaaatatagctagaataagaatgacattctaatactttataataaaactaaacaaatgaatagaataaaagttgtttccttttcattccattccatttcattcctcaaacgaaatgccaccctaacgttttcttgtgtttttgcaatatgttttcctttacagaaggaagttccatatctcgtccaccactcttcaatgattctaactattcttattggaaggttagattgaggatatttattaagtctcaagatgagaaagcatggagaatgattctttttaggatggtctcatcatgttgtggtagatttcaaaggtaattcaaagttaaaacctgaacttggatggtctactgaagatgataagttatttgcttacaatagtgaagctttacatgctacatttaatggagtatgtgaatgttttattaagcttatatcttcttgtgaatctgctaaggatgcttagcaaatccttcaaactcaatttgaaagaatttcttatgttaagtgttctaagttattatgcttcaaacctaggaatggcaatttgggattttttcgcgggccgggtcgaaatcctaacccgacagggcggccgtcggcccgtgacaatcaggcttcattgacccgatccggcccgacccgataatagttgtgtcggatcgggcctgacccagcccgcttaaatccctaaatggtttaatgatttcattttattccctaaatcaaaaatccaaaatcagtttcagtcttcactcttcagacccaacccagttcatgcacacgaatcacaccattctcatatgtgatctctcctctctttctcaatccttagttcctcatcttctttgtctctgatctcattttttctcctatttctctctcccatgacccacctacttggctacttctctattgcttctctcactatcgactcaacccaagtcaatatatgcttcttcttttcagcttttctttttctgtctttctttatctttttttttggttttattttgtttacgttagattttttggtgtagatctttggttctaagctaaaattaagggaattagttattctattatttttatacccaaaatttggctaataaccagaagttgggactcatagacaaacgcgaggcatggataggtcacgaaattattttagtgaccaagaaagtatgagtaatcgagtagttaccaatctaaaagttactcaagaactaggtctgtgagtaattatgaccaaagatgtcgcgaacctgatctctactagcacttaaatcaaaggcagccagaccttcgtgagcatttacaccataatacaccggatttgcgtaaccaacttaatcaaaatgcaaatcagcagcctgtggatccaatacagttacgagtaatacaattggaggacaagttaagaaaataccaagatggagaatatagaaaattaccaggatatgactcagatgaagaaacagaaccattccaccctaatattttgaattatcaatttcctcaaggagttaaaaatcctcatatcatgcagtataatggtacaactgatcctgtcgcccaccttaacaattttaacacaataatgtgagcaagtaacgtttcaaataacttgcgatgcatattatttccaacttcattgacaggagcaacaagtagttagtttgacaaatccaccaactatttcataacttcctaggagcacattgtaaaagatttcaaaaagtagttccaagctgcaagagatcggcaatcagtagcatgtcattaaccaatatcaaacaataaccagaagaatcccttaaggtatacttaagtcattttagtacggctacagccaaagtcagaaatttgaatgataacattcaattaacaaccctagaagttggaatcgcaactgacttatcaattgtaagggggaattatgggatgatttgcaagggagacatgttagaaacatcaactagttcaatgagagagcatagatttttgtgcaaaaagaagaggcacataatgaaattaagctgatgaagtctggctcgggagataaacccagcacaagcactacaacagcgagcaccgtgaccactaaagtaaaaaatccaaatggtttgaataccaagagtaaggatgaatctagagactcatccaaggataaaaagaagcaaaagaaacatgaaaagtatgtttcaatttattcagtgtatactgaattaaatgagacacgcaaaaacatttacctcgccaacgaaaatcaggtcgcattttacagagtagaactgatgagacatgcaaggaacaagtaatatcctactaagtattgtcatttccataaagatattgggcatacaactaaagaatgtcgttagttgaaagacaaaattgaaagcccaatctcacgaggatattttgggcaataactcaaataacccaaggttacaacctccccctgtagagggcaaggatatcttagttatttttagagggccgcacagaattagtgcacagaaaaggtacattaatgaggtaaaaaatgagacatcaatgtttgctccaacctttgaagaaagtaaaatcagatggactgcccattgtcttttctaaagaagacccaaaacatgtacgataccctcatgtggatcctctggtaataacaatttagctcactaataagagggtaaaaagggttctcgtggatgacaagagttctgtgtgactccctcaaaaaatctttgggggtttgcattgtttaattattttcatttggttctccattttgtacaaaatttttgagta

SEQ ID NO: 390493 - DNA, 1198 bp, Cannabis indica
tcttagcgaggctaatattttttttacctccagtcactgtttcttttcaccaggtgacttatattttgaaataatggctcagaaagctcacaagtcaaagactcctcaagatcccattgttacatttgaggctgagttgattgaatcaaaagttagatccataggatcgtatgttagggaagtcctaagatcatgcggcatcaaaagtgaacaaggatgccgcattaggtctgttgctgagggggaattcagttgttatcccccaaaacaggtaactcgagaagaaggctgtagcaccagtgagccctcccgaattggcatttagagccttgaacatatcagagttggagtaaccctcttagagactactttaaagattttaccttggcatcgttccactccaattggtgcccaactcatacaggatgttggcctgtctaaagtcattataccatggatcctgaagtgggagtgcccgaccctacttgaaatattatatttttattctctgaaggcctatcctgtaaggaagcgaggagtggtggtttttactaccttgggacccataccaatgatcataggatcattgtaaggctacccaacaaaaagaaattcaaggatgacttcttttggacttcaggtctctttcccttcaatacaaccaaatttcaaatcatacataagtatttcttttcttaaaaacatggtttcgagtttttatctaacgcacattggccatattttactaatttgtttatttgtcatgttaacatcgatcaccaggagacctgtcccagcttctgagattgaaaagaggcacaaaattcttcttggccttccttttggatagcgagtagtagacttcttgttgaacaagaagaattttaagacttttgctctcctcggtagcaaacaatctattgaagacttcaaggtcccaaaatatttagactggaaacaagttcctgatctcgccgacgagaaagatagagactatgtgactcgcacccactatttaaaaaatatcacccctcgggaagctaaagatgatgtctatcacggtaataactttggtacttgtggctggtctccgaccgtaattagagctgagtgtactactttagttaaatttaaggatagtcagtgcaacttttacatttagaactgtgtagatcgcattgctcataggtttgacagt

SEQ ID NO: 390494 - DNA, 624 bp, Cannabis indica
atacacaaattatatttgcttaaatattagttttaactaagcaatgatatgaatttcacaaataatagataattaaagctagcattttatctatttatatatatctatatattatagggtaaatactattttggaccttgtgttttgcaaaagttacaaattgaactatctatttaattaaatgacaaaatggaccctatatattttctaaaatggtaaaaataagacccttaactcaattttcaacaattttattgtataatataaccaactttaagacaatttctaataccaacagatacagaaaatataattagttttgtcataatatctctagatcagattattattaagttttattttaacaaaaaattagttcaggatcctatttgtacaattttgaaaaatacatagtctattttgccatttaacaaaataaagagtccaattgataacttttacaaaatacaagatctaaaataatatttaccctatattatatccatccaaataaatgaatattttgtaataacaacaaaatgaaaagtgaaaaaaggaccaaagcacgtatatctattctatataaaatgtggctatataacagaattcttggtttgtgagaaa

SEQ ID NO: 390495 - DNA, 525 bp, Cannabis indica
ttattattatttttttaagttaattctcatgtaaatttttatattttttctaccaatattactgttgctctaatttttttcttactcgataatgtgttctcttttttttttctaccaaaataaaacctctatttttcttctatttttattgattaatggattttataggtttaaaggttagcatctttttttttcgttgtctttatatataaatatatattttctttgtatattttatttaaatatctatcttttttattaatattttattttaaatataagaatttatatttaatatcaatttgtttctttttttcttctagattagtgttaattattttgtttacacgttatatatcaattaaacagttaaataagattagttttaacgttatatactaacttttttaatttgctatagcacagatattattacaagtttattgtcttatttaaataatatgtacatttttttaaaaaaaaatctttgcattttttgttgctatgggtctcccaatacattta

SEQ ID NO: 390496 - DNA, 797 bp, Cannabis indica
tttaattaaaatatatatataatctactataccaactgtatttcacaaatttcaaatttcaaatttttcaattttataatctatgcataaaattaattatcaactacattttggaagttttaatctaattttattatgtttattttattttaaacacatcacattataaaaataaaattttcatagattataaaaaactggtatttatgttttggttctatcttgattgtaaggtggattagtattcatttatttgatactattttatattaattttgaaaatatattgattaaatagcgtttttgtgcttcacaatagcaacggtatacataagaaatcaaaataaaatttgcttattcaggaaaaaaaaaaaaataaaaaaagaaaaaaattgcttctaacttatggcacatgatgttaacaaaatttagattaatttggagtatttagaaaagtactaaaatcttttctacctgctttttttatttagatttttgaaattagtacgcgagtatacaaatatcttatttcttttatttttttttcttatttttattcaattttttaaaatttaataaaaaaaatattaaaatatatttatcattgtaatatttttatgcatttttgttagtgtactcaactatttaaatcgctatctaaatttaaatttatgacatctttaaaagttgagcatgtatgccctttaaaagctttgtggcagttagtccttcattttctttttaactgttgtatcaatctgttgttcatattccttatccttataacctcttctttt

SEQ ID NO: 390497 - DNA, 1649 bp, Cannabis indica
attggaaaccatccccatctactacaaatattctttttccctcttctcagtcttttttcctacatttttcacaacccggacttattcttctccattttttcttgcaatcaatagttgtgtgtgccataccagaatagtggccacataaaattagcgtccacccatatgaaacttataccgcagtgctgaaaccattcttatcattaaaatcaatagcctcagggaattgttgattcattgcaacttttataacaactgaaggataggtaagtttatcccttctcttagtagcttcgtccaccatgataggcttgcctacttgcccaatttttttgaataagtatttttcgccccaatatttcaagtgaaggtcatcacgatggacccaaataggacccacccgaatatctactttcttgaaattaacagtgcgatcccatggcttcatcactatcgtccttctattgaagaaaatatatccacctttgagaacctcgtttctatcttcaattgaattgaatcagattaggaaaaagcctaaggatagcattcatactctttccatcttatcttgtcacattctcctagtaaagccttcttatagagggattagcacctaaaacataacatactatagtggtgaattgattttaccacagggagcaatgttggcttacctaaaaccatatatgagctacttacatggccctggatctcttagggagtgacccactcttttcagggtctattctgattagaatattttgtgatgcttgatcattaaccatcacctttgtcaccattatgtttgaaattttgttaacattgtctgaattttgtatgttgaagctatctattgtcatcaagatagacaaattttatggggtaagggcatattgcttgtgtgcttggtgatgaagcatgagttcactttattatcacatgtgagatgactcattgtccaagtctagtgcaaaaaaaccaatctgatcatttgtataggtgtgaaataacaggtttttgaagaacctttgcttgttgatttcaactcataaaacattaattaagaaaaaactccaagggaggaaaaagaaaaaataaacactaaaataaactcttgctaagtacagcatcccatacttaggatcagtttagcaactgaaagaatacaacaacttgtgtagggtcccacacccagagggttttcttcaatcaattagaaaatatctactggatgcagcatccttcttccaaataacattctgtaattgatgatgcttttcttttctttttgatttttgtgatctaaggaggaatacttgcactagcccttcaaatatataaccttagctatttattcttgtgtgacctcaaccatttatatcataataatgcttcaaattggtgttcaaatagtttgtatgtgcggttgttcaacctcatgaacttaccagcactcacacttgcacttttgattaaaaaactcagttactacaataacgccaactttgttttatctgttcgggattttgggttggaccaaaccttttgtacgcatcagatggtaaattagcgaaatgttaagaattttgacttaatttgaattttgaaataagaatctttattcatttattgatcgaaggtgtttt

SEQ ID NO: 390498 - DNA, 2031 bp, Cannabis indica
atttttaaaaagatttttctaatattttttttaataaattatagaattttattaataacaattatttaaaataatagtctgtaatccaatcgagacatcttccccaagacatcttccccgttagagacatgactaggattatagaattagagaaacaaataaaatatttagttgtataattcccaaattatttgacaaaaaaattaaaataaaatcagatgaaaaaattacaacatcacaattaatcttaagaaataaattgttgcagcatgttcaactccgtagcttgaactctcaactaatgtgtaaggtacgtaactaaattactaacaacccctttagtcgcaaaaagattgttattcccaaccagtaacaacgatttaatggcgagccattgaagaacaagaaagaatcaacaacaaaacaaaacaaaacaaaaccatgtcacataaacaagactaaaacactcaaaatcacgtcacacaaacaagactaaaatactcaaaagtatgctacatagacaaggttgaccctcagaatacatggagggcgtaagactatttaaattttggggccctcactttcaaaaaatatatataaaaaaaatattaaaaaagagtcatgagcctcgaacctacaccatcgtgtaacgtgtcattcaccccaaccaacccaagttgtgaacatgtgttgtttactaatatatttaattttactttaaataaaaatactaataagacatttcattttttttttatttttaagtaccattttatttgatcagaaaaaaaaaagcaccataatagaaaaagatgaaacatctcttttatttaataaaacccattatttttcttaaatgcatgtttaatcaattaatgagccgcaacatagaacaaaataccaaaaaaaaattacataataaaattttaatgtctaaaaattaaaacactaagccaaaaaacaccaaataaataaatttaataactttacaacaaaatattaaaatatatatatatatatttatatattgtagagggttattaaaacaaaaatgatacatcatcatagtttttttttactttctacacattaaattattctaattattgaagaactatcttataatggacggcagcttttaattaaatatcattatattttttttgtttttgaactgaaatatcattatatttttaatacatagtcattggaaaataaggaaacttagtagtaattgaccttctgaaatgaacaagggacaataacatcgtcctctacgaactcctctgtttagattcttagaaaataaaagagagagaaagagagagattgaagatggagtcaccattcagaggtgacatagcaaagggtaaggtggctctgataacaggaggaggttcaggaattgggttcgaaatatcaactcaactgggcaaacatggagcttcaatcgccatcatgggacgaagaaaacaagtcattcactctgctgtctctgctctccgatcacttgggatttcggttactaattactcctctccttctttagcttttcatctttttgttaatcaaatttggttttgtttactgtttggtttgtgggaaaaattaagtagagaaaaagaaaaaaaaacagtttggtttgattgattatatacttgcccatcttaacatatgctatttaaattgggatatttatgaaaagattaaaaaaaattaatatatatgacatacaaatttagttatactatataaattttaaaaaaaaataaaaatatgagataaacttaaataatttaaaaccttatataaattttacttttatataatcaaaattagtttgttgataaaaaaattaatttttggatacatttgatttatgtgatttatgggtgactattcaatggttacatttttattgtaaccatatgttacatttttctttaacctgtaatagcaggttagtaataggtagactttccttttttagatttaattaattatattaactattttcttaaaataattaat

SEQ ID NO: 390499 - DNA, 830 bp, Cannabis indica
aaccacatcgtgagccaccctattcctagctttagaaatccagaaaacattaacattaacaaaattagttggactaggataacggtcaacgaaaacattccagatagtctttttttattattttttttatttaagcgtttatatattacaactatttttacctgggaccaaaaagtgcaccaatagaccattcacaatgtagaaaaaagtattccaacaatatatttcaaaatttgagggtgccacaaaaagtcaaattttttctttggagaatgtatcaccgggctctcccaactaattcccagcttatcaagcgtaagcctcctattcaaccgatatgtcacagatgtggtgaggatacggagactccggagcatgcgttaattttttgctcttcattgcgtcctttgtggtttaagcttcggatttggaatgtgctaaatcgtggtaggtctgggtctttggcagaattgcttgtttatctctttgaggtgcttgaccagaataatttttctttgttatctatgttatggtggtggttgtggtatgataggaattctgttttgtttgggaaaaagcaatctagattggaagtgattgatgtgttagctaaggaagctttggaggagtttcatggtgtgggtgtgagttctgggtgtcgagttttgggggcttctgaggctagtgagcctaggttgggtgtcaggtttggtggggttgggcaggggcggccgaggaggggttgtggtgaggcgtggaggggccgttgtaaagtccttttttggcaaattagttgacaaaatatttttcttttatggtaagattctttt

SEQ ID NO: 390500 - DNA, 900 bp, Cannabis indica
gctgcaatggcagcagcataaaccttccttttgaagctgtcaacttttgctttctttatccacttgctgatattcttcaaggtcacagccatattcatccattgaagccattgcttaatttgtgctaagcaattcttcaaaaacaggcagttaaaaagtaggtgcccattgtctcgctgccatcattgcacaataagcagttatcattgtcgatcacaccaaacttcttcaatctttctctcgtctttattttcctaagcatagcaagccatgggatgaaactatgcttaggacgattaaaacgactccaaacaaacttactccaatccaccttagccggctgcttgtgtaattcactacaaccaaccgccactatgtagttaccatgtgactggtttaagttacccaaactcttcatttgttcttttactagcaccaacatcctccaataccaacttgcttgagccatagatttataggtccaccaatcctcatccttcacatatacattgtgaaaccatttaatccataggttatcttccttcttagccatggaccaagcatatttgaatattgcagccttgttccaatccaagatgcatctaaatcccagcccacccaagctttttgactgacaaatcaaagcccaagcaaccgcgagaacacctgttaatgtgtattgtccattccataaaaaactacgacaaatgccttctatttcacttacaattttttttggcagcaacatcacttggcaccaataagagtgtatagccatgagtactaagttaataagcacaatacacccagcaaaagaaagatttcttgtactccaagttttgattcaagccatcttttttccaccaacaccttgcagtcagctgaggagattctctttgg

SEQ ID NO: 390501 - DNA, 1149 bp, Cannabis indica
tatgatttttcttcgattagatttgtaattgttgaaacagattaaatatcatcacataattcagtttcatcatccaaatctagtttctatgttttctttctttttgtaaagatttttttaatatatatatataaataaataaatcacgtgcactaaattaaataatcataatagtgtatttatgatatattattatatttttttttttgacaaaattaaaataataatattttaagatgttatacttttcattagggatatgcttggtttagtactttagttagctaatttattttatatatattattttaatttaaaacatatgagggatttgttaaattaaaaaaaaaaaaaaaaagaaaatgaatatgagagatgaagtttttttagattagtatcaatgtaacaggttttttatttttttttagagagaaaggaaatattcattaataggtaatgaaacaaaataaaatcaaaatatagttcaaatcaaagagtaaaattacaaaaattagatatactaagtcgtctacaataacatgtaaaaaaaaatttatgaactaataagttattaatagtcaagcataaagaaagtgtgaaatatattaggcttctaaactaaatgaacaacttccagaatccgcttagtcaatgattttccaataaaaattaagacataaaaacctattatttaaatcataaataaaaaaaataacacgatcaactatgttgtaatgcttaatcataaaatattggagcacatacaataaagatatggagatcttccaaatctgacaactaaggaaaaagaccaagataccctcaccaaaatgatttagaattatcgatgagacacccataaactaataaaaaaaataatacttacatcttgcaccagagcaataacaatccctactaatctagtagggtggtgaaaaaaatactattattaaaaaattaaaacaaacaagaaataacaataaaaaaaagacaccaaaacgagcaaatgaaagacaccaattcgccaatcaacttcgatctcctaaggatccctccacgcaggcccggccctgggcataggcgggctaggcctgtgcctagggcccacctagcccaggggcccaaaaaaatatttcccttttaaaatta

SEQ ID NO: 390502 - DNA, 450 bp, Cannabis indica
aacaatttaggacttagcctcaattagttaatcacacaagttctagttctctcaatatcaataaaaacaaaccaagactacataggcatataaaatcgcaatatatatatatattgaacaagtacaatgacacataactcatataagaatatcaaaagcaagcataataggtcaagtgttaggttggtatagtctccagagctcatcaggaaactgaggataatcagtgtacgacgagtgacatgcgaacgtagcataaaacttagcctgaaaattttgcattgtgaaccgacgatgttgtaactcctcaatgttttgcatcatcacatgtgatgagtgtacgacgaatgaggagcgaaagtggcataaaacttagtcttttttttttcagttcaatcgctagggtgacatgtattatgggtgacatgttgctaactttttattcaaatt

SEQ ID NO: 390503 - DNA, 1781 bp, Cannabis indica
ccctcccaataggaaatcagaatatatcatacctggtctgttttgggggatagagaaccactcaaccagtcgtcccaggagctgaatgatgtagtcgaggttctcatttgccaggagcatccaaaccatatagcacttgcgtactcgcactcccagaagagatgtaaagaactttctatagctagggagcacataggacatagagtatccatacccgggaaaatggtgatgagtctctctttcgtaagaaggttataggataagatcttccaccaaaagaactttagtctattgtgcatcttggctccccacacaaacctccatttactatccgagtcaagcttcccctgcaggtttttgacgactcgatacgccaacttaactgagaactgcccattcggcgctggtaaccaaagccaaccgtcttccttgggtctgctaggaagtgttatattcagaatccttctagcatcctcagaacggaaccagcttcgtaccagatcctcgttccaatggttgtcgatgataaagttgctaaccaggctaataccatcagaggcattccaagatggggccagttgggggttgtctccagggacccaagggtcaaaccaaatggatgtcgagttcccatccccaatcttccgacagatccctctcaacagcaaaggtcgggttattaatatagctttccagagtactgagtctgtggatttggcttccatgtccatgaaggactcatttttgatatacttgtcttttataacctgaccctagaggcagtcctcattagataagatcttccaagcccatttcattaggaaagctttgttcatagcttcagtagatcggaatcccagacctcccaccacctttgggcaacaaagtttttcccaagccaccgtatggagtcttcttttgtcatccgtgtccccccaccagaagtcccttaggagtctatcaattttattggccacagacaccggtataggatcagaagaagccacatagtttaagagtgtggatcccattgatttaacaagacaagttttcccggcactggataggagcctagccttccaaccttgcacccgtttaagagtcttttcaataatatgttgagcgtcattcgttctcttgaccgaactaaatagcgggagacctaggtatgtagcgtttctacccattttcctcataccaagcaattgtgaaatagcttgtgctttcctgttagaaactccacgagagaaataaactgctgatttttgggcgctgaccgattgccccgaccagctgcaataggtattgagacattccaagaaggccttagcctctcggatagaagcttctccaaaaagtatgatgtcgttagcgaacatgagatggttaataggaaggccatttcttgcgagtttgaagcctttcagttgccctatcctttcttctcaaaaagaagcctagataaagtttcagcagcaatgatgaatagcgagggtgagagtgggtcaccttgtcttaagccccttgcctagataaagttttagcacacatttgacactactattagagctaaattttaccaaaatattctaaaacattgcaatacacgatttttatagcattccattagaatttctctaaggatatagtaaaaattatagcacaataatagtgactactatatataaaagaagagctatattttaaccccaaaaacttataaatgcatctcatttcaataatttttattttattaaaaatatatatcattaattatatta

SEQ ID NO: 390504 - DNA, 1254 bp, Cannabis indica
aggcggttgtcgacggtcttggttttttttggagtctttcaatttatttatcgtttccaccattcatttctaactgtcttgattactataccaactaatctcttgttaattttggagggtatatattcttaactaattattttataaattttattaatactaaattgttgttagtttagattttagaaccttcttgtagtaactaactatatatatcattttcaggggatttaattagtaatttagtactagctatatctacattgcttaagcatttagctgtacttctgtactttatttacgctttcatggcaaaatttgtaacaaaattacttggacacctttattttgttttgttttttgttttttttttttgcctggtggacacctttattttgatgttttattttttaacaagattttgttgggtttttgtacagggatatttgtggaggaaactctcttagtatttataattgttatacatattactctaataaaaaagtggtcgcaaaagtacattattttacgattttgctgcagtcgtatttttttcttaccatcaagtgtcaactcagaaacacgtgacgacatattattagagtgttaaataagctaaataaatatgtcaccatgtgtttctgagctgacacttaacatgattaattggcactaatagtcaaaaaagggtatgacaaattgacaacacaaaatcgtagaataagatatttttgctgctattattttttattaacaccatatgtgtaagaattacaaatattaaaagaatttggttgcaaatatatcttttattttcaacaaattaactaaacatattatgtgagaagtattagcttacactacgtgtggcaaatgacaagttaggtttcttaattaaaattgagattttaattaaatcaataaaaatgaaaatacatcatatatatatatttatattataaaagaaggttgagaaaaaaaaattaaatattattttggaccctgtgttttataaaagttatcaattggaccctctattttgttaaatgacaaaatagaccttgtattttctaaaatggtacaaataagaccttgaattgattttttatcaaaataaaatttaattataatccaatctaaaagtactatgacaaaataatttatattttctgtatctgttcgtattaagaattgtctttaagttggttatattaaaaaaaaataatcaaaaattaagcttagggtcctattttt

SEQ ID NO: 390505 - DNA, 2181 bp, Cannabis indica
agattgttcactcctgaagtgacatctcttagtgtgagctttgattgtaattcttgtattcgtgattggtgatttcaagttgtattctttctctctctcagatttcattgcaatcttatgacattttatgtttcattcatctcaaatcaaattcattctttcattaagattcttactctggttttgattacatgattactgtcattgtaaattgttgtccttgaatttgttgctatggtgatcttgatcaggtttattatccgcaacacttataaacacaatataacacacacaagagtcacacacgaacctaagaccttgttcaattcttcttcgttgtctctcacacaggtatctctctctattttcttcaattacaagtttctggtttcgacattgttcatccaatgaaatgaaaactatggtataattaaactcataattaaatttatgtgtatttcttcttctttttacacattaactttatttagtttactgtaacgattgattgattgtgtttgaattctagtgagtgaattagtatggatgaaccctattactaatgtttgtatatatttcaactttgtttctccaattgtttgtttttgtctaattaagagccaatttaaatctgagaacagagacacatttattctagcaagtaaggtaagccatcaccatcaccatcacttatacagcttaagagaattgtaagagtgaatcgaggctcgacgcccttttgctatcagtactgcttgatattggagggcacagacaactgcttctacgaagctcgggttaattttgtgttaaaggggttctgttgttggggtgaagttgatcgtacggagcttgtctttgtgagacatgctctctactatcctgatattgacgagaccttccttagagaatgtgatgcgccagatgagctggcaaatgaatctggagattttgatcattacgacggggagtttatttcaaagagcgattatcaacgcgattactgtgcggatgatgatgctgatgaggagagttatgagtacgaggatatgattgtgggatggcacgaaaaatgtgatgaaatagtggctgtagatgaagaagatgtggagaagataaggatgaggatgagaaagaaagaacatgacgtaaatgtaaggattaggactatgattaagaaggttgctgccaaggacattaagaatgatgatgatggagatgatttgagggagagggagagggagaggaggatatcttacttgaaaaaggagaaggtgatccaattttcttcttctttacctcctgtggagatcaacaagttttcttcttttttcgctcattgggctaagttgtcttcttatttacctggtggggattcttgtaaagagagtgtaatgaaatttgaattaggatgtgaagatgatgatgatggtggtaattaaaaataagtaatacttaactaggtgtggagcttttgtttgctgttatactggtcagttgctgttggttggttatttcttctttaaattttggtgctacaaagttgattagtagtatgtacaaagttgattaggatatatattgtatgtttgttgattttggaaatttgagttcccaagcaggcaattgaggataataattaagttagaacatttgtttattatatataatgaatgattgattgcagaacttgagatgggattttattatgattttcattacattttgaataatcagataatataaacagatgaaaagccatactaatgatacgataagtacttatgatgatcattgtagtgtgtgttttggaagatgtttgactagttgtcaaagttacatttatttatgtacagaatttgcttatttgagtctataatgcacataatgcatgttctcctttcattaaacatatttgactgaacccatttacctttatctgttaacaacttagaataagttttcctttgttggtatatgaatttagaataattagtcatacactttgtacaaatacgattcatacttgaaaagactcaactttttcattctaaataaatgagtaggttcatacactatgtaccaaatacatacactttgtaccaatatatactgattgtctgatagatcgatgtgatctatagttttactctaattttgaaacaccatcaaatctttttt

SEQ ID NO: 390506 - DNA, 684 bp, Cannabis indica
aacactaaatttaaattttaccacgaattaccaaaaaaaataatattgtattatttgcacaactagtacctagtagtagtaatggtcaaacaaaacaattgcaatctttagggaccatgtcttctttcaagccatctaaattgactttctatttctaatacatcaaaattggccccaaatctactaaaatttacaataaaacaatttatacatatttatataattttgtcttcattttggggtgtcataattaatatacacaccttttgtgtagatagttgattattacatctctcactatttctggatttctaacaaagtttgtatttgtaaatcatttggatacatttataagcatgcatgtccactctttttcaagggttttaaaaggcatgtaatttgtttgtttgcttgcttttcttttcttttgatttcaatacaaaaagtgatattaaaaaaaagtaatttttttacccgagtaataaattgtgcacacataaaaatataattagtcacttttaataagtggggttcatctcaaataaaagtaattagttaaaattacttactcataagtgtgtattagatttgtgtgtatcatatttgtgtatgatttgtgtgcacatattattactcttttttaaagggttgatactatttgggacactatgttttgcaaaagtt

SEQ ID NO: 390507 - DNA, 726 bp, Cannabis indica
tggtgtgtggattcatccaagattgagaactataatctggtgttcaattatttgtaacagatgtatcattgtttcttggtttacaataactaggtggaaaaccatgcaagaagtaccatttgtccttatagtgacttggtttttgacaatgtgtacaatagggatgaggccttttattctttgatgcctggtttgccacatgatttgaatcaggagctgtgggggaaggggttgtagcatcaactacaagggaaggtatgtttcgattgcccaatgttctttgtcattattgatgaatgaccatagaaaaaaccttattaagaggagggaagggatcaatgaggagaatttgatcatgtattacgtgaaaggattcattgagtccttttaggaatcggagtacttgatcatggttaaggtgagcatgattttgggtggcagctgtacatgtacaggggatgcgaggtcaaagttggttgatttcatcccacacagctgtaagtttggtgaaataggcactaacagaatcatcaccttgctgaagataagtaagagtctcattcaattcgtatattcttggaccattaccttgattgaatctgttgtttaggattgtccacatctcagatgcagtatcaagatacattatactacttcttattttagatgatacaaaatggagaatccaagacatcacaatctggttgcgtcagacccaagaaataa

SEQ ID NO: 390508 - DNA, 782 bp, Cannabis indica
tatgagaaaaagatagcgaagagagcaagagagatgaaaaataaaaggtgagctgtgagtggagtaatttttgagatttaatatttttttaataatgaccttataatatatgggatgtttttgaaggtagaaactcaaatttccctataccattatatatatatatacataatatatatattaattaccaattttttttccctgtccacttgatcaaactcaagacctctatcaagaattcgattgttgcctttggcattaatgtagcgagacaaagagatccaaatttggttgtgcagcattctccaaaggagaagtggaaacgccataaatgtggagaagtctctttcttctggactatcttttgtcaaatagttgtaagtgctcttaattgcaaatggaaccaacaacacatgctgccatattaaatatattagaccacgtatattctaaaagaatgttgctattatatgattaattaaattaaattaaaccaattactgcatcaaataatgttaggtatcccataacaaatacctacaaatacaacatttcgtatatattgaaagaacaaacctttttatattatagacactatctatagtcccttgcatgatatttatgtatgtcattgtaactacatattctaattatagtatgaacaaacccgcgggcgcgcggttgggttacatacgcgcgttcgacccacattacaaaaaagattatcgttagcgataattttttagtcacaacaaaaaaaaaattgtgactaaatgtgactt

SEQ ID NO: 390509 - DNA, 1239 bp, Cannabis indica
gaaaatgtaattttctatcttctgtacaataggatcgtctgtcttgtggtcactatatgacaaacttttttcatgccctagctaggttgacattgttaaacgtgccttccaccatataattgagtatatataaataattcaaatgacacactaatgtaataatagttaaataaaaattctcaaagatcaaaagctcactctatttcaaaaattaaaaaaaaaatacatattacttaattaaaaaaatttacatacatgtattgcacttaacatcatctaattgaacctaattaaaaaaaattaattatacttgcattgcacgtaatatcaacctagtatgaataaatagatatatatttatatatagagatataaattcacatatttatatatttcataacaaagtgtattattagaattacatttaaatagatgagttatgctttttttcttttattgaactttgtattttaatatcattttattggtcataaaatagttttttttcaaaagtgataaaagtagtttttaaaattattattagaattacaacatttgaaattggaattggaagatttatatgagtataatattaaattattattagattgttttgaaatgagaaaatattaattaattagactaaaaattatgaaatataattatattagaataacaatcacattgaataataaatctatatgtttggacttctatctaaaggttaaatatatataagctcttcttttcactacacttttatactaattattttgaatatattaaaaaattatataaataatttgcaacaataactatgactaaattgaattaattaataaaaaagtaaaaagtattagaaggcaaataataagatatatatatatactagatgagagttacgtggcaagccacgtaaatattagttttattttaagttcttgtggtttttgtttaagaatttagtgactaattgtaaattatgttataaacgatatgttttataaaactaattgttaagaatgtcataattgtgtatataaacctataatatacacattgttattcaaatgttttatgttataaacgattttttttgtatagagtttaaattttatattgatgattgttatttagggtgggtatcggtgtagtttttttttaattttaaaaaaagattgtttaattttttgggtttaattattgggtttaaacgtttaaataaagattgtttaattt

SEQ ID NO: 390510 - DNA, 1310 bp, Cannabis indica
ttttttttttctttgaggaaaaccaactgattagtattatacacgtacaattgtaaaaataataatgatttttgttaacaattgggtttttgtttttaatggtaagagtagtattacatatgagatttggatcttaaaagaagattcccttaattcgtctatagaaattagaaaatgcgtcacaggagattaattacacacagaaatagaaaaaggacatataaatatatatttgaaaattgaaagtagtctgtgcctgtaagtttcctatgcactatactcattaaaatgcaatctagccctttctttaatttcctcgaagaacctagaaacagtttttgcttttgctattttaatttctacataaaataactaataagtttacacagttacctgtcagatgatataaaatttgccgagctaataaagtttgagtacacaacacccttttatatatttttgttttgtcttctttttaaaaatatcgactatataaaattggaaatctaatagtacttttttttatatttcttttatctgataaaatttagtactgttgtcttgactaatatgaacgcgatatgctcctcttttaaactttttcatataatacattttggctatttataattatgtcgtgctttagtataaaatttaaaattagacatttattttataattaaacagcatgtatttaaattttattagggttttttatttttatattttaaagtatttttttattatatttttactaaaaattacacgtaataattaacaaaataataaatttaaatcacaattaaaattcacacaaactaaggcaactaccgtactttaaaaaaaataatatataagtaattcttcatcttattaatatatggctacttgcttacctatattggtgcatatactttaaaagactcaaaatggtgtcggcatatttcataatttaattaactttgttctaaagcttcgagaagagaatcagtactccagctttctaaaatatttttatctgatcacaactaatctaacgttatatcttgttaacttattattattaatacaattgtttttttttctttttgaaattttaaggtgtccacagtccacaccacagaaggtggcatctgctaagttatttttcaatatatttataaaattaaaatgtgggaacataaataacaataacaacttataatttaaatcttaatttaaaacaattcttttaaaacagaaaatcttactttaaagaataattatcttttttaccccatgtacttatgatactatactattatgcccct

SEQ ID NO: 390511 - DNA, 1017 bp, Cannabis indica
aactatcattctacttaaatttaactgatcttttattgttttagattgtattaaatgtatgattaaacttattataaaattaaaagcattattattgggcattagtagtacttatcacctctaaattgtcgttttgcgattagctatagtgatactctctaaaaaaattattatattaatatatctacaataaatggaatgcatatatgttgatgcgatctgtaaggaggaaaggtagaagtagtatatatattatatttcaagcaggtattagttattaattattataatattgtatattagttgcgttgggtactaacgtatcaagttgttttatcaactgataggacattaaattcattgcaaaatttaataaactaatgcctaattggtggcacataatattagtcatgttttctttaattattagggggccttaattatataatttacataataacatatatggaccagtacaatatgttcgcttacaagtacacgtgtagtgaagtgatcggtttatctcggctgtaatagtgaaattaatttgtaaaattattaaagatcccaaaagtagttgtcgatcgaattcaggtacgatagggatagatgcaaattaaatgtgtaagagcatctattagtaatgtagtgttgtggatatgtaatttaaaatctatgcttatataaaattaagcaggtggttcataatatgatctaaatttaaaatatcttaaaaattgtatcaaaatttattaatataaattatagtgtgaaatttaaattttatatcttaaatatatataatttttttatggggtataaattttcaaaaaaaaactaaattaacaaaaacaacagtgtaaagaaattttttaaatattttttaatggtttttaattgtttgtttttgtattattatttttattcattgattcctatatatttgagaaattgctaaagggcaccagtagtgcctatacacttctcttattgtgttcaattatcgttatttggtcc

SEQ ID NO: 390512 - DNA, 1238 bp, Cannabis indica
aacagtatatgtagaactaaaaaacagaagaaaaaaagtattatatttaatagcataccttggtgtagaggataattgacattatgtgtcatttacatgctcctttctatacagcatgcaatcatttttacatgcatcaatttttttataattaagtccaagtgcgttgattaacttttttgactcataaaaagaatcgggtaaggtttcaacttttgatagtgctcttttaaataattcaagtaccttgccaaattaattatcactccatccacacatacactcaatatgaaataattcaatgatgaatgagagctttgtaaaacttgtacaacctgggtaaacgtctgtctgtacatctttgattaaatcataaaattattttgccttcgtattcggtttatcttcctcaccttgatcaagattatcatcattttcaattttacattcatcatctccagtattttttccaaaaacatcatgtataactcctttcatatcaatagtaggagtatcaccaacagtactctcaatgttctgtggagcatgtgaagaagtttcactgtataatatccattttagtgtatccctccataaatccattgcatatcaaatgttcaaatgcaattgatcgagtgacaggactaataaggcaacacttaacacaaggacatacaatttttctttcatggcttccatttttaaatgcgaaatcaagaaataaattaactccttgttgatatgaatcactcaatctagattgcttcatccaactcttatccataaaataagattttaaagaatttagagtaaataaaaaccaaaagcattaaaataataaagaaaaaatagattaaacctgatgaggatgatggtggggaggaatatagtactttagcgttgtataatttgtttatttggaaggaatagtgccacctttgtaaaaggtaagatatggcttctcttcatgctgccttcaaattttttcccctttagtagtagtctttcaatcactttgggatattctataaaaaaaatcactttgaattaatcactcattttgaaaatatatagtcatctcaaataaaaacttacactatctctcaaattcttaattgcatcactattttaaaacttcgactttattagagatattcgtaagaaaataattaaagtctcttcattgattaataaagaattatgacttttaaccattttttatttatataaataactat

SEQ ID NO: 390513 - DNA, 2147 bp, Cannabis indica
cacaacaatggcaaatccatgaaaacaagtacaaaatgggatttgaaagcttacccactagtgaaaaccttcaaggaagccaataggaagcttagattgtcaaaataaagcgagaatcctgggttttggaagacttgggtgcgtcggcctcaaaggggaagtgaagagctcctttgtttccttttttaaagagagagaatataaagtatggtatgataatatgtttcaccaaataaccttatatagtttcttgtgagcccctctcatttaacacgaaaaatattatcagtttcctatttgggaacgtgaacagtcaaacaagaaaaaatatttcataactgaagttattgtataaaacctgctcggttaagatgccaatagttaagattgaagctaaaaagtccctattcatacaaacattttcacatggacttgagcaaatgttattcaatttttatgacgtggcatgtccatgtaggtaagattgatgccacgtgaagtacaacttctcagcaagaaggccaagtcatcatgcataacataacagttgacaaggagttcgaatacttaagcaggacaaagagataacgaactgcccaacttaaggggtctggtcggacccccctggtcggccctattaccagcataagctggctagcgtcctgaaaaggaaaggttggccatcttttttggtgcctctgcagcttttagcctggacaacacttctagttacgtattgggcttcaacaatccacaaaaataaaaggtaaacttcagttatttacttattcttggggactaattaacatgttatttatttattattttaatgtgtaacaaataggtgatatctcctcattttaagggatatcaatctatcatctcttgtaagctctcttatataaaagcaataaactaaacctaatctctctaagtcttaagttctgagttctaagtgcaaaacacgctctgaaagctctaagttctacaatcctagttctctcactctcttccacacgcccctagtagtgtagaagagactaagtcttcttcatctcaccaacttgagattttcctcttaattcttactattgtaatcttaagaaagctacttcagaatccacaacacttatgatctcagtagtattatctctaatatcaatacaactaaaagggcagtaggtgtaacgccctaatctataggcacgccacatgtgtgattttataaactagtttagtactaatagattaattaattattaaaatttgtgataatattaaaaacttcactaatataaaacactaaaaatggacatcataatgacactaaaattgtgctctagggatccctattataaaagttttacaaaaggactatatacaacgacaagtcaaaatatgaaatcaaaatacacaatagatacagtctaaaacaactcctgacaattgaacacacaagttgataagggtcgatatgtacattgttggagaagatagtcacctcatggttgttctaatttttccttgcccttacctgcatcacagagcacccgtaagtcacaagtattcaacaagaaaagtaacaaaggagaatatgtgaaataactaattatccatctcactattataaaatgattaaataataatattctagagtgtataacatgaccagccatatgcatggaaataaaaagggaccatatattgtattgcctaatcaggcaagcccgtgtcataatttagcatcatacataatataactacatcacctaattaggggagcccatgccacaacctagcaccaatgtatcgcatcgtctaatcagacgagcacgtgccatagcctggcactcacatgtcactgttgctcgtacctaataaggtatcgctgacaagttgaaacccaacaacggttttagtctataccataacctagcatttacatgtcactgccgcctgtaccaaataagatatcatcgacaagaagaaacctaacaacggtttcaatctatgtcataacctggcattctcatattactatcgcccgtacctaattaggtatcgccgacaggtatgttgcattacctaatcaggtgagctcgtatatcatatcaatactatcatcacattgtcattgcctaattaga

SEQ ID NO: 390514 - DNA, 664 bp, Cannabis indica
taaacatataatattttagtattaattaaagtttaacatagtactataataaaaatatgacatataatccaattcaatataatacaatacaatacaatacgacgttccaacgagccctaatagaataaattaattgaaatataatgaaaaccaacaataatattaaaacttctacacgacaccactactcaggcccggccctgggcataggcgggttaggcctgtgcctagggcccacccaactcaggggcctaaatttttttttcttcttttaaaattatacatcttttttaccgattttgaagaataccacattttttctaacataagggcccaaaaaatattttttttcctatggcccgctttatttcagggccggcactgccactactaatatagatctactagatgagtcacatattgtagacatcttaaaattaagaaatgacactccttgctaaattgaggactccaccacaatccaagaccgtatgaagtagggggaaagctcaaaccaaaattggctaaaagcctaagtctttgccaagtgtaacgtccgtgctaagatggcacgttacaagctaagtgatgcctacaagttgttcaagtagtggtcaagtggtggcacatgttaatgtgcatgctggtggcatgctgatgctta

SEQ ID NO: 390515 - DNA, 1668 bp, Cannabis indica
aattaattaatttagtaaattaataaagtgggaagaagagcactgttaatgatcaatcaacctttgtaggtagactgcagacttttttacacaccaactttctggttttttggtcaatggaggacagtgcagtttcttgtggcttatctttaagacattctattgactgcaaaggctgacaaacattgcctttggcctttggaatgtatatagtgcttagttaatatcattagtctagtctcaactaaaagaagcttatgtattgcagatatctgccattgctgccccacctgctcttcaaaagctgagcgagacttttccagggtaataattttgagagactaatcacatattttaactttaattacattcctcattccttagatttctgtcttcttgtttcaggcttcaagtatacactggaattatcgatcccaccgttgatgacaaagggtacctgtctcctttttatttttttttcttttgtgattctctatgctgtgattcattggtatcatcaaaaaaagaaaaaaaaacctaaatcatactttgtttttattgttttgattacaaggtacatcattcctggactgggtgatgcaggggacagaagctttggtacataatctgatatatttttccaattttgttttgttgaggccatcattagccaggaattagctgagttttttttactatgctaatgagcaacatattaagcgaaattgagcagcaaaactcggaagggtatcaaatttgtgtagagagttattatttttatgtgatggacattttgatcggtgaaagtaattcaaatattcttgtggcatgatacttcattttattttagtactatgtgaactgactattgggtaagatttttttaagctgcttttagctattagaattaatgtacttttggtagtgttcggttaagaagatttttctttggtagtgttctgtaaagacgtagccaagtgtattttttaggtcttgtatcaaatgggtttgggtgttcttaacaacctcggttttgtttagtttcaaaatgaattttgaaatattttttatataattgtttaataatagtattagatgtattaatataagcgagctatatgtataataataaatgaatgcaatttaaatttgttatagtttagttgttcggaatgttatattattataatttcagattggaaaattaaatgtaaataaagtaataattgagaggatttaatggctgaaatatatttttggaaggaatatgaatttgtatttggataggtcaattatgctatatgtagatgagctctactaactttggtgaggttgccaaggcatttggtgtcgaaaacttccatgatcatgcagcgaccatcagctgatattactcttttacatgtaacagagtgtgacagatgcagattaaaggaattacttttttacatttacgacaattaaatatagagtctgaacgactaacaatttatgtatttaatagatagaataattaatatttttgtcttttaaatttttgacacaacttaactttattttttaaaatataagttttgttaaaaatcttcctaaaatgtaatagttatataattatgctttttttttttgttagtattgtgttttttactgttaaaaataagtattttt

SEQ ID NO: 390516 - DNA, 1863 bp, Cannabis indica
gtatcgatgtgttcaaataattccattaattgtagtgtcaaatatctgtatggtctgtaatttgaatgtatttatgactttactatttttcttatcaattgtagatatttgtgccggttttgatgctagaaggtccaccacattagtttggtaccgaagttaatatgaagtcgaatgttgtctcatttttggactccatacacaccacaatggatgagaagtatcgtgttgatgctatgaaagaaatggtaaagttacaaagtgtcattgtttgatgtgaattcattgttgattgaatctaactaattgtatatgtttgcagctgtcgacgttggaccttttttccgatgagaataagtcaaaaaatgtgagttttgtggattttggaattgatactaaagatcgtggccttcctcaacaagaaaatgatcaagattgcggtgtatatgtgatgaagtacatggacgttgtggctaatgaggaagatgtagttgctcaggtatacctttgtttatttagttcagaatgtattagtccagtttcattgatattagtgttgtgtaattaaaatttaatttagtgttctactatgtgtaatatgatacgtattgtcaacttgatcagagtttattatattttgaatgtgtttttttttgtttatgtctttttccacagtttgacccgattgaggcgcgtttagaaatccctgtgtgaattatatctgatgaactaaatgaactgcgttcaaaagtgattgaagatcgaaggagtgtacaaggcagctcatttgcatcatcctcagcccctttgcgtagtccgtcaaagtctccaggtgatcctctgttcaatacggtgaagtctcgccacgcaaacatgtatcctcccttaagagcctctcctacgtttcggtctggcaaggctaagatttcatatggtgaatagtacttcaaaaaacttgtgttattattaggttttgtagtttggcttttggaacatttggggggattatgatttagacatctgtttttattagtttacttttgtaacatttggggtggttatgatttagacagacttgtgtttattttagtttacgtagtgcgccttttggaacatttgcatccatacaactatcgaatgattctaatttgatcaaattcattttttagttatggtaattaaatcatttttagttatggtgacaacagatgaagcaagaaaagagctgctggatgtacagataaagctccaatctgatcctttaaatgttgatcttatttcaaaggaagttatgtctcataccaaatatggtcagcttttgaagggtctcaactcatttctgtatcaaaaacccaagataagttgggtcaaaaatggagatgacaatacgactatttttcatgctagtatcaaagaaaggagaagagcaaatatcattctatctataaaagaccagaagagagtaagaacaaataagtcaggagaaatttctgaggccttctttcattttattacagcttgcttggttttaaaatggaagacaggtgcaaggttaaggcaagggttatgaaacttggtcctcttgtttccaagactcgggtagaattcttgatgaaggaatattctaaggatgaagtcaagaaggttgtttttgcaattccttgaatcaaggctcctggtccagatggatttactagctgctttttccaagacaactgggatttaattggtgatgacatttgtgaggctatgctctctttcttgcattcaagtcagattctcaaagaaattaataacactactattttaacactcattcccaaatgtaagtgtcctaattcagttagtgatttcagacctatt

SEQ ID NO: 390517 - DNA, 652 bp, Cannabis indica
aaactctcacatttacctaacttgggtttctttctatccacatccacagttgtgtaatcactctaaaattacttcttggtccttcaagcatcactcacttggctgatgacaacggaagcatatttggaaatttccttttctggagattgccttagcctcccaatcactgggaacaactctgatgaacgaaggaactgtctgcacggtggatgtgcacacatttttgccaatgaaaacatagcaatctttagaggtgactcgtttagagcatctttcttacttgggtttaatgctactgctgaacagtcagctaccaactttagtaaagcctggccatgcataaccaaagaacaaacaagtcattatcaatagtgaaaaaaaaaaagccatatgaactgattttgatatgtcaacattgtttaaatttgcacaataacagaaatacagaagagtcacatgagcctctgtaaattctctttcatattgtagaaaatagtgattcgaattgtgtgtagatttcatagaataatacatatttatatacagagttaggagactaaatatctactaaatatctactaaatatctaactctcttacagctaatatacacctaatatctaacactccccctcaagctggagcatagatgt

SEQ ID NO: 390518 - DNA, 673 bp, Cannabis indica
aagacaaatatggactcatcaggtaccctggcgaaatagtaaggtggaagaagccacctaagagttggagttcgacatgagcgctcaatatctagagttattcaggttagatatcgatgacgaaatccttttaacgggggataattgtaatgactgcttaactgatagcaaaaaacccaaatagaaaacaaataattatatatatttttttagtacatatatatataacttataaattatttaggattcatcatggatgttttttttaacaaccaactaaacttttattgaaaatactagagtacaacaaaaataatgacggaaaaatatccatccaaactagttaaccactagcttatgtgcgttgaaaactaattcattataagacaaatttgtaatatgttaaaagaatgaatactgctaaatttgcatataaatagccagacgtaggggtgtgcaaaaagttatctgatctaattacaattgacgatccaatcccaaccgatctaatagaatcaaatattcaaccataattggatcagatcagatgtaaattttaaaaatccaatcgaatcggatcggttattggatgggacatctgatccaatgaataacaaaccgaatcgatctaattatcatccaattatatttatatatttttaaaatacaatta

SEQ ID NO: 390519 - DNA, 777 bp, Cannabis indica
tttttttttttttggattggtgatgaagatgaggaaggagaggtggtcactggttcgaagccatgttttcacgtgcgtgttggtgcactgtaactatttttgatcttcaatttttgagccgttggattagtataattataaaagatgaaaggatcgtgttctcgtgcatgctggtgcaccgtaactttgtttgatcatctaggctgagccgttggattagtgtaataatgaaaggattattaaaaagatggaaatgttgaaacccgtgttctcgtgcatgttggtgcaccgtaattatgtttggttgtcaattttgaaccgttggattgacataaaaatgaataaaaggtcaaaaagtgtggaggtgcggggaatcgaaccccgtgcctctcgcatgcgaagcgagcgctctaccatatgagctacacccccaatttgacttatgtttaaactaagaacaataaatttattattgttgattttgtacttttaaatattttatgtatgtgaaagaagattttaaaggatgtgaagagagagaaatacaagaaaataatcttaagggtttgagaaaagagagggaatgaataaatatacacttccatttagaatattgctattgaatttgtgttggaattttgtaaataattattaaattaaatatcatttggaatttatctatagtaacaatagtattgtgcaaataggtataatccctttaatcacaaaaattatcaaaatgaaagaattggcgataatacctataaatatataaaa

SEQ ID NO: 390520 - DNA, 1235 bp, Cannabis indica
ttgtcccaatccttccaaatgcacagatgaccttaacattgatagtcaaatggacaaaccctcagccaaagaaaatattgaactttctcattagtcattgcctaacaaatttaaggaaaactataacatacctcatcagcaataaaaagaatgtcatatttcttcaaaataggttgaatctgcatcaagcatcagattctatggttaataagttcaacttttacttgtccaaggggaagagggggcaaagaaagaatactatttaattaggtagtatggcattatagttgatagtatgagaaaatattaagtgcaatttgtagagagaaccaggtcctgagaactttaccttatcaaaataagtggcaggaggaggtataacacctccagcccccataacaggttccgcaataaatgcagctatctgaaataaacaactagattactaaaggtatatgtacaaaacaaaacatcttttacgacataatggaatctatgctaaaatgaataatgttggaaattttactgtatctggtccctctttcagaataagatcttctagatttttagctaatctggttgaaaattcttcctcagtctcacctgccacaaccagtagcatgttaagcttgaaaagacatgtcaatgaaaatgctcaatctcagaaattaggccattaaatttggaaaataatcacctggaagatgaaacctccagtaatgaggacagtcagtgtgcagtacaaatggagctggcaaatcaaatttttgatgcaaagccggtagcctgacacaagaacttctcagtgaataatttgaaggactacatgttaaaggggagtacaatataaacttatcctacccagaaaggctagcagatatcaatgttgaaccgtggtacctgtaaagtgatacttaaatatcagtggctatgcatgataacaagaattcataaagaaaaaatttaatcaagaataaaagaaatacgattttgatcgagcaatgaacttcttcttgtctggtcgtccaagagcattattgtaataccacaccagcttaacctaaataaacaattaatttagttacaaagttaaaattcatagtattttggcgttgttcatgttaggatattaactgtatattaattgtaagaattagggtaaattatatttaatagtttctcatttagtctcctagatttgtatataaatatatactatttctatggaatacaac

SEQ ID NO: 390521 - DNA, 1379 bp, Cannabis indica
ttgtattttacttttttttttttggaaagctaattaatcataaaagaaacaattaaatcagaataggcaagtctgggttgatagcaacacaagcaacaaagggaaactctttattccaaatagcacaaaatctattatcaataacatatttggctaaacaatgagcaaaacaattagcctccatcccaacaaatgaaataaaaactagcaaagctaatactaaaagttaagaagttgttttgctgtatttttagtttttaaaattgtgtaaacaaaaaataatttttattatttaaaaaatttggtgtttggctagtattttttaaaaattatttttagattttttttattaaaaaaaactttaatattttataccataccacaacatgaacccaactcacccaaatccaaacttgagatctggccttgagacccgaatcctggcctaaactcgacctgctttggacttggactcggtcccagatctcaggcctcagaccccgaaccttgaccaagcctcagaccccaaactccgaaaataacattttgatgtttttgatttttagtttttttcttaactcaattttcaaaaaattgtttttaaaaactttggccaaacaccgttagttatctatattcataatttaaaaattaaaaagagtttttaagttatgaaaccaaacaacctttaaatttttaatgttcaaaatatattattcaagtctctacaatagctagttttgcccatagtcaaagaaatgatattcaaacaatcagactcaataaccacgttgaccaacccaagttccgaattgagtagcaactccttaaggaccaaaagttcagcgaaaagactatcaaaatatgtttgaaagaccctgcttttggcaccaatgcatttacaccactagaaatgctattgcaacactgcatatttcacccttatatatcttcgatctgcatctacattgactttaattatactaacaactgagagagtctattatttggtgtctgtcttctctttgcagatgttaagagttagcatgttgcacttctttaaaatattcacagtaattccaataccaatccaccaaatattatgtatttggttcttttttccacaccctcattttatttttgacataccagtgctgctaagttaggactagaacaaaaaatcaaaatcattcttatcaagacagctccacatatgagagatgaagagaaggggatcttgctcttcgcattcttttggcaaggtttttatatttagtgtcaataatttcaaataattcttacacactgtaattatatatgcgacataggagcacatgagtagattatttttttcacaagaaaataaataataccactac

SEQ ID NO: 390522 - DNA, 635 bp, Cannabis indica
ttttataattaaaattttgctgtaatacatgtacgcttgtagtaaaattatttatcattagcctatgaaaagaaagtgcctaagtaggctgcatactcggattcttcccgcaagtggtcctacttaagagtgtatggccctgaaggctgaaactatttgttgcaactacttgagtactattcaagtagtgatatatgaccaaccaaaagctcgtctaaaaaagaaaggcgtccaaagtaattatatacaaccaacaaatctgaaacatagtcaatgcccatcctaacaatactaacactacattagtattagtgacattgggctttgcattgcaaagaaaatagaaccaacaacacccttatcttgaagactaatggagcatttgttacatggtagattttataggaatgataatgtaaaaattaaattaaatttgaatgataagagatttgtatttttaaatagttcttactttttaattcaaaatgatattaatgttaattccctcaaaatacatgagcttcatattccttctaagtctgttctctctaactcaaactcacataacaaacactccattaagtggtgtttggttgaaaggaataaaaacatagctaaaataaaaaaaaaaaaaa

SEQ ID NO: 390523 - DNA, 964 bp, Cannabis indica
gagagagagagaggtggttggaggagtttaaccccaaaaaaagtgattttcaattcacttaaaatttgattttgttgaaaatgcaatatagtggtcaaataaacgaaatacccctaaggctaaatacatccatacacatatagtcaaggacaatattatcatttcagcacacacacacatcacaataattcaaattttctcatttatcatatcaataccataaataaatcccaaaaatatattttgggctccgaacccaattcggccccaaacactcaattgtgactataccgcgccgacttgttagcaaatacctgcagatatacagaataaacatactatataataatatagtctataagcacgatataccataaaattatgagtttacccttctcaagtaaaaattacaaaaataccctatgacacactaacggggtcttaaaatacaatctatcaatatagcttcacatattaaaagtaattataatataatttctcattaatacataattaatctagttagggttgctaatccggttattaaaccttagggtattacagattcactcgttaaagtttgtcagagaagataatttttacaacatctattttaagaagctaataatatagatggctgggaattttatttacaattatagaactctttcctaacggatcgattgttggtttctttaagtgttaattcttgaaatgaaaagttgtgcacaaatttagatgggtctaaattatacttacactagtgaattaactatactaaaggataaaaaagtaattagaaaggtaaaatggtattttgaccaaaactaattatgaaccgacatatggagggctaatcactggaattgattataccaatagacactgcaataaactcaggtggcgtttggtaacacttttttaatcagtcttctgtttttaaaaatagaaaagtgaaaatatt

SEQ ID NO: 390524 - DNA, 834 bp, Cannabis indica
tcaactactctctctctctctctctctctctctctctcattttcgaaccccctagaccagctagggttttctctcaattcaatcaagtttctgcaagattttggagtgcttaagctctaggtaagcttttgactttattctcttgagttttcttgaattttaagaggatggatttgcatgattttgtgatttatgttgctgtagctgctgttagggtttgatgttattttctggaatttagttatgttgtttaatgttaatttaagcatgtagtagtggctgattgttgggttaaccaagctttgagttttgaagctcaagcttcgagctttcatggtggtttttgattctatgctggtaatagtgttttattgctttagtatgttcattggggtctaaatagcaggcctggaaggttccatgaagtttggggttgatttgaatgagttatgaatttttgactcattcctgctctgaactagaattccggttcagatgggcctgtaggaaccggaattccggttggctcccaggaaaccccacagaaccagaattccggttggggaaaattttgggaaccctagtttttcccatttttgtgttgtttagggtattgccatgttatttatcgatagggaaacttttagtttcaagtttaagtccccaaaaagtgattcagcgtgtcactcatctatgtcatgattgatgtgatttaggagcctgtaattcgctgagcagttgttccactcaggttggccggcacacctgaattcggaatcaaggtaagattagtataatgtcatgcatatgcttatacatgtttaacgtacatgt

SEQ ID NO: 390525 - DNA, 2084 bp, Cannabis indica
ggagttctttcgagatgggatacttaaaaacaatatgcaccttgtaaatataggtagtaccaatcaatccattcaagtcccctaaaactatgtagtcccctacctacatattctcaaaatcatcacatacgaccttcccccagatgatgtgggattgtttagctcccagtactttccttatagatcacggggctctgactgtcatagtttgactcatgccccctttgatctcattttctcccttgttatgaataaatcaacttacataatcgtctccttcagttcacctagaattccaaataatacttataaattgtcccaccttcactaacactcgatcacttctaaacaaaaagattattttctctgtatcaattaaatggatgccacatttagctactcatgtcctatattccacttgggaataccagcaaatttaactcttattgtcatttctctaatcattctaccttgttagatgagctaccactaaatagcatacatccattgtccattcagattttgtttatgtctctaattgaacgtacaatgtttaacatcaatatcaagaaaatagcaaatataatattgcccataaaattctaatctgagtcggtcgaaggaccgataacctatcccccttaagtcataactgacactttggtacggactataaactcttctcctttaacatcagtctttgttaaacgtaggcaggttcttttcaggatagggtctacgttggcataaattgagtcttttacatcctggacactcaggatagggtcaccatttcttgttctcaccctgaccgttatcctggtcaccatagaaccttttgttatgtcccataattggtggtttatttagttttcacttcctaatctgctcgtaagttagttccatatatttcaccacatctagtggcacaacaagaagtgtcggtggtataagaatagacacaagatgagcctattgttctttcagatcttggatctgttccctttgttgtctaatcgtatcctacatagcagtgattacttgttcccaatgttgaggtagtaaaggattttcttctttactatctatcccgagcccagacagcttgctaatcaaactggttgattgcccttgctgcaaaacttatcacacatttaatccacctcttccaaccatgtagaacacagacagataccaatatcaatatgtgtatacctttcacatattcttcgcataatcatcactatgctatttttcccaacatactttataatagtctaggcaagtaatctaatagcaaataatataaatacttactatatcacaagttgatcttcttcgcaataaatgtacatatttgaccaatcttcaggacctttaaaatcatggcttctttaatgctaagttaacgccctatcccatagggacgccacgtgtgtaattttataaactagtttagtattaaaaaagtaattaattattaaaatatgtgataatattaaaaactttactaaaataaaacactaaaaaggacatcgcaacgacagtaaaactgtgttacggggattcttgttgtaaaagttttacaaaaaggttagatacgacaataattcaaaatactaaatcaaaagacatggaagatacagaccaaaaataactcctaacaagttgacacacatgccaggaaggtcaatataaacattattggggaagactttcagcttatggttgatcttacttttctttgcctttacctgcaccactgagcacccgtgagtcacaaagactcaacaagaaaagtaataaaagataatacgtggaataaccaattattcatctcactattatcaaatgaccaagcaataacataaccagccatatgcatgaaaataaaagcaatcatatattgtgttacctaatcaagaaagcccgtatcataatctggcatcatatataatgccacaaaatcaactaatcagatgagcccgtgccataatctagcaccaatgtatcacatcgtctaactagatgagcctgtgccacaacttggcagtaatatattgttaaattttataccctaaata

SEQ ID NO: 390526 - DNA, 1041 bp, Cannabis indica
aaacacttatcaaatgagatcatgcccagcgaggggaatgtgcgcctggtcaggtgctcatgcccagggaggggctttgttgcttttgcacccgtactttaggaatgtgggagacttcttctgcctctatctgatccaatttactcccaagggcattaaatatctatccgccctctttgttctctatgtctcccagaggtgggatatgccttctccccatgaggttagctggttttttgatttaaagtccacccccaagcaaggcaggtcggggtacttctatttctctcaacaagacttcaagttgttgacgggcaccagggataaggccattagcaaaattgggcgttttgttgatgagtatttcatggtggacgacatgggcaccacccatactaggttccaccagattcccacatatcacctccctcccttcactcttgctcgtagagatagagctcagaggcttgctcaactgctgggggatgaccgaaatatcatccagttgacctccgaggacaactttgtaaagtacgggctccatccaaaggatttcattcctaagccagtgaaggggaggaagaataaatctagtgcttgacgggctgagagagctcatcaggaggatgagcttattcaacttaagcatgaggctaggttgaagggaggtgcaacggccaaacagtatgctcatgagcccttgaatcctgaagatgaagctgaggaatagcaggtgacgccgctcaaaaggaggaagaaacttccggcccagcccaggcccgttgaacaggcgattcgaattagggagcccagttcacctgctctgccaccttctcccgtgttaggaaaagggaaagcttttatggtggagataagagacttgtcaggtgatgatggacttttgagtcttgctcggacaatcgactcgcagtctactccatcttatttttaaacttcttggctatcatgctttacgcttcttatgtcttcttcctctaaccatgctatttttgttccatgcaaacatgtctcagaagatgc

SEQ ID NO: 390527 - DNA, 921 bp, Cannabis indica
tactgctccctgctctatgtggcactctaattaggccatccatttgaaggccagctaatgttctcgttaggctatcaaaggcctatcacaccagacatctcccactagccctccttccttgatcttgttgagcttctgggtggaaatagaggacgaaggagatatccaccggttctactggtccccatgattaaggactcggggcactacaacctcctccagaatgtggtctatatcccgaccgtggaaagatgaccaagattgttcaaaggccacctggcctcatcatacgaacctaaagggttattggggaatacaacacaagtcttgtattgccttctagcaggcatggcctcctcaatctcggatgcactatctgagttctccttatctcggtcagccccgggttgttcggccacaggtgcctcaacctagctggcccttggctctccatcacactaaggttgtgcagcctcctcagcaatgcctactccccctctagttaccaacataacgatgtgagggtcatatggtggtgcgctgcgacacgtctacttggtccttgccataatggaccacaagtccctagtaacaataatcgcggtctctatgataagaagatgtctaggtgaagaaattgccctaccaataggcactactacaaaattcactattcatgtctgtttttaagtgtcacttaaagaatttatgtcggtttacaaaactgacgtatataccgtagtcgcaaatagttttttattagtgtcaatttcaaaacgacgcaaacaaaaattcgacatttataaaccgacgctaaatacttacttttctatttcatttaaagcgtcggttaaaaaatgatgctaaatgtttcatgacattttaaaactgtcacaaaaaacttattccgtcggtttaaaa

SEQ ID NO: 390528 - DNA, 2287 bp, Cannabis indica
gtatatatataattatatatatatatatatataatgatccatcttgaacctccttcttcctctcaacaaactatctaacttagttttttaatttaatttaattgttattattattattatttggattactttgaatcctgatacagaccttctagtactacttcctctattattattattattattattattattattattatgatgttaattaattagctaattacgacatatatacatatagttatatgcaccttcgcgtactcgatccctatacagttgcatgtatttttaatataattaaataaattaaagatggtacaataataaagtactagctaggtatataggactactccaaggttcgagagtccagctgtacatgtgtacgtatgtaatatatacgaaaaccacagccattttttggccctataattaccaagtggggcggttcgaatcaacactaatctctatgttaagttgagtaacactaaattatggaatttatatttatttgtgcattgctgtgatcttggatcacttcgatcacaacaaggtaactgatcaatattctaaaagaatgacattaaaccaaatgatcatcaaaatgaattaacaatgagagcataataagaacttgaaaatgaattactctgaattgatcacacacacatctttgagagaattagtttcactttatcaaccaaaaagaactaagctacaagagtaatctgtatattatataaaggtagcaaagacttcatatattacacaaaatatcacatgagtaatatgtacatagtatataaattactgttagatttggctcaaaaatcaacttattttgaagttgctcgaagatttagtttaactttcaagaattttaggtatttgctatttgacggtactaataattttgatatgtatgaagtatctattgtttcgagaatgatcttataatattatcttagaatccaggtcagaagattattttatggaagattaaattttgtcaatcgtcaagcttgtagcacaattcgactgtgtgaaaaaagattagaaatactttgtcatgaaagaaattgtaattagagtcctttgaaaaaagctagaggacaaacacataacaaaaagtgtagagaatcgactctacttgaagaagaaatttttttgtttccaattcaagaaagatacccctacgattgaacatttagataattttaacaaaattttggcagatttgcaaaatttagatgttaaaattagtgatgaagataaaactttattgctaaactcaaaatctgaaagctatatatgaacattcaactacaactttattatattgtaaagatgaagttaagtttatagatgtttctaatgctttggtaaatactgagtactggaagaacgatcaacatgatcatagagactcaatgccaaaagcattggttgaaaccagaggtagatcgaacaacaaaaaattaggtggatcgaataatagggggcgatccagaacaaagtcctgagaagaatctgttggttttatgctactaaattaggtacgcaacagaagagtttcgtattactgattgtcattgtaccatggctcattagatctccagatgtgtgtacattaaatcaaaataataaatagtaataagtttagagtatatcttttgaagcctatcagagtatcctcgaaacttctcgttaattatatcccttaatccagatgatgaggaaatcacgattggactcactagtgtcttccaaatcgatctaccacacacaagaaatagtgttggctattaggataaagtatataaattttgttttttcatgagcaagaacaattgaaagaaaaacaattttctttttctctttgggtatttcaaaaatagcaatgttctgggagtgagaagtatcgttctggtttctcaaattaggctcctatttatagtagttaaatctctttaattaaatcatatttaattgtttaaacaaataaatatctataaccaattcggttattgatatttatgaggaaatctctcaactacaatatctcaacaatcttaaaatatttataactactttttagactagatatttacctaatttaattaattaacccaaaaaaataaacttcataaggatagcgcgcctacccttgtcttttaagataaagttagtatcttttgtcctgacaacttttgtcttgacaaattatatctcgataaattttgtcttaacaatttttgtcttttttcctattaaattaatttga

SEQ ID NO: 390529 - DNA, 1405 bp, Cannabis indica
gtctgtcatcttccagcacctatgggttttccagttaaacctaatttaaagggaaaaaattaaaataaaataaatcaccaatctgaataaattcttcactaacaaaatgccccactctaatcaaatcaccacaaagatacgacaaccactccagaagcaaataagaaaaatttatctcttcaggatcgcatagattatagtgataaaagacttaatcatgcattggacaaacaaattaacgaaaagatcctactacatagagtacaaatggggtctagttgtctatctctaatttaacaaacatgataggacgcaacccataaaaagattgatatcgaaaaagcgattgatacacacaggaaaaacatttgcaatcatgataccaagacacagatacttattaaaagtataatttcaactcaaacagcaatcaactaagaattccagaccaacacaactttcaaaactttcacgagaagaaataatacaaagtctaaccttgccagcatataaaattacaaaatcatataacgaaaatcacaatttctcaatcaggcgatacggaatcgcaataaaaacaacataagatagataacccaagaaaaacctgcgcaatagaacgtaatcgaaaccaaccaccatcatcataatcataataacatcatacaccgattcgaatcagaccaacaaaccaaaataaagaaaaacatagagagtcgaagaagttcaacgatttaaaataactcacctagttgaacgagacgagatctaaactgagtcgatcggattaagactttttgtaaaataaaaacttgtaaaatctagaaaaaaaaaaaaagaaaaaaaaaagttggagaaattcttctttacaagatgaagaagattgtacggattgtcaatacaattttcatgataggggtaagaaatattattttggatgaggaaactggcggtaccggtaaaaattcatttatgcttagcataagtttggattgagaaccggctatcgtaagttgcattttgggttgggcagttttaaaaatttagtgcttagctgaacggtccagattcatcttagaaacattttttgtttgatacgccttacagtgaagggaaaccaacgaaggaagtatagcttgggaccaaaaccaaaacgggaaaactggtttgctattgcgtgcgattaaaggttagaatttaatgtgacgcgagtgtcaactatttttgttgctacgtgagtttgaggagttcgctgtcttcacgccaggtgtacttcactaatctaggttggacccactctatatattttgttgaggtaaaacttgagttatatttagtggaaatactattttggactttatgttttgtaaaagttatagattggactttgtgttttgttaaatga

SEQ ID NO: 390530 - DNA, 905 bp, Cannabis indica
tttttttttttttgagggaatgacgttttcattttaatttaattttttaaaattgatgttttcaaaaaagctaaactcactatacttttatatttggtacgatttaattgtcatgtcaaaaaattatagttaaaattcttaatattcacaatcgttttggttagcagtacttttattcactttagtcggttaagctctaaactaaattgctacaatgtataaaaattatacgtagcgaatttttattggttcaccgtaacaatccactttaacacttaatagaccaaagtagatagaatgagtgttgaccaaaacaattgtaaagattaatgactttaaccataattttttctgtatgagagttaaatcctactaaacttaaaagtacaaagagtttggccgtaaattactctatgatttttgtttccgtatcaaatcatttccctaaatttttaaggcggttagaaatcccctatattaaaattgttagatttaaggacttttgtttaatttaataaaaaatgtcaagtttaaaaggcataatttaatacatatcaaagttcaaaaaatgtgattaggtagatatatgagcatgatttagcatataaataatcactgaattagtaaaattgaataaaattaaacaaaagtcattaaattcaacaatctcaatagtttaagaaaattttttaacaacaaaaaaaattccgagacataatttagtacacatcaaaggtaaaaatcctaattagcctttcaaaaatacacttcaaaatagttttaattttgcattttttatgaaattttacataaaaatcccatatgaactaacagagtaatctaaatcgcaaccgaaatctagtaacccacatagaaactaccaaaacaaccaaaaccgtattttt

SEQ ID NO: 390531 - DNA, 1508 bp, Cannabis indica
attgtaaatgatttggtctattgttttctttttatttttatttttatttatctattcatagatacttctatttttctctaaattaaataaaaattattacaccatttaattatatataatgggatgcttaatattgagtaaattagataaaataaattttcgttacaagaacttagaattaaaagttatgtttgacaattatatttatataaatttctctatactatatatatatatataataataataaaaacaatgacttatatcaaaaattcaaaactaatattacataaatatatgtatactaaggattttagtggcaaaaaatgattgaaaactaaattatttgtcaccctctactactttatattatatatatatagaagtaattacctggactttgccgagtacaccagcttcctcatgagactcccgagaagctgcttcctctaaagattcgtcaacctcccaaccaccctatttatataatcaatatatatatatatatatatcatcataaatataaataaataattatatactattccatattcaaaacaatatataattaaatgcatgccacgtgacttattactagtatacatcataattaatttaaattcatgcatatagtacatatattaaaaaagtcttcaatcacgagcaattcgagtcacgtgtcacaacgtgagttattaaaattttgtaagaaaatttacttgacattcttttgcaagttagttcataatacctatttctatattaaaacaattgcatgcatatattggtaccatattttgattagtaatagaaatttcatgagcatataattttagaagtgatgtcttaagattgattaataatattctctaaatgtcaatacatgttagaagatgttaaacattattatagtgttttatagtatttctctaaattatttaagactcgaaattaaattgtattaataacgatataacacgttagataatgcattttattagcatttttctaatttcgtgtgtgtaatggtgcatgtaatatatttcagatctagagataagagagtttattaataattaagccaataataatgtgctaattaaatacctttggaaacatgaatcggccttgacctttttgtgaactgataacaagaacttccaattcattaatattgctactaatattacaattacttgaatcatctccattattattattctcaatatttttgtatctgtaaggtatacacctgcaccatacataataatatacaatattaatcaaatatattaagagcattattatgagaggtattaattgtgtctaacactctgataaagtattgtctcataattagttagcgatttttataatatttattaaaataaaataagtgagacttaatattaagttgcaccaataacaatattacacatcacaaaaatactgctaatgtttactaataagtaatgagaatcaatagtaaggtaatcattcacttacat

SEQ ID NO: 390532 - DNA, 1213 bp, Cannabis indica
agataaggatggcttacgaattcaaaaacttatcgtgggggtttagcattcactagtctcaacagtattgtggtacctaatttgttggaaagaatataaattcaacacgaaaagtaaatatcatattttctttccatagacttagaagctaaaaaaccaatcatttgtttgaataagaataaatggttgaggattctaatctttgtttggtttttggtcaggcggagatgttgttagagccgctgtaattgagctcgttgtgacggtggctgaaggtgaggatcatttgtgaatattgggtgtttgaaatatttttttggactctaaatttgcttttctcaatttgaagagatactgttttattatgtcaaaaaaaattttgtctaaattttagattttttgtctctgaatttgtatgaataaatgggtcagaacactttgaataagcatttcttttttctttttcctcctgtgatttgggtgtttcataaattttaatcttgagtttcttgtttgaataatattaacttgtgatcttgaattttttaattgatcttaatgagtttttagctagagattttacagttataacatttgagtattaaattgttcctacacttccaaaattgcgattgtatccctgaatttattacttattttttctgtcaccaaaaatgttcacaactacctttgcttcctttacttcccttctttctttccaagtcaaaatctcgtccaaacctcagaactttcccatcttcctttctttctctaaattcaacactctataatctattgtgtaagcaaaaataatacattgatagtttttggctgaatctaaggttttctctgatttaagaggtatttttcctttatttaatttactatcccactttatattttctgtgattctattttttgaattgggtatacttttgaatttctagtttcaataaagacagttttttttcaatcatttatagtctttggttccttatcaaatgagttttgggtttaaaagtgtgtacatataaacttatgtttcttagaaccccaaatttatctattgcttttactatatgctaattttgccttagattaaacttggttaatttaattttttgtatcaaatgttattttttttattatcttatcactatgaattattgttattatcttttaaatttgctaaagaagtagtagtagtagtagt

SEQ ID NO: 390533 - DNA, 1126 bp, Cannabis indica
aaaaaaaataaacataaatgaaattaaacctcacagtcattacagaatatattatttgaaataaaagaaacaagcatacgatcacaccgattgtgaaaaaggatccacttaaccacattatgagcaacaaaattacatgttcggctaacaaaaataaaattacaactagcataataccgggagagtctattacaaaataagtgtagttctcaatctcccaacgaaaatctagtctgttgagggaattgataactaccctcgagtcactctctataataataaaattccagctatctttagcaactttcaaagccaaacagtaagctaccgcttcaccgcacggagcatcagaaaactccaatcttgctatatgcacaccacacaccataccaaggtggtttctagtcactaccgtgatgcacatgcttttctttccatctctactttcacatcacagtttgacttaatccactctttaagaggaggttgccatccatcaaccaggagcggaggaagagtagggaaaagagaggttctataatatgtgaatcaattcaattcaatatttcacattaaactcattcatttaatttttttaaaaaaatttgatattcatgctctatatttaaagaatactactcagtgctttgaacatattttattaattattttaagttttaataattatttttgtatggaaatatttatatatttgaaatgaatggaatatataaaaaattttaaaaatgtaaaattttagtgatgtattttaaataagttgatgtatgatataatgtaaaaatgtgttgtaaattcaaaaaaaagtaaaattttaataatatattttaaataaactgatgaacgatgtaatataaaaatgtaatataaattaaaaaaaaaataaaattagtaataatatattttaaaagatataataaagaaggggttgaaagtgctctaacgacctgaaagtaaaagttgatcatgtcaaaaaggtctctcaacggctcagatgtaatttcatatatgatatcagaaaatatttgtacatagatagaataatgaataatgacatggacacccccaaagtgatatgctgacatggtccagatatagggatggaatt

SEQ ID NO: 390534 - DNA, 608 bp, Cannabis indica
aatgtaatacctaaagtaacttagtcaattaaagtataacttatattgaaaaattgctattttctaagagtgcggtgaagtttaaatcgtatatttcagtgtaaacgatttatgtgataggattggttttacaaatgctctaaactaaaatctaataacgaaagcacttcacaatatagaatttgaatttgacaaaatggttataaaaagatcgggaaagaataatactaagaccatttctaatggtgctatttattttttatctaaattttagctaaaatagctaaaagttagaatagtcagtcatttatattattcttgctccaaccatgctccctatttagttagcatttgattattttaataatattaaaaaaaattagcatagagagctcctcatatttagattttagagagctccttattcattttttattatagagatttttttttttcatagttagagtttatttttttaaagaatcacttcctattttaggcagctaaagagtatgtttagagaacgtgattagagatgctctaatagtacaaaatttcgaaaaaaaaaatgataatcatatgaagggacataattgtaatataatgtt

SEQ ID NO: 390535 - DNA, 1116 bp, Cannabis indica
cgttcggagcactcgggctcctagtgcctgagcaaccttgatgtacctagcgcctaggttgacatgcaatattgtcaacttggggcacttgaaaccacaatattgaagaaatatccaaagcatgttctttgtctccatccaaaatgagtaagcaagttttttcagaaaagaaatagattgaccttgagcacaaacttggacccaatacctaagatgacctaatgctaggtccaaacggcctagttgacatattgtcatccagggctatttccaacatcagatcagaagaagtcttcttatcatattttttattttagtcaagaattaatatttgggtgctttttgaaaataaatgaagtcatctgggagcctaaatagggaagtttcaacctaggctattttgacatcgacgttgggcccagcacccaggttcacattttgtcagccttggctatttccaattagtttttcttagaagtattgtcgacatattctttgttttcacaaataactgagatacgagtatttttgagaatcaaactaaatcatttggtgtcaaaagctggacccagtgcccaggttgacattggcgatgggcctagtgcctaggttaacattttgtgaacctgggatatttctaatcagttttcccaaaaattgttttgggcatcctttctgttttaacaataacatagatttaagtgatcacggagagaaaatgagatttctaaggagcgagaataaggtacccaacaactaggttaacatgggcgttgggccctgcgcccaggctgacattcaacttggagcgtgtggttctgctcctcaaatacaaattctgctccatgagttcttcttattttggtcaaaaacacggtaggagaccttgttcaaacacttgaattccatagaagtatcaaaacaagcattagaaaactactcgaggagcacccaacagccagcttgacgtatagcctggtgcgttgggttctgcttattagattctaattctatatcgagcatctaactattttattgtagtaaattagagctacaacttgtgacaggtctgttgctccaaaattcgcccaaaatacgtggaccagtcaagagggg

SEQ ID NO: 390536 - DNA, 1233 bp, Cannabis indica
gaatcatattccttttgcccaaatatgataggcattaactacagctttatacactatcttctgaacttggaatatttgcagtttcttaatccaattttggtgatctgattcccacccaattaaacaaaataataatgccaaattttaatagtctttgtggtgctttatagctctaccaatgtttatagacggaatatggacccatgtatgtaagcaatctaaccacacaattaattatttctcacttcagttagcaattgtctctcactttcagtaataaagttgtaaattttcccctttagttacattttgtttatttttgagataatttattaaagttgcaatgctcgttatggcctaattaattaactaacttaagatagctaaaactaaatataatgaacttatacactatacactaactctaaaattatagagatacaattttaattttatcgaatagtacttatgcaattatttttcgcatggatcatcactctctaattacagtagattagcttgaatgcaaccgaaagggaaaattcaaaattatttctaaaattatgaaattatgtaagtcaattataattgagcttgttaggctccaatcactacaacaaatatatatgagtattaggagcgacaaaagtcgctcctaaagctatagatcatttcgcccctaatactaattgttgccctaaaaaattgcctctaataatttgcgtctaaatatactattaggggcaacaaaaaaaatcgcctgagataattagggcaaggggtcttcaactcttcttctccataagctgcccttgtgtagtcttcttcatcagttctatgtttttttcagaaaaaattaattgcactttgaagcagttgtacactcatgacctccacaattccattctccaatttctatgaacaaacaatatatatatatatatataaagtttctctttcaggaaaacaaacacacatatatatattatcctagctaacttttatttacctgatgtggtatgtccacgtaagccaagataaagtacatgtaggatatagctttgccaacagcaagatatagtctccctacaaagcatgacaaaaccgtcaagtagcaagcgaaacaagttaagcaatctgtcaatgagttgtaccatcatatctggctgaccgaggggagcctacaggctgcctaggatgagcttatatggccggccaggatctgggcacaag

SEQ ID NO: 390537 - DNA, 881 bp, Cannabis indica
caattaaaatattgaatttgaagagatattaattttaagttattaattaatatatgatgagtttgcagttaggaatgttcatgtatgtatagaccgtacattaatgtattttattttataattaatatatttgacaatatatccatgattcaagaacccttactagttgtggtttaatggaacataattaatgaaattgtgtggtgtgggctccacaatatatatacccactaactattaatttaattaaatatggtttttactttttaggatccactaaaacaaaaatatatatattgtttttaggataattattagtaaataataatggtaataatagcaatagtgataaaggattagaattgcataatttaagctttaataatagcatgactgagttttttaatacaaaaaattcacactaaaaaactcatgtaaaacaatttttctatattatttggttcttaattatttaggtcttattcttaattattttattagctaggactctatttaatgactcgaacatttgtagttttactttttctcctgattttttctttttgaaatataaataattataatgcttgttattcttgctaaacatctctttatatataattatatatattactataggttgatgcagggcaaaaatgtagtatttttcaaagtcacgagtaaaaaaaatatataattttagatagagaaatttttttttgggtccttgagctaggtgggttctaagtacaaacttagcccgtctatgcccagggtcaggcctgagttgatgttacgtacaatacaagtataattattttttttaattaagtttaattaaataatgttaagtgcaatacatgtttaattttttaattaga

SEQ ID NO: 390538 - DNA, 1455 bp, Cannabis indica
cgaatacactcagacaagataattgacataaaaataacaaatccattatcaaaatttaaaagcataataacaatccatcattagactgatctattatatcataaaattattttaaaaaatatatattatataaaaatagcataacaaaccttaaatattcgagtaaacttagctgattataaatctaatcagacttatttgagcatttggaagaactcagacctcgtcaggtcattctccatatcttctccattcattcttctataaactatttctctcttcattctagtcttgtttcatttctaagaactgataattatatatatatgagtttgggcgcatagtaaaaatgaagtgataagggaatgcaagtgaggattacagagagagaaaatagaaggggatactggtaagtgaggatcccaaagagagaagatagtcgacgatgggtgcgctgcgaaaaagatgacaagggggaagcagatgaggaacttgaattttcccttcagagagagagaatcgtgggtgggagcggaacgacgggggtcgaatattgccaaacctataccctaataacttttgatttggagaagagaatgaatagtctgctaattttgcgatttgggttgaggaaataggatttagcgtcggttttaagaagtcaaaagtatttttgttgagtgtttatacgcatagttatattcgacctttctaaactgacgcaatataccaattaatttttttaatattttacttttcccatcagttttgtcattctcgtcttacaagtaacagccacaaataatgtttttttagtgacagtttaaaacacacataattacatggtttactattcacgtcagtcaacaaagtgaacagtagtgttgaccgacgtgaatagtgtaatttgtagtagtgcgtgtttaaacacatgatcattttcaccgagtaaaagtagataaatcacagctgtgtgatattcaaatgataaccgcatttatactacgtgatatgtaatcaaacctcacgattttagggaataaacgttgtaaagattacagtcaactatgtaattaactgcctactatgtgattttaaatagaggcaagttagatcaaaaaaaagacgaaaaaatcataagagaaaaaggccctgaaaaactatcagaaatctaataagattgactcgtggactatatagaattttaactgcaaaacaacgtaaaaaaattctttgcgtctatactttttcctttactatttttattttctatgtgagattatcattgttatgctcatatttggttaacgaaaatatgcattaacactaaggaattggaaaggttttatattagcaattaattaatagttaaatgataaattgtaaattaaaggataaatactattttagaccctatgttttgtaaaagtcattaattggaccctctattttgtt

SEQ ID NO: 390539 - DNA, 1385 bp, Cannabis indica
ttgatttgaatctcaatctatccaaaaccaaaaaaaccagaagatgaatttatatttcggtatggataatttattccaaactttcccttgccaattacaaaagaaattgaagaatgtacatttctctgaaaataaattgaatgagggaaaggaaattatatggtgtttggttacaaaataaaaatggaatggtaataggaataaaaatttaatggaatgaaatttctattcttttatttggtaaaaattatgaaatcaatagctaaataagaattgttatatttagaaaaggatggaatagaatttttattattttcaccaaaatacccattaatttttcttctaaaaggatttttgttttattaaattactattattttacaaataaataatatatttatatatcactaatgaaaagattcagaaacattttaatataacctaaaaataaataaataagcatatttcagtataatatatatttattttttattatatccacatataattagtttactttgagcacctttaattttaaaaggtgctagcatgtttattaaaaaaaatatatgaatcaattgtgttgtattgaattccatcatttatttactaaattttggaattgaaaaaattagtaagaccacacaaattaaggaaaaaataaagaataacaattttcttttttaacttaatttatattaattaattaaaaataaaaagacaaacatactctttaaaaatctataaataataaatcatttcatcatacatgttctaacaatttaattaaattaaaacatttcgtttatgttttataattatatgaacaaaataaaatgattttgattatctttttaatcaatttagtaagcaacataataaagtattatttttaattattttatattttaaaccaatttattgcttccattaattattctaattataattacaattttctaaatgtgcatactggaattgtctttccatcgaattttgagcggaattttgtatgaaaggaaaaactactcctatctaatttatcaagcaaataatgaaatgtacttttatggcatatttacttataatcaatcttttacatttatttaattgcattattaaaattaagaaaaaaaaattgattaaataagagattaaaaaaaaaaaatactttccgaatcaattttataaggaatgtcagtaaaggtaatgaattggggtaagttgaaaaataccactacaattaataaacaaaacaaaattacctctaattttatatttctttaaaacatacatctttttatatgtattgtacctaaaataccctgacagaagagagacacatagagagtatcctgaagtgacaagggtaaaattggtacagt

SEQ ID NO: 390540 - DNA, 643 bp, Cannabis indica
aaaaagcaatattatatattaattaagaggtggtggtaataatatgatcatgtcacaatcagcgtgcctaatttgctaattaatcctccattaattaataattaatactttttttaataaatataattaaattaattacaaaaaagtatatgtacttttaattttatataactatatttttcggtaatattattttgggctctatgttttacaaaaatgattgaatgaacttttgttttattaaacgataaatttgactccgtattttctaaaatagtaattttttatcaaaataaaacttaataataatccgatctagaaatattacgatgagactaattatatttttttgcatctatacatgttagtaattgtcttaagtttgttatataattcaaaagaaaaaaaataatcgaaaattaagcttgaggtactgttttgtatcattttaaaaaataaaatgtagactttatcatttaacacaatagaagatctgatttataagttttgtaaaacagagtaaaaaatagtattaatatccttcaattttttaaacatgatatagtggataatggatattaatgttatacaagatttaccacaaaatttgtaaaattttgaatttatttagggaaacttacaa

SEQ ID NO: 390541 - DNA, 2167 bp, Cannabis indica
gaagcggcaaactctgcatcgcagggtcgccgagagcaatgaataccctattgtggaatgttcaagggattggcaacccttggactgtcacggctcttgccactcaagtcaaagaattcaatttaagcttggtttcctttctgaaactcgttcgaaaagtgcgtatatggagacaattcgagttcggttgggttttgatggttgcttttgcgtggatgcaaaaggcaaaagtggggggctggctctcctttggaaagctccttttgcggtgcaattgatgtccttcaatgacttccatattgatgcttggatcaatacggaagaggatgttaattggcgattcacagggttctatggggatcccgatccttcacaaagaaaacattcttggacactccttaaacgtctagctcgcagttacaatggtcctgggctatgtggaggagatttcaatgagataagaggaattcatgagaaattgggaggagggggaaaacctggatacttgatgaaaagtttcaacaatgctatagacatgtgtgctctaagagaactagaatatgaaggcagccacttcacttggtgcaacggtagaaagcaaaatctgatccatgagcgcttagatagagttatggtcaacaaaaaatggtggaatacttatgcaattgcaaaagtaaaacacctaagtagatggtgttccgatcattgctctctcttagtaacctttaaggccatcccaaatgatgataaaaagcaacagccatggggatatagatttcactatgaaaatgcttgggccgacaaagaagaatgccatcacattgtcaaagagatttgggaggggggaaatactatacatacggcagaagagttagggagacgcattaatcattgtgggcagattttgggtcaatggaatgcaaaggaaaaaaaggacagccaagccaaaatcagagatttgaaaaaagaagtggagatattgtctcgggatcaatctatacatggatttaacagattaaaagaaaaagaaagagaccttaatagacaacttgcaaaggaggagctattttggaaacaaagaagcagggctatttggcttacacatggggatcgaaacactcggtatttccatcaaaaggcttcgtcacgaaggaaaaagaacagaatttgtggtttatttgacaataatctgacctggcagaatacaaaagaggggatagaaaagactatatgtgaccattttgagactctattttcccacaaagaacctgaaaatgacctcgtacattacctacaacgctttgttcctttgagactaagtagtaagcagaatgagcacctccttcaggattttacagccacggaagtagtacaagcattacaacaaattcatactctaaaagccccaggagaggatgggatgcctcggctattttatgatcaccattgggatgtagtgggcgcggatgtaactcgtgtgtgcctagagattctaaacaccaacaaggattgttgatctataaacaagacacttctttgtctaattcccaaaataaaaaacccgatccaagttggtgacttccgccccataagtctatgcaatgtgtgctacaaaattgtggcaaaatgccttgctaatagaatgaaagatagcttaaaggaggtcatttcagaaaaccaaagtgctctcattcaaggtcgtctcattcaagataacgcgatcctgggatttgaaagcctacattgcatgaagaaaggccgatttgggaatggaaaaaagatggcgctcaaactggatatgtcaaaggcttgcgatagagttgggtggagattcatagaggcaatgatgatatgcttgggctatgaaaggaattgggtggataaagtcatgaaatgtatcaactcggtctcattttcagttctaataaatggggaagtaagtggacacatacaacctcaacgcggactccgacaaggcgaccccctctcaccatacttgtttcttctttgctcggaaggattatcttgtctcattcacgaagcagaaagagcaaatagaattcatggaataaagtttggtaaagagggacttaaattatcacacctattttttgttagcccaagatatgtttccaagaggggggtgaattggaaatttaaactaatt

SEQ ID NO: 390542 - DNA, 804 bp, Cannabis indica
ttatgttttgatttactttattttaggcacgacacttacacaatagggcgtgtcatttatcttattaagataagtagtttacaatatgtgttgtttatcttattttaaggtaataataagttaaagaataaattaaaaactaaattgactacatgaaatttagtggattttgataagctaatctccacttttaacatgagaaattatttgaaaaatggaaggaaaaaaaattaaatacatacaaacttttgagactaaggtatggttagcgaaaaaaagagatgacaacaactgctaagctagagtattaacaagaagttgctcatataatgaatctaatgaaaatcaataataagaagatttgctagcatgttgtaatattacttttagttgatttctcttttcataaaaagccaataaaaattccaaaaacaacaaatattaagggactggtatagtagtatactatgatctctgatttctttattagtgaatttatgttgagtttttttggcttggtttactattttccaatgatacatatttattttaattttatatgtttttggcactcattttgtttctattgcagcttcaaccactcgtgcctagttttatggacaagcacaattgagttgcacaatattttgtgtacatagctcttgcagttttccaaaaatgtattacaagaataattaagtaaaacttatatagatgtagataattatcagcacatgatttggttacttgtgtagagataaacaaatgtcaaatatttctactaattgactttcaatatgccta

SEQ ID NO: 390543 - DNA, 1675 bp, Cannabis indica
tgacacgtcatcatcgtcaaaatatgggtaaacacgtatgtagaaaacttataatttttaatgtttcaaacagttgcattacagttccattagagttgcataaatattttgctaacagttatttcgtctaattgaaaccttcgtctaatgcaaccttctgcaaaccacccagaaaccttcgtctgattgaaaccttcggccaacaactcagtaaccatcctacaactatcgtctgattgaaacctttgtttgacgcaactatcgtgaaaccacgtagtaaccaccctgcaactatcatctgattgtgtaagtgttagtgtaagaggtattttagtaattaaaatcacataaaaaatataaatattgtccacaccttatgaacatatttttataaataaagtgtcaatttatatttttcatgtaattcctttttattaagtatatattcaaatcacaatttattatgtacaaactaacaacatttttatatttatagaacattaattgtatatttataggagggtgcatttgtattaaaggtcatgagttcgagtctcaaattatatactgttgtaatacataaaacctttaaatccaaaattaaaaaaactatattactatttgacataagctatagttttattatattatcaagtaagaaaaaaatgtgtttcacttatttcaactaattcaatagttaaactgctctaaattcgtgtgtggcgtactggtctaattcatatttatttgtatttcttaaaaaacaggtcatgttatgtcgtgccatagaaaaatataggtcgtgtcgtatcatgccaatatttttaaagagtaggcccgatatttttgtgtcgtgctcgaatttgtatcgtactttgttcatatcaatttgtatttcttaaataggcccgtctattttcatattcaagcttaaatttctactttactttttcattctttttttaacaatttctaaagtatatgtatattttataactttatatatttatataacttttgaacaatattttaaagataatcatataaaaaaaattattagcatcattagaatttgaatatttacttataaatactcaaatttttatatcacacatgtggtataattcttccaaataaaaagatgtccaactatagttctagttatggaaagttagttgtctcccaaatgggcgctcctaggagtctaacttgtccatccagatgaatctcgtgaaaggctagatgtcgtccggaatggagtttcaaaagtctagcttgttcttctaggaagggtctccaggggaagccagccttccccggaaaggagtttcggatggctagttgttctctcctagaagggatttagtggactctagttgtcatctttcctattcaggaagtcccttttacgtactccttggtctttcttccaaggagcgtatgactcatccagaagcacttctttttgtgctgacatggagatattgttacgaggagtttgttaagtctaactaacttaacaatttaacacctgtagtgtaacgccctaaataattaggcacgctacccaaaatgattatgaaaccctaatcccctaaccgggattactaattaaaaatagcgcagaatttaaacttttatattaaacagactaaaaataaacttgtaatatatt

SEQ ID NO: 390544 - DNA, 554 bp, Cannabis indica
tttgtataaatatatataatgcaaatacagtcactaataagctacccagttttttttgtcttctttcgtccattttttaattaaaaagaaactttatattttgctctaacacgtgattatcatgcatgcctatgaattatatatattttgcgtattatgaatctttttagatatatgtaaataaaaaaacctataattaactttttttaggatgatttagttactagtttacaatgtcgtcatatatatacacgtaactaaataaattaagttcaaaattatatgatcatcaatatgtgtcggttaatatatatgtatttataaatataattggaccctagaaaccctagagctatatatatttatatatatagttagatcgatacgactgcatgtgaaaattcttccaataatttagtgaaaagaaaaaagatgttaaaatttataaagagaataattagtgctattagtactcttaatttcaaaccaacccaattatgatcaaacgactaattacatatatatatatgggtatgctcttaataggtattacc

SEQ ID NO: 390545 - DNA, 753 bp, Cannabis indica
ttgaaaaataaatacatatcaaacttaaatggagaaacttagagaaatttagagtgttatgatgagggaaaaggggaaaataagttatggtgctttattttttccagcaccttttcttgccatcgttttattgataatatctaaatttaatattaataccactttttttagtgtatactccaaaattattttatattattaatattataaagaaacttagaatattaattattcttatgatactaaataattataaaaattaaaaaatcaaaaaatatatattaaattatttatgtaaaattataaattttttatcagcgtagttcatgagatgtgctagtaaaagtgatttttgttagcgtacttcactattttgtgttggtaaacacatttttctgctggtaaaatgtatgaagggaagagtgtttacacgacttgttatgtcagcgcaaatatgagttccattggtaaaaataagttttgccaatagaaatatgcattgataaaactatgacatttttaccaataatacaacttgcgaaatatgctagtaaaaggaatttttgttagtacaataacgaattacgctgacaaaagtaacattttttgtaatgatgagtatttgaaaaattaattaagtatttactgaaattccgtattttaatatttcagtttaattatttaattaagtgattaattaaatgcggaataatgaaactggtactgaaaacagtttttccgtagttacagaat

SEQ ID NO: 390546 - DNA, 1621 bp, Cannabis indica
ccagcaacatagttccgccattgtcactaattgagtaataaaatggcaagtggaggaatgatattcctttctaagttccaatgctaccaagagcaaatatgacaattgaagttttaagatgaaggcgctactaggagccaatgtttaaaaaaatgcaaatgagccttgaggcattttttttttgtaaggcgatacgtaagccttgaggcgtatgaggcataagcctgaaaaattaatagaatgaatatttttagagcacttaagaataaataaactatcacataaaggggcagtgcaccaattcgaaggaagaaggcagcaagcttttttttcgttggttgaagaataagcatgtgctgctgtgaagaagagagggagctgctgtgagataggaagaagatagaactagggttttatttttaagttttatttgggcccacttaagtattttagtgggctttttaaaagttttttaagtcttttaagttaggcagcaaaaaaataaatttacaatagtaatttgggcctttttttagggctcaaatagcccattttactttattgaggcgcacgcctcttacgcctcacgcctcacttctcctcagcaaggcgcacgctttgatgcactattcaaatgcctcagcttgaggcgcgcctcaaaaattccttaataaacattgctagaagcttaggatgtgtgagatattattgagaatgatcataaaaaacaaaacgacattgctcttttccaaactcaacaagatgccttaagagattcaagaaagctctctaccttatctatcaagcaatggatgaaaatgtgttcgaaaagatattgaatgcatctacagccaaagaagtgtaggagaagcttcaaacttgcaacaaaggagtggagcaagtgaaaaagattcgtctttacactcttagaggtaagtttgaaactttatttatggaagatattgaatccatttttaattatttttctagagccactactaaaagaggtggattataattcttgatcattttaaacagccggctaatgtattgcctttggtctctataatcgtcacctattcgactgtcgcaaaactaggtagaataagcgacgatttaaaacagtcggcaaaaaactttactgttagtttaaattcgtcagcaatagtgaaaactatagccgacaattttgcactgtcatattaaaaaaactagatttcctctcgaaacattcaccacatctacgaaccggatgcaaaaccaaaaatcctacacatctcaaataaaaaatagtcacaataataaactcatacacatctcaaatcaaagaataacataataaatacaaataaaaggcaaagagagattacccgagaatgatattgattaacggtggttgcactagtggttggaggcagtgccgagatgatggtgtgactggtggtggtgccaactattgacgtggtgcaattggaaggcagtgtcgactgtcgaggtggtgcaattgaaaatgatgccaagatggaccagctggtgcgagtggtggtagcttcgtctaactggcggctgctgctgctgtgctccgtcgaaggagagagagggagagagagggagagagaga

SEQ ID NO: 390547 - DNA, 618 bp, Cannabis indica
ctttcttttcattttcaattaaatatttagatattttaccacatttacaagcttttcacagtaatgttttcattagaaagagcaataatattataataggtgactgcttcataattattgatagattaacaagtaacaactttaatttctcaagatttatatgaatatgttagtaacttagtatcatgtagtacatattgagcaaagttaatcgttttctaatattattatatcattggattctttcattttacaaattactagataagggagcgtacttacactgaatgcaaatcaaacatggaatatgtgtggctgttaattctcctcttgtcatatatttatttacagataactcaatgaattattgtaattattgttgaaacaaaaaataaataaataaatgaattattgtgtgaaagccttgtcatgttgtagaaattgtacaactctcattaattgagttgtggcgagtacagcgcaagtggaatattctactggcaggcttttagcacacacaataagctgactatatatagaagaataatagtaagaaatgggaagattaattagtagtgcatatgtactaatataggaatatgtatcaacaatcaatat

SEQ ID NO: 390548 - DNA, 558 bp, Cannabis indica
gtgacacaccttaagagcgacatggagaagctctgtatgtacattacttcgtctaggattagatacctagcaacttttcttcttatctttttgcttcattcttgtcatctggcaaggctccaatttggaggtaagttgcaatatgtgttatccatgttggactttcagccaacatgtcgacttcttttgggatggtaatgctgggatcctctaagaatcatattggcaccaaatttgctttttcggcaatattgctactttctagatgggcaagtgcattcgctatagcatttttctctctagggattttcttgattgtgtagcctttgagctgacttagtaagtctttgattttgctcaagtaggctgccattttttcacctaaagttgtatactcaccgaagatttgattcacgaccatttgagagtcattgaatatggctaggtggtaagctcgtacttcatgtgccagctttaggctagatattaaggcttcatatttagcctcgttgtttgaggctttaaaattgaatttgattgctccgtgcagttgctgcc

SEQ ID NO: 390549 - DNA, 750 bp, Cannabis indica
tttttggtataagattagtattcgctttgatgtttgttacataaatagattatgtaaatataaaattatcatagtataagtatttaaaaaaaatgaatcatttatctaaattcaaatctatatttagtatatataaattagctagatataaatagttgatatttacattaatttaaaattttctaactaacaaaaacaaaaaatcatcattcttggtttattagaaatgtgttgaccataacaaatcacaaaatttatgttatgtaattaacaaaattaaaatataattgaagcaaacactatttagttatacaaattgaaagacaaaaaaaaaattaaagttgttatcattactgtatcttactttcaccactacattcaaagttattgtcattatcgtattttacttatagttaccactatattcgaaattattatcattatcgtatatcttattcgtaattgcaattccatttaaagttattatcattaatgtatctcacttatatatttaccttcttttcattaattttttttctttactttattctcttatgtgtctatgtttatataatgaaaaatcagactttataatatactcaatctattacaaaaacaaaaaaaataaataaataaataaattatttataatatttttaaaggtaatagataattaggtgtagaaattttttgtttttaaatgtagaaaaaaattaataaaaaattagaaaatagataaataattaaaaa

SEQ ID NO: 390550 - DNA, 1650 bp, Cannabis indica
tttttagaactaattaagttgtatacttccttacaaagaagaaataaagttaagttatatttttttttctcgtatttttgttttctagaacttataatactataagataacattcattaaaatatgacttaccaatattttctcctaaacttgtatatttacaaaaatttagtgcatatttggcatcataacaaaaaaattattttttattttttaaaataaaaaattattttcttgaaaacaattaggcttggttggcatgaattctttacactaagattatcccaatcgaaatgaacaactttacttattacattattcttctaagatcaacaatagttttctcttcctctctctccccgattagggatctttgagctataagtttgttttggaaatataattcaacaaagtttcgaccagactagtgtagtcaagaattcgtgcattttggaatgttggggtcttctatttataggcgagaatcagtgttgcacaatcttctttctcttattggattggcccacgtggctccgtgttcctatttcctcactcgtcttctctcatgctctacttatcgagttgcgttctccaagctatcctgaacctagctatgctcttcttctttccccttctcctttaaatgatacaatgcatttttgcctttcctaccatgttgctttattaattttcattttattattatggtaaatttactcttatactcccagattatttttattttttacaattatccattagttctacaatttttgagcttttagctgttaagtttgagctcaaatgttgtggaaccagtacccaaaattatctaccacctacctttctaagtcgtatttatttaataaaacaatcatttcaaatcttaggaaattgtccccaccttttcaatttaccttaatttcctaatttcaaattaaactagtagtatttaattaaaagattgtatcgaatttaggaacttccctgattatctttgattttccttcttcttttttgatgtctttccttgttgtttgtttttacttccttcatcccaccgactcgacctacaacaatggcttctagaaggtttatcctttgactaacctagatttcatgtccaaatacaaagatgtttacgatgagatatgtacaaaatattcagttctcgatgccatcatctttctaaatctaacacaaaaacaaactgaccaaaagcttgtgtgagaaaattaagactaatagtgcagaatcaaatcaataaaattttaaacaatcaatacaattagcaatgacaagattaacaacgagaacaataattagaaataaaacaggggtaaacagagtgttaaaaaccaaaaaacactaaatgcagaaaataaagaaatcaacaccaagatatatattggttcaagtccgatagatcgatgtgatctatggctctactccagttctagaacatcaccgtaattcttctttattgattgagcaagaataggtactattgattgtggttacaagtttcatcatccaagagtaaaagttgtgaacccagagagtagataccggaagcttagtgtggatctggaaagctttgcgtagaaggtctagttgaattcagaaggtacttccagataagcttgtacc

SEQ ID NO: 390551 - DNA, 737 bp, Cannabis indica
tggtcaggaattaattagtaatgagaaaacgaacaaataaaaagaagaaaaaaaatctaggaagaacaattaaaaactgagttacattttaacacttaaaatcaatgtatgtaaagatagaaaaggtaaagatggttagggaggatggcgcgtgggagagaagtagagagtagaagggcattggaccaaattgtgagaaattccaagctgtcacgtactaaacgcgttctcgtctttggtctctttaggtgggtgacaggatatgccttttttggtttaattcccataaactcataaaagtaattactttatggtgcccataaacagaagaggcctatattaatttttttttttttgttattgtacctattttatttttgtgaatctttcttcaaccattgactttaaaaatatactttatgcattgccaaataatcacacgtgagattcttcagagaataacaccaacaatagtcatttaggtttgggccaacaaattaattttgtaagttacattattatatttatgtgattacgtatgtgctagattatgttaataatattaggttttatcattgtatatatatttttagaacattattatcaatattgtatatatatatatatatatgaaattttcttatataatataatgtttgtatatatgaatcttaacaactggcgttcgtacggaaattctttttattattgttattgttataacatttatgataggg

SEQ ID NO: 390552 - DNA, 635 bp, Cannabis indica
tttaatatatttaccttaaatatcttctaatttatagcatggttaaatctctatatttatggggtttattttgcacagccgaggaattcgagggatttggcatttgattttatatttatttcttattatatttggtaaaaaatattcattgtatcttctcaattaatagtggagccattccactgttaagggggctcgagttcatattttctaaacaacacttatgttgtcaaaatatttgtaagccttcatcaaggttgttaagaaactcacatgggcagctccttgtgatctaaataatctttgaaacaatacaacaaaaagagaaaaaaattattaccataattaagggatcgaatctgtataaaaaaaattctcatgttcttattgctcatagatattatttaattattatttttaattataattccatcactttaaacacgcagtgtcattgcctaaaatcaaagtcaaattagctaaaagtcaaaacaaaatatttaatagaaattaattaataaatattgaaaaaataacaaaaaggtaataaaaatctgaatttacaatattttgtatttttataggtttttttttaaaataaaaatacggactattattttgaaatttttacatga

SEQ ID NO: 390553 - DNA, 725 bp, Cannabis indica
ttaacaaataatcaacatcgtggaaaattaaggatgtaaaattactgaaataataattgacttacttacgtattcagtgacgtaagtaaggaattgtttttgttttctggtagggaacaaatacagtgatactactgacatttcatgttttttttacacaaataataataaaataaaataaaataaagtttgattttgtgtgaaccaaatagtgacaagtaactagaaaaattatgtgctcacatatccatgtttagctaacttctttggctgtgctaatttaagaaagtggtccaataaataatacatagtacaaataagaaaaactttgggaaatttaaaaaaaaatattattttatttataattttagagtctaaaatttttatatataaaaataaatttgtaaatttttaaaattataaaaatatattttacttaataaaaattaaaaaaataactaaaaaataataaaaaattaacctcacgagaactatacataaaatgtaaataaattataaaactattaaaaataactaaaaaaatattctcataacaactataatataattataaatgaattgcaaaataactaaaaaaataatttattttttttaaaaactaaaaatgtatttttataaataaaaaatttaaagtgtaaaaataaaacattttttgtgttgatgtatttttgtattttttttttaaaatttttgatctatgtaaa

SEQ ID NO: 390554 - DNA, 1935 bp, Cannabis indica
caagtatataggcgctctactaacagaaatgacaaaaacttaaattatatccttccctagagaaggaatctctttcattgtagacattttttttcttatataattacaaacaaacaaacttttcagctggctagaggaatctctatcgtctatatgattctttgcctttagctgtcatttagttttgagcaggaatctctatgggtcttgtgagtagtcacatgatcttggcacactaaacaacagactgacttcttcaggagtcacatgtccaccttattattgacataaaacaaacacgacacaagtacgcatgagtatgtttacaacgttcatctgttttaccatttttgttaatgggtttatgtgagggactaaggttcatgcactcacatgtgtcactgtcatcttcatgccacacagatgaatgatttctcttttgttgccacttgttgatgcagtagatttgttgttgataggttgagatattgctagtcccctacatattttttcatcaagatcattgagtgagaatgggcagttacaagcagtttttaggtattgtgaatcttgaaaaaatagatctttatagtcgactttgttttcatcagtgtagtgtgttttttttttttttattaatgattcatatcttcttcttgtttttggaggtcttcaggcgaataatatgcccatggtgtgtcatctttggattttggccagatggcgtctgaaatcaccatgttgatggcaaatagcaatttttcgagctgtctgcttcaatgcttcctattacggcaagtgggtgctcacttgacttgtgtattttgacactagccgtaaatgataagtctcgattgacatgtagcctaaatagtaggattgtaaaacattgcaatgggtttggcatgtttttggtaactgggcaattgatagccatgcgtctcttaatgcaaactttttcccactcttgtgtgaggagtgtgtcctatttgggagatgttttgaaccattgcaacataaccattggatgttggtgagtaggcatgagatcaagcattgtaaatagctacagacggaagttccaagccttatcgtgggtatctcgaccacaatagtgtatgagtttgcaagataccagtataggtctgttatcctttttggtatgaatatgctacttttcatgtgtaagagtttatcaaaaaggtagtctagatagaagtcaaattcttcaaatatagccttgccatatccctggaagagagtggaatgaatttctagggctcttcagattgctttaacccttgatggggaatttagggaggataagagatatgttgaccatgtatatcaaatggaatgaatttttagattgttgattgatcatatttataataagtttgcttggctgggagaggaaaaaaaaatcgcatttgtttttctatttatgtgtttgatttcgaacgtgtaacgtaagaaccacatggctgacctgagcagttgagcattgactattttgttttgttaaaatatgaacatcccttaaaatgcggcaacatctgtttccactagaaaattgtgtccgatgaggtgaaactcaaatgttgtgatgctcatttttactgccagtatctctgtgagtgtagaatggtagtgtagctgggaatctttgaaatttctacttttgtaactgcacactttgcatttgccacgatcgtcttcctctagtaggactgctccccagtgtttgtcacttgcatcgttaataactagaattgattatatcaatggacactacagttaaactcaataaatataattctataattactaagagtgtaattctatatttatggtgaagttatcatggaagtaataaataagtgattatttggttgatgagtgttgctataattttaaacactacgcaagtatacg

SEQ ID NO: 390555 - DNA, 1049 bp, Cannabis indica
tttttaaatatttttacgtaatttttattttatttatagaaaatactgtcttttaatgttgtactcttaagttaatgtagtttgtttattttttattatctgtatgttatttgttattgttattttaatgttatttagatgttattttcatgttacttttatgtaattttcttgttgttttcgtgttatttctatggaaaactgtaaaaatgtaagaaaaattctataaatgtaaaaatgtaattttttttaaaaaaaaattgccttatgtaattatcccttaaaattgagaaggagaaattatgagtcatcagtagttaatggagaaaagtctgatattaagatttaatattgggagttgattgagtgataacatagattttttttctattttttttttattttttttttttgtagattctgacgaattttttgataatatagatttctaatttaagtttggaatatatgaaatgagaaatattaattcaagactgtattatataataatttcaaacttgtaagtactctcaagggttgtttttagtttttatgggtattgagtaaaactttgaaaattggttttttattaagaaataaaatgaacttcaaataagttttataaaatatttttctagcaaacatttgattggggtcttatgggttaatgttaaaaaaaaaataaaaaaattactattaggaggccccttgagttgaggggctatgggcagcagtcctggccaccttaaagacaatcttatttttcagtaaagacaacttacagtttttaataatcttacaaaaaaatgtggaattaatggtttgttctgttttatcatgctattcatctttcccaatcatttttctcataacaaagtgttctaaattcttaaataactatatacgtgagtgttttacttatctttataaataatataaatatatatggaagaagtttcaatgggtacattttttattgtaaccattatggttacatttttttaagtcattggattactattaaatggttgtgattaatttggaaatta

SEQ ID NO: 390556 - DNA, 2438 bp, Cannabis indica
gccgctaatagcctattgcggccgaatcgggagttattagcggcggagaggtccgccgcgctaatgagggaatatcttgtagtgccaacgaacgaacacaaatggttcgtttctcctttctctctcaatttgtttcccctctctcttctgttctcatttcgtttaccgagtcgacaataacacagctcctccctcagtcacaaacggcaacgttacaactcctcccttagtcccagacaagaaaacaatgggtgtggattgtcatcttttcggtggtttggttctttttaatgttgtgttttggattgtgttgagaatagggatacgtcttcttgatccaatgcatattagttataattaggttttgatttgtttataggttatatctgttcagatagtgtcgtttagactattaggttatacctatttcatgtaaaaagatctcatctcataattattcagcaatttaagttaaatgtccttatttaattgcaatagtttttggtataataaggtatatatgggctcgattatttgtgtaaaattttttattgggttcaaccagagaagactagtatataaaaatatattttttgaaatatactttaggttatggtcttgaaaatttgcaacttatttagttactagtgattaaagcagcaggaatgttgttataaatggatattctattaaactagagatctttatgcctctttttacagagcaattttatcaattcatagtgttaatttattggatgatatgtatacttatactgctcttgtaatgactgaaaaaatcaatttattttcacaccaacaaataggcttatttagtaatagaactgatatctgtaattagtgtgactgctttgtgagatccttatagagatttacaatactaatttagtttattgaatttgtcactatactaattttataatctgtgcttatttttctttatttcccaactgcacgtgggtgatatttaattacttgatggtttaaatccctacttaataacaaacatttgaaaatttactaacaaaacgccacaaaagggaaagcagtataagaatagaaaagccatgcatacacaattgtaatttgtaaatactgctttaatcttaccttatttgattctctatatccatataaattatgtaaacatcctcttccttttttatctttactgttgtcagaattttcttcttccagggtgaggtttactacaagaaatgtcacttttaccagcacagttcgctactgcgctgtttcgcaaactgcgttggcaaagagatcaaagttttaccaacgtacatttatagtggctaaaatctaacttttaccagcgcatttatgcgctgggaaaagtcttttttgccagcgcttttcattttatgctggcaaaagttctaataccaacattgatttgtcaatctccttttgccaacacatcataggtaaattctattttaccagcacaataccaacttttgctagcaccaaaatgtgctggcaaaagtgacattttttgtagtgaatttagtaattactccctttgctttttccttttttgtttctcctcgtaggcttataaagaacccatatgagttgctcaatagtcatggattctaaatctttattctcttcaatgattgtagcaatgtactcaaatgttgaattcacaacgtgaagaatttttttataacctttactccactaattttattgccatttctcttcttaattgactgacaatgataatgctctagtgaaataattaaaaattgattcagtatcttccacaaataaagtttcaaaatcacctctaagagcttgaagtcagatcttttccacttgcttcgctcctttttcgcaagtttgaagcttctcccacgcttctttcgccgtggttgcatttgagatcttcttgaacgtatctttatccactgcttgataggtgaggtagagagctttcttgtccctctttctttaatcccttaagccatatcgttgagcttgggaaagagcaccatcatcttgctctttatggtctttctaatatcccacacatcttgagctcctagttacgccttcttattaatactctaattgtcatagttgctcttagtgagtattggaacttggaaggggatcattcctccacttgccatttttcttcacaaacttgactctggtactactttgttagataataagacgaattttggagagaatacttaaatggaaaaagctatattttatatctcaacatgtgtaatttttgacttggtacaaaatgatatgattacatctctatttatacgattatatggactaatcaagaaacattattaaatgactagcttctacatttttctacataattcccactattaacaaaagtgaaagataattctaaaaaattcaagagta

SEQ ID NO: 390557 - DNA, 1011 bp, Cannabis indica
aattatatacaataatatataatttaattagggtgcttattaagacatatcctataagtataaaataataaagataaaaggcaatataagtatttaaagttataaatttgtaagtggtataaatttaatatttatttttaacagtataaagtattcaatgtttgtaaaattgtaatttttttttaattttgtcagtacaaattctgttatttttttaaacaggccacatatgaggtctagattataaatcattaagtctagacagaaacatgtagtattagttactttcaattatttttttaataaattcaaaatggagtatgtactgataaaattggaaaaaaattacagtttaacaaatattgggtacttatactactaaaacttaacattaaatttatgccacttacaaacttaattaaaactttaaatacttatgtcggtatttaaatatatctataaaataataattaaaaaaaaaacatgtgtacaaacaatttaaatattgctttcagaacattaaattaaatttattttttttaaaaaaaaaataataccaaatattttaaataagtatgatatgcacattctcttataaaaaaaattaaaattagaactatccaaatattaaaaatataatataaatggtgcattcatacacctatttttgaggttcactacataaattttttttttttataatttattaatgtataaaataacatgacaaatcaattggacatactcccttacatgtagataatacttaccgaacataatcaataaaaataggttaattaagttttttacatagaaaaaacaaaaattctaacagcttcaactaaataatttataaaatattaaattattttgaagaaaagtagtttttcattccgaatgaatcacaaccaggcactgatccacactaataaaatattattttttaaaaattaaatgtatttttttaatttgataattatagatttttatagtagaaaagcccccacaaaa

SEQ ID NO: 390558 - DNA, 512 bp, Cannabis indica
caggacctctaacactcacacactcgcctatggccacttgagctagccacaagtggttcatttcttaagtcattctccaccttctttttcttttcggtaaaatttgttaaataactgagttttgttgatttgttaaagatgaaggattcaatctcacatttttttattcttctttgctggaaaaaaatctaagcaaaagttggtgcctatgcatattaagcaatattcactttcactttcaccttaggcaagagttatcttaggtcatctctcaatttttttcctttctttttctaatgctactgttatggtttttattagtgatggtattggttataactattagtgatttaatagtacaagtcttgccaattttaggatgttaatatggtgttgtcattgttttatgttttccatttacagattgattacatgactgtgaacgctaattaatttttgttttgaaaatttacgtgcttcggcacgtaacttctaactaatatatatatata

SEQ ID NO: 390559 - DNA, 1061 bp, Cannabis indica
tcagatttaatgtatcaagatggtgcggctgcacatattatataccaaattagggaatggtaccgcgcttcacgcagttttaataataattgaaattacatacgtatatttaataataatttatattttatagtgaaatttatatattttatgattgaaattcatgattaattttacagcttgtacaatttaaattattaaaaataaattagtaattatttttttttcctgattaaaaaaaaaaagattctctaaactattagtgatgttaaatattctcgatactgagttgtgatctttctcttacttttcatcttatatggttaacataaaactgatttggcacattaaatcctaacatgttttaattatatcaatgcaatgtgtataaagtaaataagtattttgccgtctctattttttttttttaaaaaaaaataagaattgtactctaaatttattaacttttaaaaattatttaaataatcagattaataaaaactcaattatttttaagtgtatatatatatagttagagctaaaaaaaatgtgtatacatgcattatatcttactaaataaattaattataatttttatattttaaagctattatacataactttaagatagttaaaaattatgaatttattattatatattgaattgtatattatgagttaatagaaaagtatagaatatgtgaagattaaaaaaatcaacccatctatattacataaagattttgttgatgattaatatttttataagttatatttatattattgattttattttttattagtgttaatattatgtattgtagatgaagatgtttataagttatcaatttttaagagaagttttttatctattaattatgatatagagattaaaagcataacttaccaaaaattagaaaaaattcaaaattttaattaaaaaaaaaaaagaaaaaatacaaagtaaaaaaaaaaaaagatgtcacatgtttttgcttgggtttttttttattatatataaataatttcacttttcgtcgttttgtaataataaaagtatt

SEQ ID NO: 390560 - DNA, 403 bp, Cannabis indica
gctttaaatggtatataaactatctcttaaaaataaataaataaatatttaaactgcgcgaagcgcggtattgttgtctagttggaatataatttgttttgtcccaaatatattcataaataaagttctactttaataaataataattttaaaaaaattatctaatattgaaattaaataatctaatgataataattttagttagtaaaaaataaattatacaaaaaaaagttagaagagacaacataaaagacaaagcataataataataaaagtagaatgaagagtagttttaggatgaaaataaatgacgtatgtatatgatactttacagggtaaaattattttggactattttttttaatataaccaactgtaagacaatttttaacacaaacagata

SEQ ID NO: 390561 - DNA, 948 bp, Cannabis indica
ggttgggaatatattataaaataatggaatctaagcttaccatgaggatctaatattagttttcttagagtgttaatttgtggagtgctaacagttggatcaaaatctataatcggattatagattaattgtccatgttgaattaatggtacataaggaattcaagagacaattaaaagggtaaaaaatatttttgcccaactttaattatgaaataataatttgaaagcgaactacttatattaattatatcaatagactataagtaaaaattctgtaaatataattatatattgtcaaagagtacaattctatatttatagtggagtaataatggaattagtaaaccagattactctattgaagaatttaataataatcaagtatttattggagcttcaatatataggttcatggtctccaaattacctctatacaacactgtacagaaaaatatttaatttgacgaatgaattgagaaagaattctttaggattattttggatgattatatcaattctgaattgaataattaaaatgatatttaactatttagttttatttgataaaactatattaattagttaaatataatattattcttaaatgatatttaaagggagaaatatattattttagtgtaaaataatatttatctaatcctaattaaataagagattaatgagaattaatcaattattatttattacaaaataaatattagattttattagtgacaaaattgagaaattaatttttaattttaaaatatggttcacagtgtagagcttaggcccagaggtgtaaggtgacatataaaagcccaatttatttgttttgattattttattaaataaattaaatcaaataaaattaaattatcttttaattatttaaaattaaaaatatattatcagataatttatttaaaaaaaatataaaataata

SEQ ID NO: 390562 - DNA, 1137 bp, Cannabis indica
gacaaaatcgtatccctaaaaattataagtggaatacatctggtcgataagggaagaaaggaaagcgaccgaccagcaaagatcgatgtccgattccataaaataaagatatgaagcatccaccttgccagcctaactatcagcgaaagcgacctattttagatcattcacacaattaaatcctaaatctttgaagattaattaggtcattatttttaccgtagaaatccaaaatttagagaataatcaacattaatcgaatattttaatgtaatttatttacttctagcttacaaatactagctcatttcacaaaaatgagaatccgactattttttaactctaaatcatttgtgtaatctttaaagaatagttagaaaactcattatttggcatacaaccaagtgattctaattattcataaagtaataccaaggaatattaccaataaattttaatttgtgattgaatttcttatcattattttattatttcatatagacattattgtatatcttgacttcacgtcttggctagaaggtgagtcaatattactaaaatatatttattaattttaaatatataatattaatatatacacatatcttcaaaaaagaaaataaataaataaataaataaaatttttacttttcaattaggacacttgtacggtttgccccaaaattattattcattttataagaattaattttcatcgaattatgaaagtaattgtaaatttcttaatttagttacatttaatttattttttgagataatttattaatgtgtcatgagctatgcgtataattatagtacaagactctactttattaacttaagctactttgaacaaagtataataactttaaacattcaaatattaattagctctaaaattatagatgcatagaaattcacttttttttaatagtttatatcggtaaaactataattttgagaagtatttattctctctaaaaaaaatttaaaacctcaaacaattagatttggattcgacattcaattcacacctattattcatgtagaaaataatgattcgaattgtgtgttgatttcatagaataatacatatttatatacaaagttaggagactaaatatctactaaatatct

SEQ ID NO: 390563 - DNA, 821 bp, Cannabis indica
ctgttcaaaacaataaataaaagtatctattcatgtctaagaaaacggtattccttactttttttttgaatatttatatcggatttggattaaatcactttttatacaattttagatctttaaagaaggaacccttaccccatagatttattcgaaattcaaaaaaggtaaaagatagcttgaaacctgtgatttatttaagaactttatttcatctgcttataaaattgaaatgggatatactttgttatttccaaggttgatcggaggaaggaggttgggaaaagacttagccttccaaagtataaatttattttgattggctatgcttgatagatggcaaacaaaatataaattatttaaatttagtattactttgaacaacatttgtattatttgtggcagacatgaagagaccattcaatctcttctttagttgtacaaatagtaataagatcttggaagctctcaagaattggttcaattagaatacttgatcaactactattgttcaagaacttttgaagtgaatttggaagagcaaaatgtcaaaagtgtaaacgccaagtgtatgcaataatggtagctgccgcagtatatcatatctggaaaagcagaaatcaagttttttggtaccaaaatgtgcaatgttatcatgtaattgttaagcaagttaagtatgagattataagtaaaatacactttcagttgttaaatcaaagttttgttatagatagacaatgaattgctcagttgtaaattattggaaatattttaccaggatctagatttactaccatgtatgtttcattaacatccta

SEQ ID NO: 390564 - DNA, 871 bp, Cannabis indica
atgctgcattaagtttcctgaatcatgaagttgatatctctcacttcaacacaattctcattactcatacctaaagtgagagaaccatctactctcaaagacttttgccctattagcctatgcaccaccatctacaaagttatctcaaaaattctgactaataggatgaaacatgttctcaacccctcatatcacctaatcaaagtatctttctctaagggtgacttatttataatattatcctaatggctcaggaactcctgcatgcaattaagagtaagaagaaagggaaaactagttggatggcagttaaaccaaacatggccaaagctttcgacagagtggaatgaattttttctaaacaaaatgttggaattaaatccaactaagtctttcctaaccataagtcggttacatgaaaaacaacttgcacaactacaacaacctaaatacaattacaatctaaagatcctaactgaaataacagaacaacagaagatatatacctgccagatcatcacccaaagctacttactctactcctatcctagcagtatatattgccactcctagtttcgattttcgcctagatctaaagacatagagtgagagagaacctgtaattgctctgagttcaatgataagaacttagagttgagaaaaagagagaaaaagtgagaatctgtgagaagagagagattgttcttgagaagaaaagaagtagagacagtagataaacaaaagcagtagagaatcgagtcttaccagttgatcttgtagctggaagctccatgaaaccttgtattggatctgatttgaatagtgcaagggcttagctctatttttttaggcgagctcaagaggactaccc

SEQ ID NO: 390565 - DNA, 1230 bp, Cannabis indica
tattctgttatatttatccattattttattccaattctaaatactgtgtaataaacatgccataaaggttaactattttactaaaaaaaaaataataaataaaataaaataacaaaaatagaaggaatctactcaactatttttttctttcaccttctatataaatgtatgaatgccttaaattataaaatatataaggtaaaaagaaaactgtagcctatctgtaattttcctttcaatttcatttcatataaagaataaaagaaaactgtagcctttctgtaagaaggaatatagtctctctgtaatttctctttccataatatataaactataaagtgccttaatttaaaaaaaaaaaaaaataacaaataaggtaaaatagaaaactatggtgtgtctgtaatttttctttctgttttgtttcatattaagtgtcttaaaatgtagtttatatatggatttacataatagtataacagttttctctttaccttatttgcatttcacatttcaaaatatttattatgaaacggaaaaaaatagaaaaatacagacaaacaatagtttctttttaccttatttgtataacataattattttttcttatttgaattttattatttcttttaaaaaaaaaaaagaaaagaaagaacaccaaatgattttataaaacatttttctctttaccttatttgcattataaggaatttctttgccatagttaatgtagtttaacggattaatttttttttttcaaaattatgactcttgaaaatttagaattaaaaaaagttttaatattggaataaaatagacaaaagcgcgataagatataaatagctttttagattagtaaaaatacctacaacataattaacattcaattcacaacattttacaatggagatttactcttgctaatcacactttctttacggacatgaatgaatgaaatcctctatttaagaaagaacaatatgattttagaaatatgttggggttattttgtttattactcattataatcgtaaaaataatatatatgtcgaaatacaatgtatgacctagaattttttgaagagaagtttttgtttcaaacatggccattccttttcaattaaaacgaaaaagaaaaacaatataattttaaatatatattgtaattagtactgtaagttcatgcttgttgtgttgtctcagcccgtatttatttgtacttttcaaaaa

SEQ ID NO: 390566 - DNA, 766 bp, Cannabis indica
ctaaaggcttacattgtagtagtatatacatctatttataaaaatagcaaatgatatgtgacttctgttactaatatagagaaaatactacacaaagacacacaacagcatagcaaacttacattgtaattaaattaatgcaaaccagttagagatctaataaattatttttaccaatatgtctcctacatctccaaaaattagtacaatccaattagatatatagtgagtgtaaagtccttttttggcaagttagttgacaaaatatttttcttttatggtaagattgttttgcattcatacccgatttcttaccttgtatattcagtttttagttgctcttttctatgttaggaaagatgcacttttcagctggactttcctttgtttggaaacttcttgtaagagaagcaattctcttatggaaagttggttttttaaggaaactttgattattgccttttccttattgaattcgattgtatcttgatacaatcagaatatataatctgtttatggcaggaatcaagacttaatagaggatcagacccgattatagcaagtttcctttttctggtcagatttgctgcgttagcttccgattctgatgctgcagattgtgtttatcttaggaaagttttgtacagctgtagattcgatcttgtgactgtctctagggtttctatgttctataaagcctagagagcagccattcgaatcagctcttccattattcattttttgcacttatcttatttgagagaag

SEQ ID NO: 390567 - DNA, 1525 bp, Cannabis indica
ccaaccacctatttactaggcaccactgcctcaccttccaccaaggtcactaagaagaaagaaaatgtaggcacaaaagactctttcaaaaggctagcggttacagttgaaggtgttactcgtaccattgtcaagcgagctcagtccagccccactctaataataaacaaagcatctctatatgcagatacttctcataatcaggcttgccttgtaccatgaagattgttagttcgaatgcatgttgtcctgggagtgatcatgcatgtcgaaacctctcccaccttactaatatttgtaaccctaaaattttgtttattattgaatctagacatactttgggtactttagacaagtttaaggctaggcttagatttcttaatggtttggaagtaggtggaatagatcagggagggggtcttttgttgttatggaagttggatgtaattgtcactcttgtcaatcaatctaccaatcattttgactattatattttctcttcctcctttaacacccctattttcatttgacttgtttttatgctgctcccaatcatgtcaatagacctcatacgtgacgtttacttaaccatattggtcaaaataatccattggatccttggatgattgttgtgatttcaacacttttatcaataaggatgacaaatatgggggacacttggataaaggcccttcaaatgatttttgtaaaatcactcaagacttcaatctgagtcctttggattatgagggggataagtttacttggtctaacaatcaccccaatgaggaaaacatccaagaaagaatcgattggtgcatagtcaatgaatcttggaaggatatttttcctcaagccacacttaaacatggggaattctttggctctaatcatagagcactcatcgttaatatttttctccaatcttccactccttttttaagccagcaaaaagactttctttttgaaaatgtctagctttagaatcccaactagggtttacacatcactgacttttggcaatctccctctaagactacaaatcccatcacatacttaatggatattcatgaaagatgtgcgctgaagcttcaggagtggaaccataagtctgccttctaatttgaaaggcgaattaatcagctatcaaaataggtggaaatggcccaaaccagtcaaaattgcgatgctgggagaattaatcgcattaatgtcctccaacaacaactggacagtcttttgtattaagaagaaatatattggaagcaaagatctcggattaactggctgagtcatggtgtaacaccctactagtttaggcatgttattgttattttaaaataactgtgcagctcgttgctaatcaacgagtttattacaaatcgtttataattaaaacttttacttaattactctctaaatgaaaataaatatcttttacataatcgggatcccataattaaaatatttacaattgggttacaaaatattcaatacaaaagttgtcacctagcgaccatttaaa

SEQ ID NO: 390568 - DNA, 1260 bp, Cannabis indica
cccataaattttcagggccggccgccctgatagtgagattagatgttgtaaatagtggtcggatttttttatacggcataaattaaatcggcatgatgagcttataatgctacaacatcatacagtacaaaaaaatatatataagctaattataagtatgacacgacacccgaaagatacagtacataacagtctaatttaaaagtactactaataataataacttgagtatttattaacaaatatttatatttatattttaataattttctatgaaatattattgtaaaattgtataaatataacttaaactataaattgcatgaataaatatctcataaattgcaaagataaaatgaaaaattaaaaaagtataacacgaatttaaagttgtatgaataaacaagttgacccagttgaagcactacgaatttgagcatatgcacaaaattaagcatgacatgatcatgatatgatacatatttaattatagcacacggcacaacataatttatatacagcacaatgtgacacacgacacaacacaacaactccttatttgtctttaatttgattgtctttatgtatatatacatatgcttctgcagctttatcccattccccaataccaatgcaatgcaatgccatgcacttttcttattattacttttgctttttaataattactctctttattcttttattctttttctttttttttattcttttagaggagagggaattttgctttttatctatgcatgcagcaataaaaataattcatatatctcttatttttttatttgtaaagagatattttttttttgaaacattgtaaagagatatttgaaagtagagaaagataatttctcattgatatcaagcattgaatcaataacatagtacacttagcaacttatagactagctaatacacaaactttggtaactaactagtaactaaagcaatacaattgtaactaactttatacattacataactaacctaccaactcaattaactactccactaatcttaatactccccctaatagttctgtaagcccgtcatgtctttaaatagcttgaactgggagttgaaaacaaaaatttaggttagtaaatactcaaaattggtctgtagttgaaatatggactattttgatgagtcttctttttttattcggtacattaatctcaatatgtttgttcctttattaataaaaggaattagtggtaagtgtgatgagcagccttactg

SEQ ID NO: 390569 - DNA, 962 bp, Cannabis indica
ttgttcttgtatagcttattcatttattgatgcggtagggtgtatggtgtggccaaacacacccccttattgatattagaatacttgaaagtgatgatgcaaatgatttgattttcgcattgcggcctcatcagaattacaaggtaacataatatgttatgtttatgttatttttgaattaaagttactgttactatttaaaatagtattgtcaagaaatgaaaatgtttgatttttgtatttggacttatcattgaacttttaggttatcgtgggagacaaacaaaaatcataatatataattgcttgtgttgtggctctatcaagtggtgcaatattattaggtgtaatagcatttgttgtacataaaagaaaagctgaaagcaaaggtatgaaaatctcatagctagcttcttttcttaaccacaaaaaatcatttaaaaaagaaagagaaatatcttggatctttccaccttgaataatttttaaaccacaaaaattcacgtaattaatttgagtagtttaatgattgctacttttttttaagaatttgatctcacaatacaaccaaaaactattgaaattaatagtgaaaacaattccaggatattcttgagtcttagatatctcacataataccttttcactaagaaaatatcataaaaaaatactaaaagcactactacaaaagataactacctttagtgacaaatttttagtcacaaaatacattttttgtgagtaaatgtaatttttatagtcacaacaaaaaattacttgtgactaaaatattgtttttagatacaagttgttactagtttacttttagtcacaaacaagtattttgagtaaaagtacacttagtcacaataaattgtaatttttgtgactaatacttttagtcacgcactgcaaaaaattgctatttttagtgacaattttttagtcacaacataattatt

SEQ ID NO: 390570 - DNA, 2095 bp, Cannabis indica
gatcaagcaaaagccattgggaaatattctcaaaataatatattatggtacaatcaagggggaatcgttgatagaattttcaagggcaatcctctaatcagcagcaacagggattctaccagtagagaaattagccccaacaaaatcaacaatagccacaacaacaaggtctagtggatagtctagtcttcaaacagatttgctacttcagttcatgacagagactagattatccattaaagccttagacactcaaatggggcaactggctacttgccctcaaggtaactttcctagtacaacaaaggtgaaccaaaaggaaaattgtaaggcaattactttgagaagtgggaagaagtatgaggggcctattgagaaacaacaagtggaagaagtggttcaagaccaataagcaccggcattagaagagaagaagattattgagggtcttacatcaaaagaagtgtcaccacctgtcagcagtgagcaccatgtaaaggctctgaaagaccaatctggacaagcatttttcaaagtttttggaaatattcaagaagctgaacattgacatccccttcgcggatgccttggaacaaatgccaagctatgtcaagttcatgaaggaaatcttgtccaagaagagaaaaatggaggattagaaaacagtggcattaaccgaagagtgcagtgcatattatagaagaaactccccccaaagttagagatcctaggagttttcccataccttgtaccatcggaagaacagaagggatatatgctctttgtgacttgggagcgagcatcaatttgatgccgctgtcagttcttagaagattgtaattgggagaagcaaagcctacaaccataaccttgcaattggctaatcgttcgctggctcatccaaggggggtcattgaagatgttctagtcaaagtagataagtttattttcccaacaaattttattgttctagacatggaagaagatagcaacatgcccattatccttgggagaccattcttggatataggccaagcattgatagatgttcagaagagcgagttgaagctgagggtgtaaggggaagaagttgttttcaacgtccttaaggtaatgaattttccaaaagctagtgataattgtttctctattgatcttgtggacactttagtttagtggtgaagaagaagttgttagaggattcattagaagtgagtctaatcgaagaggatttgaatgagcaagatggaagtgaagtgatggaatatgcaaaattgcttgactcctatgggtcgttgaacagaaaatactttgaagattgggagtcgttccaaagaggcctgtgccgtttgtagagaaaccatcagagcttaagttgaaggcacttcctgatcatttgagatatgaattcttgggtaataataagacgctaccagttttagtgtcagtttcactttctaatgtggagatagataagttgttgagagtacttagagcacacacgaagaccgttgggtggacattggctgatattaagggaatcagtcgctcaacatttatgcaccaaattttaatggaagatggagctaagctgactatcgatgcacaatgaagactcaacctaccaatgaaagaggtagtgagaaaagaagtggtaaagtggttagtgttggaatatgttttaccagggtctagatttactactatgtatgttgtttaacatcttaaatatgaatatctaaaacaatgtaaataaacacatataaaattttggaaaccttacagtgggtgcagcagaataataatggctcctttctactcagatctctaacccttgtatcttgtctgtagtagagtatcaccaagatctgagcccaaatctccttctcttgaaactggattcttcacaaccttacacattatgattgagtaccacttgatgtgtgtgggaacttactctatcactatagggtttgaaattatgaagagaggaagagagaggagtggttcgaaataggtagaagagatggctcaaactttttactgaaggcttgaattttcgtcatcttttgatatgaggcatcactatctattt

SEQ ID NO: 390571 - DNA, 836 bp, Cannabis indica
atcatcgaaaactcagaaaagtgataatcatcatcgtcaacatcaaaacctaggttctattccggtacaattagacttatcactgttggccgaacagcatagtaacaagccacgtgttgattctcagacgatgacgggatcagatgatgaccatgttggttcctttgttggggaaccatcggtgaccgctggcgcagccgtcgtggaggagcggaagacggaggagttggaccttgagctcaggttagggccggagcgtcgacatcatgatgataggaccacgttgagtacaagggaattcttttgatccatgtgttgagcatgcatatatctgaagatttatatatgttggctttttggaaatgaaaacactagaggttattaattatatatatatatataaatatttatatatacattatttatatatacataaatatattcttatttcttgggtctacaatcatctatttttctgattcattcatttgcatggtgttttcatttcttcttcactttaatatttagatatagtgtgttatgaaacaatatttaaggaatatagatattttattgattgtaattgttcttaatgttgttatattaaaattataaaaataattcaaacaaaaattattaagatatttctatcttgaaaggttattttgttcattttaaaaaaaaatagtcatttcatttcaatactttaaaatacaatcaataaagaaatgtaataatttttttttttttcgatttcattactttcagccaaaggttacgttgcactactacacaaaaggagtttagagactgttatttttgctgaaaactaagaa

SEQ ID NO: 390572 - DNA, 2249 bp, Cannabis indica
tttctcgctaagtatgagttatccttcttattcattcttagaggaaagaatgttaagtgtagacatgcttcttctcgcaaaattctcattttatactgatattagcaagatgactactacgttgcgtagaaagcaagatgattgaatgtacttattttctccctgctcatgtatataggtcgatgagttacaaacttttattcccaagtatgtggattaacgagccgcaagctccttgatgtctcatcttgtacgcttctattatatactctgtttatcccgagatggatatgttgtctcatcaattatattagtttaatagttattattcttatctcgcatatgcttatgtggcagtgagtttgaatatttctatcaatttataattaattgaaatgagttattttaaattgcatttagtaataaaatttaattactatattctttgagttgattcatatttcttttgtaggacacgtgttagcttctaatgaatagctaaatttcaggtagaacagcgatagtccccaaaaaaatgatttgagaatcgattgtggatagtagtttttttagtagtgcggggaacaaacggaatcatcaaggagtcaaaataaaaatccagcgcccaggttgacctaggtgttgggcctagtaatgtcaacctgggctatttccaatcaattattccaagaagtcttctgggcatattctctgtttcaacaaataactgagatatgagtgtttccaagaatcaaatggaaccaaccagtagaaaaaagctagacccagcgcccaggttgacactgatgctgggcccagtgcctaggttgacattttttcaacctaggctatttccaatattttttctcgaaaagtgtttcgagcatctttgggagccaaaatagggtcctagtgccctagttgacatgatcactaggccttgcacccaagttgacatgaaacctagttcacatgtttccatcctcaaacacaaattttgctctgggcattcttcttattttggtcaaaaacagggtaggagacctcgttcccaatctcaaatgccttagaagtatcaaaacgagccccgaaaagtcactcaggaagcatgtagcgcctaggttgatgcgtggcctagtgcgctgggttttgcttatcagaatctgattttgtcttgactattcaactatttttttttttgtagtaaacgagagctacgacttatggcaggtcaaattcacactttgatatttcacccttctaacaaggtggaatataaaaataaaaaattagtgagtttcgagtttacctgatttcaccaaaaagcaacatctccaagaaccggtgaacaacctcacaaaaacaaagaatctgattaggtgatgtcaacatatcacttaggcataaaaaaatacaagtctgtgacatttttccacttacaaagtctctgggttgtcaacctgcactggatgttgaacaaccttcagttaaatagtcataactccctcaatattgatctgattgacacgattcatcttgtgtttcgaaactatttcaaagatatatcaagtaatgtatcaaatctacatcacaattctgaaaaattcaagtctaaaattcatgcccaagatagttgtaatcttttcacaaactacctgaaaacaatccaacagacgagattcaagctcaaaaattaacgattttcatcaagagtcaattttcaccattgccaagattagcccaaagtaattttttttcattttttttgtattttttattattatttgaatggacatccttccctataaaaggagatctccactagctcacttttcacattctactaagtctccatgaagccagagcatctctctactttatctctctagaaatatgacatctttttttagttaattctcttgtaatttttatgagaaataaaaaattcaaaatagacgtagctctattatcatctcgacacgaggagtaaattattatgaattttgtgtatctctctatgttatttacttacccattattcatcttgccaatctagcgagctagtattggttattttcgagtctaacaattattttatatgtatgatttgtaagaatataaaaaaggaaaaaaaaatagtataaataaagatggattttttataaaataaaaattattaaaataaaatatttatataaattttcttaaaaaaaaaacattaattgtgggcaaaatatagctcaggctat

SEQ ID NO: 390573 - DNA, 1296 bp, Cannabis indica
agagagagagagagacttaggacagagaaactaatggaagaaaataaagaaaacgcagccattctcaaacatcaaaaattatataaataaacaaatggaatattttaatgttcgatcgaggaacagtgtgtatgattaagatatgtttaattacaaaaaaaaaaaaaaacttattatatgttatctttcctattcttattaatatttgtttataatttacacaaaagttgaagttcttctataatactacttttaactgtgagtaacgttgttaaattacatgttcgataatatgtgttgaaaaagaaaaaaccttaaattattattaacaaatattgctttaattatatctgtcttttaacacacgaaagaagaaaaatgagattagtttattaattctatgtttatcatcttaataaacactaagaaagggctattgtatcgcatttttttttttgaaataagaaattttttaaatcaaagattaattgttacaaaagaaattaagaatgtcgaaataacttttcctattgaactactaattattgaatgcagaatgatatatataacaaaaagcatcaccaaccaacaactaataatttgctaacacatcaataacatggtgatacaaaaaattattcaatttcctagtgacccataaaagcacaaaagttgaatcataaattttagtactagtttatacaagaattttaatttagtatgtatgaaatttaagtttcatgataagatacaaacgttaattaaaaattaaaaataattaaaaaacttaaagagtaaatctttctaatatttttgcgttaatttttttttcgaataataattttagggagttgtttagaaaaatcaaatattttttataggtgttgttataatataaatacagtagaacctctattcaagaatactctatttaagaataaattctaatttgttataaaaaaatcgactcacaatttgagtcaattataaataagaataacctcgaaattataactagttatacattttcttagtctcgtactaaccaagtatacctctatataagaataattacatcgtaataaaatatatacatacattttgtaaattcatttatgtaaaattaataattttagtccaaactataatacttgtataaacattctatttactctaaaataattctattatgatatagtattaatgattttttattgtcattattattacattgataattttttgtattttaattttttttttcttgtgtaactctatttagttataatatctcaa

SEQ ID NO: 390574 - DNA, 1652 bp, Cannabis indica
aatacactttatttaccaattatacggcttcttcctctctctctcgcacaactctagcaatctccagccattaccaccatcttcattggcaaactctcgctccaaggtgtcttgggctcgctcgctcagtgttgccttcaacagcctcgacagtactcgtagctctgagttcaattttgactttagggaccttgttgattggggagggaggtttttgctgcgtgtacagaggagttgttatgtttttagggtcggatgttgagattgacgacgaggatgacgacaaagacgcccttccctgaaagattgaagttgcgatcaaatagttgaatcgtagtggtttcgaggcatgtaaaaatgaatttgaaaagtcaataaaaaatatttatgtcaataaaggtttatagaattgaaaattttaaaaagagaacgtaaaagtgaaaaaaaagtttgaaaatgtcgtaagatgggtaatttccctaatctttaagtaatttgcttataattctaaataaactatgaaaaaaaattattgattttcttatgtgacaaaagacaatataaataataaataatctaaaaaagaacattttagctacaaattttgaaataggaacgcttactaacataatcttacaatttatgccatttattataattttgcttaagggtaaattaaatttaaaaataactcattaaattacataattaataaatattataaaataattaaaaatatttatttctaaaaaaaaaataatcaaaaataaaatttgaaacgtaaaatgactgttacacaattctttttttttttttcatttaggaaaagcaatactagtgttgtaataaaatatatttccaaattcgtccaaatatcatctatttagaagaaaagagtggctgcccatgttcatactctgtggcagttattgacagttacctatcggtttgtgtagttctaaccctgtattttctctttttttggtttgaatcttctattctgcagcagtttattccgagtttcatctttctcattctgtatcttgtttcccttcattgaatctatggatccttttgttcataaaatgaaatctacaatctccttaactgaaaaagaaagtgttgttctggccattactaatgatggttcagagttagacgagtcacatgaatttattcttgtggcccgtattcttactaataagaaagtgtggccgagtacacttaaaaaacaaatagtcgagcattgggatggtcgttttaaggtgaatattaaagaacatcattctggtttgtttctcttgtatttttgttgcgaaggggaccaattaagggttttagataaggagccatggaacttttaaaatcaccatattgttctcccacaaccaactttgctgcaaaatgttactcatgaaatcatgatttattctccattctgggtacaagcataccgactcccatttttaagtaaatctaatattagaatattttatttatggaaataattttctatttaaggaaatgattttctatttaaggaaataaataaataattgattttttgataatgaatattttatattcattgaatctgggcaaaattaattatgtaatattctatatatggtcagatttctatattcattacc

SEQ ID NO: 390575 - DNA, 2217 bp, Cannabis indica
tgagacatgtacaagagtaaacagtctagtcgaaagcgttgaacccttttggcgctctaatacaagacggtccttgtcatgagtatatctaaaactttgttgaagacgtaaatacaccacgccagaaatcctccatttacatcacaatatacattgataaacttcatccacttcccaatgtgtagcaagtggaggccatgctccttggtaccttggtcaaacaccaccctcaagacagttccgagagtaggaaaagtacttaagatacctcttgacaaatgcaattgttcaggttgtaggggaagaggattgttcttttcatcttctagcctgggattttattatttagttaaatcattaatgattattgacataagtgaaacaataagactaagcaattcatctaatctaaggtacacaccaaaccactcaagctagcctcaaatggcattggtaaccaataaacaataattggatatcattttcaaggaaacatccttcaaaacattcattcagatatactcaaatcaaaatactcaggcacatttcgaaaattgagtaagtgtactctgtagaaatttcttgaagatgagaaatgagaatatatcatactatcttttctgtaaattttgcaattttcttcttttttattttttgctcatctaatttgcttctccttttttataaactcatttttacgatgttctcagagagtggagagaaaagtggggatacattattaattaataatatattattttttcttttttttttttcttaatgagtctttctcttatatattactattattttttttatatataataaatgaagaaaaacaacggttcaacacacacatgataatacagccaactatgacccgaatttaaaagcaacaatagaagttaagtaactctcactaacctcgaagaaatactactcggatgggcatcagttccatcccagaggaagcccatcaattcgcctttaaactcttggacatgaattaccttgagagagaatatgaaaggtgaaagttgatcaaaaacatagttacatacaaatttgacaataataagttaaagcaaaaagtattaagtaaaatacaattttaaacagagtaaagcaaattaccttgcaagccaaatcaacaaatctaccttcctcgagttctcttatcaatgaaaacttatttgaatctatcatgtatgcggcgcatttatgaatatcgcagttttaaatatctattatataattagaaaaatcacataaagcagacaggtgcaaaaatttaaaatacatagttttagatacctttagatacctacactatttttcttttcttctattttcatatcgtcccataatttttgttatacttttgttagcaaaactaagcttgaacatctactaataaaaaaggtagctaatacgaaggttcttcgatgtcgtattcgtataagaactttactttaaatgtaaacatattcagatacctcttgcacgcccttgggaatctagtagactacatgacttatgtacgagcatgcatggtttgtttaagagattcaaccacacatttgccccttctacataactaaaagaaaaatgccaagttagcaagtttacctcgaatccatgtttctcctttaatgcaaattttaaagaaagctcctaaaggaagccaactccctcaagttctttttctactaacttctataatgttacaagtttagaattcagtttcaactattaatgtgtctctatcatgaatttttcaaaataaagttaaataatttagatactaaaatataaagatggctaattttatagttgtataccacaaaattgagctaccttcatcaaagtgaagatcaataaaccattttctcaagcgtgttatgagcttcttgtctacgtctctctgaataaatattgggtaagtttgataaggaagaagcccttcattgtcatttccatagtatacagcaaaggtagagaacttcttattaaaaacagcatacactgctccaccatgagttttcatctgtaagaacatagctcatgttcaaatacaccacactttaaacaaaacaatttattcatatcaataaagttaaagttcttatcctatggatgaatgtcttccctcaacttctgtttcttttgttccactaagtcaaatagacatgcaggtaaatgcatcataattactct

SEQ ID NO: 390576 - DNA, 725 bp, Cannabis indica
atatatataattaatattatgattccgtgttcaaactattacatataggaaattaaggaataatattaaagtagtttcatcttaatgtcagtcatcaaaatcatttttgacatagtacgtactactttttttttaattattattattattataatatagtggtcgacattaacttaattgttgtttggaatttgcctaccaagttctaatttctatattttctaatactatacacatatatcgacaaaaaaaaaaatgttctatagagacaagaatactatatagcatattatactggcaaaaatataagttatttaaaatagtaatatatggggtaaatatttaagtttaagtcttactccctaataaatttttaagtaatttttgatggcagtaatactaagttatatttctaaaagttcagtacgtacatgaccattaagcttaagtgtcaagttattatttacgtgtcattttttattaatatatattttaaattaatttttaaataaaaataaagatttaattagtgactggaccaatcaaggactgctgcgtgacaatttacttaatacttaataactaagtacttacataagtttcaaaattataacttaataagtattactgtaacgtccccgcttcaagccttcattggacccatacacccacggactcttggctcttatatacgagtatgccactctggctgctcgtggattgat

SEQ ID NO: 390577 - DNA, 541 bp, Cannabis indica
ttatttttaatttattttatttatagaaatgctaaagcgcacccgtgattcaattaaatatcgggtctcgtatagaagtatcgctagccaactacaacgtgacatatggagaaggtgctagataccacttgtgtcttgtgtctaatagcaatactctttttctttaaaaagcttaatgtttctacaagtgtggtgcatacttacggaagagttgactaattttatggtaggtgtcgggtcaccttcagccccaagtgagtttttattggaactataggtgtcgcgcatgccggattacatagaactgaattatttcttaaactgtagattagggaggcacaatttccgatgggtatgagtccgccgagactagtccataatggaaccggaattttctttctaaatagaacatgagagggtgaggagaattatcttttgtgcccgaatattacataagactacaaggatgacactttccatcttgttagagaatcctacattattaatctgtggaaagaaaatagaatatataagaggaatg

SEQ ID NO: 390578 - DNA, 985 bp, Cannabis indica
ctgatcaatgtcaacaattgatctcaatgctagcacaacaattaccacctgctgcttcaacatcaagtgacacccctgctgtcactaacttttcaggtaaaaatcatgacttcccttacaatttttggattatagatagcggagcaacccaccatgtaagtggtgtttttttttaaaccaactgataatagtatgaggtctttcacgtattgttaatttggctcgtgacctcggatcttacaaagaaaatagtggtgctaacatttcaacatcaaaattaatactttttaaagatataaaattccatgtgtgagggattcttttgttatattaattattaatataatatgtatatattaaaatgtaaaattatattattatgcgaataatatatattaagtgtggtaaatcaaatgtgtacttatgtatttaacttacactttatattatttgtctttttggataaaggacacgtagcataaaatgaggagtatctcgttaaacaatcactaattaagttccctcaattggctagggtcgcggagaaaccatacaaatatgggaaaagcaagcctgaaagctacttggagacttgtcccacagcatacctccatccaagacccgaaggccttatcatctctctgaaacccagaccaagctcaacatatgtccaggagacacctagaggacactcgaagagttgaacatggacagcaatcgctgagaggaagccagacgtctaccatgaagagagacctgaatcgttctagcgacggtcttccttcttcttcttcctcttcaatttcgaaaaacactaagcctttcttcacaaatattattcagccattagtgattgagtaagtgcccacacacatcaagttagtcctaatcatagtatgtaagactgtgaagaatccaaacacaaggaagaagttttgggctcagatcttggtgatactctgctacagaaaagatacaagggtta

SEQ ID NO: 390579 - DNA, 1039 bp, Cannabis indica
ttatatttttaagtaaccatttattataatacttaaaaaattaattagccgtgcgaagagcagttatattgcctaattaccaatatactaattgtttttatttttaatattataaaaaatgtcaattaatatttaaaaacattaatttttttaaaaattaatctttgacattttttttatttgatttctaaatatattattaaattttgtagtgtttctaattatattaaaggggtgttaattacaatcttactcttgaaattatatatcgtaatattttttatcattttttataagaggatttgttataattataatatgtaaattttaaaaaaatttaaataattaaacttattttcaacacttaacattataattataattataataaatactactataaaaaaatatatcatttttgagtaggaaaatgaagcgaaagatataataaaacttctttatgctatgctacattgtacctacctactactccctccctccccaatcccatatataatattatcataaaaaaaaaaaattgaaaaataaataactaatatatttgagattaaactagacaaagtcccaaatagatcacattatccatttatatttatttatatataaataattatcatttcccccaaaaagataaaactaaacaaaataaaaaacctctctttcttcttcttcttcttcaacaaaatccttctgtaaatggcaagatctgtctcccaaaccctaaccctaaccttagcacgtcactttacccccaaatccccacacccatcgtcctcctccatcctcctatctcacagaacccaatccagtttgccttctcagcccaacaacgatctcaccgacataaacgacgcctcatcttcttcctccgatccccttctcaccaagctcgaagacgccatccaccgtattatcgtgcgccgatccgctcccgattggctcccctttaggcctggatcatcgtactgggtccctcccccgcgatcccgtaagtatgggctgacccagctggttgaga

SEQ ID NO: 390580 - DNA, 804 bp, Cannabis indica
gaggatcataatttcaaaaaattaaattaataatatgtgttataatgttttaattatgtgttgcagaaatctatggaaagatgagatgaggagacttaaattagagcaaaataataatatatcataaaaagtatggttgtggtcgcaaattaattaggtatattaattaataatattattcttatgtattcatttttttttaatattagggtatagacattacttttatttttactaaatagatttttttgtttgtttgtttttttttttttaaattctactacttgcatattttttattccaaattctatttacacatgacattgtatatttattgtagtttataatatatagtcacttgttttttcgaaaaatctcaaataatttagagcattaaaaccacattctatattatattattattaaaaataaaattgaaaatagtagactacattggtattttaaaaaaaataccggtatgtatgaaactaactatttatatattatttttgataccgtaaactatttaaaatttcaaacataatgcctactatatacaaatttaagttataattttttaattaatttattgacactaacatgtcatggtttcaattatgcagtttcatggagaaaaaaatattatggaagaaagaaacaagaaaaagagaagaactgaaagatagttatgatcaagatagagaagaatcattgagaagaaaaaagaaaaaataaagaaaaataaactagatcaatataacaataataattactatatattaattattattgtctctaaaaact

SEQ ID NO: 390581 - DNA, 1252 bp, Cannabis indica
cgttataccaatcatagaaagaaaaaaaaaactcctaattatactacactctttataattgggtcttttttaacaaatatataagtatcaagcaaatgatgtttttacaatacttcaaccaataaaaaacaaatcatgggtatgtatcaaaccaaaaaatctcaaaacaaatcagtctctgtattattattgggtattttttaacaaatttaagtatcaagccaaaagaaaagtatcaagcaaatgatctttttataatacttaatcaagtttttggtacaaaacactcaaaaatcactccaaaaatatcaaattttacctaaattgtattatgcatcattggatctttttaacaaatataagtattagtactttagcataattttaagatagacagtaaatttttttttcgatacaaaaaaaatctctttatttattgtgtaatgtagttaccttttgttattttaatttttatcggaaacccttaaaaacaaaaagtaataataaaccaaaaatctcataaaatcaaaattatccactcccatgacacttgtttacatatataacctgaaaatagagaattttaaccataacccaaagaaacacaaaaactcatttggcattatcatagagagacaattttgtaagtgagcatatatgtgccatcttatattggtacactatgctatgcaggcttagatagaatagaataaaaatgagatgtttccataaccataagacacacaacttcagaaatgaacaaacatgtttaatgagtctcaaaatctcaaccctttggattccctgcctgaaaatgacttgcagttaatggtgggtaggaattagatttcaaccaggctctatatatagtcactcactactactactactactgcaagtggacccatttgacattaaattggggttgcagacccatttacctacacaaccttccattatccaactcccataagtttatgaccaaaaaaatgtagataatttctttaccaccttagtgtgtgttttgtatattcttttggggttaatgttaaattaaccccaaaagaatataatcttagcattattttttttattccaatcataacactaaaatttacactaaaaaatattctttattattatattattttattaaactatctcaaattataatataaatataaaaatttaatcataaacacgttattttaatattaaaaactaaataaaaagtagtgtagtctagagtgtc

SEQ ID NO: 390582 - DNA, 594 bp, Cannabis indica
ggaaaaagaattactaaatgcatgatgttgatgtcctattatgatcttggtaatgttgattagaatttagtgcaattattagttattaaatgcatgattttgatgtcctattgattctaaataaaacaaaatacttctgttacttgctaaaaataacataaacattgaccataatgatttcggaatactaaaacaaattacgatcatgcagcattgaccattgttgattattcaactttaactaaaccaagcactttaagttctacatctatatggcaagtgtcacccaccacatagccattttctatatctttgaatttagtttgtgtcatgaactcacggaatccccgtggagaagaatcgaacagtcccatatctgaattaggaaaaaaagaaataaactcagacaaaagctaaaagttactgtttatattagggtaaataccaatttggatcctatattttgcaaaacttactaattagaccctctgttttgttaaataataaaatagaccttgtattttttaaaatggtacaaataggaccctgaatttaatttataaaccgatctaaaagtgttatgacaaaactgtt

SEQ ID NO: 390583 - DNA, 1722 bp, Cannabis indica
ttttttgtgcaaactcgtatttcaattgtgtggtgttatcaaaaacaaagaaggattgtctgaggtctactcttaacttgtgggtactatttttttccctctttctcatggcaatgaatatagtctttgggtaagactcacgagattgttaatcaaacgtaaatactattttggatcttgtgttttgcaaaagttactgattgaattatgaatcttgtattttttaaaatggtaaaattagaagtctgagtttaatttttgacatttttttaatataactaaattgaagacaattcttaaaatgaacagatacagaaaatataaacaatactcatagtacttttagatcagattataattaaattttattttgacaaaaaattaattcggggtcttatttgtaccattttagaaaatacatggtctattttgtcatttaacaaaacagaggatccaattaatatagtatttacccttaattaaataataaagaaaattttaaccccacaaaagtttttataggacaagtagtgtcttcatttttctttttatgaagaagatttaaatttaacacctctttatttttgttgaaagaaactagtgtgcttattagaagttagaatcataataaatcacaccttttttttgaacaaaactaaagaattttattcaaaactgaacaatacaaaacaagagactaaaacctcaccacctctttacaacattcaaaatattatgttaagcacacttacttattttacatattatcttaatctatttcaagtcatttgatgtaggataaacaataaataagaaaagagggattttggtcacatcactcaaggtttgatcacgctcaattattaatgttatgtatttgttttgtggaccacaaataagtgtagcacatatggaatcgaatagtggtccaacaataccttatcactcattcttcattaatgagggtctcttagtattttgttttttaaaaaaattgtgaatcctatttggtattattgattgcataatcttaatttctagtccccacaaaatctttttgtggtgcaacttcatgtacaagtttttgagaactacacatgctaatggaacatataattaaatatgattcaatgacattcttgtaagaatttgtttatatttttatttttatttgggtgtcttaaattaatatgttactcatttgtgggagtcaattaagttttctttcattattttggatagagaaaaatagataatttgagctatggttctttgggttagagcattttcaataggagcgcaccatgtgccaaaattatacatatcatcactaaatattattagttttattttctctcatccatataagtttactatatttttctacaaaaatgctccaataatagtcaactccaaaaattatcaaaaatacacaatctatttttgttaattgaaaagtatagtcggagaaatttagacaatacaaataatgcgagtattcaagcaaagtaagaatagtcaccagcagttatgctagtactcaccaagaatagtgagtactcaaagtataagttacgaaataaacaaaaaagcagaaatatagaaaaaataagagaactatagtggttcaatcagagcttggtctgtttagtctattttaagaaagagaaatttacatggtatacttgttggaatttattttaccacgatcttagatctact

SEQ ID NO: 390584 - DNA, 1304 bp, Cannabis indica
ttttaaagtttctttaaaatacaatattcatgctctacatttatagaacactatttatttctctaaatataattttttttgttagattttaataattatttttttttatgaggatatgcgtatatattaatattatatatttgaaataaataaaatataataaaattttaaaaaataagattttggtgatgtattttaaagaagggggtgtatggtgtaatgtaaaagtatattgtaaaatagaaaaaaaaaaagttttgatgacgtattttaaaaaatagaataaagaaactcttgggagtgttctatatgtaatagtaacaaacaatcttctactattatatttatttccaatctcattcttgtacttttatacttattactttcacttagcttaactaattaatatgaactttaatttactttaagaaaattgacatttagctttatttaatgtaacatcaatcaatgtatgcttataatttcttaagtaatttattgttatttttaagttgataaaaagtttcatcaaatctcatgaacatatttatattataattatttttttggacaaatatttaaattataattatatataattaggtacaaaatatatatatattttttttcaaaatactgaacatttctgaatacaaatacatccatcaagttaaaaatatattttttaaaatatacatgacaaattattttataagcatcaaaattctttttaaaaatttataaaaatgggaagcacatgccttgcatgtacattcctactagtaatcataaaaactaaagagtaaataactaaacaaatagtttctttttctttcaataaatgacttcaactatacaaaaaaaaaaaaaaaaactaaacaaataataatttaaatacattaaacatgttaaattatggttgcttagatactttttaggatatatattttgattattcttagcaaaatggataaaatttgactaactatatgattaatacttcatacaaaatagattcaaattaatcataaaacaccttagaataaaaaagtaatcaataaaaagtaaaaaaaaaaagctaaatttaaactaattaattatatattaaaaattacacatatcaaattatgattgctaaaaaaaaatttagtcctaaaaaaatttaggctatacaattttgttagtcctaaaaaatgacataatttaacttcttttttttttttgaaaaaagcaagtaatataatttgacaaattatatagttattatattctacaaaaagggaataaaaaccaaaaattagtaa

SEQ ID NO: 390585 - DNA, 905 bp, Cannabis indica
gagaggacaattcagatactaaaggatatgtgacgagcttgtgtgatggattttgaaggcttctggagtaagtatctaccattgatagagttttcatacaataatacttatcaaagtatgatagggatggctctttattagatttttaatgccataaaatgtagatctgcaatccactgggatgagacttgagaaggaaaatacttaggtttggaatcagttcaatggagcaatgagactatagagaagattaaggccaaaaggcttgcttctcagagtaggtagaaaagttatgggaatttgaaacgcagatatatagaaattcaagtagaattccaatgaaaggagttaagcaattctggaaaaagggcaaattgtgccctagatttatagaaccttttgagattcttgaaaaggcttagtagcttatagtctagcatctcccccatctttgtcagcagtacacaacatatttaattctctatgttaaagaaatacgtctcggatacaacacatatttttacttatgaaaccctagagatgcaactcgatttgtcttatgaggagcagccattccttatcctttataagaaggatagagttctttgtaacaggaccataacattggccaatgtactctagagaaatagtaaggtggaggaagccacatgtgaattagagtttgacatgagggcccagtatcaagagttgttcaagtttgatttcgatgacgaaattcttttaatgggagattattgtaatgaacgcttagctttatatggagattagttgataattaggtcttattatcataaataagctttaaattattattttcataattatggtgatatttttggtgtataatttatgctatatttataattttatgtttttcatatttt

SEQ ID NO: 390586 - DNA, 957 bp, Cannabis indica
aaatgaaaagttattaggggagaccccactaagccacaatgcctcaatccgtacttctaatattttttttctaatttttgtgtgaaaatattttttgtagtcctaatgcacactgaaaattttcaaaaaatttcagattatttaataatacattagattttctaggagaattatgaatatagtatatgttataaccataacagcaaaactacataaattgtattattttttttagtggttaaactactcaaattttattttttttagcgagaaagattttattgcttaaccaactcagtaaatcatctataataattgtggaaacttttccttcccaaagaactaggggcgcacatgagttaacttagctgggttagaagtattttaatcgatcaattcaataactgcagtttggagaagctataaaccatttaatttttttccttattgtacaataatatagggggtgggtgtgtgtttattggattgagatgaatattttaggctttactatttatttacaaacataataaaatgatttaaactagtgcatacaaaatatgaaatgatacatgtaaatatgcaggtatgtaaatatatttaaaaaaatctaaggtggtggtatcttttgtggatattaaatttaataatagtaatttattctcacgtaactgttggtagaagtagtaggataattatgaactacgtgttttggttaattcactttctaagtttatcataataatataatttatttataaaaacataaaatacatatttgtatatattttgtgattgcaaaatgtagaaaatagtgattcgaattgtgtatagatttcatagaataatacatatttatatacaaagctagactaaatatctactaaatatctaattcttttacagctaatatacatctaatatctaacactccccctcaagctggagcatagatgt

SEQ ID NO: 390587 - DNA, 2364 bp, Cannabis indica
tttgtcaactaaaatcttacattatgcttgtgagattctttttgcacaaattggtatgcctagatactgcaaagctctcctttttttgaaggaagcaagaattaatctatacataaagtatttacaattgttcaaaccaagttctatcttcttgttcaactttccttggcattatacaggtagtcctagtcttaatatgccacttaagctcctgtatagaaagtttcaacgaatcaaagcttgttttccaaatcttgatgttcctttgttgccaaatatgatacaccagaccagctatggcagcagcgtataccattttcctgaatttacttcttttcgatctatcaatccacctattgaggatatgcaaatatgttgcttgcacattccaattcaggcaatctttaacctgttgtaaccaacttctagataccatacaatcaaaaaaaaatataagaaacagtttcatcttaattactgcagaaaaagcaagtggcaacctcaataatcttgaatttgtgcagcctagctcttgtttttaatctgtcatgtactgccatccatagtatgaagctgtgtttagggctattaagtctagaccatacctgcttgctccattgaactctatcctgagttttatggatcaatttatatcatgctgctatctggtatagccctacagtaaattggctatgatccataattttcatcacttcatcttttatttccacaagcttcctccaataccagctgctatggatggaggccttgtggttccagcagtctcccttttttaagtagacattatgaatccacttaacccacgggttatcattctttgtggctaatgtccatatgtttttaatcaatgctgctctgttccaggtaccaatgttcaaaaatccaatacctcctgctcacttaggttggcatactttcccccaagcaatagcacctgctcctatcatattgctactgcctctccacagaaaacttttgcaaattctttctatttcagtcactactttctttggtagtaccaaaatctgattccaatatgtaagaatggttagcagtacagagttgatgagaattgatctgcctgcaaaagaaatgtgtctagtgctctaggtcttaattcgagctgtcattttgtcaactaaaatcttacattctttttgcacaaattggtatgcctatatacttgaaaggaatagagcttccgctgaatctagaaagctctatcaccttttatatctcattcttcttcatcccagcacagtatatagcagtcttgctattattaggacaaagacctgaggttcttgagaagagtcactagatttggtcttacactattcttgtattttcaatctcttttgcccaaaaataccactttttatctccatcttttgcagaacttaaactactaaagcagagtttaaatttactcggctacaaagaagaaaagtattgttcatatttttttttttgctttgactttttacatgtgtgtggtgagaaatttattttcttttttacagagaaaacaaattcagttttggcagtttgaaccgaccaaaccgcgatttacaatggtcggttttaagaaaatttctagattgatcgctcgatattcagattgtacgaattcagaccgaaaataaaaatttggatttttatatagaaaaaaccgaccaaactaactggtgctcctaggtgttggtgtcgaactcattgcattggcttaggccacaacaacacccacaatcattcttatttcagatgactccacgaatctaagaccattttcaatagttacaccaatttagtgtgtaatctacatagtttagtgtaaaaaaatttaccttttggtgcaacaactctagtgattcacactaaatatcacacaaaatgttctatcaaataaatatattttacttaaaaggtctcacattttatgttatttacactaataactaaaaataactaatttatgaaataattagtaagaattatattatgactactagtaaatttaaaatcttaaaatatttagtaaaataaacattttttaaactaattaaacatttttttaaaaaaaaataaaataaaatattattgtagttctatagttgatcctaatatacacgatcattttcaaaatgagcaaataaaagattatgcaaaagagctcaccaataatatcaagcatatcaacattaccaagattctcaaatacttaaagtccatatcaccaatatttgaaattcttcaaggctaagatccacaagtgatcaatttgactattgagttattattttacttaatgttgttgtttttagtttttataacttagtgcta

SEQ ID NO: 390588 - DNA, 1223 bp, Cannabis indica
aaaaaataattaccttaccattattcccactacttattagtaaacatgtcattagtgaaaaaataaaagtgaatgatatctctatcacttttcttattatccttcttataaaatcctcaagatatattatttacaataattcctcaatataattataaagtatttttttatttagaaatggcaaatatttcaatgaaatttaacgaaatatacagaaacacttaaataaatttgtaaaacattatattttttccatttaattataaataaaaagagaaacatgagatatttttttattatcattttttatgataaagaaaaggaaagaaaagagaagagaagagtaataaataatgatgtacaaaattgcctcaaattaacaaaaacaaaataaaaccataattatcaattgattagaaaattgataacacgtggcatgatagcatgacacgtatcagaagagtcaaatcagattgggatctgagactcagacacggtcacacggcatagcatacattttccaaattgaggttgtaaactaaccaggtggagcatctacacttgatcttctctgatttaatcatatctatttttattttatatgcatagaaccttcttcttcaatctaaacattttttaaccaagggaatcatactctctcttcttttttttattatgaaattcttcttagaatattagaattatatatatatatatatatatatattatatacgtagaattattatatttgtttattttaattcaactttatacaatcagttttgttttttcagcttttaaaaataaaaaataaaagtgtgttttgtaaattttatttttatttgataattttattaaaaatgggtccaagtctattatcggggcgggatccgtagttcggattttggtcgggtccggcatttgggttcgagggcgagattcaggttcgagtccgggattcgggtctggggtctaggtctggagttggagccgcgaccgagttcaaggctagggtcaggatcgggtttgggtttgggtctagtctgacgtcagggttcggggtctagggccagaagtccgaagggtagggtttctaagttcagggttccggtcagctccgaggtccgtctccgagctaggtccgtggtctagatctaggtctgagtcgagatcattagtaattttttaaatatttaatttaattatttgtcatttaataata

SEQ ID NO: 390589 - DNA, 688 bp, Cannabis indica
tgacaaccaaacgtatcaggggagaagctaaaagttaaagttgttataacttttttttaaaaataaaaattatgatgaattatttgtattcaaaatatatttcaaaatttatttaatattacataaataaaagatatcgaaagtaaatatactataataaaatagagaactttacgatgtagcccaaaaagacaacaaatttacataaatacattgagctagtaatttaaacatttgtacaacccaaaaaattttgttacagaaatacctccgtaccagccgtagcatgactagaacttgaagttttgtttcctcctttctgtggtcctccaattaaattctcaaacatctgaaagttgttgatcaactcatgaaagtcaaaagtcaacttgttcatgatttcatttgaagtaaaggtagaaaaactgtagtcaaactatttagattaaactcacttgagtttcttgatcaataatagctctatgattctcagcttcttggaaataactagccaataggagtaggtgatcacgcatgttctggtgaagtttcatccgtacatttatgaagttcttggtcacttcaaaatgagcttaatctgatgccttcctaaacagttctgttaactggtccatgatctcccgcaaccgtgagagtgtagcaaaccttgttgtaaagaccgcttagt

SEQ ID NO: 390590 - DNA, 1575 bp, Cannabis indica
aatttaattataatgaatattattgtgggacatcatgatacattagttagtgcaatttaattagtataaaaaaaaaattgaatttgtgtgaaacttaatattaaattatttcgtaatcttttttaatcaaatatacataatctatttgaatattttttttataatcaaatataccataatctatttgaatatgtggtgctggacacataacacttaaaatattttttatccaacagtatataaatcgttctgcctaaaactcgagacaaaaattagtattaatttctcttttatttttaattccttttattgcttgattaaaaatcaaagcaagtatataacaaataaatgtatatgagtattgtgagtgtattgatatttatagctttttattacaaaactaaacgtctgtttctacacaagctggtggatctaaacatttctatatatactatttgatattaagaaaaatagaagttatttggcaaatatagatatattttttcaagtgagatatgaaaagtaagtatatatatacatagatacataatatagctatatagggagagaaaattccaattaagggaatgtgtggtggatataatgtcagcatgcatatgccaaaaataacatagaaataataagccaaatctgtatacataaataaatccaatcaactaaaatctcataagaatatatataaatatatatatttatatatttgtgtgtgtatatctatagacctgtaagagcaggaattggggttgtttgtgctgagcagtttgaagatcgacatgaacaatctcatactcaatccccttctcgtgaaagcaagcaagcactctctgtgtacacgccgacctcaatgagccatatactttgaccaccattattctcaccctcaactctcaacaacaacacttactgtttttatttgtttatttattttatataaccgaaaaaaagctgaatgtttatgataatgaaaaaggagtaaatatatatagcatgagattgagagttgcgcagtctagagagtcatgagtaaccacatgtggttgttgttacttgtcaagcataatatttttgatggggcagacacacatgcttattaccactttcaaagtacgtaccggtggttgcattgcatagtaggatatgtcgtatggtataatataacttcaccaattattgtcgttttttaaagtacgtaccgttttttcttaaaaaaaataatggattttgtctctgtccattgaaataatgcaactttattaatgggtgggaatttcacaacatttgaaaaatgctctacgtaggttttcgttaagggtgttcatcaaactgtttatactatacaaaccgcccatattgtaccacactacataataaacaatttgaaatcctacggtgctggtgcagttatggtttgcaatttttccaaaccacccagtgcggtgtggtttgtagtttaaaatttaataattgcgttcaaaccgcactactctatatcttacaaagttaattactaatttttacaatatgatttttgttcttttttcatataagaacaaa

SEQ ID NO: 390591 - DNA, 612 bp, Cannabis indica
aatagtacttttctacatgtagaaaaatactttaacattctttaaaatttgaactaaaatagttaatacaatgtatgtagctgattttttgtcattttttcaccatctcttctttattttgaagaaaagattctcttgcaaatttacttgaagatgttgaaataatttgaaccaaaatatgcatgtatacttttttgtagggatcaagggggctgcatcatcatgtaagttgctcaccccttcatgttgttgtaaacaattctaaacacgccaaatataccttgagaattttatttctaacattggagaaggggtttcatatttgagatttctttgtgaggagaggagaaatgtagtattaattactaaccacaattgtattgtattagttaagggtattttattgtatttgttttttattgttgtaatataataatattttacaatgtagccattggtacttcacacattgtatgttatgtataaattttattaggcttgtttggaacactatattttattgtaggaaattttttgtgatagaatttgtggaaattgttccacatagataaatggtagagaattgagccatacataagaacatgagctact

SEQ ID NO: 390592 - DNA, 635 bp, Cannabis indica
atctgaatatgaaggaaggtatgattatttagttcaaaactaatttgaattattacacttaaatactaatttacttctgcaacaaaaattgcacaataactatctgctattaactttacattagaatctaacaacaaagttacaagttgattatagatatttttttcggtcgaaaaatagacttagactactcaagtgcaatttgtatattagaagctattcatgtataaatttttttacattcccttgatgaagtcatgtctaactgatgatgttgaaaacacagggaaagaactccacaatttgtagttcaggcttatatagcaggaccaaagaatgtgaattttcaagagacaggtccaatgtggctcaaatttgaggaagctttaagttattttgaagacataaagaagtatgccttttccttcttatgcatgatcagtgatagtgtagaacttttctctagaaaataaaatcatttctaagagcgctcacattagcttttctactttattctttaaaatatttaaccaaaattatactttctctattttacctcaaacttttacattacactatacatcagcttttttattttatttttctgcatttatttaaatattatttctttaata

SEQ ID NO: 390593 - DNA, 730 bp, Cannabis indica
tctatatatatatatatagagagagagagagagagagcaatatatgcataaaatgagtaataatttatatccaaaaactaacttgtatatatagagagagcaatatatgcatacaataagtaataatttatattcaaaaaactaatttgtgtatatatggagcaatatatgcgtacaataagtaataatttctacctgaacattttaagggagaaaggaatgaatataattcaagtatcattagctacctgttttatgctttaactatggattcctagctcattcttacgcaaaatgcgaaaggctgatagaattttttattacgtacaaacatgtcatgataaagtagagtttactcatagtgagtactacgacgctaacaccacttctaagtttggaagtgtaatacccaatttatatatattggtaacaatatattacgtgtattatttaattattattgtcttttttatttgattatatataatttatgtgtatgggataattgttttgttagtattatatctattctatataaagtgtgcctatataactgaattcttagtttatgagaaattcatgggtgtgactttttatttatatttaataaaataattaaatattatttatatataataaaataataaaataaaaattaaacaaatcccatttaaactgatatttgatatttgaactgatattatttatatatatacaatattatatattg

SEQ ID NO: 390594 - DNA, 740 bp, Cannabis indica
aatttaaacttgaaatcaactattttggtatttagattgtactccaattttgtcttgataggattgtcttcatcactacccacactttctaaatcaaattctctttcatgtccatcatcatctacatcttcctcaacattaaagtttgtaatcccatcccaccagttgttggttttaggtttcctaatattctctctttcaacttctgcctaaccagcatactcttcctcttgtatttcacattggtctatttcattgtattcttctccaacaaactcttcatgcttagcctctggttcaacttctttgtgtaaatcagcttcaaatggagtagcttctctaataaactcaaatgtggtaggtggttcattaggttgtatgtcaggttaagtaaaaggtgcatcatcattgatttattgaatatcttgaacgagttcttcattaaaagtgtaattgttagatttagtccctaataaacatatttaaaataatttgataactaagcaaaactcaaaaaataatatgaacttgtaataacaaacataataaatattggaactaatttgaaagaactattgaataaaaatgtagacacgcaaggagctagcatgtcaagtgaatcattgattaacagattgggggactcattttccaacttagatgcatacatgaataatatgaagtaaaacaactccaataaaaaataataagtagttgatctcccatctctattcaaatac

SEQ ID NO: 390595 - DNA, 791 bp, Cannabis indica
gatccataaagggtatccgtaaaaaagttgaaagcctaaagagagaactggatatcatccaggctcttctcaaagatgcagatgcaaaggcaaacagagaagatttgatcagtgatgctatgaaagtttggatgaagcaactaagagaagaagctgatcatataaacgatgtcattgatgaataccggtggcatgtggcgcagagtaccaccaagaagtgtggattcaatggttttttctgcccaatcaaagctttgaagtcacgttatactatatcttctcagattgaagacatcatccaatctttgcgacaaatcaaagatgtgggtcaaggatttggtttgagtcaatctctacagggtttgcaaggttcaggtgacaaaacttcgtggacagaagagcatggtgatcgatttggtgctcattttgttgaggaagatgaagaatatgtggatattcctttgtttcagggacaactaaaaagctttttgttggaaggagagtctcagcggatgattatttcactggtaggacaaggagggattggcaaaactactcttgctaagaaagtgtacaatgaggtgaagcacaaatttgagttccatgcttggatcactgtgtcacaatcctatgatatgaagattttattgaaggacatgatggggcagtttggactaaaagctgaatgcagtattttaggtcatgatatgatgatccaagggctaattacaccactcaggcaacatttggagacaaaaaggtatgtagttatttttgatgatgtttgggat

SEQ ID NO: 390596 - DNA, 956 bp, Cannabis indica
atcaggtcacataatattttggatctatttggaaaaacaattcctcaatacttaaaatttaatttcttgtacatgaatttgttttaaatgaaaataatttcaagctacagcagattgtacattttaatttatatttatcttcagaatcttttggttaagtgggaaaccatgaaactctctttcttaaaataatataataagagtttttgtttgaacaatactaaattcaggatgaatatggaaaaatatctccaaataatatgaaaagcaaatttggacttacaataaattttacatggtcaagatatctaatctctaaaaataaattgtgtgcttagtgatttgagtactcatatatgtgcagcaatatgtaaagatgaatattcatgatttgaaatatcaacaatcaatgctgacaaatccctacttttagtatcacaaagcaaatatcgtgttaagtagattgaaaaggctggtgagtctgattgttattcttattgatcttgctgctccagtataatattagtgtttattgtgaacacatttagtttatttggtactttatttttcatatatagtgtgttgattatactttggtgaactttattccatctttagtaacttttaccttagctaatcccttataatttgtataatgtttctcttaacattttaatttattttctaatatttaatgcatcattctgtaaaattttgtattaggacttatgattaaatggcttatcatttttctttttgtttgaagttggggaaggtatgtgtatcatcattcatgttgttttctatttctatgtaaaatttattgctttgaaatttcatgtaaaagagctttattgctatcatcattttcagtttagttattaactttaaggtaaatgctagagccatcttctctattagcttttcttttttaaatactaatactagaagcaatt

SEQ ID NO: 390597 - DNA, 502 bp, Cannabis indica
aacaaaaaaaaaaaagaaactaccagttacattagtatggaagcctccaaactactagttacattttgagtaaatatttacttagtcaaattgtggacagtaaaattaaaggaataattaataaagtactattttttgaaaaattacaactcaaaaaggagtttattaaacttctacaataagcaacatagatattaatttctcacatcaagtttaaacccttgacagctttaataattgtattagaatcagtttacacaataacaagttgcattagctaaaggcaactgcttagtactaactacatcatgtttgagcattgttattatgtattagtgatgcctaacatagcgatgttctataaaaaaaatattatactaaattatgtgagagagactttaatatttaattgtactaataacaatatactattttgatgatattggcacattcagggccgtctcaaggtgttgagaggcctagggcgaattttgaaatgagg

SEQ ID NO: 390598 - DNA, 1534 bp, Cannabis indica
gagaaagaatattgctcttagccactagtatttctaagttgagaaatgttaaacactatctccaaactcaaacttattgttgttggtcatgtaatttaatatcaaatattatcacattgacacggctgataacaatatatatgctaactagatagccataccaattaccaaaccaaaaaattaaaggaaaaaaaagagaattttatttgtggtggtggtgggtgggtgggtgtctgtctctctctgaaagctgaattttaagaacaaagctgaagtgcccagatcaagaaaataaaaaagaatgttgatgatcatgaggatgatttgaaggaaattgggttttgttttacttattgttgttttgtgcattttgatgttacttttggtcatcatgtgtatttttataagggcatgcgcggagggcattgaattatggtgtatggatgagggctttaattttattttgcctttgtctgcttttaatcattagtgtgagaaatataaagctttgacaagttatggtaactagtatggtagaagactaatgtaaaaagaatgttcacacttagaggcagcttctaataaaagtgaagtagtgtttcctactcaccaatataagactaatgtaagttggactcctcttgaaggaggctttaaaactgaatataaatgcgtgctataaacttgagaaattgcaagattggataatatggagcacatgtcttcagttgctgaatgctgcattctctgattatgtagcctagaggttttaattagctcatttaactttataagaatgtttgtacaagtcactaaaaaaatgattgtaagttagtgattgtgattttgggcatctatgaatatttgagccttttactgatgattttgtgattgtgattctaatgttcattcaggagcgagagagaccatttttcttagtttataactgaaggctttacatcctattacaagaagaaaagaagagataaggtatatatgactgttatcttatctggaatgctgttggaattttctggatagtgttaatgctttatctcttgcaatacttcattgttcttgtatgtttgttgtgatagtgggagttttttgtaaaattatctgtttgctttggaattattgtatatgtgtttattttatataggtttataaaataaagttttgttctttcttgtcaataatgaagaattatttattggtattattggttgtagatcaaattgtgtctcgtgtcatatcttgaatctaagcttgggctagttagtcaaataattatttttgtagtagtagtaatagttagtacctataattattatatgacatttttttatgtacatggaatgctattaatagatatggatatgcaacaaaagaagattctgatatttcttttcacatggcatttttaaatgatgagcatgtgtatgatgttgcaattattactgtataaaatggtacgcaaccatcataggagacgtatgtttctaggtcgtacttttgctagacatgagactcg

SEQ ID NO: 390599 - DNA, 962 bp, Cannabis indica
ttattgaactgataagtgtaaaagaaattactggaccaagcagctggaactattaaaagcatcttccagttcaaaaaaagcttgatgatctcaacaaactcagttgaaacattggaatacttaatgttactacatctagttccatcatcacggacaaccttattcgggggcaaaatagccaaagaaagaacagctcctacggtcatgaaacacatgaaagcaatgtaagtagcatcattaacagaagcagcctcggttctgtgatagtttagaataaaaggaattaaaccaccaatgacacctcccatgttgaagatgctccaaaaaatggaaatgtatgtccctttacgatcaggaggtggataagaagtcatgatggcaccttgtccagcccatagaaggcctgcaccgacaccaagaagggctccagcagcaatggcaaagtcctggttcttgtgatgattgtagtaaaggaaagagcctgcatagagaacatatgtcaaacaggcagagagcaaggtgagatgggggcctaagatgttgtatatgccaccaccaagtatgccaaagatggtgaatgcggtgtagagagcggtaagggagttgtctgaggctgtggggtcaacttggcctccacctcccatgcctgagagggcattgaacatgccaggacagcagaaacaaaccagggcaatcaagattatttgcacaatgggagagttgtatcttaataaggattttgttggaatttcatttttggtggctgattcttggtcaacttcaacacccatctggaatttgagagcaaagaaagttcaattaaccaacaactatgtttgctgactttgtgaaaatcataacattgggtttttgagaaaaacaatatatgtaaataaagtttagaactttacatagataaatacctgtttgaaaaacacaaatttagaatgaagttgagacaa

SEQ ID NO: 390600 - DNA, 1697 bp, Cannabis indica
gagatgtgagaaacgtacctgggcattgtcgatcggggtgtggctgctactaggctcagttcgacattgtggggtgtggctggccggttgctaggcttggtcaccgagatagatagagagagagagagagagaaagagagagatagagatggatttagggcttttaaaaatggtatatggggcggttgaaagtagtaggttatatatatttagggtttgtaaaataggcttggcccatctgttgatttaatttttttatgtaggagtttttgtgtcggttgtgaaccgacgcaagattagcatcagtgcagaaccgatgcaaatagtcttacaaccgacgctaatcttgcaccagtgcataattgacgcaaaattcacgagttctttaatagcgtcaattttttaaattttgtcgacgtcaaaaccgacacaaaatctagtttttgtaatagtggaagccttcaggaaagctagtcctcctccagaaagaagtttcaaatggctagttgtttcctcctataagggagttccagatagttgactccaactgtgctcttcttatccgggacgacccttcagcgtgtgctttagttcatagtcccaaaagcatttatttcatccgggtgcactataacttaagttgacgtggatattctgttacgaggagtttgttaagtttgtcaagtcgtaactaacttaataacttagcacttgcagccatcgactttaagatctatatcctgaacttataaatactactaacacttagcatttcaaggaggaagaagtttagacgagtttcgagaggttaccttgagagagaaagattgagaagtagagagagagtggtatagagaaaagagagggagagagattgggtttggattttgtaagaagaatcttctgtagatgaagaagattcttggggtaagagtgtgagagataaacactttgagagaatccaacagagaatcaatctcgactgtattgtaccttgttcttactcaatcaataaagaggatttcggtggtgttctagaactggagtagagccatagatcacatcgatctattggacttgaatcagtatatatcttggtgttgacttcattattttattgcattattgtttcttgttttaatacactattcatccatattttatctctgattgttgtgtgttattcgttaatcttgtcattgctaattgtttgttgatttgattctgcacataagttgtaatttttccacaaatcagagcttggtaatcgatcaagaacgtagaatcaagattcttttcgctctaattcttgaagaaacaattattgtcattgatggcttgatttgaattagagaatttgatggaacaggagactttgcgctatggagagaaagtttgaaagggatcctagagttcttcgagattagaagttattggctgagaagaaacaaaagagaaaatagaaatggaggagatggattattacacgatcatcatgtacttgtccaacaacatgaggagaaagcttgtcagagaaaagacaacaaaaggaatatggaaaaagcttgagaagttaggtttaagagattattgtaggattggctaatataaaccataagattgattaagaaagccaatctgagatctctcccaatctcatatcaagaagtcaaggctgccatcaaatatggcagaga

SEQ ID NO: 390601 - DNA, 678 bp, Cannabis indica
cggtgcgtgaggaactagattgatcgctggagctatcttcactaccggagctaacaatgatcggagcaaaaatcggccgccaaagaaagagaagaaaagagagagacagaggctgagagataaacaactttgaaacaattaaggtttgacttagaaataatacaaacatataaatatggtattcaaagctaataataacataaatatgacatagtacataccatatataagtctaaaaataaaaaaattcttaaaaatggtcaaatttaaaactgtcatatttatgtaaaaatattttagaatcttaatttgctctaaaaaaaagtctaaaaactaaaatatttcctaaaaagtggctaaatttaaaactgtcatatttttgtaataaaattttaaaaaatcatattaagtgcatgctaaaacaaaatcatattaagtgtaatttccacaaattttaaattaatataggatgtgcatgtaaaatacagttgccccttgtgaacagggccagccctgagttgaaatgggtcataggcaaaaataaaattttaggccctttctaattactataaagataaatgatatttttaaaaattattaaaaaaatatatgtatatttttaaaaaataattttttttatttgggcccctaaacatgggcctaacccgcctatgccta

SEQ ID NO: 390602 - DNA, 1395 bp, Cannabis indica
gaaactaaagatgtagataaaaataggattgtgaatatctaattttttgctgaaattgtaattaagtaattgcctatatagaggaaaaaaaaacagaaggggaaggcagagaaagagcttgaatgtaatcaaatgtaagttgtaaaaaatgttgtttgagcaatacaagaacctattacataaaaaaaaaaaatcataataattaataacactataataaataaaaaagtaaaatttattatggtcaaatttaacacatcttttaatatacgctaaatttgacatacttttttttagaacatcattaaaatagtatttttttttattaaatgtattaaaatataacaataaagtacttttttagcacttgattgaaaatgcttgaagagtatttaagatttttgttaatcatagccaatgaatttaacatatccaaaaacacataattgagttatatataaagacaacttcattatataatcttaattaataacaaactgaacaattgacaaattcccaatgatttattaccaaataatactccatggggttgtaaatttgtaattgtattatacattattacctttattcaaaaaaaaaaaaattgtattatacattattaattgttagaagaaggtactaaaacccgattgataattcaagactgtaagtctttgttagagtctttgaacaatgtttcgataaggtttgttaaacgttctgctaatcgagctgcacatgtggttgcacgtcagtctcgattgtttgctgatcgtgtgttcacgaaggatgttatcccttcggaacttgaagttgtacttttgagcgattgctcttgagttaatgaagtttatctttattcaaaaaaaaaaacccgattgaagtagtgtccgagagcccatatagggtatatgtttatataggcagaataggtgagccccaagcttccattggtcactcccacaaattcctataaataagtaaactccaaataataaattaacatatacatatataattgtattagtactcctagacatatatatgaggtgtaaatatattgatacaatttaatattgaataacatacttgttgtggaaaatctccattttccatttgtgaattgatcaataattttgctgcatgatgcaaaggtgtaggatctctctcggcctatatatatataaagaaagatctgtcatatatatgtgcacctatatatatatatatatttagagggtatgatatataaatgtatataattggttaattcatgatattgatgtacgtacctggccagcttcgatgagagctaacatggcccatgcagtgtttaccaaatgtggtttattcttttcctttttttttttttttagttttttttttgtttttaag

SEQ ID NO: 390603 - DNA, 763 bp, Cannabis indica
aaaaaagttatagaatttaattttctaaaagtaactcctactttcaaaattgggatggggcattgggtgggcccataagtggactcaatcatatgggctagaattactttgctttttacacattaggtggaagtttgattttggttgtttaaaagtgtatcaataatgaataggcacactagtaaagactaaagaggataataataaaataagtagtaacgatcaacgtggatataaaatatatcatacttttacacatttactttcagaaaaagaaaaaaaaaataccataactattgttctaataatattggattggggcccaaattatttgtgaattggccttaaattatatattattgttaatggcactaactaatgacctctaatacactatgttaaattccactaataataaatattaatttcataataatcttaaacatcactaatactctttaccaactctcttcattagattgtgagtacctagtgcagatccggattgttgttggccctcagaataattgaaaaatttaggctaaataaaagaataggtaatctttttaaaaatcactaaaaaatatatgtatttttaagggatttgtttttctctttagagactcttaaactagttgggcctttaagtgcaagcctaatccgctcacaaaaatattgtaagtattataaatttgaagaaattttattgtatatccattttttatgggaaacttacaaaaatactagaatttgggttaacttt

SEQ ID NO: 390604 - DNA, 880 bp, Cannabis indica
gttaaaaattatgtcatgttcatgttgactcactgagaaaatgatagatttagtaattttattagaaatacacttatttatattattagttttttaattataataaaattaaatttaaatatttctaatttatttttaaagaaaattaaagttaaatttttattaaatccacattgaataactaaatatacatttttaccaagttatattattattaataattttttactttgtttaaattaaaaaaattgtgtcaaatgtgtcatatttgtgttaagcgagtcgtgtcgtgttgaaatcgtttttattccatgtcaactcatgtatgattttctcaaccttaacccataaaaatcatgtcatgttcacatttatatattgtatccaaatctgttttgccactactaatttcttaagtgcttttgtgtaaatttcccacatataattgcatttggtcatttgttgcaggaaaaagaatgaggaaaccacacttaatgtgagattttaaaaactttatatttaaatgtggcgaatttaactttgtccatttttatggttttttatttttattttttgtaatttttatgggcttaggtttgccattacaaatgtttttataaatctcatatttaacgttttgaagcttctttctctttttttgaagcataaatcagagaaattaaatgtatcgtatttgagaaaactttctattaaaaaactagtttcttcattaagaatcagttttttcatgaagaaactggttttgatataatataagtaaaaaatttataagagtttttagttttttatagtattgtttttatctttgatgatttattctatattttttaagtttttttttttttaaagaaatatcata

SEQ ID NO: 390605 - DNA, 1004 bp, Cannabis indica
taccaccaaaatttgagcttgaaagattaaattcaaatgaaataatagttaacagagtttagttgtaaaaaactcttaaaaaattaatataatcacacaaattttatattcttatgatcatcaatctcttatgttttacattttatatgttaaaattgttataccaaaatcatatgtatttattattcgtgctatgatatgatgtgttggaagctaaaattcacaatcaatcgatattattcgtactattttctttatgattgtgaatatcgattcgttgcaccaacaatttgtagaataaagaaaatagtacttgaaaagctttggaacactagggtggtgccactcaaagtcgaagacactccaatagtccaatcagcttgactgtaatgaaatatagagaaaagagaaagactattagcaaactactacatattgtgattgagcgtcaaattacaagataaaagtcaccgatgtttaaagattctggctaaacatttaataataagaacaaaaataatataaatatgctatcataatataagataatttacggtcaaactctctaaattttgaagtttggcacgatcaacctcctagacagaaatagttaggactgaaccccccaatttacaaaatcgttttgctctatgctccttctgtccacgttggtatgttagtgccaaagtagactgtcacaatgtacacaagtatacacgtggcaaagttgaacaaattgaaattgaagagctcgaaagctatgaagaagcaatttcaggtggaaacaagtctaaataactttagaccatggatgaggagatggattcactctagaagaacaagacttgagtagtcatgccgaagccggagaacgagaagattatcgagtacaaatggattcttaaggtgaaagagggaatcaatgagaatgaaccagtgaggttcaacctaattaaaattgattagaaacataattaattctttttttgtgacagtcagtagtc

SEQ ID NO: 390606 - DNA, 1512 bp, Cannabis indica
agacaaagtgacttcccaaattatttgatattaaatttaataatatttactataaataaataattattatttctcccttgaaaaataaattcttccgttttttttttttaattttgtgacattcatgtctttggtgtagaggccactcatgaaccattgacctataatactaagctccaataaattaaattatttattaaactcgtaaatacaatatttttattcattagtttcgttaataattactccagtataaatatgatatcgcactactctttgttattatataattatatttactaaatttattaacatcactccgttgatataattaatagttataattggtcaaacttatcgtttgacccttctaattataatctctttatccttagtactattaattcactagtgaaagtttttatatctaatctaaatttctcacaacttttagttccataacactaaaaaggaaattaatattcgatctattaggaaagtctagattttatcctataaatcatgttctcagtcatacatattattgaatttccaaaacaaaagtgtaagtttcatttactacaacaaatatgaatattaggtgtgagaaaagttgtccctaaaaccatacaaatttgcccctattagttcgcgcctgaaagtactattgggggtgccaaaaaagttgcccctaaaagtaatgcacgaattttttatgtttacttttaggagatattagttttatggtactaaatcaggtacacagcggaagaattagtaaatctgattatcattgtaccatagactaatggatcttcggatgtataaacattaaaccagaaacataaattacaagaaaggaatatatacctcttgatgactactagggtattctcgaaaattcttgtaagttgtatctatttggttgattaaaaaactcacaccgtagtcttccaaatcgatccaccacacacaaggaataatgtgggttattaggataaagtgtataatttgttcttgattaattctcaacacatgagcaagaactatttgagagagaaagctattttccttttctccttggtattttaaaaatatcagtgaaaaaatcctcttctgatttctcaaattaggcttctatttagaagatttaattttccattaattaaatcatatttaattatttaaataaatagctataaccgaattcgattactgatacttcagatgactttgagggaatatctcaaccaacttaaaatatctttaaccactttttaaattcaaatatttatctaattgaattaattaagtatttaattaacccaaaaatataaaactaaaatggacaccctactaccttgtcttaattaagacaaggatgttgtcttttttcctgaaaacttttgtctaaacaattattgtcttaaaaacttttgttgttttcctatttaattaatttaaaaatttatttatttattacaaaataaataattactattttgtcaattc

SEQ ID NO: 390607 - DNA, 670 bp, Cannabis indica
taaaaaaaacaatattggaagcttgctacatgtttggctctttttaatttcctttgattaggttggacttctatacaaattatcattcatgtgtttaatagaatactcaattggccttttgtaattaaatgatcactaaatttgatgttttataaaatgatgaaattgatatcacgtgttaaatttaagtcaaataatttttttaaatgtaattaactttaaatttattattggacatattaaaaaattaattgtttattgtggtttatctttttagtcgggtttctcaatttattctgtaatattcattttcttaattgatttgattgtataaagaaaactaaaattattttttttttgtttttataaaagaagagttacacttattggtcacgattttatagatacagaaataaactgattaaaaatcttttttagagaagtttcttctgagttatggtcttgtttaaactgtatatgcgttgtctataatatgtatattgattataaatacacgttataataactaaattttgaatctctttcatatctttgtattatactcatattttataagaaagagaatctttattgcgtagagtagagtgtgtttgtgtcttcctatgagtttatatattttgtattgtcttgagtctataatcaagtttac

SEQ ID NO: 390608 - DNA, 1179 bp, Cannabis indica
tttggccatgaatcccaatgacattggttgcccacgtcgagaattgagacgcaacatgtagaattgattggactatttgtcctcatgtgtgcctttatatcaccgatacaaggtgttagacgatgtaattcacgtacacagttatttttgaaaccatcaacaataggagatgtagcgttaaatggtgttgacttttgcttcggggccaatgaagaaactggtggtgtcgattcaatagtatttgcaatagaacaatatttttggcttttgagaaaccaaataggcattagatcacccgagcatttattggcgatgctgagaatagactcacaacatgtagagttgataggttgctttcgaataaaaaaggagaatatgttagccgagcatggttgtaattgttgtaattcttcacaaattatgtgagttttgttgacactgctaagaggttgcgcattacagaagctcaacgccaccataagagaaaataaaaagattgaaaacctagccatgagaaaacctcaacctcactcactctttttttttctttatgaaaattttagatgaaaacttttgaggtcttaggaatgaatgtttatatagagtattataattagggaattagaataataaaatatttttcataaaaaaaactatacttaaataagtgataaatataccgaactaattgttgatactttaacatgtatatatcataaaattatttattaaatatagtttaatataataattaattacgtgatgatctactaatatatattaattaatttttttgaaagtaattgaaacatatattaattaattattcaaaaatctaaaaaatttaaatttgaattttattttatgtaacataatatgtagtatatatattatcaaaattttatttttagtcataacaaaatttgtaactaaaagtaaaaaaattataactaattataaattattattttgatattgtgactaaaaaatctgtgactgaagatattaattacaaaaatcaaaatttgttgtgactaaatgtgattttactcacaatactcattgtgattaaaatttaattagtgacaacttcacttgtatataagtaattagggttgtacatcggtcggtttgggcggtttattctatatattttctaacccaatctaaagttcgggt

SEQ ID NO: 390609 - DNA, 1087 bp, Cannabis indica
ttgtataaatagacatatgttaatattattatattcagtctaataatattatttgaatattgttttgacaatttatatttttgacgttaatttttgtattatacactagtacttaaaagaataaaaaaaaaaggttctaataaaaaaattgaaaataaaagaaaaataatttaatatgaaaaaaaataaaaaaaaaacaataataaacatataacaacacttgtacaatagatgctgttgtaattatatttagagtagcaacatttagaataaaagtgttgctatatcatattttaattttttttaatattaacataagacaacatttatataagtgttgtcttaaactctatcttttagcaacagtttaggagacaacactttttcaagtattaccttttatatttccttagttaaaagaaagtattgcaaaatatatttttcttgtagtaagtgaaatgacgatttcctttgagcttagcttaatagagataaatggaagggctcttattttagtaattatattagtttactgaaatatcatttagtggaagctaagtattttaaggataaaatacattgaggagtgaaatagtaactcaatataaatcatctatagaggatctttgattattaggattagaacaattgttaaaatttcatagtgtatctatatcgtggagcatatagagcattctatataattatgagggtaatttcaaatctatagtggtgcaaggaggaattgataagttagggaatttacttggtaaattctagatttgcttattggaagctcggttatataagttcatggtccccatactagttgagactatactacttgtaagactcagtgaattgattttaattaatcaattataattctaaattaaatatgtctcatttataaatttttactaaattagagcttaattgtgtagaaaagaggttaaatgatttatttgttaattaagtgactttgttaagtctaattaataaatatatcaaatgacaattttatttgataattacttttaattattaaataaataattttgacatttaagtagttaaattaaaaaat

SEQ ID NO: 390610 - DNA, 3227 bp, Cannabis indica
gcacaccctccacttattgttcagtttgggtaccaacatggagttggatacccaaagcagatagaatgcttcagtgatgaagtcattggtgctcagtcttttgacttcatcattcagagcatgtgcgtgctccttatccagtaacctcctttcctgttgtactgttggaagtttggatctacgttcagtgcatgggtcatcacaaattggtctatgtgaccatgcaaagaggtcaatttacccttagaaattttatatagatttattttatttcttgcgctaaaccctttccaatatttaactttcttgttggaagagtggggtgaatctccacctcttccaagttatacctgaaattcgggtaccattcaaagaaggacacgtgtcaaattggaaagaatacgaatcaatgaatgtaacggtaagtatatttgaaaatggaataactcattaatgcggaattgacagagtatatttacaactcgatgactaaaaggtcttatgcatgataaagatacaccaactgttgcctcgtacattaacgagaaactgtaggaagacaagacatcaacctcgctatgcattaggagacaagacatggagactggtaagacacttagagtataatacaccttatacagactaagtataacagtcaggcaactaatagcgaggcacctatctcgccataggaaggcgcgctcatggtatcttcattaattagctcccaacacctttcaatagggttcacagcttcgtcgagttagctctctcagatagaagctgacacataaatgatattgactgctgaggtccactttgtcaccaagaactacgatattcagatggaacattatgtcttcgagtgcagggaggacgaggctaacatcataaacctcaaagaaacatgggaaaagctccagcttgctacaaaggttattgatggtgtgttcccatcgagacattctagaacgttacgatttacaatgtgtttaatacacgtttaccttgaccagctaaaagtggacccatcacagctgtgtgattttcaaatattaaccacatttattttacgtggtatgtaatcgaatcccacgatttcaggggataattgttgtaaagatatcagtcaactatgtaattaactgtctgactatgtaattataaatagaggcatgctacactgaaaaagggacaaaaaaaattataagagaaaatagtcctagaactgtatcagaaatctaataagattgactcgtggactatgcagaattttaactacaaaaccacgtaaaaaacctttagtgttcttactttttctgtaccatcttttaatttctatgcaagtttatcacaatttaggctcaaatatagttaacgaaaattggtattaatagttcggttctttctttgagagccttcatgaaaaagctcagaaaaaatcactccttacatacaataaaaaacaatttcttcatggctgacaacacagagaacgttgacacaccacatgaagaaactcctcaccgtcctagaaaagagtcaatgagctctaggagacgttcaacctcacaatctaaacagaccactccctccaggaggacccaacctgagggtggccccagcactcggaccactcgttctagggaaacctaacctgagggtggcccgaagacatgaacaacacgtttgagaaggactcagcgtggaaatggccaaaatcctagagtgagggatgaaggacccaatctcggtggtgctcagcccatggatgagggtgcttataaccctacaagataaatccctatcgtcgaattggaaaattgccagctcaggcgccgcctggaggacgcaaaccaacagaatgctgaattggagcataaggcggtcgcagccagagcagcactagggaaaaatactcaaaaccaacctgaccctcaaaaaagaagaccacgaggcaggcctcggcgctcacaatccaggagacaggaaactgctcaggagaaccctcaaagtgctcaagaagaacaacttggggaaacagagggacccttgaaaacgaacaacccaacgaaaatgaggttcccctgaaaatccaaatcatcagccagaaccatctaatagcaatgagaataggaagtgaccaaaaactaggaaataggaaattccttgtggaaacgaggaaaatcctgggacacaacctgggggacgtaggtcactaacgaggaaccaccagcgttcttcccggacccatagggaaggggctcgtacaaaacccagtgggggaaacacgatgaaccacgcctaaggggaaagaacagggcattaagaagcgagtgtaacttcgaggcgcacaagaacacacagtcgatcaatgcgaggaggagaaagtactcgtcgcaataatgatcgagaaagcacaggtactagtaagactacaagtcactcaaggacgaggtccatgagtaggacaagatccgtaagtaggatgcagtctctgagtagaacgaggtctactagtaactataaccaatcagatctgtgagagcacttgaaccagaaaaaacctgatcttcgcaaacaactcgatccaaagcaagaggatccaatccaattgcgaatatatgagttggacgataagtttagaaggtatcaagtgggggagttaggaaagaatctggatatgactcagatgaagaattcgagccataccatccagacatcatgaatactccttttccccagggatttaaaaaccctcacgtctcgtcgaatgataggaccaccgatccggtctcgcatttggataacttcaacactataaaccgagatagtaacgttacaaacctcactagttggagcagaagcagctggttcaataaatttacttatcattccattacttctcaggaacagttgtccaaggacttcaaaaagcagttctaggccacaggggataggcgacccagagcgtcctagctaaccaatagaaagcaacagcctagcgagacgcttaaggcgtacttaagttattttagcacgactgctgcaagagtaagaaatttctatgatagtacacaacttactgcccttaggcacagatcactactgatctttccaccgttgggggcgaattgtgggacgacttacagggtcgtccagtgaagaacatcactgagttcaacgagagggctaagtggttagttcgaaacgaagaagctcaaaaa

SEQ ID NO: 390611 - DNA, 1017 bp, Cannabis indica
ttacagtataaaagaaaaaagggggaggacagtaaaagttttacccaaaattcagtattttttaaaaaccatttctcctttaaaattacacaattttttactaattttaaaaaatattattttttttctaaataagggtccaaatatttctatttctatgtttactaaatttcagggcttctgccaacatagaaataaataacaagaaattacactacatacctcttttaacttaatgcctttaatttttaccttctctttcaaaatctattaatatgtttacctctttttttactattacaaaataaccctttagaggctgttttttccacatatttcataataagggaagctgaagggtgtaagaatactctgctattaaaaaattgacctctagaggcagttttttttttataaaaactataggtatagaattggattataccatttagagtcggttgggaggaagatatttctgagggtgatttgaatcatgtcggttattaggaaataactgacgacatagggtacacatgatattcgacacgtgtaccatatgtcgttggttatttcctaataacttacggtatatggttacatagaaaccctatatcagattcgtcttcttcacttcttcttcctcacgaaactaaaccaggagcatagacataaccaaaccctcgccaccttcaccaaccacccatattccagcctatatctcccccatttttgcaccatttgagccttttttttaaatcttctattttcaatacctaaacccatacaccaaggaaagtttaattttttttttcctattttagtgtcaaccgaacctattagaaaatagtggtgggtattgttgggttttatgccctaaataaaactctatttcaatgtaatccagattattcaatatcaataaaataacagaagtatttttcattcatttttgtatgttttgggttcatcttatcaattgtttgtctatttgagttataaattcattcaaaccctttt

SEQ ID NO: 390612 - DNA, 1076 bp, Cannabis indica
gtcatattgaattataagatattatgtggttttttataagttatttaaaattatcaaaattgttataaataacttaggtataatgtaatcttagaaattttttaaatatgaaatagcaaattattgtttaataactaataaaattggctgacatattaaattttattaactaaataagaaaaaaaaaaaaaacttaaaaattactttttatttttgtcatttttttttggtaacatatatatgtttttcacattccattaccttaaaaaaatagaatataaaagtaaaattcttgagctcatgtgataattagtgtgatcaaatttttcattaaacctttgaagaaaaaaaacaaaaaaaagaagaaaatgaatcctcctccaaaagagagagagaattacatctaaatttactaataaaaataaaatcaaagagaaaaagtaaaataatggccaataaagactgaagtgaatggctaatagtataccacttaaaaaaaaaaagtcaattgagaacaaatatagataagggctattttcaggaaaaaaatattaaggttataataaatatggcataaatagtaaatactaataaatatgacattatttaaccaatcaaattaaaaatatagtttctttttccatataaaacattaaaaagtgaatctgaatttaagattcataaaaaataaaaacttaacatatatgacattgaattactataaaaaaaatattaaaattcctttcatatttatttttataaaaaaataaaacaaatgaaactacagtgatcgccggagttgtcacttgcaccagaaaagtcagcgatgtttgctactggcaccgaaatagtcgtcgaagtagctgtaagtgccggaaaagtcatcgtatttgccgccggcgccaaaaaattcgtcagaattagcattgttgccggaaaaatcacaggaaaaattacaaggaaattagtttcttgataaagaaactggttttttgatgacgaaaccggtttcttgatgaagaaactagtgttggaaattattttaccaggatcttcgatctactcacaagtatgtt

SEQ ID NO: 390613 - DNA, 611 bp, Cannabis indica
atgcaacctccgcaattgagtccggggagaaattagaatcctcaggatcggaaactagaatctcatgatcatcagctcgggacataggagaagatgatgttccttgagtgttacggcatcgtttcaagaactttctcatagaaagagagtcattttgtcttttgacattgctggcaggtggtgagttctcttttccaatggtcataatggctgctggaactgaagagtggtgcttgggaaggacatttatggtggaggaaaaagtatttgagtggagatgagttggttggagtggtggtggataggtggcgaatgtctggttttgaatctcaggcatgtaaatatgtgagaggtcagcaatagactcaggaggagtggttcggccaggatgaattgaagctgattgttggtgagagtgagcactggaagaggcaattgtttgctggtgcaagcttttgcaaggagaaaaaggatagtgagtgtgaatcgggttactggtgcaagtatttgtgaggctagtgttggtgttataagtactgagattctttttctgagttgggttggctgaaaaatccattggttgtttatttttggtgttgctgtgagtcagt

SEQ ID NO: 390614 - DNA, 1046 bp, Cannabis indica
atactaacaaactttcatgtgctaggaaccaaagaatattccgattgttattactcagctactaagatcgagattaagattaaaactcacttatttttgttatttgacttttcttataaatattataaatatacataatcaacaatggatgaaatttgattcaaaaaagaaaaaaaaaaaaaaaaacaatggatgaaatttataaaactactggcgaaaagtgtgagttgtttcttaattattatatatttaaaaagtttattgaaattaaattttgcacatattacaaaaattacatggacagccatgacacgggtcaaattttgctccctgatatattttctctcgatttatatttggtataaaaacaacaacaataataagtgatattctttttggggtctctgtaattgactggtcataaatatacgccagatttgagctcaaggtcatcacaaatgtagttttcatgttttgttttttttcttctttttgaaggaaagttttcatgttatttattagaagtatatatttatctatattaaattattaataatgagaaaagtttaaactatcaatgacagacatcttctagaatactagaactacaacttggacttcgattcttctttcccttctaattttgtttctttccaaataaataattatataaatatatatttatatatgaagaaaaagtaactattacgtacaaaatacaaatttatattttattacaaaaatatctttataaagtatgaataatatttataatttttacgtgcttttaattactaaaatacatcttacattattacttatacaatcagacgatagttgctagatagttgttaagtggttagccgaaggttgtatcagacgaagatttcaattagacaaaaattaatgtggttggccgaaagttgcatcaggttttaatcagacgaaggttgctagatgattgatcgaaggttgcatctgacggaggtttcaatcctaagaagcatggatcgtcagttgttattgaaactgtaatgcaacagtta

SEQ ID NO: 390615 - DNA, 1234 bp, Cannabis indica
tattaattttaagtttgacccattcaaaattataaaaataatctcttaaatatattacaatctttttattaaaataaacatttttcgattctaattatgatgatattaaataatttagaaaaagcttaagaaaatttaggtgaattttgaagtacagctgaactcgataaatttaattagttaggctacctacataccttcttgtgaagaatcaagccacttgtagtctagaatgatgtatattttagaatttgaatatgagaattccggtatatgataattttcaagaaatcttagccatatatttaaaaatttgaaaaaaattcttaagtggacgaccttttatggaattttaagatttgtgttttatactattttgcgatattgacaactgcacttagtcttagaacctaaattgtccgtatattctttaataggaatcaagtcaaatgtagtttcgacattttgagattttttagataattaagaggtaaatgacatctttttgggatgccatttattatgacttttaattttagtacacttttgaattttaaggtacaaatacaataccaatttgatgtcaaattactattttgagatttttgtgaggttaatgatctcagtaaaattttggaatgatatttatcatttaaattgtttttggtgagctcatttgagatattgtactattttatatggctttacattttatactttttgtgataaatttgagtcttgaaatccttttattattatttaaaaaaaagattatttgactgatattttaattaatctaatataattcccaaaatttataaggaaataattaaattaattattaattttttatatgataatatttagttatcatttttaattcaatttaaattttaaattaaatcaaatataagatataatttacggcttaaatttttatccgtatataaatatcttataatgctcaacgaaacatgtgtttttttcaacgaattcagaaagttgagtctctcctgctaggttgccacactttgagtcatctctcgtttatcagtgtaggaccttcattcgtctactcattttttatcatttgaatttgaagattcgattctctaccacgactcaattttgagtaggtaactagaagtttttttgtatatatatatatttatatacactctccttttattagccataatgctaatttttcttctactcatgcaactattgaaac

SEQ ID NO: 390616 - DNA, 1371 bp, Cannabis indica
gatcttttttttacaatggagtctatagtgaaaaatttttcaagtttccataatgcttcattacacgatctcaagatgtggtacacaactgcaactaaggtcgtcgagagaacatgcatttggaacctgccaaatttagattttgaaatctatttcaccaatcaattttgtataacttttagcatgttgcaaatatgacaacacttttttataacaccattgaatatgatattattttttaaatatactaaaatgtagcaatacaccatacttttagtactttattagagatgctcttaatatttggttcaaattttacaattttgatccaatactcaaggtacaaattaacacccatagtcattaaattttattgaaagtataattaaaaaaatatttaaatgaataaataaatattaaaagcttttaattaataaaaattattaactagtgacaaatgagtaaaataaaaaagataactatttattgtaatacaaatttagtcgatgctatatattgtgctaagtttggccaaacgtttagcaagtgtaaaatttggcataagttgtacactactattggagctttattttttaaacattaaattacagcaaaatctctaaaatttttaacttgctagcaattaactcctcaaactcatttttttttttgttgcaaaaccccccaaaactcatattttgttagtaatttgtcattttcatccaattttagttatgaaaatcatgttggatcattcatatgtacacattataaacatgacacaattgtgttggtacatgtaattaattatttaaaaaatatcaaaaatattttaaaaatttataacattgttaagaaaattaatgttttttcttcttcttactctcctaaccttaactccctctctcactctctccctgaaaccattacaagccatgttaaatctgtatgcctaggttctatacacatgtccatgcctttagtcaattagttaggtacttatttgttaacaagttcagatgttaaatctgttaacctcttagtcgtaactcgagtatgtaaatattctgttagtagaggtatttagtctataatacctctaacttctcaactgaaaattaattgattcatcattgtaaatactgttgggttttgtaccataaataaaacccattacaatctgatagttataaatttaagagttttgaagtgtttatgttaacatgtattttacatgcttatggtttaatatatatatttaacatatgcacaaaatcagttaagtccagaacatatatttacacacaattacagtactgtcaacacagtggaatgtgattgtgattatatgattcaaaagactaagtccct

SEQ ID NO: 390617 - DNA, 737 bp, Cannabis indica
caatagtagcactccacttccttccacgaccgaacagctgagaactagagagaagggcaaaaaacgtgatatagttggtggattagaggaatgtgtttgtgacagagatgtaggagattgcatcaaaataaaaaatacacatgatgttaggttgggacatactaaaattctaatttttaaaattagagatttttttatttaataagggatgggtcaagcgattctgaaaaaaaaaaatattatttttaaaaacacattaattattcaaaaatgtattttagaaagggtgaaatcctacttttgtaaaaaaaaatattgtaaatactataattaaataatttgactattaaataaattataagaggaatttaaaaataaaaaaaaattataaatattaattactaaaaaaattttgttaaatattaaattaaaaattaattattttcaactaaagcgttttccattaattgtgggttgagaatcgtaatataaattaaaattacaagaagttagttatgtcatgtgataaaaatgacaaattaaaaaagtacgtgagaataattgcatgacaaagaagttaggtaagaaatttgataaaaatgataaagaaagtagttaaacttaaaaaaagagaaagaacttaagagcatgtttgctatattattttctgttttttgttttaaaaaattatttttagaaatgagaacaaaaaatagtttttgaagtttttaaacaca

SEQ ID NO: 390618 - DNA, 1724 bp, Cannabis indica
aaagttattagtggtttctagcactttcatcgttaatatcatattgttatttatgctagccaatcatcttttaggaggtgttaggtactactagtgccctgagtaataatgggcccaattgtacaaaaaatatcatttctttaatgtaaaaaagtatattatagaaaaattttgggttttgggtttgggtgggtcctaggcacgggcctagtctaccttagcctaaagtcgaacctatctaaaattaaaaatcattactattgggcaacagtggtgcccaacactttctatagatatagccttacaattgtttcacgatatttcttaaaagttattatctttaagtttttaagttatatgagacctgataccaaattacacccataacagtaagaatattcttaaacactcataatgtcttttaccatttctcaaaatcaaattaaagaactttatttataattattgcgttggagatcgatatagttgattccttaacatgtgaattagttttcacattagtgactttgtcttaaaaagttaaatttggatgatgatcactagtttgaaataatcctttgccaaaacacgtcccaatgttgtgtaaaggcatatgggaagaatcgtaattagctgggaaatgtatgtatctattatgaatcatgataatgaatataaaccacatacctaataaaattgaaaaacaataacatgacaaaaaatggtgaaaattaaaagaccaaacaaattaaaagtagtgtcactttagccaacttgcatggatggatagatgagcaaaaatgaagtgtgtttcaatttgaattaaagaggtttgcttcctggtctatatctgtctgcctccatcacatgccattaggcattaggcaaaatggcatagagacatctcatattggaattttgttttcaaccataactaattaatattattacacaatctctccctctctctctaatatatatatatttatacatacaaaatatcaataggaattaaagaagagattacttgaagtcaacatctcactttcaaaaggaaacttccttagccatgtttttagaattttagagctaaaagattaaattcactagttagagcatctttaattgtatttttttttagttttttagttaaaatagctaaacagttaaaatggagaattaattttattgtagttgctctaattagttaatatttaattattttaataatatctcataatttgaaatttgtaaaatataaattaatgaaaaaataatattattttttattaaaatattattaaaaaaaatttagcaaatacctatccattttctattatagaaagctatattttctgtataattgaaattcatttttttaagtctcgcttattattttagctaaagagtatgcttagagatactcttacctaaccgacaacaaaaatatttttggagctttagaagcccatccaaccaagaccattatttagtattgctgcatggcaaagggaaggggagacttatgggatcatttgactcccctcaaatttttataaattaattttttatgtataaaattttaaaaaattatgttttgtccctataaattaatagtgtgacagtcagtagtcccgtgatccgtaaggggaaacatcgggtaagctgtgcaatcccacaccgcctgggaaaggtcaagtgggatgattctgagactgtgtagg

SEQ ID NO: 390619 - DNA, 1005 bp, Cannabis indica
cataactattcgtaaaatgttctataacacatgagtttaaccttcaatctttacagggtggtgaaaaaggtctaaatcactgaaaacataaccaaatcaatacttaaaacatagcttaccagtatcaatttgctgccatcagggagaggagggaggaggattgtctgttggggagaacgattgggcgtggcgagtcaaaattgtagagttagggttcgaagggaagagatgggagcagatgtcaacaatggagatgaagagagagggaagcggagtggtcaatgacggagggtcgacaatggagaggaagagagggaagcggagccgtcgacaatggcgggtcgacaatggagggtcgaagatggcaggatccttagagcttttttgtcttcgaagtggttgaagacaaatgtgaacagtggcgagatcgatttgggagtttaggtatttagaaattatttttgttggttctaaacctttggcactatatttctcgtcggtttcaaaagctcccacaactttttatttgactataatgcaccgacgagaataagctcttccaactttaatttttccttggtttgtttttttcgtcagtttcctttgtatcgtcattttttaaacgacgcaataaatatttttttaatgtcgttttataaatgacacctctatttttttcacactattcacgtcggtcaaccatatgaacagtagcgttgaccgacgcaaaaactagtttttgtagtagtgctcgaaccctcctttattgttcttcacctatttggccttagtgatagagtgtcatgcccacacatagtaagttaagtactcaatcatagtgcggaacggtggtaaccaacctgaaggagagaaagagatccagactcggatcttgataatacgtcacgatagaaaggaacaagggttagatatctgagcagaaggagtcatattccgctgcaatcaatgtaaggttttttttaactcttatgtatttaattttat

SEQ ID NO: 390620 - DNA, 980 bp, Cannabis indica
ttttttttgttccttttttagtttgagtctatcagaaccttctgtgaaatgtcctgactgtacacttgtcccacatcaattattatcattatttattatcaaataattagcccttaaaatgaatggatgatacatcatgatagtgtattctttttagatatttattgcaatttttttactattatttcataggtatattttgacaatttgtgaatttgtaagatgtaattgtggaggtatttttgacttccttaataataattttttactaacaaagagtttaaaataataaattaagtgtaaaaataaagataattaattgtttgaattatattatgtatcaacaccatttttttttttaaataggtgagaatatgcaaatttaagttataatctcctcacaaagccaaaactagatcgatcgacacactataaaactatttatatatattttaaaaaatttatacatatataattaatattttaaatagataaaaataaaattattcttttaaataattgatatagtaatcaaagattaaaatcttgatataagttatacattttcttgtgttatttgttattgaatttaaaattgaaagaggtaatatttaattaattttggtgaagtaaaaaaatattataaataattattatgtaatttaatatttatcaaaataataaacttaaaataactgatttaatccacaattaatacaaattagatatatattatgattaaaaaaatagattaaattatatcaatactattagagcgtgacatcactgattctctctgagatccactatattataaagaataatattagaacatctctaatggtaatattttagaaaatgcttaatgaagtgaagaacttaagtgataaaatatagtgatgttataccattagagataaaagaatgttattcttaaaatttatattgatgtcatataatgacattgatgctatgttttt

SEQ ID NO: 390621 - DNA, 1346 bp, Cannabis indica
ataatcgttcctcaatattaccttgatcgaaagcaagtcacaacaaacacatatgaggatctcgaccataatcgagactatcacaattatatttgttaaccataaacggtgcataacacttttcttacctcaaaccaatatcaagggtgcaggccgacctgggtggaaccatactcgatgatcctgggtcctatgtcacgataacaaaacttgataaacaacctatccaaactccgaaaacaaactataattccgtaactgaacaaatcaatccccgactaattcgaaataactcaaacatcactaaaataccctaatctaagctctgaagaacaccccgctcaaaaccggtttcgaagccaaaaactaggttttcccctactgacaaaccgattgattggtttcactatacctgtgaaacaggttaattaactggttttccttgctgcagaattgggaaactcgagtttttgcaccaaaacccaaccaaatctcctccaaacctacccaaacactccagaacagttcaataacataaaaacagggtatataatcaatcaattctcaaaaattcaacacaacacccaattcaccatgtttgaaacaaaattaggttcttaaactcaattccttcatttctaacattaacagccatggaaataatccaattcacaattaaacaaatccaaattaactttaaaatcatactacgaacctcaacaactgtacagactcgaaaccataagaaaaacccaataaaactttaaccctaaacctagaaaatcaaagggatggaataagagacttccctccaagcttgggttacttctacacctcattaccacaatcaaatcttgcttgaaatggagttgaaaactcttgtccaagttggttttctagggctttcgagagagaggaagagaaagcaatatatgtgtatccttagttatttatttatttttttccttggttttatcttaatttcctaaccttaaattaaaaattaataaacttaaatataattctaatttagccatcaataaaactaaaatccatataagacaaaactaatacttggtaaaatgactattttatccctcttactaaacttaaactaaacacaacctaggggtattttgatcatttctaatttccccgatcaaacttacttcttaacattcttacctagttcgatataactctaatataatgcaacttcagtcgtcgtgatatttctgaccaatccgtcgagtttccacggtcgccgaacctgaaaatcttttattttgaaaatggtatctacaatacccccataatccagtaaaatctccttaattaataaatta

SEQ ID NO: 390622 - DNA, 1640 bp, Cannabis indica
tttagttattattcttaccaaaaaaaaattactattttattttagatattaatatgagttttattttcaagatagtcattcgataatatattaatcaaaagcaatatttaagttttttttgtaatttattatcaaataagagtaactaaatattaaaattaaatatatatatatatacatataaactaattagtaacttattatttcatgagtattttatagaatgattttaatagatattttacaaaatttgtaaagaaactaaataatatcttaaacatcacataattaatttcattaccaaattttcttttagttaccattatgttatattgttgtttaaaatacttatacatttaattttattttttttgcaacatttttattacttcaaaactagtttaagaatttaataaggtacaataaagtataagcacttattagtaaaattagtatatataattatttaaaaacaatagtatatatactaatttttcatgatgtaactaattttgtgatgtttaagatactatttggttattttatgatttttttttgaaacatatcaaaatatatctattatatagatttattctaagtatatcatttggtaacttttatattaaaaaaataataattttttttaaagtaatcaataaagttggtttttttataatttattttagtaacttaacaaacttgtttaacaaaataaatttatgtagaatacaatttggtacttttaaatataaaataacaaaatattaattacaaatccaataaaattagttgatatattaaatttaataaaatttaatattttaattattttgttaactaaatataaaagaaacttaagagttacttaaaaaatttattatttttttggtgacgataaaaaaatatatgctttctacatgttgaaatgatcaccttaaagagagtagattataatggtataatttttaagttcaaatgattatcaatatgattataaaaaaaatttaaacttttaagattaaaaaaaagtaaaagagaataaattaattatattatggttcaaacaaaaataatagtaattagtttaggcaatgtataatagtcaacatatactttacacagtttccaaaaaaaaagaccatcgttatattttttcacaattaagtagtttaccggtagttgtaatattaattttaaaattacgtgtttgagtgtaaatttctctaaaatagtatttttaaaaaaatatatatttttttaaaaggtaactttttttgtttgggctcctaaaatgaattggccctaggcgcgagcccccccctatgcctagggccgaccctggtagtggtccctaagaaactagaacaactctattctcatttgctccccattaagagaaaaaactaaagaaccttaagtcttgtattcttgaaagatcattacccaaaatcaccacaaagatcattatttagatctatgtttatatacttataatatatatgggagctaatacaataggtattataatttttacctatcaatagggatagtaatttatagccattgatttaatccaatggctcaaatcaactcttgaaaattacactaaaattaaatatttttttatttataattaatct

SEQ ID NO: 390623 - DNA, 838 bp, Cannabis indica
agactttgttccgcctaccacaaaaagtgatcgtcagcttgttaagagaaatcaaaggttaatttgttaaaacattttcctccccaaagttaagaaagggaagaatcaagttgatgagagtccgtaggtttctgtgtaatttttttatagttttgccccaacattgttctaacttttctaattaccagtttctttaggaggcaaaaatttaatttattctatttttaaacatctttaaggattataggttttcttttatacaaaagtactaattattttttattttttgaaagactgattaattgtaccactgagtgtgtggtgtagttggttggaatgctttgcataaagttcctcatttgattgttcttcggagttcgagtccccatggtaacacttatcttgggccttaaaaattgcactattttattaataagaaactttgaagattaacagaatagtcagtgtaataagaaaagttttggtacttcacatcaatgagtcaaaaatgatgttcataatactttatatgtttgttaatattttagatatgtcatgcaatgcaagatgcaaccttaaaacaattcttgtgcaactaatgagttgctcattggaaagaaggaggtgttgttagttgttgttgtgttgcttgtcacgacccgagccctaggctgtggcagatatgtaatatccataacttgggtgaactttgacccttgtaggaagataaagcttataaatgatccttttatttatattacaaaatacgaatttaaaagacatggattaactcctatattaataagaaaatattagtaacaaaatcaagaccactcat

SEQ ID NO: 390624 - DNA, 1032 bp, Cannabis indica
tgacaagtcacttcccaatataaacatcgcccgaattattttaagtgctaggactgttttgcagaagggtacccattacatatactaagtaattatgaggtctctttagtcaaaagatgaggactttctactgattatgtgaaatagtgcgatatgggcttcaggtcatttttctaatttttaagtgagtggcgagcttaatttgaaagccctaatgttttgtaagcagaagaataaatgacttagattaataatgagagatgatattttcttctaagttataaagtcggcgtattgcttagttatgggattattaatccttttgtggttctgccaaattcgttcaagggtttaggagacaagaatctctaccttcccttgtatttattttgaatgcccaatatagtagtatgttagtagccatagaaattaacaatttgttaaaattttaaaatacaattacggctaagtaaaagaataacaacataattaaacagctacaggaattttatctagcttgtgaaaaaaaggtaagtcaaccgtatgtatatatggctacaacatgttgcgactagtgctttgtttgttagtattaggatacttagcacaagcgtacactgcttcttagagtattaatgagacaaggaactagccgaagctatgaattgctctcattaagtttatataatatagtagtatgtatggtatgatatgaatttaaggcgttagtatctcagtctacccacaaaatgacaacttattgttgaaaaacaattgttcataatcattaaacccaaaattaagtatttatttagagcattaaaaataaaatacacatacctcccatatcatccatgagagtgattatccttcaatatcttcaaagaaatcaccaccaagatctctaacccttgagcaaaagcctagagaacactttgtggagctaaccccttcaatatcttcaaagaaatcaccactatatatatatatatatatatgtatatctctcatacccttctaaccctaaggggt

SEQ ID NO: 390625 - DNA, 622 bp, Cannabis indica
ttaataaaattataaaaatactattactattcattaataaccacaaacattcaccaaactttatcctaaatatatatatctcaacttattatattaaattaaattattataataaataataatgatatcaattatcaagtgttcattaatcgaaagagaagaaaagtacatcaagcaaactttgacccttcgatgctattaaggacactttaagccagccgccataatcagtcccacattaatgatttaggaaatttaataccaatacaataatattcaagattaatctttggcttttcacaatttttctttttatgtgtacatttattaaaatgtaaactagaattaaaatataaaataattaaaaatattattttattattatttattaaactattcaagaaaattataatcattttactttgataggtaaatactattataaattctgtattttgcaaaagttatcaattagaccatctgttttgttaagtgacaaaatagactatgtattttctaaaattgtacaaatgggacaataaactaattttttatcaaaataaaacttaataataatctgatctagaaattttatgacaaaactagttatatttttttgtat

SEQ ID NO: 390626 - DNA, 2266 bp, Cannabis indica
aaaagactatttctttacgattaagcttcatggcgttattttctaagtatgttaaaccatttctatgtagtcctttgtgttgatcctactattttactaatttcaccagcatatcgttgacatagatttccatatttcgtctaatctggtctcaaacataccatttacaagtttttggtacgttgctccagcattttttaatccaaacggcatgactttataataatagactcccaaatttgttacaaagcttgtatgctcttgatcagggacatgcattttaatctggttatatcaagaatatgcatccacaaaattcatcaactcgtgtcctactgttgcatccactaactggtcgatcctgggtagtgggaaacaatctttgggacatgccttatttaaatctaaaaaatctataaaagtcctccaggtgccatttggtattgggacaagaactggatttgagatcaatgagggataaaacgcctagcagataaaatcattagttaacaatttatcaacttcttctttgagttcaccttgtctttcggaatctaacagtcatcgcttttgtcatttttctggataattggggtcgattatcagatgatggcagattatctttggatttattcccatcatatatgagtgactctaagagaactgatcctgatttgcttttagaaaaataattaattgctattttaattcttcctccaagtttttcccaatgtaaacacattttttggggttgtttggatctaaaataacttcttccaactcttcaattggtttgagctggttattttcatcttgaattcttgggtccaagtcctcttattcccactcgttttcttcaattaggattaccattagttgatgattggctctcctattctaaagttctatttgataacactctcaagccaataactggtcgcctctgactactcctacttctacctgggttggaaattttagggacaagtatctgactgaacttactgctctcaatccaattagtgctaggcaacccattaatacattgtatactgatggaatatcaacaactaagaactcctgcatttgtgttgttcattagggtggctctcccatagtcaatggatgctcgatgatgcctaggctggcaacgctgtcgcctgcaaatctaaatgttaacgcagattttcgttaacaaaatttgagcctcacagtagtaatttcacacagaaaaataaaaactccagaataaagatatgaacacatggttttttttacgtggttttgcagttaaaattttacatatagtccacgagtcaatcttattcaaatttctgattattttttaggaactctctcatatgagttttttcgtcccttttttgatcttgtttgtcactatttataattacatagtggacagttaattacaaagttgaccggaatatgtttacaacaatcatccctaaaatcgggggatttgattacatatcatgtagtgtaaatgtggtttaggatttgaaaatcatatagctgtgatattctcgctttaattgggtcaaaacaatcgtgtattaaacatgtctttagctgttgtatctagagataacttgacagaaactttgttccagtgatctcaataaggagttgggaccattcttccttccgaggtccacgatgtatgtctggtgtcgattgcggttcttatcctcaaagaattctttgaggctcatttgaatagtatcttctggctctccaggattgtaagccttgctgacgctatcgagatgaagttagataaagtctttccataacgagacggtcacctcgcttacttgttcttgagccgatctgacttttgcacttagtttgttcattgtacgctaaagactttcacgattgatacgtgttgctttctttggtgcctcgctattcgcatttagcgacatatggtttctcactaatatactaagtgtcattttgtacattgatttctcgcctaagaccttacagtcagcgagttacaaatatagtctgatacttacgtaattaatgagttattccataagaagtaattgcatcgattcacattccctttatcttgacacgtgtcctcgaaccgaatttcgggtataacaattgccccttaaaaagttcatttttagtaaaaagagctttgtaataattacagagggcattttcgtcaagatctcttcttggaaaaaaatgcatcctttgattccggcggttgtacagtttcgagggt

SEQ ID NO: 390627 - DNA, 1150 bp, Cannabis indica
agtaaaatagtataaataaaatattggtgtttttgaaagcttgaaagccaatatgaatggaggctaattcttggagaagcccaaattatcacaagtttaatgcaaaaattatataaataggaaatatttaatttattataaatttgtgtcaatattcagatttggaatttatggaatacattggcaaaagttaagaaaaaaatgagaagcccatcaagctcatccatcttattccaatcaagtttgcatgaaagcccattgaatgagtctcgtagctatgctattctcatatgcacaaatacatcattcaacaactgcctcacatgttagcccacgttcaatacaccactcaacacgcatgagtttcccttcattcaacaacagctgatgtgagtgttctgagctcgccacatgttcactcatgtctcctcaatctcaccaaaaggggcgcacgtgatgagaccactctccaccagatttcttgtgccattttctccactatttggataaattggttctataaatagagaaccaaaatcaatcaaattttgaagtagagaaatacactttttattttcttgttttttcttttattattattttaggtgccaatttgtaacattttttttaatctagttttctgtttttaaaattgaaaaagtaaaaatatttttcaaaaacatgttttataaaaatatttttacttttctaattttttagttgagtatctaaaattttttaaaattttttactttagaaaaaaactttaaacagtacgttaatttagtaaattgaaaatcgttaaattagcttgtactatttctctgttaaaataataccgttaaaccaacaaataaggttagatagtcacttttaatatataaagatatattggtttgaagggtgtttatccaatccaatcaacactattgtactcataaaacatccgatccgcactaagtgcagatttcagtttttgaatccaatcccttccgcacaatagctcaaatccaatccaatccgcaaaagtgcggattggattggttactttgaattgattactttttattattaaattattttataaaaaaaatatatttttttcacaactagcaacaaaataaaactaattatagtcattttatgtctc

SEQ ID NO: 390628 - DNA, 693 bp, Cannabis indica
tggataaattcaatgaagtaaacgacttcggactttggagaataaagatgaaagccttgctggtccatcaaggcacattagaagccattgacactgaagctcttgcagaaattgaagacaagaagaagcaaaaagaaatgtggatcaaggctcatagtgccattctattaagcctgtgagatgaagtcttgcgagaagtgacagatgaggaaacaaccattggtctttaggataagctggcaaagatttatatgaagaaatctttggccaacaaattatatgttgtacacaattagaatttacgacttaagtgagctaattaagaaagtaactagatgaattcaacaacatcatcctagaactcaacaacataggtgtcaaaatcgataagcaatgttaagctatcattctcttaagctctctgcctaaccctttatgcattttgttgacaatatattgtatgggaaggattctttaaaaatgtaagaagtgaaatctgctttgaattctaaagagattcaaaagaaattagaagacaaggttcaatcaaagggtgaagggttgttcaccagaggaagaccagataaaagagaatcaaatgataacaagaacaaaggtgaatattgttggggttttatgtcctaaataaaactcatttcaatataatcttatttactaattaacaaaagatca

SEQ ID NO: 390629 - DNA, 1825 bp, Cannabis indica
ttttttttttcaattttaataaataaaatataagctatttagatttttttgtgtctagctaagaatttttaaaaatttatctgatattgaaaaatactacgtttttctttaaataagaaatttttttttttttttatagctgactaaattttaggactgcaatctacatgtataattaaaaatttgtagttttagaaaattattaaactaaaaatcaataaaaaaaagttaagtaaaattaatttaaattttttaaaattattttttaaaaattaattacacagttgatatgctgcttatgtagcagccacatcatcgctatatcatcattttatttgtgaggtatgacaaaacttccacttaataaataggtcataatttcactatatttttttttattcctaatctaaaaaaagtgggcaactcgatcagcaaatcgagttgctcactttgttgctaagcgctcccaatttttcactgatcgtagtattcataggattgattttcctgatgagcttcaagctcttttgtacgatgaatgttaaatttcaatgaagttgatatttcattctaaaaaatgtacatgatcaacaattattattattattattattattattttgtaaggacatgatcaacaattatatatgcatccttcaaaggattatgtatcaacaatttattttaatttaaatattttatatctataaatggtgtgtttttttaaaatggtaaataaagtgtttccataccaaaacaaacgtagatattttcgcacttctttatttcctttattattattattattatttttagtttcttccttatcttaatatatactttgatacttatctcttcaaattatatttccaagattagttattttgtttcaatcaaaactactatattgttactcgtgatccctttttaataaacaaaacaaattcattttaaatataaatttaaagtacaaactaattaaattaagataaaaaaaaatctagtcaattaatataaatttattatttttctctacataaaaaatatatcttgccatgcgtaaatacacacacctaaattttattatagattaagaaatttataatatctctttatagtctaccctcaccaccccaattttttttttcttttgcaaagaaaaaaaaagttggtgacacgatttgtttgactttttttaaattattattattactatttttattttatggagttgataaattttaatttgttcacactattaaggtaagaaacatgtgtgtgatagtgggaaataaatggacattaggataaacatgggtgccttatgtagatacgtagaagacttaaattttatagtacacaaaaattaaattcagataaaataaggtatcaaatcataccacttattcaaaaaatttaggatgcaattgtaaattaaatttaattaatatgttcaattattttattttatattcgtataaaattattgtttgaactctatattctataagatatattattttaaattttttaaatagttgtgtgtattatgttcaaaaaaaaaaatagctgtgtgtatattgttatatatttatatactagcaaaaaactacgtgcgagacacgtatactaaattttatgctaggttttttctatgttatttgaaagtgagattattattgaatattgaatgcaatatattagtgtttaagaaaacttaatgacttaaatatgttcttaagttaatctaaaaataaactaaaaattgatgttccaatattaaaaaaacattacttaaatgattggacaatattcattattcaca

SEQ ID NO: 390630 - DNA, 759 bp, Cannabis indica
aaaaaaaaaaaaaagaaaaatttttaccacaccgaacctagtgatagaacctgtaaactcatccattacaaatgtcacattccactattcaaattgttaacttcagtttgatttttagacaaaaaaacaagttgataaatctcagctcattttgctttgagcacaactctttcatttatagaaaaaaagaaaagaaaaattacaatcaataggaatgtgccagctggcatactgtagtagggacatatctaatttcaagttccttcttaagcatcttgtctctaacaaagtgaacatcaatttcgatgtgctttgttctagtatgataaacaggattaaaggcaagtgcactcgcactgagattatcacaccagattattggcatctttggtaactggaacttagaattccttcaatagtgactcaatccatgtgatttcagaagcaacatgagctaaagcctagtacactgactttatacttgacctcaagaccacaacttgttttttagaagaccaggacactagagaatcaccaaaatacacacaatatcctgcaattgatctcctgttatctggacaactagcctagtcagcatccgaatatcctaccagagatagcctctcacagtaaccaatgtgaagtccatggtgcattgttccctttaagtaccttagaactctctctactccactccaatgacttgttgttggacactgcagaaactagctcagcttattgatggagaaggcaatatct

SEQ ID NO: 390631 - DNA, 1859 bp, Cannabis indica
agacaaaaagaaactaagattttctaaaaaataagatctgaaaaacaatcatgatcaacaatttaacaaaatataaagaataagaaattaaattttaagaggaaactcatcaaaaatttaccaaataaagcacatgttgatacttaccaaaagaaagaccactgatcaatttttcttagcccaaaagtcaagtcacatgacacttttttttttaaatattattattttttttaaaaaaaaaaaaaaaaaaaaaaaaaactaaaatattttatacaaatgatgatgtgtgcttggtgtgtggaaaggaagcagaaacgttggagcacttgtttatcaagtctataggcaacaataagtatcttgaagagataaagagctggctacaatagaggaattcagccactacaacaagtagtattctaaaacccatacaaagaagtagagttttgatggcctgaaaaagatatatacgagttctattgccgcactaattcaacgtttgtagataaatcgtaattagacttattggaaccaacaaatttagagaccaaatgtaatgattacaaccattaaagtaaattttcaaagtataatatgtacacgccagaatacatactacaattgtaaaaaagagaggggaggttttgaaatggttttcagactcaaatggtactattaggatataaattcaagtttgaggcaacataatcttttctatttcataaaaagataatttctatgtgaaaaatactattataatttattaaccaattataaatggttattaaacaaaaatatgttagatactcttaatttgaatatataaacatacataatagtattacataatttgaaactaaaaattgacacttgtaggcgaaacttaatttatattaggtggtatattttattgttagaattttataccctaaataaacttaatttaatttcattataatcttacttacttttagtaaaaataaaaaattataccttaaacttgtcatatgctttcttcgcatattttatacatgattatatgtttatatgtttcatatttcacagtagaaagtaattgtgattatatgtttcaaattatttagtctcacgatttatcactgcactagatttatactaacgtaataaccagcaatagggtttgcttacacttgaataagtggaatgtcttttccaaactattagtaaagtaaacaaggaatggatgtatcggttatacatcaaactggaccgatattaataatatgaaagatatcgtaaacttaccgttatatcttttctaagtcaatatcacttaggggatcatagatcatttgatctcaatcttgagatggttaaggtctagcttagttgtattgtacgggttctttcacttgttaattaccaacttacccttaggactagcctatacttacatattgggaactcaatagtgtaattgactaggatgttaatcataaatatagacatcgatctatagattctatatttattagaaatgaaagatggtttctagaagcttagactaacacgataaatgatagagcacttatttcggtaattatattaatgtcccaaaatatcatttacaagtagctaagtattttaaggataaaatacattgaagggtaaaacagtaattttatctctactcaatgtaaaccgtctatagaagatcagtaattgttatgattgcactacaacaaaaagagccttttacttcagttttaaagtgacacataagtaatttgcttcagtttgtgtaaccgatgttatagctatagacgcaaatattgatttttttttgtctttaatttcgaaccgacgctaaatgttttttt

SEQ ID NO: 390632 - DNA, 1320 bp, Cannabis indica
gtaccattgaagatgctctaatatttatttttcttgttaaattggtgatgaagctaagtttaatccaataactaaccttatgattaattaacaaaagcaagagaaaacctataacaataattggagaacaatatgataacatactcattttttcaacaattatattgaaaagaaagaaaaaggttcttgttttttttttttttattctaacatcacaacagatctcaacaaaaacttaagaaaaatcattactacatacaaatatataataataataattatattaaattcattttccatagcatgaatcaagctaatgaaatatttcacctgatattcatacatatatgtatatatatattgaaacctaaacagaacagaacagagagaagcataagaacaattctcacaaacaatttctacataataatatgattctaatttaaagaagaaagaaagtaagccatcaatgggtgagtgggcttagctcttttcttttctttttctttttttcttgacagatttacgaaagtgagcacttctttgaccactgaaataaaaaagaaagctttttcttcacagcttcatatcttgatgatgatggtgatggtgatgatgatcagaagaagaagctcttcttataagttgtataatcataaaacttttgttgatgataaaatccaacatttgtaaaagaagaagaagtagtagtagtactataataataatgacttaacaaaattaccattaacatttcctttggtgtttccataataccaaacaaaagattcagcaactttgtaagccatataatggagacctatatatatacttacacatatatatacatacacatgggcacacaccaaatgtctatatggaccccacacacatatataagtgcatttttagttcgttgtattaggtcgtattgtattctattaaatttaattatatatcatatttcatataatattatgttaaactttaatttatattaaaatattatatatttatgtgctcatacaaatcaataccacatatatttttacataaaaatattgcatgatatataattcaatataatactatacaatacaatacggtgtaatacgacatactaaacgaaccattaatgattaatatctattaatgagtattattatgaaaatttgagtttttgtgattaattttgcgatctaattaaaataaatattttatttttatattatatggctgaagttgttttattggagcgagatagaccaaaaaaaagttaaatttaatttaaagagagatattttttaattaaatagtaaa

SEQ ID NO: 390633 - DNA, 1593 bp, Cannabis indica
ctcggtctattttaaagcctcctagaatttctgcttgttcctggaaaatagtttaatcttaatttttgatgaaaaagagaatatgccgagaatacttttcgaaaaaaaaactcctcaaaattggcccaggttgacaaactgtccaccttggcgttggtcccttattttggcccctaggttggtttgtttcttccccaaaagcacttgtctccctatttttgatgatcaagaagaagatgcaagattcagagttttcatctaatgcttggaagttgcccatgttagaaaattgtcaacttgggcgctaggtgctcaggcaccaggtgctcaaaaataaaagttctctgaattttattccgatgcctttaatatatttctggtatttctagttcatgtccaagtgcaaagtttgacctatttgcactaatatggtcctgaaaactgaaaccctagttgggttgtcaacttgggcaatgggtgatgccctaggcatctaggttgatttctgagttgttgtttcgtgtgtttttcagctcgtaaggcctggactttgatgcttcttgtctttaaggtgcataatactaaaggatagggattcagaaataacttagcagaatctaaacacccattctagagttctcggagtcaacttcggcatagggctagggacccctccaggtcaactactatgactagagaatactcaactcctagatgttatctttcttcccacgtgcaaaatattgatgtccacgccaccagggaaagtttctgagttaacatcccccaacaacatagccgacgaggtccaaggtttcttttcgttaaaaacctcgtagggtcatagttttagtccttccttggggccattcttgctaaggccaccagaaaggttcacggtggtggccttcaccagagtatttctagatatggtctccacctttcttgcttgcttaggcatgtttagaaagcatgtagggtttgagaaagttgttgttgtaagcttattcttcccaaaataccaaactgcttacgctaagaactcgttaactaagttatggttgaaaaccttatgtaatgattgtgaaaatggttgactaagtgtatttcttagagataaacctagagagaacggagaaaaatgttttgtattgaaataatggattattagtgcataaaggtttcaacccctttgaaatgaaataagaagtatttataggaggctctaatggcctttgttacatcttgaaagaccctaagtggtcccctaggggtaccacaaactatgctgaaaaatgtgagggggacaaggtgaaggatagtgaaatttaggtagtggtggtcaggtgccaggtcgtactgacacatgggatcacactcgcactacgtaccttgtaccaagactaactcctcgtacgtccattgccttgtctcagcctatgtaggggtcatggttgtacctcttgattcgtccttgccctaacgtgtctttggctgctttgtttttgttatgggctccttgccatgcttttgggtacttggtattttgctatgtgtctacccttgtaatggaacccttcatgagacttagtc

SEQ ID NO: 390634 - DNA, 706 bp, Cannabis indica
tatatatgtaaataactagaagaatatacttcaatgcatgattgtgttctttaggtcctggagttgtggatctagatatgatgaggaagtgtaaaaacaaaattaattaattaattatatactagaaaaggatatgtatattattatataaaataagtgagtgatacttatagttaaaaatatggtttctatgcatttagaggagtagtaagtaagggataagaataagtaaatcatagttattaataactgaagaattaatgtatatatgagggaatacgatatatatttaaacgtataggattttgagataagattgagatatttagatggtttctatttattcagttagttgtttacagtgcacgagtgactataggaaattgaggatataaatactatgattatagggtttatatatataacgtttaattcaattattttatgtgtgacgtgtgtatagattttatgaaaggtggttcaaaagtcttttgaatttaaattttgaggttggtcccaaatggcatggcgtgagagaatttaggaaatattgttatctttcttctagtcaacgtgtggggtattcttatctagtaaatatatatatcaataatgatacgtatagccgaattagtatgatataagagtaaaaaggttggttaatgatatttatcaaattcaaaatttaccgagggttagggattat

SEQ ID NO: 390635 - DNA, 879 bp, Cannabis indica
ataacactatataagtaatgtatacagatatttagcaacaaaaaaagtaatgtatagagatattatttggttcaaaatatctgataataaatatccaatataataattctctctcaaaaaaaaaaatatcctataataaattatagttatttgtatatttattgtattctttcaaaatattttttattctgaaccattcttcaaaatattttagttttatggctgtatttattttctttttaattattaatcatttttatacgaaattttccgcccctcttaaaataataatctaaatcctaaaagtctgctatatcattttgaaattatattcacttattttataagttttagatatctcccctattattattttttatttctataaagcatctttcaatattggagactgttaatatttttctattgttttataattaaaattaattgttgattgaatttttaatcgtagagttgtaataattgagaaattaactaaaattgtaataaatacaaatctctttaaattttagtattattatttattttttagtttaaatttcatttattatgacttcatttactaaaaattaaattaggaagaactagaagtattgaaaacaaaaatgttttagtatatccttatttattagtagcctgaaaaaatttttagtgtatatttttttaataataatttaggtcataattatttaaaattattagtaaatttttccattttttaatagtttataatattaaaattaaatttaaatattttattttactatatgattattttttatattataactattcataactttttaaaaaattatagtttatcataaataattataacataaaaaaactcaaaaactc

SEQ ID NO: 390636 - DNA, 2719 bp, Cannabis indica
tgtgagttttgggtcggtcatgctttgtacatggctcttaagtttatctatttgggcatgcatcgatatttcaacttgacctacctattgaccgacctgtgtcacatgtggatctcttagaatacgattgggtacatacttatctgcattatttggttgaatggtaggagggatattctgacagtctaaatctcttttgtgatttagatcatacctgaggtcgtgcacggtgcctaactagtcaaagattgattcaccttgaggccttcttgtctaactgttgtcagtatttattttgctaagtatctctgtccaatgacgaatattatcctaaccatttcctcccaagtaatgagctggaaagacttgctcgtatatcgtgtggcccaaagtttgactttgtgaccttagattagacgtctcatttctgtgggttcgctaagtgcttctagttggacgttcttttggcccgtattgtggttcagcagggacataggtattttccattggttgttgtccggtgatttgataggctctcctgattattacaatggccattctagaaggatcatcaattacctcttgttgggttctcatgatttccaactattgatccctcctctgtttgaattggcatctttgctctacaaaagaaaaatttatacctgcttggtatcttgctaattgtaatgaagagtgttattatgctcttgcatttgccttgagcagcccgcaaattctatagtttagtgtcatcaccgttcaacctttgagtatttggagtatatggaattccagtaatgggggcagtttgctcgatccgagtgctggtgtttccagcttcttgcatgcccagagtgaatacagccaaagaggtggtcattccatatcctattgtttgagggctcgtttgaggttaaggagcagtagggtcgagatctattcggactggatctcttcgatttgcaggtgtttacacataaggagacatcaaattagtggtttcagtctgatttcccctccgtgtttgtacaaccatcttcgtatatcctaaaaagttaaagaacaaagattgtgtttctttactctcaatggaagcacaaaaaatattgaccttgcttttagccaacgatagtgagttaaattaaagcaattaagaataaccaaataataataatcgttgaagattaagtaaagaaaataccaaaattattgtagaggttcagccccttgatgacggtaatatcctactcccatatagttcgtattaacttgtgagtagagaagcaagaagcccttgatatctcttgaaagctcttacaatgatctctgagtgtttcactcttggatctataattctttgataagatttatctcttgtattttttgtgtgaattttgttccccggatagtgagacaactttcctatttatagggaagtattacagcgaattggttttccaaaactaataagaaacaaaatggataactatttactttttataattacaataaaaatgagaaaatgaaataggtttcctttctttcttgtactgcgaatctatcccatgaatttaaggatacatccgtggcttgcaagcttgaaaataaatgagacatatcttctaaaataatccatctcgcatcttctagtttgtgtatgtaagctacgtgtgtgatggaagctgatcggatatttcatcttctgttatgacttcatgtatcaaatctccatgtatggatcattataagtggaattgtccatctaagttgcaagattctttccacgtgtcacccagatggatgtcacatcaccttgtgtggaaattaggataatatttaggatttatggacaaatagaaagttttttatttcatgaaattattagatattgtttttttttaatgaatttctctatttctgctaggatttttttgtaacttataattgtttattcccattctgaaagtgaagtaaacacatgaatgtgaatactatcgaatcctatatcgattctagatttcaaaataaataatttattctggtttcgattcctttatcaagagtgaatccaattcttagtcagtttgattcttaatcaatctaattacgtgcaaataaatataccatctaaatagacgtaactccaaatttgtcgcgacacagggagtgaactactataaattcttgtgtgtgctctttattttacttagttacatctaactttcatcttgtctatacatatgagcgagttggtaaattttttgcgtccataattttttatttcaattaagtgtaattaatattgtaaagatcttgtttgattggtaatataacttaatgatcacctgctttctatataaaggagtaatcaagatacaaataaactatcacaatcgatcttctaaaaatagactaagcagaccaatctctggctgaatgatgagtgcacatttgtacactcattctgagtcaattattagatggattagtatttatttttgaatagatttgatgttctccaagtgtgtaggtatgtgctgaaaagaaattttgtgatggactgatctctttgaacccatttttgacaatgatttcatcattttttaaagagcttatgaaactcaaaatgatagagctcgttccctgctttccaaaacatgttaaatcatcccatttggagtccggacgcaaaaattatgcatgatttactaagcaa

SEQ ID NO: 390637 - DNA, 1975 bp, Cannabis indica
tctcatcaaaatttgtgcacaactttatagttttagaattaacacttaaagggaaccaacattcgatccgtttggaaagtttatccacattattgtattaccaaaatagatgttgtaagaatattttctctgagaagctttaacaaatgaatcaaagaaaataataacatgaacaggagttcatgattactcaaaatttaggttgatctactattgatcatcattatgatatgaattatgtctttatagtaaacgacatgtaagataacgacaactttattcatatcggtcattgtcatatataatctttattatatacaacaccttcactttgatgtcatactacatccgtaatctgaatcgagattacttgcaccgaagaacgaacatcagtgaaccatacacgcaaccattaattaaagattccataactttaatacgttgttgactattttattcatagctaagtgatcttagttctccgtacaactacaagtcacagtcttgtatatgaataaggaatttttccatatttatatataaattattcaataataaatattaataagttaacattcatgctcatattataatgttcaactctttattaataatcaaaaatatatttatagacttttgagggtataaaccctaataatatcccacttgccctaaaagcaaattgacaatcttccttagtcccatattatttatatgacccataaaagatttcgcgggtagcatctttgttaatgaatatgtcaagttatgttctcacgcaatctttaagactgttacatcacctctctctaatatatctcatagtagatggtatgtcctcttaatgttcttgcctctcttgtggctcattggttctttggagttggccaccgctacattgttgtcacagtagagcaccagtggtttttctacttctataactacttccaaagctgtgtagaattttttcaaccaaatcgctttcttagctgcttcgtaagctactatatattcgacttccattattgaatctacaatactagtttgcttaatgcttctccagactacagctcctccaccaagagtaaatactgaccaagatatcgaattttaattgtctttgtctgattaaaaatgagaatcagtatatcgagtaggattcaactctccaccgaaatatacaagcatgagatctctcattctccgaagatacttgagaatgtgctttacagctatctaggtgttctaaacttgaattagattgataacaaataataattcctacagcgtagcatatgtcaggccttgtacacaacaatgcatacgtcaagctcccaacttctaatgcataagggtactttctcatgtgctctttctcttgacgagtctttagacaatgatccttacatagagtaattctatgtctagacggtaactgttctttcttggaattctccattgagaatatttttagcaccttatcaatataagtagcttgagaaagtagggatgctcaacaaatctaaaaaaccaaaaccgaccatcaaaccaactagaccgtaactgaattttcaattctacgtcatcactgaatttggcagtcggttttggttataatttttttgatatggcgatcagtttcagtttttgaaataaaaaaatagttaaaccaaaaaattgccaaaactgctaaaaatcgccataaactgcccaaaaccagctaaaactgtccaaaactaccaaactgaaaaacttctaaaaatcgccaaaaactcgatggtcgatcttatacagttataatttctaaaaggtcggttacggtttttgttaaccataactgacccgtcagttacaaatttgtaaaaataaacaataaccgaccaattttcacccccatgagaaagtactaatgttctccgctttctatctctatagattttgatctcgagaatatagcttgattctcccaaatcct

SEQ ID NO: 390638 - DNA, 819 bp, Cannabis indica
taataataataataatgtaattagacatttctagtaacttttagcatttctaagaataaaaatagcttcaacatatataatttacatattatatatcaaaattttatcttcataaactaatgttatattaagcttaatttaacaatgagtaggtagctaaatttactaaccatgttttccttaatatccaaatacatattatacatattgagaaatgtcattgctatataagtatttagtctttacatattttaattttataattattataaatatcattaactatatgctacttctcataatagtagtgatggatgatgatgagtgttccttttgttttgttccaccgactttagtggtgtactatactccaaagtactaatgctatataatggaccaaaaaaggagagtcccaccatacacttgatcaatatgaaagctattcatttgaggaaaaatactaagcatttccatagctttaaatcagcaccaagagacaagaggtagtgcagaagaagcctatatataatgtatggtcatacacattgcaaggagaattaatgctaaagagaatcttagtacccaacatcttatatatccttatttttgtaaataaatatcttatttcatacattttaatataaattaattttaaattaaactatataaaatttattactaaattacatcaataataatatgtccatatcctaaaacaaacactttacgttggaaatgttgtatgcttactaaatattgaatctaagagcatgtttggtattgttttctgttttttgttttaaaaaattgtttttagaa

SEQ ID NO: 390639 - DNA, 929 bp, Cannabis indica
aagaactgcatgtagttgcttgactttggttaaaaaaaatgtgcatgatatttttcaacatattgtttgacactttgtattttcattcattgaatgtaacactcaacatgtatacattgtgtcttttatgatgaagatcgacggatccaagaaattcaatcatttgatgaaagaacatttaagtatatattaaatttagtaaaaaaataaataaatattatatttaacataacatttataattgaattctaagacatcataatattttaaaaggtaaatcgatataaaaataaataatcaataataataattaataaattaaatatttaaaaaattattaatgacaatattctaaatgaaatatatctattctttataaagtgtggctatgtaacagaatttttgatttagcgatacttttttggtttctaagttaattttaacagaatatctttctacttaacaaaatattctttattaattttataatattattatatatatttaaaaataaaaattatataaatattttaatttaaaataattaaaatattatagatatttttaatttttattttaatctaaaatacttaaaatattatttttaatcttatttttaaatttattgatttaactttaaattaaattaaaatgaaaaactatgtaaatattttatataaaaaaatttaaatttaaaatattataaatatttttaaccatatttttaactatattattatttattttatattttaaattgacttcacacaccatatttttcataaagtttgcaaataaaaaaccctttatatcaaatttacgaattcaatttatatatagacacactcaaatttggttatgtaagtttggttaagaataagtaaattacaatatatgtattatcagatacattacctaattaaaaaaaa

SEQ ID NO: 390640 - DNA, 945 bp, Cannabis indica
gatatctctgaattatgaaaaatctcaagaaactgataaaagaatcaaatcacattgacaagattttttttaatgaaaaacataacattgttagaatttttctcgataaatttgtggggctaatatgcatttattttaggagattttttttaaaaaaatgtcatacatcgaaattaaaagagagacaattggatttgatctttttcctcgctaattaacactgatccaatatgtagttaccaagtactgtaaaaataaaatacctgaatatcttgattactattgaatgttaacaaaacagattaatgattcttgttcaatatgagatttatttttgtttcttttgaaaaagaaaaaagataaatctaagtcctatcctcataagccaagttagtaacactgataaaatatatgcataggttgatcaatgatgagaacaaaattgagacaagaggtgtccaagacaaagagaataacccaagctaagaaccatcaaaaatacagtttatataaaattcaagaccaccaaccaaaaacaagaaaccaaaagtagatccactacgtatccaaggccttgagaaagctttcaaccgcgttgaaaaaccaaagaacgtaacataacaataatgcaatcagaatcaacgaaacaaataactaaggtgtcatttggtaacacttttattttctaattttttaatcacaaaatgaaagtaaaatttttgtttttaaaaatttagtttttcaaaaacaaaaatacgttctgtaactacttttgttttttaattttaaaaacagaaaacaaaaatatgttctataaagttcatttttgctgggtttagcgccagggccgtggggggatttggatccaggtctgatcaaagtcgaaaatattgattaagaaaaaaaaatctattgaaaaaaacattgaaagtgattttttttttt

SEQ ID NO: 390641 - DNA, 605 bp, Cannabis indica
aaaatttatctaatttattttggtctgttggtccatgtattaattgtaattgaaatgagtaagatggagatatttgatcaagttaagcaaaagaaaaagagagagagagagagagatatttgatcaaaatatatatagatatttttctattattattacccatgcattattattattttaaaaaagtgataatgacaaaatagtgacataataatatagaagcagatactaacaatgagcaagagtaccagatgagtacgtaccaatattattattaatgttattgattttagccacacatatatatatggagtctaaatttatcactgctatacatacaaaaaagactttctatgtcgtttcgttcagtatcacttcgatcgattcttccagttgatgtattttttcttttaaccggatatatttaaactaacatgtatataagatctttcttgtcaaaaataaaacatataaatgggtcttgtttgaaggcatataaatatactaggtgattgctacgtgtcaagtcacgtagtgttagttttatttagtaatttagttttttattttaattaataattaaaatagttataattatttgaacg

SEQ ID NO: 390642 - DNA, 1097 bp, Cannabis indica
gtctaggatatctgatatatgtgaatggcaaaatgatgcatgtaagagttacatttttaggatatggatatgttgaaattttcctgccaagggagtgctggtgctgtcttggaaaattagggtatggttattttgaacctggtagacttttgcatgtacttaggattctaagattagggtctggaccaggtaggacaaacttttgagtgagtgttaggttcgtccatcttctgcacgtctatttggagttattaggactctgaatggacccaatttcttgaattcacttaaatcttattctagtaattttcccttggtttctcaatttgtcactttgagtcacctagtaaggacatgcttctaggagtgatgggtccagcgaggacttctccaagcaatttttggggaggccttccctgatgcccatattgtcatttggatgtttggtatctaattgcttagtttctcctttcttttcgtttttctagtgatggatttgaatgaggaatttcacctcaaggtagtggatattgaagacaattcaatagttgctctcgcgaaggagatggctactgaagaagttttggtagaggctcctatcggggaacttcaacaagacctttcctagagactactctgagggttgatccattctaggtagccataaaatccaagggaaaggggaaagccaatgctccacctcctgcacctgtgttcaatgcttccatctggaagatggatcagaaaattaacagcttctgttcatatggaatggtggatctttatgccatcaaagttggagtgcttatattccatggatgacgagacacaaagtatctattgcgtaagagtctgcttctgtgatcacagataggttcagtgctcgaagctgggctcacattgtaagtggggcacatctcccgttgaggacttacttcacgaaattcattgcactaatcaggataggccccttccaattgatacctcaaaattataagctcttagccaggtggtacatcttctgtaagatcaacaaaattgaggtgcctaccccagaggagatcctgtatttttatggcgtgaagcctcaacccatg

SEQ ID NO: 390643 - DNA, 1725 bp, Cannabis indica
catctgacattccatagcaaaaaattgaagtcttgcttctatttactttcaaaccgacattttcagaaaaggtttgaaaaagttctcgagagaagcatgattgattaaacatcaccacagaaaagagcagaagatcacctacaaaatagatatgattaagctttaaattgagcatctaggatgatgtttaaactctttcctcttagaaattttggccaacaaccaagagaggtactccatttccaaaacaaacagcaatggagacatttgatttctctgtctaatgcctctttggagggaaaataaccatgcaatgaaccatttaccatcaaagagaatttcagtgttgtaacacaagacatcaccaagttgataaaagtcataggaaacttaagagccatccacatttctctaataaaatctcaatccatagtgtcataagctttctgcaagtccattttattcatacaataggggctattgcttcttctcccataaagcctaaccaaatcttgacaaataaggatgttatgaccaatgtatctcccatggacaaaattaaccgttttaagttaggtaggacttgtctcatcctattacaaagaactctagtataattttgtagaccacattgcaatacacaattggcctgaaattactaacactatttggacatttaatcttaggaatgagagttaaagtagtagcatttacctccttaagaagctttcttaaattcaaaactgcaaggacagctctagtgaagtcttctccgattaaatcctaattttctttaaaaaaaaaagccattgctaaagccatccaaagagctttattattcagtatggagaaaagagaattttcaacctcctccttcatataaggagccaacaaaatttgagtatgagcttcggttatcaaaggcccttcctacacaatactagtaatcacatattttctttgctctaacttgcttcccaaaagattattataatacccaagaaatgcatcactcaccaactcagaatcattttgccaaataccctgatcatcatgaataacatcagttgtattttgaagccatattttttttcatagatgaaatatatttgagtttgtatctccatttaagtactagacaactttggctttctgatggagaaaagaagtatagctttcagagactttaatatgctctaatttagccattttctcagcagtaatcaatagggcattcatagaatctttgtgcaagtctaccttacaatcttccaatttagttttggcagccttctcctgaccctccagatcactataacctagcttattgaggtcttttaaaactaatttgattctcctaagcttttgacagaaaacaaacataggagtacccgaaatgttctctttccacatcttttggacacttttatgaaaatcttgatgcttgctccacatatcaaagtaacgaaacaattttcttgctcagtttctagaaggatacatcgcaagcaaagctgggctatgatcaaaatcaatcttatgaaaaaaggtgacttcagcactttcaaaagtgtcaatctaactattgttagaagcattctatctaatttagcatatattctagaattagggtcttgattattagtccaagtatataagcaaccagaattaaggggagttatatttgcaccccacaaaattataaatacaccccattattaaaaa

SEQ ID NO: 390644 - DNA, 610 bp, Cannabis indica
tttttttttttttttaagaataatcgagggaatagagttaaaaggtgcttaaaataccaattcaactttggagggggtaattagcaaccgtcaatttaagtaggatgttagatacacaaacaaacttcttggtaaatttaacttacaaatgcctcattatattaacatgtgttttttatttaatatttaaataggaattgaattgacatttcatgttcaaaaataatgtacgtatgatagaatgatagtataacgttaaagacggaaaatgacccatttagaatataaactaataataaagaaagattattctgataagtttcccacactacaacaaatatgagtattttgggcaacaaaaaccgcccttaaaactatttaaagtcgcccctaattattattagaggtgacaagtcgtctctaaaaaattgctccaatattattaggggcgataagtcgcatctagttgagggctacacaaatttttgaagtttacttttaggggcgacattatagctcttaagagcatctccaatagtaaaaaaaaagaggatgtttgcttaggcggatagatgatgtggcaaaatattgagatgctatacaattggag

SEQ ID NO: 390645 - DNA, 594 bp, Cannabis indica
ttagttaaaatgatacgaaaaaattagtcaaaatgaccaaaggggaggaagagaattgtactagatcttattttttttttcgttttttttttttcttagtttttttttcaaattgtggtgcaatgactgtctttttatttatcatcattaattagataaagtcggttttctctaaaattatagtgtaattatatattgtagtatttttttttaaaaaaaataaatttaaattttgtgtaatacacattttttaactacaatttttttaatcgatattgtaaatttgcatcttaaaatgctattctacattgaagcacaatatcatattgtaacaatatcatatttgtttactttttatatcaaattcagcatacaattgtttcaaaaataaataaataaaattagcataaagttaaaattttgcattagagatagtcaccgctaaactatcatacttttgttagaaaggtaataattgtgttctcatcttattcttatactgctattctaataatggagatataaataaagggattatttcacaaatatataaaaataataaaaaaattataaaaatacagttgtacggaattt

SEQ ID NO: 390646 - DNA, 665 bp, Cannabis indica
aaatatggagaggaagatgcaaataggagatcacatcaagagagagggtcacaccgaaggtactgttggcaaaatcattgtatactagaaagacctaaaacaacaggtagaaagttaaaattgtatagttgaatctccattaacttatgcttttttgtattttgttaacagtaaatttactttaaattacaggcaagacttgaataaaatacgaacaactaagaccagatgaagatttatagtggatggagatctaagaccatagccggccacattttgggcagggtatgatgttataaatattattgcctaaaaattaataatttttgaataatatatttctattttcttatgtataaaaagtaggctaatcctgagaagggagaacttttcagtgccgtgaacagttttcaaaagttccactacaagaacaacaaatgtcacgatgaacacacaactattgcatgtaactaattttatatctttaagaagctcgttttatatatatacagtagaacctctatccaagaatacacttgggaccaagtaaattatattctaattgtgaggttataactaaatggagttacactagaaaaaaaaaattaaaaaacaaaaaaatatcaatgtaacaataataacaataaataatcattaatactata

SEQ ID NO: 390647 - DNA, 550 bp, Cannabis indica
tatgaaacttttttatagaatcctatatatggtgtaattttcaattcttaatctgaaatccatgtcatatgtcaatatttgactttttgttacaaacgttacttcctaaaatactggatgctggatgccccttctcaaaacacaaaatttagacgtattatatatgtcatacataattgtacatttcaatagtaaattaaaaggaaaaaaaataaaaaaaacaaacacaagtgatgatgaacaagcttgaaagaaaccaacaattaacttctgcattataatctagttgggtaggtaatactgtcagaaataaataagagattataatgaaaagggataattgcggcaaaagtctccaaaaacttagggttgatgcagattaatccctaacctaaaaaattggcggtaatagtccccaatgtcacattttctgtgagttcgttggtcctctttttaactgttccattaaacccaaatgaaatgccacatgtaaattttttattggttaaaataatagttgtaattaaaaaaatttaaaataatataaaaa

SEQ ID NO: 390648 - DNA, 877 bp, Cannabis indica
aaaaaaaaaatataggcctcgatgcttgataggagctaatactcatattacccattgaaaagtcaacaatttcgggtaataggactcacatttctgacagtcacaagtatagtaacttccaatagagttgcactaattgtgtcaagtcattatccacgacgtgtcatttttttattggtatatttaatttaatttaaataagttataaaaatctaatgatatgggtcaatcagagattgccacatgtccattaacttggcacttaccgtctagttacctacagaaatctcaaaaatataacattgctattactaccgttaaaaattaaacttaaatatttatctttaattgaaaattaaacataaatatttatactacaaattatttaaaatataaagctaatatatacactgtatgtttcatatttaagtatatacttttagtgcacatatcattacttattttacttatatatttcaatacttatatatgtacaaaaatattaagtgagtatatttatttaggtggcgtttggtaacatttttttaatcagttttctatttttaaaattaaaaattaaaaaagtgaaaatatttttcaaaaatatgttctataaaactgttttcacgatttcaattttttagttgagaatcaaaattttaaaaatagaaaaagattactttcaatatttttctaaacagttgttttccttaattaatattttagacttcgaccagactcggacccaaatcctcccacggccttggcgctgaacccgacctctgacccaaacccgaatccgacctcaaacctagacccgacataaataaaattaaaaaattaaaataaaaacgaattttacagtacacttttattt

SEQ ID NO: 390649 - DNA, 1331 bp, Cannabis indica
tttttctttttctctttttctttaattgaaaattctaaaactaaaatcatcatttctctctctctcttcctctcctgttaatctctctctttctctctacttgtgcgacactggctacggacgaactaggagtattgtgctctggccctcctctagtcccttttcccaaacccacaaccccaaatccctgaccctctacagacccaaacgccattgatcccctgcaaatcaaaatgttatcgaccccaacgaaccaaaacaagtcgacccttaaaacacaaacgtcgttgctcccctacaaacctaaacctgtcgtgtccttgtcaaataaacgagaccaaagaattctttgtaataggttgtgggtttaagatttgggttatttgttctctgggtggtggtctcgtcgggatcaaaagagagacagtggagagaaggaaaagagagacgcggtcttgccgggattggggtatggacaaaatggtgctaggtttcggggtgggggttggtgggtggtgagtttttttgggtgtagtattctagacagtgtgaagaagaagaagcataaagaagaaaaagaaaatggaaagaaagaaaaaaaaaaaggaaagaaaaaagaaaaaagagaaaaaatatgttttgatttttttttttattttgaagttatatttttaatttttaattattaaaattagatggactaatgaaatttcgtcacgtgtacacttgtgtacaccatggcggtccactttgggatttaacagaccaaagttgagggaaagactacatagaaaaacgattgtgaagattggagagtttaccataatttttccagtttaagagttaaaccgtgccaaacttcaaagttcaaggagtttggtcgcaaattacccttataataaactaggcaatataaccgccagaagcgcaatcattatactaattaataaatattttttgagttaatttatgattttttttctcattttttataatttatggtcactacattaagttatgtagcgaatatctctttattataaaaatgtattaacttttgtgttaactttaaaatagtaacgaacaacggtcagtttggtaggatttaacaattttattaataattttaaatttcatattttatcataaatttgttatgtgaaaataaaaaaaaaataatctccaaagtacaaaaagtgcttaattcattccttgatttcgactatttaaaaaattgagactaaatttataacaaaacgaaaataataacaacaatatttaaatagacaaataaatttataaaaatagtgatattatattttttaaaattc

SEQ ID NO: 390650 - DNA, 629 bp, Cannabis indica
taattaaatgtaaataagttattatatattagtaacaaaattctataacatattgaaaaattataaatttttaaatatgtttgatgaaaaagaagtaggtgtagtggcagataaaatcaaagagaagcaaaaagaaataatatatttcaagcctatatttgacaaaggctggggctgagatctgtgcaagaaagaggaagaaagagagagggggtgaggaagaaagggagaaataaatttaaatttaggattttaattttttgtttaattttttattattttataattatttttttttcttttacatgaattacttgtaccaatcaaaacagtcacgtaattgtatatattgcagcagtctttttcaacatttaaaatttgaaaaatgctaaaagacatgtctaacataatttaatataataacttttaaagagtattgctagttaattgcaaagcgacatgtacgcaatgctattctatgcacatagaagtaaagtaaaaaaaggctaattagcaatattttctcctgaactttgacatgtactaacttctgccccttgtaaatttttttgccattaaaaattccccatgaactattaagattgttaaatttaaggacttttgtctaa

SEQ ID NO: 390651 - DNA, 1354 bp, Cannabis indica
aaatacttttttgaaaacaaaaataccaaatatactctaaaatattccgggactagatggacgtttacgtaaaattaatctttagttattgttaatatgatcataaatcataatttctacataatattgatgctcttaaaagaataatcaagctagagcattgtattcactacaatcaaataataatccaataacgctcttgaaattatccaagatccaagcatttatttagagcattaatagttaagaaaacatacctcccatattgctcatcccttcatattgagccattgttgaatatccaagtctaaaatacactaaaaatatactaaagagtgaagagtaataaggagacaattctggagcaaacccacttagtgtctaaccatctaccgtaacacacactatgcatccttaatatatacatatatctcacatacccatctaaccctaaagggttatataagcttattgggttaataaggactaattgatggtggactataactcaatgggccaattatagtcatatgggtgctctcatgtgcctctaaataattaatagttgttaaccatcccattatggttgtatgagaaatattaggcacataattaatgattgtgattatggtattatattagtccacaaataaataattctaacattctcccacttggacaatataatcaatcaccataacattgtctaccacacataaggtaaccaattaaaaacgtacataatatcatatcgacgggatacatatattatgtatgaattgaccttgaagacattttaattcaataacaatcattaacaatcaaaccaaacatgcatgaggtacaacaaaattgagactatgcgcattcatctccttttgtacctgtcacttcaataaacaacacatatatgcatacatatgtcaacaataactagaagtgactacaatatcattatgcatgttcaaaacacaaatcataagcattccatacaagatactagcatgttcaatacataatagaaaaactcccactgagctcaacagctaggctcctaacaatcccattcgagcaacatgctccaaaaatacacatatgggtaagcctttcgttagtgggtctgctaacatgccagtgctaggcgtgtattcaatggaaataagagactctgtaactttctctttaacaaaatagtactttatgtcaatgtgtttagaacgggaagtacttctaacatttctagagaaagctactgctgcggaattatcacaatacaatttcagcggcctcgagatagagtccataacacccaatgctgaaatgaagttccgcagccatattgcctgacaagtag

SEQ ID NO: 390652 - DNA, 1150 bp, Cannabis indica
cttgttggtgacttgttgtatgggtagggatttttagtaaaatataatgatttaagaatgcaattgtttaatgttggtagtgtattttcataatacctaaaaaattaattatttatcgaaattcaatttttcgatttatttctaaacagtacctatgtaatcaactcattgtattctttatatgcattatatacatatatttttatatattattatttcatctaaataacacgtttcatgcatgcacaaaataaggccacaatataatcatgaatctcatccatttgcattatatttcttgaatctaagttgttgatgcgactttttatcaactgatctaaggagattgtaaaaaagaaagatgaacacaagtaatcattaatcaaagtaaatcggtttactaaaagaaaatttaacaaagatgaacacgatgattttatagttgttcacccccttttatcagtaataggctagtccacttgagttgttattgatctcaatgcttgaggagatttctctagagttatgttctctaagagttcagtcctcaagtgagtttttaaaataagagtatgagagtttgtgagaatgaaagtgagagtcccttttcaaattacatctcatttatataggtttacattctaggttttaaagtatcttaactcaacatatactttatccctactgtagtccaattaagtttaagatgtaaaataataataaaaactcaatcaaaaaatagatatctcttcaattattattttttgactaaatttttagaataattctaagagcacatgccttttgcactaggaaaactcgaatggtcatgggcacatgtgggcagctagttgagtctcttgatggtttgtgccaatacggtccttaaggtgacttggtagttagggagctctttgcgccttgtagttgatataaagaggagcttattacacagaatgtgctcccttggtaagtggtggcacaatgtgctgcttcagtaggaggtgatgcatcgtgctccctcgataggaggtggcataatgtgctgttggaaatattttaccaggttctagatttactaccaagtatgttttattaacatcctaatatgaattctaaaacaatgaaataaacagataagagtttaaga

SEQ ID NO: 390653 - DNA, 748 bp, Cannabis indica
cttataattgattagaaatattctccaaaaactaacatactaaattatatatatctaaaaaagtattaaacaccagtattatcctttagggtttatcagttagattttttatataggattacattaaatttaattagttttattaaaatttggattgattagataactctttgttatgttagtgatcaatagttaatgaacttagtatttatgtgtgtaaaatctaagtgaagcgaagtgtgagtttttctaatcaatttaaacttttgatgagcataccctatccaactagaattaggtagctaacattaatttatctaacattctctatttaagatggtcccaaaagaagatgaaaataagagatggagtgagtagtgtcgagtaatgaaatatagatagacattagtcgttgcaaatcgagacagagacattggaatggccgaaagagaattcgacaagaagtagtactgaccctattcctcgcattttgtaagaaaaaaagagagacaaaatttaagccactacctcttaccctcaacctttctttaactttattattaccagccatatttgttacataactattttaatttatattttgagttttatatatttaaatataatatttatttttaagacggattaaatacttcaacttatattttcgtcattattattatgtacaattatattcaaataagcggtaatttttttttttttctgcgatttcagagagaggaagaga

SEQ ID NO: 390654 - DNA, 1747 bp, Cannabis indica
cctagagctgcgaggatgatagcaacaatgaggcttgccctagagatgggcaaggccttgactgggatgatgatgatgtacctttgtcttgtattgcacaaaatctcgagaggagagagagagagctctccataggtgcctagcccgtgagggtccagtaggtgacacctcctttcgtcttaggcctaaaggcccaacttctgatagacctacacgccctgtgctcataactagggacaagggtaaagctgtagttgtgagctttaatagctcttcttctaatgatgatggaatttgatagtttatagcaccatgcttttattcttgtattgaatattattgaatgcattttaaatttgttactttcattttccagacatgtcttcgaggctgagaggtcttgcaagtgggcctttagataagcctaccagacgagtgagggccaaggtggccagaacctcttccggtgcagatgctagtggaccatcactcctccccctccactaggtcctacacctgtcggccaaggtactaagacgccaagtagaggagcgggtcaactattggtaagaaggctgttgagttagccacttagcgtatagagagggctattccattcttggatgaggctttgcaggagttgggtgatagtatgcctgataagctgtactttgccagacttcgggacctttctctagtgagttatgctttcaagtttgttcatctttttagcattgtatagcttgtcggacatagtgtttcttgcatgtggctggttggccttgggcatccatacaggggtctggcccaccatagcattccaaggaggggactggccgacatgatttgacttgtttgacactaatgttgttttgctttgtttttaggccctgatgaagctgagtttggctcacaacagctaagggggtcttcagacgcttttcaagagcatgtgaaggtcttggaggcatcccttgccacaaaagcaaagcgaattctgagctggaggtccttctagcagagaagcagagaatggtccttgaattggagattatgttgagtgccaggaacaccaagaacaccaaccaagccactctcatctatgggttgcagattgatcttaagaatcacaagcaacagttgtaggaggctcttgatggccaacatgtcattaaggaagattacattgacctgtccaccgaacttacttacgagttttgcctgcgcaaccctaaagttgacttgtcatacatgggaatccagcctttatggagagaacattggcccatgggagggcattgtttgaaagctagatggagagggaccagattgctgcttattgagacgagtcatcattgtgtatctgtggcgaggtgttggcggaccctccagtgggacggtggccggccaggatgttgcccactaggcttgctagcatgatgatgatggggccaacctggactctgtggatctcgacctggcagctccaaattcatctcctgctgcccctgcacacatgtagattgaatttttattagtactcagcgtcatgattgtattgtataaactctattttcatgttttgcgtagcctgtagcttttttatggcatgtggtatcttagcttaggagcattactcactttgccttccatgtggcctatggcgtttttgaaactttatgtcctatgtggtttggatcctttttagtgcactattttcatgtcctatgtggctcgaggccttttt

SEQ ID NO: 390655 - DNA, 1239 bp, Cannabis indica
aaaaaaaaaaaataattatgtacaattataataggtggtcaatctaccgtattccgtactctctactccctagtggccatatgtataacatttagctcaaagtaaataaatttaatatttgggcccccctattcaattctttggtagtatcatatgttaaattaatacaattaacatgtagtatcatatcaggcctatctatgagtcaatgaccacatcaatgttaataataaagtatttgaagtacatattctctctttctagatttttttttcttttttttgaaatcacatattctttctttctaaaagaaaaaaaagttattttatgtcaataaaaccctaaacaatgattttcatttcttttctaataaagagtcataacaatgtaatgtaggagcatggtgataaagaaggaattttgggtcaattagttgatcgaaacccaataagacgaaaagcagagcctagtgatatttcatcagttgtggcttttctttgtttctctgctgcttcatttgtgacaggccaagttatttacgttgatggtggatttactgttagtggtttcccaaacccatctccagatcatgatgaggactagaactagaagattatatttacatttcaataattatataaatatgcgtggatgcaactctctacctcaaataaattaatttcgtgtgttttattggtcgatacttatataaatatgaagaataattaataatatctatgaaactatgttacacttgcacgcacaatattatttgtttttatggggatttgcacgctagaacatctttaaggagttcgttaaatttgatgtcacattgtaaaattatattcgctctaatcagaacacaaaaattatagtcttctggtaaattacaaaatagtcttcaacattattaaatagttagtttcacatcttatctctgaaggttcatatttatgttattgttttttctggttaatgtttttggcgagtttaattttaattaggctaataggatttttgtcccctgaactttgacatgtaccaaatcatgctccatgaacttttaagatcgttaaaaatgcccatgaactattaaaattgttatatttaaagacttttgtcaaatttcattcaattttactatttaaaagattatttatgtactaaatcatgctccaaaactttgatatctaccaaatcatgcccctcgaactttgacatgtactaaatatgccc

SEQ ID NO: 390656 - DNA, 952 bp, Cannabis indica
aaaataacttgcaatttttttttattgaaattggcaaacatgccttattacatcaaaagtgggcaagtcgtgcctttacattaccaaactttgctggaacgtatgatgaccagctgtggaaatgaacttttcaagtacaccaaccagcttaagtaactgttgaaaagcaacttatattggtagtacttttgtaggtgctctccatttcaatagcaaggcactagtactaactttgtcttttcaccgtaacatgctaacttatatattccagatgcgatgacctcaactactccgtacttagtggtaagtcatcctttggtggaatgatgggatatcatacccataggtaaggataagggtaatgtcacacgtggttgaagattgtatcatttatgaggacgtagtcatcaatgatgatgctttgtttggctttttgttgttaataaagttgtttgcaccgttatcattgtttgccctctttccactattaaagccatttttattgttgcccctgaccctgggagccttggccactagagcttgctctattcttgtttcccttagcttggttgacgcctttgggatttcgcttagcctcttccaatttaataaattcatcaactttgttgaggaagtctttcatagaatgagttggctttctccttgtatctttctatagttaaattcccaccgtggtgcccccattatggtggctcgcttgctgtcgtcacttaggttctttaccttggtggcttcatgcatgaagtgttggatatagtattttagtgactcgtcaggcctttgcttaatggcaactaagttaccttgctctgtcagtatctgtcaggctgaagagaattgggtatagaataacccttcaaacttgtcccaagagtgttgctataattttaaacactacgcaagtatacgcaatcaagtagtaaatctcaca

SEQ ID NO: 390657 - DNA, 784 bp, Cannabis indica
atgtttgttcatttttatcatttgttagattttatgttattatttttatgtttcttcctagttgttttgcagtgactgtgaccttttctagcacctttgcagagtactttacttataataagtctaatccttctcaggattttgatgttgaactgcaccatgattttttggccattttttttatcactatggtcggaagaagcaagtagaaaatgtcgatagggaattcgagtctccatcaaatgtctaacatttttttttaataatatgttgtttttaagttgttgctatgttgtttctgatgactgaaaacaatctttgcatgttgtcatttttatattttctaatgttttcagaatgttatgggtacttatttttataattttatgttaaatatctatgtaatgaatgatatctctctttaatatatgtataagtttttatgtttatatatgtttgagttgtttgactgttgttttataagatattttgttactttttttattattaaaataatataaaaaatataaattgttcagatattattataaagatcattgacatcaacatttaataataatagaaaaataataaaacttgtacgcaaattcttttcatcagtatcatatgctcaaatgtgaacctaagtcttcatcaaccgttgttaagatacaatttgctattttggatcatattctttagttgtttgcagtttttgttgggttttgtgccctaaataaaatttatttcaatataatcagaaatcgcactctatgctgcatag

SEQ ID NO: 390658 - DNA, 1598 bp, Cannabis indica
tgccatctgcaaccagtaacagaacacacaacatgtgcaccaggtcacagtcgggtattcgaaaaccaaaatcatatatggcaactaagcatccgttacctgaatccgtcttgcctactgaacctaagtcactcaaggctgctcttgctgatccaaactggaatggggcaatgaactctgaaattggggctctacacaaggcacaaacttggctactggttccacctgaagataacatgaatataataggatgtaaatggattcatcgggtcaagttaaacaaagatggctctctaaatcgatacaagtctcgactagttgcaaagggatatcttcaagaagctggaatcgacttcgatgaaacctttagtcctgttgttaagccaacaacagttcgaactgttttgtctttggctgtctcgaataattgggaagtttcacagtttgatgtaacaaatgcctttcttaatggtcctttaactgagacagtttacatgagacaaccccccgggtttgaagacaaagaccatcctacttatgtatgcaagttacaaaaggcaatttacggtctcaaacaagcgcctcgcgcttggaatgacatgttaaggcagacacttgtttcatggggatttcaaggctcacgggctgacagctctttatttgtatatggttctggtgctaaccttgttatttttctagtttatgttgatgacattcttgtcacggggcctaactctactcttataaacaaattggttggtgacttaaacaaaagctttgccttgaaagatcttggacaggttcattatttcttgggagtggaaatttatcgtgacaatacaggaatgtacttgtctcaaaccaagtatattactgatttacttgtacgacttaaaatggaaggagcaaaggcttgtccaaatccagccagtgcatcaactcgtctctctcttcatgacggtgaaccgtttcatgatatcacattataccgaagtacaatgggtgccttacagtatctatccctaactcgtcctgatgtggcctttatagtgaacaagctgagccaatttcttcacgctcccacttcagttcactgggaagcttgcaagaaactcctacggtatctcaaaggcacaatcaaagagggtattcatcttcggccttcatctggtttcaatctctatgcctactctgatgccgactgggcatcgtgcattgatgatcgtcgttcaacaggaggctacttggtttttctaggggagaatttgatcagctggtctgccaagaaacagcaagtggtggctcgttccagcacagaaagcgagtttagagcgttagccaatgctgctgcagagttgaaatggattcgctctttacttgctgaacttcaagttcaactatctcaacctcctgtcatctgggttgataaccaaagtgccactgcattggctgccaatccggtgtttcatgcacggtctaaacacattgaaatagaccttcactttgttcgtgatcaaattctggagaagcagctctatgttcgatatgtgcctgcaatagatcaatctactgatctattaactaagtctctaactaca

SEQ ID NO: 390659 - DNA, 1420 bp, Cannabis indica
atgtcaaatattggtaaaaagaatagacttgatctgattacaattttctttgaaaaaaaaaggtcttatctcatttttgcatattttgtgaaaaaaaacctaatttctatataacaaaatgcataaagaaaacaaaaatattataaaaacaaataaaaactcaaagaaatatcacaacaaaaatataataacaaatatttaaaattaaatcacattagaaatttttcataaaaataatatacaacagattatcataaactatatatcactcataatatattttgtttgatttatcactcaaaaaaacaataataaaaaataaatatcactatcatagattataaatcatcataaatatcattatatcaaaatataaaaaactgttattctaccaacaaacttaagaaaacttagaactaggaatatatctcattaagactgaacgattcagcaaaggaaaataaaaaaaatagtaaaaattaccttacctctaacgaatgcaaggtcgtgtacgacagttcggagcaacgaacttgtttgattttcttcttgcataaataataataagaacaaataacactataatgaaacctctgagttttgcaaaaaaaaaaaagaagaaaacataaatgagggaatctaaagagcttacaggttgatcgtgtgtttcatcaccgattgtgtgccgtcgtcggtcgtataaggtaggccaagaagagagttcgattgtggctttagctcagacctcaggcgagagaatggagggatcactcggtcgtggctgagacctcagacgagagaggttcttagagttcagatgaaaaaagaaatgaaagttttgtgtttttggctcatacaagagagaggagcaaaggagactgatgtcaatgagatgtgtgtgcgtgagagactttagggttgcttagggtttttttgtttgttttatgtataaaatataatatttatacatgtattataatttgaaaaaaattattaattttacataagtaaatttataaaacatatgtatatattttttttcagatgtaattattcttatatagagtttattttattaatacgggacttaaaaaatgtataactaattacaatatagaggttattcttatttataactagcctggacttgatttttttataacaaattagaggttattgttgaatagagtattcttgaatagaggttctactgtatatagtaagtcatagcacatgggttgggttgggttcattgggtcagcccaacccatttccaacccatatcatgcggcctgttaattttttaacccaatataatttgggaaatttacatggtatactaacttttgtcatttttttacaaaaatactgccaggcagtatttttacttttttactgtatttttttataagtttcatac

SEQ ID NO: 390660 - DNA, 685 bp, Cannabis indica
tttttttagcgatggtctccccaaaaattgagcttttaagaccgttccgaattctgacttttgtagtagtgttgttttcttatacgggctcaaattcgtgttcgataattttgcatttctattacaatttaagagctaaatattgttataactattttgatatcttttttcaataatagttatatacaatcatataaaaaataattataattattataatttaaatattactattatttttaattgataaataaatatttatcaatgctattattattaaattattgggtttttttagtgtatcatgctttttaactaatctatctgtgcttacgtgcagtgctttcgggcttatcgtgcctaatcctatattttttgtgtcatgtcgtgcctaaattcatgtgtttttcatatcgtactgtgtcgtgcctaagcatatattcttttgtgtcaggtcgtgttcgggcgtttcgggctcatgccaatttcgtgtcatgtcaaaaaattcagcccatattttcaacgcattagtcatattctatgggaggagtactgatcgtatgtgttgaagaccatgtaactagttcgaatatagggcctacataaatttttttttaaggatttttttcatatatatatatagaggaaaatgtaagagaatttactttttatatgacataaataa

SEQ ID NO: 390661 - DNA, 1343 bp, Cannabis indica
ttgaaatttaaaaacaagcaaaaactcagggtaaatcgttagaatacctagaagatgaaagcttaacgtgaagatacaacaccctactggtaggaaaatcagaggaaaaaaatcagtaatctcagaggtcaatagtgcaatttgtgttgcaaacagggcaataagaatccaggcacttatccagtcgaaagaacctaagctttttcatgtctgtcctcatgggattgcccttgacgctgtaaaagtaaaggatctcctccagggaaggggcctctagcttattaatcttacagaacaagtaccacccagccaaaagcctatacaatgaagggatcagttggaaagggacaatctcaattttcacaattagattcacaatataagttcatagaggaaggtgagcaccagtgaaaatgtgggaccaactccatgcattgaacccctctacactaatggaagcaaactccccaatgacagaaagttggtgccgcatttgtccaaggacattgcaaagaccaattactttagaataatcttaaaacatcccataagatcgaaagcatttggctttctgatccatttcccatatggactcatcacgggcctgcactggtagacgagttttgacccctttctctcttctaacctctataagggggtctctcttagtggtgggttcattttctggaatagtttccaaggccgccttaggttgaaatgttaccgcatgtcccttggtttgatcctgtcccactgaaatccttttgacaggtggaatagacacaccctcggtaggtgtgcccattttatgagaaggtcttgattcaaattcgttgctaccaacacaaaaaatgaaagggaaaagcaaaccttttgatggatggaaggacaacaactaccaactaaggccccaggcaacctagtttctcgggatacggatgcaaggacggagtttcttttgtacactaccttatttttcaacacgtgaacagtcctagccctaacctaaacaaaacccttttgctccagacgcaaaataccaaaagtttagacagcgggtttgttagaactattattttctgtagtgacaaattatgtccagtagtattccagttgcgtctgggactcgtagtgttttgtctggggttcgtactgttagtgttagtccacgtcagcaaagatattttaggttttaattgttcagatggtaacagctgtctatttcgggtttcttggtttagctgggtataaatacgatttctgggtattttgttgacgaaactttttgatcggagatttggggattacgttcgtttcttttcgtcttgtttcttctgtatgtt

SEQ ID NO: 390662 - DNA, 4281 bp, Cannabis indica
gcttttaaaaaattatactgttgaaaaagaaatctctaccctattttatcaaaaatcttctaaaatcttctgaaatctcttgcaccaacacatgcctattagaatcagccataggcacaaagaggacatgacaaagatgtcagaactttccttctatatagtcctgttcaagttggaaggatatcatgaaatctccaaatgtaagaaaaaactttctttggaagatgtaatttctaaaaaaaattcaacaactccacaactaaaacacatcttttgaagagaggatgggagtcagacttcgccctaggcatggtcaggcctgtgtttaaaactcacttcgagggaattaaaaaaaatctttttaaaattatatttttttatactgtttttaaaaataacacatttttttaaacaagtaactttaattttttttttttgacctactataattcaaggcccgcctgcgaatagccactcttgactccatcatttgaataatgtcaaaaccaagaattagtttctaggaattcacttaaaagtatagatataatacaatccaaatcagtcacataaaaaagtttcttcaatagtgatatattccagctttgtcgattttcctcaaataagtttttaaccatccaagtataatctgtaatgacatttgaagacagtcgaaatgaaaataaacgaggcctttttcaagtaagaaccatcttcatataatacttcttcaaagataaccaagcttggtgatcgaccaactagaaaaaaattgaatcacttgaccatcaaaatgaaatattaattaaatcacaatagtaaaactaaaccttacaaacacaacctctatagacaataactcaaatcttatgattaagacatccttacgaaaaaaaatgtgatataggaagacacaaagtatcaaatcaaatgtaaaagagaaattaaaagatttgaaataaaaatataaaatcaactagaaatagaaagtacaagaaaaacaaaatgaaaatagcccaagattttattgaatttaaacacatccgaatcaaacaataacaaaataatcaacattaattggtgatgtaaatagttaaaaatacttatacaaaatttgttggaaattttctagctacaagaggaaataagagaattacaataaaaatacttaaatacaaataaaagtattacattaagatcataaaaaaactagataagaagaaaaagaataacacacaacaggcttggttaaagctcgaagacctttgtactaaaagtcatttcttccctcacatagacacttaaaaaaaattttaaaaatatttttaaagattttcaagcctcatatgctcatccttgtgtctagaatgaacatatcctcacaatgttttgttataattttataaaatataatatttaaattaaatactataagtaataaataaattagtgtagcaaataaaatttgtcaaactataaaatataaatataaattacatatgtgtgaattatgatccaaaaggagttctacattttttatatttatgattataaaatttgtaactcatctccctaatcatctttctttaattactaaattgagttacaagtggtatttgaatatggtaattatagaaatatagttattggaggcttatttctattatttataggatgtataaatgctataatgacaatgtggaaagttttgaatcgtttggagttattttaaaaaaatgttgataaaattattaattggttacttgttaccatattttgaaattttgcaccacatgtgacatgttgcctagggagaggcgacatatcgcttgaccatttttagcatgtattttttttaacgttttatgaacgttgtgctcgattctaacaattctcataatcccctgttgatttcgaaatctagattagacctctaagtcacactcgctcgctagattgacgagaatatgaaaagtagttaagtaatttacagagacacaactaatttatagtacttcacccatatattgtaataatagtgagattacgtctatttcgagtttttatttctcacgagatggtaattaaagcaatagactaagtatcagaaactccaaactctagagagcaaaagtctagtgagagaagctctaaccttgtgggtagttttctgaatgtgaaaaatgagctaagatagctctccttttatgggtgaagaaggcccacaaaatagaaaaaaatatataaataagttattttccaccgttgatgatgatctaacggtgaaattagcttctggtggtgatggccaaattttggtgcacgacaagtcccgttgcgggttacctggagcttatttttcgtaattcccttggggtgaattttgacaatgatagctttcgtattacgtctggggtgtcacacatgacttgatagagaatttaaatagcttcaaagcgcaagctgaatcgcatctatcaaataaaaatttagtgttatgattgttttactgaaggaagtttatgtctgagcgcccagattgacatccaacgctcaggttgacatcccaacgcccaagttgacatcccagcgcctaagttgacatttgacgtcaacttggatgctgggtaagtgtagaaacatccaagggatgtcctctaatattcctaagtgatagtttgacaccacttagtctatttatatgttttattgaagttggtcaccagttctcgaagatgttgctattttgtaaaaatgagagactgaaaactcgtcatttctgggtgtgttggaaatgagaaatgcaaagttatgaatttgattttgttgatctcatagatcattatatttgtgaaaaactagacgaacggtcgaaataacatcaaattcaaataagctgaacccaacaaaccagggcaataggccctttcaaccaagctcttgggattctatttttgatactttcaaggattctaaacttgaggacagggtctcctcctccaattttgaccatgtcaaatttaatagttgcattggatttggcatttgagcaattgaaggcagcgtcccatgttgattatcaacctgggcgctgggcctagcccaaggtcaacctgggcactgggccctatttctagggacttgggtttgtggttttccctcgagtttacttgaatctttgttatttcttgatgacgggaaaaatattcggaactttttgctgaacttgataggaaacggcccaagttgacaaaatgtcaacctgggtcctggggcaagccccaggtgttaacctaggcactgggcccagccttaggtgttaactagggcgttgggaccttattctaccccctcaaaaattctattaggcccccaaaaatagttgaatctcaatattttttgaagaaggagaagatgctcgaaaaaattcctaaaaaactccattttaagtggcctaggttgagaaaatatcaatctgggcgcagggctatgttatttgtgtgcaagaattgttgtttttcctttgaaaggacctacttccccatttttgatgaagatagatttaatgtaaaagttggatctttgatcggacaattggaaggccccaaattgaaagattgtcaacttaggcactgggtgctcagggccccgggtgctcaaaaatcaacttgcttcgattcaaattctaatgcctcaaatatgtctgtggtatgtctagttgatgtcctaatgcatgttttgaccatttttcactaagacggtctcggatactgaaaccctagtcaaggatgtcaacctgggcaacgggtgaaaccctaggtgcccaggttggcttttgggttccaagttcgtgtaatttcatctttgagggcttgaattaggttgatccatgtgttcatggtacaaaatactgaaggatattgggttgaattcaagttattaaagtccaaacttccatttggagatcctaaagtcaacctgggcacaaggctagggtcccctcctaggttgactgctatgactcaagtttgttcaacttcgtgatgtcatccttcatgccacgtgtcaaaaattgatgtccacatcactagttaaagtttacgggttaacatttgcccctaagtcaactttgcacttatgtggagttgacttaatgacgtgaatcaagcccgttttgcttgaaactaccagatgggcatcaattttgacattcttaggcacttatatctattctttaaggttttccaactgaattaggactttgaacacttttgattagtc

SEQ ID NO: 390663 - DNA, 868 bp, Cannabis indica
atttcaaatcacttggcttatagactctaattttaacgagattagtagattgtaatcacgtaccgtggcgttcttctaagtaggacgttacacaaacattaggataaaactaccattaatatagggttatcaacagtcagtttaggaacattgattagattaatatcaagcacatgtaacatcaattttaaacacaaagttttaccattgtttgttttgggaaaacctaccaatatgacatatgaaaagcttgttttcattacctacagtaacagattccttaccccatactcatgtttgttgttcatggtggagacatcaaaagtgatatggttgctggcactactattcgcaaactaggcatcactgtccaccacttcaagagtagaaatgaaggcattttgaggttgtttcacctagttttggccctgcttaggacctgtgaaactttcatcatagcttctataaagcagaatgatcatattttccaaatctgaccgttgggttttatgcaagttgttgttgaaccttcctcttcctctagatcaaccaccattgttacctctaccaccgaaaaattgactaccgttactttgatttgagtataatctacgacctctaccataagactgaggtttagtttccatgttggcttgaggattagacacagatccaagtatcctgttattgttggtgagtgtttgaagcctttcaatcttgctgcctaaactaaaaaatggtgtcttgaagttcttgtcgggttgtttcggccttggattcaatttgaacaacaatggatatatactcagcatcaaaaccaattcccccaaactaaatctttactcgtcctcgagtaagactaacaact

SEQ ID NO: 390664 - DNA, 1014 bp, Cannabis indica
tctttctatctatccccttttctttgtcataatttctttttttcgtatttctaggtttttatagtttggtttcagattgatattattaatgtaaggatttagtttagaagatcattcaagggcatggattcggtccttcgcaacaatttaagggcgctgatgtcagatgatgctcctgcagcattttttcaacagagaaccccaccacctctgccatagctcatgtgtttcaccgatgttttttcatggaacggtgactcttcaagagtactattagtgcactaagagagctcttaattggggtttaaatccgattgttttgttttttttttcttttttggtcatctgagtttagcctttatttttgaaatttgttcattctgtagataaatgttagaatctggatatatatcaaataattgctattaatgttctagaaatagttgtttgttctatactaaagaattttaatttaattaatgtaatttttttaaaaatatcatttcattactgttttgatgcacattaatataattatttattaatggtttgaaccacaattaatatattcgccagactattttttaaaacaacaaaataattagattataatattttttaatgtatcagaaaaattccctcaaaaaaaaatgtatcagaaaaataatttacatataaaaaataggtacggtgacgctcagtgtacgtaggtattacttttatagtttggcattgcgtgactctataagcctacagtgactcgctacaagagactctaaaaaaggtttagtgactcaccttggagtgtcactaaatattgcctttccagtcatccacaatagtgacgcgcattgaagggtcactaaaaggttttagagtcactcaatgtgtgtcacgctagtctatttttgtagtagtgatttaattatattaatatcttattttacatttgttacacggacaatatttgtttaattttatattgtttattcaaaacttttttaacaaacctat

SEQ ID NO: 390665 - DNA, 950 bp, Cannabis indica
ttatacttagaaaattttcatcataccaagctgtgaaaattaattgcatgagaaaaatttgataacgagttatgcaagaataaagtcttttgaggcattaaattgcaattaagagcacacatcaaatttagcgataaaaagtactaaacaaaaggagtatccccgaacggatacactgttcaaaaacatggcaaaacaagttgtcttaaatacaaaatgcgagtacccatgtatcgcttaagagaagtttgacaaaagaaataaaaaggttaagcggcaggagcgttggaatcacctacgatcatatttgtaccatctacgacttcagcagcagttgcatctccaacatcgtcgggaaaaagatttccacctagcccttaactctcggtaggcaacatggtatgaaaagcagtggccatctcaacttcctctagtccaaagaccgcgaagtcaaaatctggcaaattggtcagtgtagtgtagatgtagttagagaccacctggtcataagccttcttcgcattctctttctcagcctcaagatcgcgggtaagaccagcattctcctcctccagcttcttgactcgctcattcagagtcttgatttgctcttccgcctggcctttggccatgctgagatcctcgacttccttgtctttggctgccgcatctaactttgcctttttaaggcccttttgaagagctgagttctgtttcttcaaaagatcgaggtctttaaaacaaacatcataggcccgcgaatagacggtcatcaactgggagatgagatcagtcaatcgaggcaagaggtcctcgacaagagttccctcaactctagtgacaaactcatcagtcacgaacttatcgtgtagaaccatgatatcgcgaaccttgacaacaggatcgatcacaactttcttccccttgtcttgagcaaccttctgctgctt

SEQ ID NO: 390666 - DNA, 1112 bp, Cannabis indica
gtatggaattattccggtttcttcgattccggaatacctttatgtaatcatcgtgaagtctaactatgtttaagtaatagaactattacgacttaattttaaaataaaaaaaaaaaaaaaaaaaaagaaatagtatctgaaaactatattgatattccaaactagtagtagttatatataatagtcatggtcaaagacgcaatttccttcacgattcctcttttatttaatatatatgttttaaattaaaaattaataaactaaattctacagaattttttttttattgtttctaaaagtcagatcaattgaaaatgtcatgagtaaacttccacccaataatcccccccaacagacaaaaaggcagtatattatagatgatatatagtatgaggtttccaattaactttagtgccaagcaaaaggaaaagaaaaagaaagtcagatgaaagcttatgcaatagttcttatagtatgtggctcagtaattggtacaatcataatttttggtgtgtgtgtgaaagcaaacaaaaagaagaagcaaacaagttctccaatcccaatcggtatacacagcttgagcaaaaccactcctacagtagtggacgttgaaaagggggaaggaactaagaaaagcagtggaacaaaggacggtaatatggttattttggcaggagctggtgctgttcttgctactgcggctgttgtcaatactgtaactagcggatacagtggcggttgtggtggcggtggtgatggtgatggtggtggtggtggctgtggtggcggaggttgtggaggctgcggaggttgtggcggttgatgttactttgaattgttttgttgtgatgaataaaggcatgtgtaagggcacatgtaaagattatataacaataatttttcttgtgtatatgtagttaaaaatgtaatgtatgttataaatattaataatatgtggatgtctaaatattttatttattattattaattgtaattaatatttttttttagttgctctgtttttttgttttttaatatttcactactaggagatcacccattgaaataaaacactaagaaaattctcagttcttctctattttctttctcta

SEQ ID NO: 390667 - DNA, 538 bp, Cannabis indica
ggttgggaataacaagttatttgggaccgaatgagttgttaatagtgcagttacttaccttgcacaatagttgagtgctcaagctacgagattgaatgaatttgctacaatagtttctattattttgtcttctaagtggtaaataaaactgaatgtatgtgttgttaagattaagtgtgatgttgtcattcttttgaatctgattttaattataatttttttatcaaataacctagaaattaggcgactgattatttggttcgttattctaaccttaatcctagttgtgtctctaacatgagagagatgtatcgattgaattgcaaactactatttttattgattgatgttgcatgatttattaaaaaaaaaaaacaagatacacattaaaccgacaacctatactttatttcttaaagaaattctaattaaggaaattgcatatttattaataaaataagcaataatttgattttgaaagacttttcaatataagaataaaaatattaattttgaaaataataaaaaaaaatcacat

SEQ ID NO: 390668 - DNA, 655 bp, Cannabis indica
attctatccacatcgatggtagtccgataggggtctgatagtggcccattttttaatgttttggacataaaaaaaatagtaacatcatgccactatcggaccaccatcaaactaatacatttatagatgttaaactccattcattaagcttgtcaagaaggcattaggccaccatcagaccaccatcggactaccatcacatatcctacatttataggtagcatcaaaccaccatcagaccttcatcttcaacctttactcattttaacaataggaaggcgtcaggccaccatcagaccaccatagggcctggcaaaaagttcaaaactcagatctgaccatttgcaatcttaaatctaacatcaattcacatatagcagacattaatcataaatttattcctaaatgaataaacctataaataaaaccatacatttcaatcctaaatcacacagaatacaataaaataacatggaaaacttacatttatagtgtggtggtcgtggttcgaagatcttggatcttgggttggtagtcgtcggttggttagtggtcttcagttggaggcatgatggttggcagccatgggttgctagggtctttgtgtgcatgagaagaagagatcgagtgagagagatgttggaaattattttac

SEQ ID NO: 390669 - DNA, 1282 bp, Cannabis indica
gttgaataaataatcaaagttaaaaaattacatattccaattacagataagattcataataaatgaaaaattaatatatataattaggtgaatgctatgcatgcaccatacaatacacaatctttattttataaaagtacaaaaaaacgacccctaaacaactagctaggttgtgccgggtttttaagttagtatatatatatagtgactcatatttaatatttatttaggtttatttagtagaaagtattcacataaatgggaaaataaaatcagggcagttgctcgtttttatggaagaatatatattgacctttcatattaggttttgagaagcaacgtgaaagagacgtgtgcatgaagaatataataaagtatacatatggaatttttataggttagatcgatatcatatacattataggttttttcatttaattttttttattatttttcaaaaaagagtttgtgttgtgcccatttgtcgccgtgcttttcggatccattacgttatttttaaataggttattgtatattagaatttactttttgtaatttaattagttttaagttttttctttttcctaagaaaagatttggattgtgataccaagccaagtaatttaatatatatatattatagtaataaagtccaaggggttatgattttggcttacgagcaaagtctgagtgggtcctgtaatgattaaaatcgggtaggtttaagatggtggaattggccgggcagccctcaaacggtctatttatttaggtgaccgctgaccgaagtgttctttatttttgtttggaatctcttgggagatgatgagagagagcattttgatgggtaaagtagacgtttacaaagattgagatatatatatatatataaggatgtgatgtgatggggcataatatatatcttagcatggggaagacgtaaggtagtgatagccatattgacaaagcatgacttcatccctacgtacatacatacatgcacaagttttcattcatttcatatactatatacaaattactatttcatatatataagtaggaatggtgtgttgttcattcgattagtactattttatttatagtgcactaattgaaaattttatattttaaatctaatttaattcataaatctaattaaatttaattcaatccaatgttcaaattcaaaagcgaattaaattggtaatatatttttttacatatttaataataaaataaaataaattaataacaaattaaaataaaattttaaaaatgtaaa

SEQ ID NO: 390670 - DNA, 1415 bp, Cannabis indica
tctcttttttttttaatatatatcccttttgctacacatttcaagtcgcaaagataattttattttgctttggtcgcgagggctatttgtaatagtatataaggttttttggcatttctttctggagatttattttggtagactttttaggggctggttatgtcattgaaacatctggttccaacggccagtgttttcaacctttctcattaatcttactcatctcctagtcgattcagggatcatttatgggttttacccttttgccccgaagttgtagtgcttttccccgctacttgacctcccgcttgggaagaccacttgcttaaggtaagctcggagatagtttcctttgcgaaaatgagccttcagtttttcacacatcttcttcaggctttagttcttttacaagattgagttttggagtaatgctcacaattgccttagacttttaagaaattttcttacctcagtccttgttaacatgttagccaactatacaacccgatgaactaaacttctaagaaatccacaaagatttgtaagaaggaatttgggtggatttttcttttcaagaattctggccaaatacgcatcttatccccgaattcatacttaagtttagcctttgaggaaagaattcaagcgcgtttcccttgggaagacttggttaaaaaatttcctgcttttggttgcatatgtacaatgagctaataactttggcaaatggatgtaagaaattgcagtcatcagcaaccgggcgcaccatacctcccaaatgagctgggaattttagtctcaaattctcagttatttgcttgaaatttaactcgtatccttttccaatcttcgaggaggacgtctaagtgcggtccttctttgctccaagaagcgtactattcatccaggccatgtctttcctctccatgactacttggaggggaattcttgaaattttagcaataatctcttagcttccgtaaggaaaagccgtgggattgtaggtgaaaacctagttaggttgctaacccgaaatggttccttcatgacatagacctcataagggagagtataggcaagcttttggtttcccagagggaaagctgggcctgcgtcctggcgtgggcaactatcctatgttgaggtctgtttcaataagtgagagtcatgttgaattttgtagtggcaacctttggctttcacagggaaaggctaaaggtggacaaaacaaattcaaataatgactttgcttgcaaaattcagagggtgaaacatcactaggcatgtgacagactttaagcagtccttctgtaacgtccccgcttcaagcctccattgggcccttacacccatggaataatggctcttatacacgagtaagctactctagctgcttcctggattgatgactgacc

SEQ ID NO: 390671 - DNA, 1144 bp, Cannabis indica
aaaaaaaaaaaaagaaaaagtatgctctctcgtgtgagcgtgtgagccacgcgcaaaagaaagaaagaaagaaagaaagaagcactctagtttgggttgggttgggtactcacgtggcttttatccaaactcatttctctcttctcttctatgtgttgttctattctattactctagtcttgaggtgccaattggcaaaggcaattctatatctctattctatatttcagattacattgttatgaaaagaataaaaaagaattactaaagcattgaatttcatttaatttcaaacaaaatgtgaacttttttgaggctaccagcattttggaacgtgaaaacaattgtataatattgcatttgtgattttaaatgataataaaataaatatatgtaccaggttgttgtactgacaatctaataccaaataaatttggttcaactactcacattatcatataaaaataagtgcaaattttattgtataactacttttttattttattattttaaattttattattttttttaatttatatttaattttataaattatattcctacgatgtgtttaggaactttaataagttgtatatatttagtatttaattatggtagaaaatatttattaattaaatttattttaaagttatatttaattaatatataataaaaaaaaatttcaatctatccctaaaaataatagtaactcaaataaacaaattaccccaatatatagagagatttggaaataaaagtgtgaaataataaagctcttcataggtgtccattaattacattaataacaaataatgcttgatattcaagcaacaaaatttgggtaacggctcgcgtaaaaaaatattgggtgacgataaaaataaacaactaaaattagaaataaaataatctcaaaacaaaaacaactataataaaaataaaaaatgcacaatttttataaaaatggaaaatatataagaaaaatataaaaagtaaattggcatgtcatatatcaactttcctttttttcatattttgtggtaaatagccctatatataactactagtaaaaagttacgtgcgaggcacatatattaaattttatgttaggtattttttattttatttaaaagtgataaaatta

SEQ ID NO: 390672 - DNA, 1899 bp, Cannabis indica
aaaaagaagaaagtgaaagttaattaattaaaatgatcatgatgactctcacttgaaggagggatataaactttattgaattaaaattttacaaaataataaaaattataataaagataaaggttttggcaatttaaaatttttgattaagaatcttttgttagatgcttaattatatatggaactaccaacacaaacacatggatctgttggaacataattaactaaattaactaaattaactaatttgattttttctttctttgaaataaaatcatttctattatgttactaattattgattttattggaccttgttcttaattctctcaactaattagaatttttcaaaaaatatattcaattacattcgttttgactacaatgaacatcgtttattttttctctaacataaataatactatgatttttctatatataatgaatttagttttataatcaatataattttaatggaactattactgtatgttttgtgtacaaaattaataaaaataagaattataacttgtgattttttttttgtttctatatttctcccacatagaaatgatagtgttattttatgggtttggagtagattttaaatatctacttaattttatacatccatatacacatattttttcaaagtaaataaaaaattaaatgtttagagggttattttattttaaatcgaaacattaatagtaacactgaacttatagaaagtttaccgattaaactttttacatgttatattagtctattataaatagttttttagtgctagagtaaaaactacagatataattataaaagaaattaaagccaatgttaaatatcgagtcatagcgacaatgcctaaaaacataatcaagttattttggtatgtgtaaatagaaattgaagtaatgcattacaagataaaaaaaaacattttttttaatgttattaacattaaaataatattatttaaatgttatatttaataatattttaaaatgtaatcttatagtttgtaatttttacataacaacacattttatatcattgttattatattgtactaatattttgttaatgttatttttgtgtgttttattttaatactttttaaatgaaaatttcatattttataaggtctatcaattggcccaataatgtaaatattaaccaaaatataccatgtgtcccaataaaaattattttaagaacaaataataacaataataataataataaataaataaaaaagtttcatatatcaaaataataataataataacaataattattttagatttccgatttaaatttatttttaacaaatcatatttattttaaattaattattagggaaaaaaattagaataatctagactgttcacgtgtctattaaactaacagaagttaatggataccaacagaagtttaaaataatgaagttttgagtattaatgccgcaatttttaaaaattggatacttgttagcaacaaaactaacaaaataagcatttatgctgcaaattttccgtcaaaatatgtcaaattcattaaggacatggaaaattatagtagagttgaatttgggtgtaacctaaccattcatccaataccaatgatttgtgcctagaatgcggtttgacttggggtggcttccctttcattatttcgataatcacataattttacacgtttgtttggccatatataatatataattagaagtaattgaagagtgttaattataaattatttttcacataatgtatattaaccatataattaatatttttaagtgagactgctcagaggaatttttattaatttttttttatattttatttataattttacagtgtaaaatttttaattacaaaaatacgtttgtaaagt

SEQ ID NO: 390673 - DNA, 2168 bp, Cannabis indica
tgtcctcatttaatatattcaatgcaataaaattcactttgacaaaaatatatacatgttaaaactaaatgaattgaagattgtatattatatgttctgaaaaaaaaaagagattgtatattatatgactcatatcaccccaaatatctatacaacatgtgagaagttaaatcgcttacactattttttatttttgatttgtattactaggtaatataacttaaaaaataataatttaatataataatattaaaattatgctatttaattatttataataatgattttatttatataaaaaaaaagttcttttattagaaagattgaaaagttttattatttattgattaagaattttaaaatttgtacgatggttggctatataaaattttaaaatgttctattataaaaattattaatataaaataaagaaatagggtagcatagcgaaaaattagagtattattattattatttaagtaattaatatttctcgtaatcaatattatttttatatctcgatcattcaaacttgttataattgttgtatcacaactgttgtcattactgtatcctacttgtggttgatattattcttattccaacttgatacataataaaaagcaagcaatgagttacacatattttctcaactattgtcatcaccgtatcgtacttgtagtcgatattattgttatccccaaaaattttacttgatacataataaaagtcaagcaatgagttatgactgcgtatttagtacataatgatttgaattatttagttattgttgacctcaaaaagtgatcaaccgatggcagggttgtatgaatttgttctttgccacgtgttacacaacaagaagtaaataagacaaggacttttatagaggtttgccccccttagttagcgagtaatgacctactccctttttagttgtatggataccttaagataatacaattcagatcactaggttagagttaaggcctttatataggaaaatctaaaccctcatttacaactgaaaccctagatatttacatattaaattgattaaatataaacgattaatttcccctacaaagtagatattttccatcaatttgttgggctattaagggccagattcttagataacttgatgtccatgtatcaggctgtacatgtcatgtcaggtggacaaaatttggaataacatttatccccaagtccctgttcgaacatttggtcggatagggactttctagctccgttttatttgtagtagtctccatcgagcagcctcatctagccaagttggcttttttgcatggcatgcttttagatctttaatcttctctctctatgtatcttgtcttctcttctttcatacctcttctttgtacttgccattaataagtttcaggctttataagcttttggaaacttttgattctcatgttagtttgtaatctctttggtatattgatcctcatgacagtttttgaatgtacaatgcgtgaccttttgatggaaaagattcaattttggcctttgttatgattcttgactctctaagtcatatagaatatgagacacatattcgagttttgaaagaaaaacacattgggatataaaaattaccttcgccggcctgggaggtcttgcttgagacatggcctgccctaaggcttaatcatggcagttgaccagctttagggttttaccctattaagctagcatgttcatgcctaggactggtgaccttggccagtttttggtcgagtcatgggaccctggccgaccctttcaaggcttgagaaccttggctagcatgggccttggttctaactgggtagctaattttctgttctattttgacttcggtaaaaatctcgctctgtaggcatatacaaccttattctcatacgtggtttccttggaaactctgtatgaaacttaatggtgagtctattatagtcgaatgttcaacttaagactcaacatggcttggaacttgtaaggaactttgccttagcagtagcccagtacatggcccctatagaagctccgtccagttcttttctggctatctggttcttgcagggccttggcctcatgcacgtgaactgatttcatatccgaccttaaggctttcatgttcttgctttggcctatgggccctc

SEQ ID NO: 390674 - DNA, 618 bp, Cannabis indica
actgaactttttagggacttttgtcgcaagttttccaatataatgaaataaatcaaaaagaaatatatttattagccgatcttataaacttagaacaactggttactaacttaatataatattaataaagtacataggcatcattgctatagtactgcgggaccaattcgtgattcacaaaattgactgtctatatatatcaagtatgtaaaataatgggtaaatactattttggaccatatgtttagcaaaagttatcaattggaccctgttaggttattttaggtattaattttagattaagtttagtatatttttaatttagttttaatcgtgtttggagcattttcacgcttgttatcttttatttttgcagatttaaaatagaagaaaattagaaaatatcaaaggaataagatgaaaaagataaaaatatctcacaaaaagatgatatttaaaatagagaaaattatgtaagaaaataaagttgtaacttccagtctgaatttgactatcttctgattagattttggaaaacgtcaaagcataaaagttctagatctctcttttatctttctggaacatcctgaatcatccaattccgagcaatatcgagag

SEQ ID NO: 390675 - DNA, 621 bp, Cannabis indica
aaggcctttaatcgtgttgaatgacactatgttgctcaagtaatattgaagatgggatttggaacaactgttgtgcagcttatactctgctgtttataatctgtcccttattcttttctattaaacggagtagtatgatttggttccaaccaggggtataaggcaaggcgatccactctcgccttatcttttcctcatttttgctgagggtttctcaaggctactatgtataaaacatcagttctttgcagggattaaaagtttcgagatcaactccatctgtgtcacatctattctttgccgatgatagtgtgcttttctgtcaggcaaatcaaggtcaatcaaaaaagttctagatatctatagcaaagcatctggccaatcaataaatcctgataattgtgtgctctccttttcaactaatacacgacagcaagatcaagctttctttcaacatcttctcaatatgccaatacagccgtgtcatgaacaataccttggattaccatcctttgctggacgtgacaaaatgaaactttttagtagaattacagataagatatggaagctccttagtagttggtgttgggaaaattttaccaggatctagattaactaaca

SEQ ID NO: 390676 - DNA, 1082 bp, Cannabis indica
aatatatatatataaagtcaattagatatatgttgatcagtgtatatggaatcaagaatatcttagctagaagaataaaaattattagtataattaaaaaaagtaaaaaattatatgtggctatttaattaagaatcattaagatttagatatatactacttttaacttcaagttatttaattcttattatatacatatattaatttttgcgttaacaaaagctctcaaatgcaccaacaattgttctacagacacataaagattgtgtcctcgagcatcaacatatccacaaatgtgttttcattaagtttatatcccacaaatcttataaagaatttttagggacaaattgtttatgtttaatgttttcataaaataaataaaactcacataaaaaatctaaaattgtaagatacactgatattcttttcaaaagaagaaaaagactaaccaatattacataacaactatttttcttttgtaattttaaacttttattgttatatgtactcaatatacttaactaggagataagggaaaattcgatatctgagttatattattttgggaatagagtatctcttgaaaataatgataaatattgacaacacagatgagagttggaactgaatcatctatgatttaagaataatgttttgctcttttgtcatggagatttcaagtcaatatacttgattctactagatcttaagctattctctcaaacctcaggccttcaaccaagtgaagccaagtcagccttctatttttgtgggatggaagaaagggaaatacaaagagttctaggtatcttcggctactttagaagctctttaccatttaggtatcttggaattcgcattgtaacctgtaggcttctaagctctgaaagtgagatactggttgagaagatgactaaaagaatcaatgtattgagctcctaaaatctctcttttgctggacaagtaatattattgattaactctatcttgatttctattcacttatactgagctcaaatcatgttgctaccgaaaaaaaacattgaaaagaattaattccatttgtattgctttccttt

SEQ ID NO: 390677 - DNA, 1574 bp, Cannabis indica
aaaaaataaatcaattttttaaaattgaaataaaattttttgttgaattaaatgtttttcaatacaatttttctttcaatactaaatatgataatttgtttattttccatttttttcttacgtttttcttatttttttctttcctaactaaatttcaatttctaaagattatatttgactctttttttaatggtttatttttctatttacgaaactcaatttcaggctgaattaaaggtggaatatttaataataataataaaaaaattattgcatgtttttgcaaagatgtgaagtgtagtgtacactttactaaacttgttaagattatataattatataaaaatatatttttaataatatagtgtgaaaaggaaacgacatcgttttccaaaatgtaatatcaaatttgagaaaatctttttgtcattatagtgttttaatagtttaaatgagtacgacatttttcattattatttataattattattcaatttcagcccatttatatttatatttttatatatatattctaaaagaatatttcagtataattattgccctattcataatagttttttagtctaattttcttaatatacattatagttattcagcactatttataaattttaaaaaaatctcgaatgatttataatgttaaaaataaagtttaaatattttgttctgcatgtgattattttttcttatacaataataaacagttgtttaaactttatttttagtactataaattatttcgaattttctaaagagttctttagtctaattttcttaatgattacttagatgtttcgatttgttccaagaatctctatggttgatagattgtaatgctctaatgaagaatatggttagcatagtaacaacttaaagctctcgaaatttgtctttcgccgaaagagtaactcttattaatttaatgttgatttcaattcatatttacaaggcacaaattataatacccgtgaagaatctccttaaaaagataaattagatctacaggaattttctttgacatggaaaagttaattgtaaagatgctaactatattgtttggtactctaatatgtgtcatcagaaatttgaaagtggttcgggacttcgaattattgttcatttataaataattctaaataactataatatacatcaaaatgtcaaaacaaataaaaaatataccaaaacatttgtttagaagagtgtattttactatgttccatactatgattatgagcttttatgtaacatttgtaaatgtaataattttagagcatacattataattataattatgaatttaatttatttggtatataaaaagtagtaataagaatattgactgagtctttacgctaacactttaatcattatatatatttatacccctatatctaatgtctatcatttactaattttataccacttttacactaacaaaatctttaccatataaaaccatatattcttttactttacaaaaaactaaactacaaaaaatgtaaaataaaccatacttaattttactatagcaaaaaaaaaaaataataaat

SEQ ID NO: 390678 - DNA, 698 bp, Cannabis indica
gaaccatcacataggttttcaataaataaacatagagtctaaaacaccatttcatgcattaaacatcaacagcaaactctcaaaattagattgctcaaaaagcatgaaatcaagctctaaataacaaaattcaagcttttgagctagagattctttaccaaccaactctaataattttccagcagcaacataccaaacaaaggataaattctaacttggaaaatactcataaatgtcattcaaaactcaagaatataaccctcaacaatatcgcaattaacactcaaacttaagaagatcaacaccaatttatttttacatgcaattaagaacatcataacccaaaacatgcttttataacattcaataatcagcaagaatttcaaccaaacacagtaaaaggaagctacctcaaattaaatcaaagctaagctcaataatcttcaaatacccaagctccaaccaagccaatacatcaagatttttcaaatggaaaaatagcttagaaagagagggagagggttcaaatcaaaggtcaaaatgaccattttgcccccaagggctaaataaagcctatgtataaactaagggcaaaaatgtcctttcacatccatttaaactcaaatatattttcagattatacatgaataattaaaatgccaataattcaatcctaaattgcatttcgggcccgaaac

SEQ ID NO: 390679 - DNA, 805 bp, Cannabis indica
gaaacataaaattttgtggtggtatattctgtctaaagcaatcccaagtcgttcagagatctgtaaaagattttctattgaggatgttagttgcccgttttgtgggactgaggatgaatctcttgaatacctgtttttgtcctatagtgtgccttttcaattatggaggtttttttcttggagtattttccctatctgcggtaccagctctgaatgtgggactgagtaaaattcatttaggaccttaaactcaaagacatcaatactgaggaggtctttctttatgcttcgttaatagttgacaccatctggcgaatccgcatagataaggtacacaataattttccagttgatgtgaaaaagtgtattgagtctattcgtttatcttttgcagattaccatgttttttttattcccttgaccatctccgagtttggtaaatgtctggcgtcctccccctcaggaatagctgaagctgaattgtgatgttaaaatggggttggacagcatgtgtgctgcagtcgtgtaagggatcatcttggcagggtgatttgggttcaaacatctgttagacaatttatatgtataaactgaaacatatatgattaagtataaagtacggaattaataaatcatatatgcactataatttaaggatcgaaatacctccagccattgattcttgagcttcaaacccacataagctttgatctgcaaagaaaactggttgatgtgggtaatcgggcttcctcgctctctcaactctctttagatggattttgctgttatgaacagaatgagtgag

SEQ ID NO: 390680 - DNA, 748 bp, Cannabis indica
gtgtttataaaattaaatttcaacaatgatgtataatgtgagttaaatttagctctacttaaaagttgtgactaaatgtagttacaaaatataagattatttttaatagagtgttaaaaatgtggttcatatgggtagtgtatgaagtgatccaaatttaacacattttaaaaataatattaaaatttgcacaaaatataataatataatacagttcaaatagtaaataaatattattttttatttattctttttgctacttattaatgtaattaataattttttattttcaataaaaatttaatattttactggttctttcacactaatttataaaaaaaaatgctaattttatccctaaatacattagaatactaatgtgaaatttgtgtctgagtcattttttagttaaatttaattcaaattatacatcttttattgaagatggtcatataaactaaatttacagcacaataaatatcacatttttttaattattcttttgacactcattaaatttaaagctttgttaactaatttttaaggtaattttacacataaatacattaaagcacaattgcaaagtttaagccaaatataacattgactcattttttaaagctaaatttagtacaaattttagatcttgcaatttataacactagtcggaggcaagtgtattcaacatgactttttattttaaagggactcatttattataaaaatatgaaaaattttatttatattc

SEQ ID NO: 390681 - DNA, 812 bp, Cannabis indica
ttacataatattttaaataactatatgactataatttttaataatatttactatttgtttagaattttaatttatgctaaaaaaataaattaaattatctaaagattttctgaaaaaaatctatttttcatatataatttgaatttaaacaaaaaaaaaatgataaaatatatgtttaaacaaatttagagttagatttaaatataattatacaaaaattaacagcataaatttattaaaaaaaaggtttacgagtacatttaaaaatgggttaatactattttagactctatgttttgtaaaagttatcgattgaatcttttattttgtaaaatgacaaatttgatcctgcattttctaaaataaaataaaatagtatcccgaactcaatttttttttttttaaataaccaacttgaagataatttctagcatggtcaaatgtagaaaatgtgtccagttttatcataataactctagattgtgttattattaacttttatttttgacaaaaatcaatttagggtactattctataccattttgaaaaatacatggtctaatttatcatttaacaaaatagaaagtttaatcagtaacttaatgcagagtccaaagtaatatttactttttcaatatacagtagaacctctattcaagaatacacttaggaccaagtaaattatattctaattgggaggttataactaaatagagttacacaagaaaaaaaaaattaaaaaaccaaaaaataatcaatgtaacaataataacaataaataaacattaatactatatcataatagaaatatt

SEQ ID NO: 390682 - DNA, 2926 bp, Cannabis indica
ggatcgcgcccttgtttcatcggcttggcttcaaacttttacacaagctcggttactaaaccttgaattttcttcttcagaccactcgccaattttcctagaagtcgtagctccggacgtcttcattcccaatcggcaattcaggtttgaaaatgcttggttaaaagaaccgatgtgctttgaaattgtgaaggattgttggaatgttcctaaccatgtgagtgtggccgaaaaaatatctctttgtgctgagaaattatcaacttggggaaaaaatgtgactggcaactttaagtttcgaatcaagaaatgccgaaatgagttgaatcagttgaagaacaaaagagatactctctccgtccaacggtatagtgagaagaaaaaggaactttttttggtgttggaccaaaaagaagtcttttggaagcagagggcgaagcagttttggcttaaggaaggtgatcagaactctaaatactttcatagggctgctagcaatagaaaaagcttcaacaagatttcaaagcttaaagattctagtggtacttggaaggattgggaaaatggccttgcggatgtcgttgtggaatatttctcttctctcttcagtgcatcgaacttgagtagtgacatggtggttcagagtatacaaagccgggtgtctacacgtattaatgaagacctcaatcaaccgattcttgccgaggaagttcgtaaagctgtgttcagtatgcatccagataaaagccccggcccagacggtatgactccagctttttatcagaagtgttgggatattattcagattgatgttgtcaatgtggttcaggatttctttaccacaggggaactgggttcatcttgcggtgatgctaatgtggtgttaattccgaaaaagaaagtccctgaaagtatggttgatctaagaccaattgctttatgtaatgttctgtataagatcattactaaagtaatggccaataggatgaagccttacatggaccaaattgtatctgaatcccaaagcgctttcattccagggagactcattactgataatattcttgtttcctttgaagttctccattacttgaagaggaaaagaaaaggcaaggatggttatatggctttgaaactggatcttagtaaagcctatgatcgtatagaatggaacttcttggattcggtgcttagaaagattggcttctcggataggtggatatcattggtgatgaagtgtgttagttctgcaagctacaaagtgattcatgggggaagaaccatgggaccgattataccctcaagaggtatccgtcaaggggatcctttatctccctacatttttatcttgtgtgcagaaggtttatcagctttgatcaaaagatatgaggataggggtctcattcatggttgtaaagtggcaaatggcgctccaaaagtgtctcacatgcttttcgctgacgatagttacttgtactgtaaagcaactctactagaggccaatcggattcgagaacttcttcaccagtttgaatgtgcttcaggacaaaaagtgaacttggggaaatcgtcaatcttctatagtactaacactgagaaccaggtgagggaggatataaactctttgttacaaatgcctcaagctgatgaacggagtatgtatctggggcttcccaagtactatgggaaggaataagtcagctgtgctgggtttcttgaaggacagagtcaggaaaaagcttcaaggttgggattcaaaagttctgtctcgtgccggtaaagaggtattaattaagtctgttgctcaagctctccctagctatgccatgaatgtttttttactccctttggagattagtagagacattgaaagtaccatggcgagattttggtggaagagttcgtcaagagaaaataaaggtattccttggatgtcatgggatcggatgtgtaatagcaaaagcaatggaggacttggatttcgtagtcttcatgattttaacttggcgctattgggaaaacaaggttggcgttttctaacaagaaccgagtctctggtttctcgcattttcaaggcgagatatttcccacatggaacatacctctcggcctctattggaaacaacccgagttttgtgtggcgtagtatttgggaagctcagtctcttgttcgggcgggagttcgctggagcgtggggaatggctcatccattaatgtgctgaatgaaccatggttaccggatcatcaacaaccattagtgatttcgtctcatccggcccttcaacaagccaaagtgtgcaacataatgtcaatggatttgtcttcctgggatgaggatattctaaaggatttgtttgaggaacgtgaccagagattgataaggcaaatacctttgaatataaaccacaactcagattctctttgctggtttaatgagcccaatggtatgtactcggtccgaagtgcctacacattacaacaaaaattgaagggacttgggaatgatgtagctgcctcggatttttggaagtcgttatgggcattgaaactgccaccaaaaatcaagaacctgatgtggagagccggctctaactgccttcctactctctctcaactcgcctctaagcatgttccagtcagcacgttgtgtcctttgtgtgaggagatggacgagacaatcgctcatgtgctactgacttgccgtgtagttacgaaggtgtgggaaagggtcggtattggcactaccgtgactgcagcaggaggcattttcctggactggtgcgtgtctgttttcacgcatttatcagctgaaaaacaaggcctggctgctgctttgtgttgggccgtttggggagcgagaaatgatgttgtatggcaagggaagtcgtttaatttttcatccatagtcgcctctgctaaaagcta

SEQ ID NO: 390683 - DNA, 915 bp, Cannabis indica
acagtttttagtgtgaatttaaagaagttatttttcgtacctatatactgataggttaaataaaaaaaaaaaagaatgtttctcaacagaaagacaaaaatttacaatcactaataatgtgaccaaataaggaaaagaaatcatattgaatgaaattctgagagcttgaactacaccaagacgatttgtctgcacactagctttgctgccattctttaaattgatccaactaaaatttccttaacccccaagtagagtcggcctgagaatatatgagcaataaaaggaattaaattttggagcccagcctcagaaatatataataaaaaataattaaaaaaaaagtgttatagaattagaacctatgacattatataatatgtcatacatctcaatcaactaaattatgaatatttttatttataatacacttaattttacttaaataaaaacctaatgtaaattttttattttttatttgttatttagaattaattaatctcaaattactatgtttattaatgtcattgttttttcctaagagaacatatattacccttaagacttgttttctatctaaatttatttttctcaggaacttatacatacagcagagtaacttacaatgctacatcaattggatcaaacattaacaattgcagaaaagtggttgagaatgctcttaaaatatcagaaaaatgttcatactcaaaatgcacatttagtgggatatggaatggaggaggaggacttggtgcaactaatctttatgttggttcatttttctttgatagggcagctcaggtatacatttatatataaatatgtaattcttctcaatgcctaatacttgattaccaaaaaataacaataaatattatcaattttaaaaatattaaattattaaattttgat

SEQ ID NO: 390684 - DNA, 1047 bp, Cannabis indica
aattagaccacattgcatatgtaacaagattactctaatgagcaaacccccattgattgtgacaagacttctaaaataatcccaaattgaattgagatacattatattccatttaaaaaaacgagtacacagagttccattaagagattaaaagacagtatttaacaatataaaaaagtgaattgataatttttataaaacacacaacttaaatttatttttataccacccaaaattattcttcttcatcctttatattatttgtgatcacaaaaataaagaagcatctataattgataattgtacactattgttgtctgccaaatcactaggcacgtgttaccaccaggagccttgactatagatgacatgtcaaggaataggtgggacccacttgtgttctcccaaattaggatggaatctacttgggacacacacgatcaacagtgacgaaatcagaaataaaatttacgtgggacgattatttatttttatagtgaaatattaaaggtatatgtggtgcctagtaccctttatggagtatcataaaactattggtataatttaatatcaaatctcaatagaaaactaataactacctcatggtagtattgaaaatcatagtgcttaatagcaatactgaattatatatttatagaattaactataataaaatataaattaatagatgattatgttaaaataaattttagtgtcgtattttaaattaaatgttaagttcaaatcacatcaataatacaaaaagtaaagtggaggtatgaaatttttaacttttaacctccttaagatttaaatatagatttaccaatacaccaaacgatacaatttgataatatatgatctcttaaaatttttatttggacttacattaacttaaatttgggttgatcggatagtgttctttgttgtgttagcccatattattagtgattaatagttaatgggcttagtatctattgggcttagcatcttagcatcaataattaatgagattttctagttaactaaagcctttaatgagcagcc

SEQ ID NO: 390685 - DNA, 638 bp, Cannabis indica
tttgatgggtattatatgtgtatattctcggtttgtggttgaatctttgtgaatctttttgggtctttttttcttatttatatactcttatagttgcatctgtgagtctgaacatctttctctctctgttttctttttctttttcgcaggcatgttttaactctgttttgttgggtttggcttacaaaattctctcacacttttaaaggtcaattttttaaattgtaaaacatacttacagtaattagctctcttgttttattccagttattggtaaagatttcaaattttgattttaaggggttcatttatttgttttgttagtttactctgctatcatccaacttactttgtaactaattggcttctttaatttgttgtatatggacactgacttatttagttagtgatattaactcgatatttaattacactaataataagaaaaatactaaatataactaatactgtatttctcatatatatatatatatataagattgctattggatattaacagtacttaacactttctagtagtattttatgattggttaaccacatttaaatattttcttaatttatacataacttaatattatggtacgtgataagtttttcatataataataataata

SEQ ID NO: 390686 - DNA, 1007 bp, Cannabis indica
ttcgtattatattttattaaaatcttaccacttttattacacttttattatgagtaggttgcctacaatgcaatttcctaaaaaaaaaaatctcatatatttattattaaggatactatctcatcaacacatttgaataataataaattatatgcatataaatattaggtgaaaaaattaatatatacaaagaatttcaacttatatattgcataaagaaaaaagaaaatatatataaaaataaactaggctatggttcaaatatatgtatatatttatagggatatgattttgttccgttattgtattttcacggattataatccgtgatgtacagcagccgtcaaatgagggagttatttgatctgacggctgaaattgatctagggtaattagtattaaaaaatagaaatgtaccctgacactcatttaatgtaccatttactcatctaatgtaccacggaatacattctgtaaaagtacatcacgagacaaaaccatatccttatacttataaactcgattttgtatttttcgcataactcaagaaaagtattgcttaaaaaaatgtgctcttgcaatacaaagtatagtggcaaacgcaagaatgaagtaaaatttgtaattaaagataaaaattaggagtccatttggtaatattttttaattaattttttatttttaaaattagaaaagtaaaaatattttttaaaattatgttctataaaatttttttattatcaaatttttaatcaagaattaaaatttgaaaaataatcactttctaaatttttttaaatatttttttctcaattaatattttagactctgacacgaacttagaccttagaatttgacaaccctagccgcgaccctggaccccgacccagccccgataccagttttgcattcaaacctaacttaaataaaatcaacaaatgaaaatgaaaataaaatttacagaacatatttttgttttctgtttttaattaaattgaaaaataaaa

SEQ ID NO: 390687 - DNA, 1280 bp, Cannabis indica
gaaaaaccagacaattttagaccaaaagtaataggctacaatgtagaattcttttcattatgtagatgttcttttttctactttctttctctaagttatatttgagccagggatactattactaatcattcctttccttatcaattgagtgcactatagaattggattgtacatgattgtttgttatctttaaatacaataatagtgttattaatgttgtttattacagtatgaggtagttaaaaaaaaaaaaaaaaaaaaatcaaggcaaacttaaaatctcaacataggtcaaaattacatggctttgagtttgacatttaccatgtcctttgactcacttatttttgatttaatatctttatgagaaagatgtataaaatgacataaattctaattattatggtagctagattctaatagttacatgtatactttggaactgtatcttctccacgagttaaaagaatataatagatggctaatgtaattcataatggtataagaggaatttgtgtcactgaaattagactaatttgcaactaaataaatagtacaattatgcactgtgttttgagatttttatgtctaagtggattctgaaaaagtttaatgtttctttattaatattttagttggattcactctctttttatttcagtctaataatgtttctattcttctgtggtaaaaggtataatccattctctcatagtttatgctcaggtctctaggagagttataaacttcctaatcacaaacctcattttgaaaccaaaaagagagagaagttagaaagatttgcaaaaataacaaagaattagtttggttacaaaaataatagttacaagaaacgtttataaataggaggcatataaatatatttttatccttgttaataaatatataaattcaaagaatagcagcataaaatacttaaatcatcaaaatgaatggtttgattggtacttaagttagtgggttaggactgtgcttaaagcctacttaagttagagcccaaaaaaatatttttattttttagttgattttgaaaaatattataatttttctaaatatagcctaaaaatatatatattttttttcttatgactcataaaattttagaacccaccatgctaggataccacgtgtctatgtcttattcgtaaaaacaataatttttgggaaatttacatagtatactaacttttgtacttttttactgtatttttttataagtttcatattgcagtatactgtgttaagttttcactgatgtt

SEQ ID NO: 390688 - DNA, 1263 bp, Cannabis indica
cgtgcaatggtgaaccaatcatttgaccagtaaatgtgaaaattttaagagtggatggaccgcaatagtaatgccctactagcttagcacattactgtatttttctttgtgctaacctttgctatccaaagattttgtgtaaaatcatgtttatataatttagtttataaaattataaagttagctaaataaacatattaaatattaaaagcttacaagtcataggatcccgaatctattttttttataaacctacaaaagacagcataacagaaaagtgttgccaagtgactaaaaaattgaacccatattatcccaaagatttgaaccctataggtctaactatctatatatgtacaatctttattgagcttcagactcactgttgttcaacctttaccttgccttaacctacacatgaaaaacatatttgtgaatcgagagactcgataagaaaagcataaaacataaacatatagctgaattgtaattaggtgcccatgcacctaattaccataagtctttaagccgcattcaacatgtataatatcaacctataatcagcactctagtcatattcaatattaaaagtttttcaataattatttattggtttcaataggactccttatgagtgttgtttctatctactattatctaaaaatagtcaagttactaatgactggacaaaaccaaatagtttcaaagagaatgttttaagaagctctattgtcaatcactgtttaggaaactatcatatttgcaatttgtacttcaatgactagggatcattgtgtggatagatgacatggtcgatgtcttcttcactaaataagatgatcggttcttctctgtgtagtggttttagttttctttcttccatgactagtatttcatcgttctccttgttgacctcacttttggccaacgacaatgagtaaattaaagagattagaaaaaaaataattataatgattaagaaagtagaacactgaacttgttatagaggttcaatcctgtgattgtggtaatagcctattctcctttttcttgtattgacttgtgagaagagaaccaagaaattcatgatcttcctcgaaagctcttacaataattttaatagcttaagttctttatggaatgaatgattttttggtccctgaatagtaaaatgactccactatttatagggaataattacattagtttggtttcccaaaaaaaaaaaagaaataaattaggaaacttatttactttcttaaa

SEQ ID NO: 390689 - DNA, 504 bp, Cannabis indica
caatttgatttaaacaaaagactacaatatttttagttatattgtaacgacactaatacaagctttcattggtacgtcattttggctgcttcctgaaatgacaactgatcctgcaaaccaacacgagtattttcagtgtactttgtcctcactcgcaggcttcctaaaaaaactttccagtcatccatcccaagattactccagatcaagcacgcttaactttcaagttcttaaatgataagccaccaaaaaactagatacaccttacccattaattaatcaatttataaaaaaaaatcctaaattcctaattgaataacaataacaaaggcattccaacctttctaacaaatattgaacatctattgccttttgttcaagccaagttagtgctttcctacttaacatgaattccaagtgcttggttttccaaccttatagtattaggaaaatttcatttttgcccctaataaaactcccaatatcaaaatttagacccttcac

SEQ ID NO: 390690 - DNA, 1330 bp, Cannabis indica
caattgggttgaagtcaatatcaatgtcaaactacagaaaagggcacacgatcccaaagaaatatctggaagaactatgtatataagcagtaatgaagtgttgtctatattatgtggacaagtgaagcaacttatctacttgcaatggaaacccctctttctttttatcacttatcaaaagaaaatatcttgtgacttatgagaacttccaacaaaaattgtaatttaaactatcaacaaaatcatattacttaaactttcaaactcacatttaaactataaaaataatcaaattaaaaccaatattacacaataacaattaattgattagttaaacgaaatcaaaaaactaaaaaacaactcgagaacactcatttttatatcagatttggattctaaaattcaaaacagcacaaattaaacattctcaagtcaaaaattaagctttaattcaaactttagaagaagaactattaaagaaaacaaaaccaaacaaatttcccattaaagagaaaatatactgaaaaaataaatttctaagcaaaagtgtgaaaacctgcaaaaagaacgacagagcgagagagaggtgaagaaccgtctttcaccgtggccgtcggagatgacaccggattttgcagagagaacctgtaaggagaaatctggaggctcgacagagtgaaaatggtgaagagtagtgtagggttattattttcttttctttgattactcatttattaatctatatatatagtatgagaaatcctaatataactccaaatagttttatatcttttttccttaaatttctattttttaattttttattatgttgataaatatttagttattttctatattttttattattttattattaataattatattaattaataatttacgtagctttttttttcataaaaaaatctacatatatttattttcttatatttttttttattattttatattaattaataattttaaaaattaaacgtgatttttctttttaaaaaaatctatatatatttataacataaaatctatatattttattatatataataagaggcttaatcgcctaatgcttttttttttttgacttttatagcttctgttttagttactttataagaacataattctttttgacattttgaaatgtaaatttattttgaaaattttatctacactccaaaaatttttggagataccctattttaataatttttattttatataaaatttatatctttacttgtattaagttcttttaacttttttctttcaattcatattcttaaaaaatatacttatcaaataaaaataa

SEQ ID NO: 390691 - DNA, 1602 bp, Cannabis indica
atgtattcatttatctgacaattgtattgcatatattctattatacattatccataaaatacttgcttttaggacttaaaaaaactgttaaactaaaaatttatcttagataactacatttaatataagatatatatattagttcactacaaaaaatcttacttttagttaaaataaaatttgtgattaaaagtaaaaaaattgtaactaaacatatgtttaaatgacgattaaagttatgtaaaaattacaaaaataaataataattaataaatatagcaaatactatacgtgcattaactaatttttgtattatatatatgcaaagatgaaattattaatccaaataataaaaaaaaataatttgattcaattttatcatattttttaaataacaaaatttaatttaaatttaaatttagacatatataaaaaaataatctgccatatttttttttttaaagtaaaataactctttaaaaaattattttagttatatttaggtagcgttgttaggtagctcgctagagccgaagcctataacctagtgataattgcttattttatgcattcatttactcttttttatttctttttttaggtttgtttttctttgtagtttttttatttggattttatgtattttctctaattgtgtaggtttatgcttgaaagataattttatgatgggctgagatctttaagataatttttaaccatgttttcttcattttttcaaagacattgtgaaatacaaactgatagagctctttctcagattttcaaacatgttaaaacatcttatttggactttggacataaaagttatgcatattttactgaacaaggtcaaagtagtaaaaaaaatgacaaaaaaaggcctttggcgccatagcgccagccaaggaaaaagataaaaaaaaaaaaagataatatttgcacgttcgcgattttgggaatctcgcttagcaccatagcactatctcttaggcgccatagtgccatccgtacacgttttgaatttttatctttttcaaacatcatcattttcatcttttctcgcctataaaaaagcattataatttcagctccaaaaacccaaaagatagagaaaaatacaactttatagagagaaacaacctcgagagatcaatgaagcaacctaaagctacattaaagagttttcatctattgttcttcttctttcttctttatttctcagtattacttagattataaacaatattttgatatgataaaccacactatgtgtggctttcttagttgttagagttagatggatctctaattatgactttgattttatgatttaatgcaaagtttagtttagtttaatatttttcatgtgattctaccttgtttaattgttgccataactatgtcctatatattgttctaccttatatgattataattgaggctattatctagattgtgatatatattactcaagagggaaaattttaaacagtcgggcatcaagtagataaatttaggtggtgtgagatcgagagataagcattcatttaggttatggtcggctctactgctcgtggaactttgggcttcctttcttccacg

SEQ ID NO: 390692 - DNA, 594 bp, Cannabis indica
attaattaattaatatactaattaataattatatctaaaatcaattaattaaatttacataagtaaagtcactttatgcatgtaaaattaaacatgcacatgtaaattatgagattagcctatcaaagatttaaatagagtttttttttcttttttaatgacttacatataaagtttaattgtgtaattactctttaacatatacattatttttctcatttttttagattatactataattaattaaccatctacattattattattattattattatttattattattattattattcatttatttatttatttttgcagaaaaccatccatatattaattattacattcacatgttatttattagtcacttttcccttttctgttcataattaccattcacgtatttctgatctagaacatgcattatataattaaacaccaaaaataaaatagtcttcaaaagtataataaagaaaaatagtttttattttatattttacattaaaccaaatgtgcacgtgcaatcaatgatatactatgggccatggattgggtgggattgtaaaaagaatattaataattaaaaaaaaa

SEQ ID NO: 390693 - DNA, 541 bp, Cannabis indica
tttgccccgtcgggggcatgagatgcatatcctccgtaagctccaccttgtggactgttgacatcacggtcgcctgccggtggatttgtagcctcttcgtctccagacgccctcttagggcccgatttgcctctttctccctctacatttcaagagggttgaagggaaccgccctcctagggaaggcaaaccccacaataggcattctagatggagtcgtggggagggccctgggctagcccagcctcagttaggcgtaagggggccaagggtgatcccccgatccccccatgccaaagtctattaccacgagtttttgcctctacctggtagaggaactgcgttctgccgccttagagggaccaacctatttaggagaagacatggtgtacctgtccacggattagcacaacaaaaagagaagggtcactgcttaacccgatcattcccaagaatgacgccactgggaatcagtgtcccaaagtgaatacaccattgtggttccctcaaaaactttcaagtaaacaaagaacttaccagt

SEQ ID NO: 390694 - DNA, 1682 bp, Cannabis indica
gtcagctatggtactgcttgctaggcggacaagtgcatctagttgtggtattctgttctctgggatctgcttgatcgtgtatcctttgagctgacttaacaagtctttgattttgctcaattaggcaccattttgtcacctcaagttgtgtattcaccaggacttgattcacaactagttaagaatcgctaaatatgtccatgtggtcagcccgtacttcatgcgccagcttgaggccaactatcagagctttattcaccctcattattcaaggccttgaagccgaatttgattgctccgtgcagttgtgtcccccctaggtgttgtaagggcaatgcctgcagcggacaattggtcagtgcaacttccattaacatggagtttccatgttagatctttgagaatttgttcctgctcttgctcttgcttcttctttggctcttactgttcttcttagtcttgagaaggctcaatagttgagttggttcattcagccacgaagtctgaaagggcttaacccttttatggttgctcttggttggtatgtgatctcgaactaaccaagctctatggcccatttgagtagttggcctgatgcttcaggaatctgcaaaacctgttgtagtggttgatcactgtacaactttatggggtgtgcctagaagtagggtctcaactttctagacgttaagagcaagccgtaggtcagcttctccatgagttggtatcgaattcatgtgttgactagccttttgctgatgtagtataaagggtgttctacactgccttcttctcttgtgaggacagcactcatagtgtgctctgtgactgctaggtacacgcctagctcttcattgtctatgggtttagacaacaccggtggttgggccaattgcttctttagctcttggaatgccttttgacattcctttgttcactcgaattttttgttgcctctgagaatgttgaagaagggtacgtatttgtctgtagacttggacataaatctgcttagtgcattaatgcgtctagttaggctttgtacttctttgatagttgtgggctatgaaatctgtgaacatcatgttcaccaacctttaataagtggcccctgtgtttttcagcccaatgggcatgactttgtagcagtatagtcctaggtccgttatgaagctggtatgctcctggtcaggtggatacaaatttatttgattgtaacaaaaatatgcctccataaaattcaagacttcatggccaactgtggcatcaaccagctggtcaattttgggcagcgagaagcagtcctttggacatgctttgtttaggttggtgaagtcgatgcagactctccacttcttgttgggtttaggtagcaacactggattggacacccattgagggtagaatgcttctgttatgaattcattgtccctcaatcgtttgacttcatctttgagcacttgggcacgcttcttgtccagcaactgctttttttgttgaacaggtcggatgctaggatcaatgttgagtgcatgggttttcacggaggagtcgatttcaaccatgtctccatgtgaccatgcgaataggttcatattttcccttagaaattctgtcaatattgacttgatttctagagccaaacctttaccgatcttcagtcttcttgttggatgagtggg

SEQ ID NO: 390695 - DNA, 1314 bp, Cannabis indica
tcaaacaacacaaatcaaaaactctgttctacatctccattttattcaaccccctcacattccaacaccctatattattgttcagtagctacctgagaagctaccccatcctcctttttttcctacagcactgttaaagagttgcttgagcttcctgcattttctcttgacactcaaagttgtgttgttgttgacagcactttagtcttctttggtatctcccactcttgttggtgctaaacattgtttgctgcaatttccttctctcccttcttctccttctgcttatttttatcttgttgttgttgctgtttttcagccttcgttttcataattttgtagtgtctacaagttgctttagtatggccatacttagagcagtgagaacatttggccggcaaccattcgtactccacattctgaccttggagctgcccaaactcattcaagaaaggaatgaattggggtggagtgtctgtgacttccatttctaccaaaattctagcatattgcaacctagttcgatccttggtatgttggtccaccattataggttttctaattgtgttaaccaaagcacttagactttcggtgccccaatattgaagccccaagtcatgtaatttgatccacaatggaatagtgtgaaccagattcattgtgttcaaatccgcagaccaaggacggactaaactggtttccgatcaaattgaaccactcctgcctccactacttgatctcgagttgcttcatcattaaaccgcaccatgattaatcccattgacaatttactaacctggataactccaagatggccccagacccttttaacaaagccttcgaatattgtaatgggtggattagctcccaaaaatttgcagatcactgttgatttccagcaattctcctcttctcagacctcctctagatcgacctgtgctattttaattccatctctaatcaatggtctgtaaacagaagccgttgatcacgattgctaaccttctccttcgtaaatgtctcccaggtccttttagctgattctggtgagtgttggacatccgacaacctctgctcattatccacctcctcagcccaactctgtgatctacttttttcagatcgattcaattcctctacttcaattaggtcatgagctttaaccatcttagcaatcagttccaaaccctccgtcgagtgaatatcgtcattgtcctccttctccctttcaattccaacaagagcatcatcaatcgtgagccgagtgactggtttccgtccaactttttcttcctcgccatggagggagaaagc

SEQ ID NO: 390696 - DNA, 815 bp, Cannabis indica
atatcatatatatatatatatatatatatatatgtacaaatttgcacaaacatataattattaagttaatattgtgattctagttcatgcataatggatttaaacacgttcctaaccagaatttgacacttttaataagtaaacatataaatttgttgtttacatttgccggatgattgagacaggtccagtgaactcgatagcaaacaactccatttttaataatcataatgtttccctaggaatgttattttcattaactctataagctaatattaatgttgggaaacttgtaaacattacacacacattgaaaaatgctaaaataaaaaaggcaatttaggaccaaaattatgatgttgttattagtacccattaatattttactataagtgcgagagctataatattaaattacgagtcattgatatatgttatcttaaagtgtcaaataccataccaaggtgacatataattgatcagcaaatttttatattatttattaaattaaaatgtgtaaaacttgatattaatatatattaataacagtatatcaattcttacgataattgatataacttattatatctctaaatcacatcaatattgatatatatgtcatatcctaaaatattaaacactttgaagtatttttttttttttgaaccagacactttgaagtatcttagactataagactcacaacaaactctttataataaaaattcattaattttttttagaaaatgtgataaaattaacttccatcactgttgtaatctttatctatttcggtatttgaaaaaaaaaaatta

SEQ ID NO: 390697 - DNA, 1493 bp, Cannabis indica
acagaattaaaccttaccttaagcttttctgctatgagaattttctattctgctactactagagcttagatcgctaggttttggattaaaaatcgaaaaaatgaatataaggagaaaaagttttgtcgaagggggagaacgagagtttcatttcatatgttttctgtttataaacttttttttaaaaaaataaacttgaaaatgatcagaagttaatacatagagaaaagataaaaaaaaaattcatatatccaaactagttcatcatccacctcgagtttatataataaacttatcgatactgatatgtttatatacgaaataatattataataataataatataatattaatattaatataatattattaatattaggaataaaaataaaaaaaaaataattaaaaaatttattattaatagttatcttattatttcttacccactaaaaaatctatagttctaaggcattaagtcgaatcccacatactcctaattacccgaatacttacactatcaacttatcaaaatattctcatcaattttatcaattaaacctattatgatatttctggccccagatcgagtctctaagatcatcaaacctgaaaatatttttattccacatatatctcacattacattcatgctatttaaatctctgtaatttataaatttcgcttatttattcacttataacaaatttaaattttttgctgaaatagattagtaggatcatactcctacttattacctgattaacccataatataaatataaacctaaattacttaccattacacttattaggatattacagaaatcctagtgtggtaaagggtatggccttacctgcttatttacctataaatacctctattttttatgtataggggggaacaatttttacttacaaaatctctgctaaaattcctagagatcttttttttttaaaaaaaaaaagagaaacaaggaatatagagattaccattgtaaacacttgtaatgcttgaacatttgccaaagaaggctaatattactgactcgtgaactaaaaatcattaacgtctgaaccacgtaaaaaccatgtttatttgtgatttaatattttacattccttaagctttcattgatcggtttttgaaaatctcggtaaacactacgtgatcctccaaactaaaaaactatttgtgtttatatatatactcctcttgaacaaataacaaataacaaataactctttttttttcactctcttcttcctcaagttctctcaatctttctctaataacatataaattttttattttattttttgttattttcttcttctttatttttttttttaaatttttatttagttttgaaagttttcattcacgtttttgggaaagataagagtgttgtttttttattatgtttttcaaagacttgcttgcaaatatagtctttatttcatctggtgttgaggttgtgcagaagatggttagtt

SEQ ID NO: 390698 - DNA, 1285 bp, Cannabis indica
caaaaaatgttcaattcaattatgaattattgagagagagaggcaatgaggcataattgaaagtatggggctcgtgattcgtgaaagggtgatacgaatcccctgtcgctatctaaatatgtaccaaccactaatatcacaccaaaaattatgggtgaatgtacacacgtgttaattattgaccaatatattatttttttagcattgttatttattaacgtcttataattaattagcagtttctatctaatttataaaattaaaatgtgttaaattttatattaaaatataccaataatgatatataacatgcaggcaagaaaaaagattatatatttttttttctaaggctcaaaaaaaaattttatcttataaccaactatatatttcaatatcctatgacccactatatttcaatatcggccgtttgcagtgattattggcatgttaagataccccttagtatttatctattttttttcctatgtttttttaggtaaaaagttctaaacaaattgagggtcaaaattttgaatattgaccttaattataaattttgagaatttttccagtgtactaatggttttatacattaaaaataagttatataatagattttaaattttgggtaagtggatctatagtaaaccttgttaaatggaggtttttacaggcctatatctattttgacattcaagagaatttttttaatttattttttttttccatgaacgtgtacattgtagttatttaatattacctttataagtagtttacaatgctaaaaataaaatataagtattttgttgtatgcgcgactgtttttcttatgcgcgtagtaaacaactgtttgaagcttattatttgctacagaaaactatttagaatttttttaaaacttataggtgatcttaaatagttgtaatgtacacgatcatgaaaaaatattagaatgaaaagctctcttagatgctgaaataaatagcaagtctacataaacaccattttaaaggaatgtactatttatttttcctaaatcttttgccccgctaacaaattttttggaactgtcactagtttgaataatgctttctattttataaattattttaaatttctaaattttttacagaatatcttaaattaaaataaaaattaaaatatctctaaatatcagtaaaaattaaaggatttttttttcatttttacacttcaaaacagtttacagaaactcctattgcaactagcgctgcaacttaaattgtaacaaaaaattatatagaaa

SEQ ID NO: 390699 - DNA, 2364 bp, Cannabis indica
tcaaaattttgaatacttatgttattttttacctttttttcttctattaatatatataaatatataggtctttatttttatttttatatatttcttaaaaagacagagaataaatgacatgccttgttttttagagaaggaattattcaattatgcactaaattgtatggtgcatctctaaaagaggtgtaaccatgcacaccttcatgttatcgacatttaaatattacgttgcatgtgtgtctcttttattttatatgtgtaaaatgaattatttgaatcatgttttctatattataaattattttaaatttctacaaattttatagaatattttaaataactataatatatattgttatatatataaaaaaaataacaactatataaaaaaatattaagaggtgcatcccctcaatttcttttgggtgtttctatggtgcactgatcaccttatatttaaaccaaaaaggaataaagcataattgaccattataaaagaaagaaaataatttgttagtgtagggtatgttttttttttttgttaaaaaatgttataagctagggtgttattttttttaattatttggtatggggtattttattcaatttttttcttaagaaaaacatttggtatggggtgatcgtgtcaatgtttagttttcacttttttttttaacaaaaaattaatttctctttaaatatcaagccatttatatacttggattgatattttcttcaactataaactattcacctaccacatagttagactgttttctaatttttattttacttaagaaacacataaataacacttttaaaaatattaggaaataaagcaaaatttgtatattttattattttacaaaaatattatatattgttttctgatgtatagaacactcttacaaaattaatgtcaatataatattccacttgtctattaaattttttcttttattttacaatatgaatatacatggtctcatttcactatttcaatataaatggttcaaatgaacatcgaagcaattatataatttaatattgacataggaacatgaatatgaacattcataataaatgtgaaactttgagagattaaaaaacaaatgaaatgagaaattaagtttgtgtaaaaaagagacaagggtggttgataaacatatttgttaaattttataaattataatttgtttgaataaatataacttttagaatatcatgtaattaataattataattaaaagatgatgtatgtattttttttatataaaataaattatatattgcatttacattaagtaaatgttgtttttgatgtgattaattacatgatattaatttcacttttttatttgacaaattcaaactttatatttttcaatgtggtacaaaataatattttaagttcaatttttcgtgattttttttttcaacataactaacttgaatcgagtttcagttacaaatgcaatatatataaaaccaatctaaccatagcacctccaggtcaagttattagtaaattttatttttatgaaaattgtgcccaaagaatatactacaattttaaaaaatacatgattcaaattgtcgtttaacaaaacaaaaaatttaatggataacttttataaaacacaaaatccaaaatactatttacccttaaatttattgaagaaaaaaaaacaaaaccgttctcactctactctttttcttttttaattttttaatagtttaaatcttttcaagtttttttatcagcaaaaacattgttcaaatgattaatataaaaaaattatacaatgtacgctttaatacccattctgttttgacattcaagagaatttttaagtctaattttctttttcataatcgtgtacattgtaattattttagacatcttacagaatttagaaaaaattaatacgctaaaaagaaaaaattctcatgaatggtaaaaaagatacggtgcatcggtgcacctttttatgggggtgcatggtagaaaataattgggtataaaaaaatagctatgtaggtgccaatctgggggaaatacttcttgtgctggaacacacttggatgatgctagtaaggcattttgtagttgaacaactctccctcagtccctcccaagaggaggaaagagcactaatcataattgctgctatgctatgctatgctagtcaccctatcatcattcttccatgaagcatcactacaaattaccttgtcaattccacagttgatcaccatctgcaaatctggtttgaattgtcttaaagcatcatggacatacaactataacataaacatttccagagtgattcagcaaacccaaaaacagtttcccccaat

SEQ ID NO: 390700 - DNA, 650 bp, Cannabis indica
ttttttttattaaaagtattatctacaggagtataaaattcctcaaaaagataagagaattactcaacaaaaagacattttagcccttagacaaaaaaaagttaagtgtccaccaagggtagaatggtcattaactaatcccactaatttcccgacactactaatatctaacaatgattccccgataataaaatactataccaaataaaatgtgactctctagtggcccaacgccaatttccaccgttaccaagcacaatcacaggtaaacgagaaattcacatataacataattatcatatatatatatacttaaataaatctccacaacatgcatattataaataataattaaatctcatgaataaatcctatttattagatagtccaatatattaacataagcgatctttacataagtaaacgtatcgttcccaaataatagactcacaagtgtaaggtcgatcccacaaggactgtagttaattaccaaataattaaattcctaattctatttgacaataataataaaaaaagatatttaatttctactaaaaagaaaataaagaagacagttaattaagggattatttcacaaatacacaaaaataacacaaattacaaaaatacggttgtatagaattttaaat

SEQ ID NO: 390701 - DNA, 1097 bp, Cannabis indica
tctttattcctcttatttctcttgtagaagaaagctcttaaggaattttggcagaggttttgtaagtaaaaattgttcacccttgctcatgaaaatctcgaggtattaataggagaattcttgatcaacatactttcaagattggccttactataaaagatctaacagttgatttggtaggtggcctctccatcatgcgatgcgtagagatgacgacccgtaccatcgagacctttcataagtgtaacccaaaggcctttcctttaagaatcaccatcttaaatggccgctagataatgggcaggtacaatggtacacatgcctcatactatgtcctggcatgggggaaaaaaactgatgttgtacctgaaaaagcattgccgtcactcctgtggtcagacaagtatggacgatggcctcgtgcaacgctgtatggtagtaaaacctgtcctttttgctacctacatagacatacttgtagagggcattgacttttgtaaggcatttttgaaccttgaaggaacacctttgcttctgctcccaggaataagaaatggcatgcacgctgactctccacgtgcccctgccttgaggtggtggatgcgcccttcgtggaaactgggaccgaaggcactaattagctgaagattaacttggattcttttgtgggattctacatgccatgcttgcaaaaatccggacaatactcctagtaatcgagtttcttaaaaacatggtgtactatgcaagtgttaaacggtcaagcaataacggataaagtaaaataaaaaaaaataattggaataaaagttctattaagatggaaataatttatgatttaactaaaacaaaattctaataacatttactaaggcttatccacattgaaagaccgcccgagaacgaccaactaacacactaaacctaaatgctaaaaacaaaaaacaagaattcaaagaaggtcctagaagcctattatgtcaacaacaaattcctccttgtcctcacttttggcaagaggagcatcacccacagaaagaggaagttgggatgcttaaggttgtagccttcaactcttgaagtctctttgactccgg

SEQ ID NO: 390702 - DNA, 895 bp, Cannabis indica
atttcaatagttcgggggtaaatttttaacggctaaaaaagttcagggggcacgatttggcacatgtcaaagttcaggggagaaaattactaatgagcctgttttttaatatgtcgtgtcatgcttttcgctcttgtcacgtgtcatttattcgttcttatgtatcatgcttctcgtgttggttcgtgcttaataatatattttccgtatcatatcttgtcaatttatagtatcgtaccatatcgtgcccaaacttatatttttttcgtgcctagacgtgctcgtaccttctgaactcgtattgagtgcgtaccatatcaaaaagttcgacccatatttacaacaatttagttttagttaataaaaaaaaaaaaaaatactaaagagtgatacagtgatgattgtatattttaaatttataataaaatatataaaatacactgactcgaccttaagctatttttatcctctcgttacataaagatcatctactcaaccactctttgatcaatttatgacacgattcagttgttaacttttgagttagacacattttatttatttatttataattttttgttttatttgattaagatatagtggtcatagaaggtgggaaaatatttacaataataagaagctagctatacttgtctcaaaactatacacgtgaaactactactctatacgttatttatctttttgggaggaacttcttctacaaaaaattatatatttttaggtggcgttcggtaacacttttttaatcaattttctatttttaaaagtggaaaagtgaaaatattttttaaaaacatgttctataaaactgtttttactttccaattttataattagaaatcaaatttttttttttaaaaaaaaatcactttca

SEQ ID NO: 390703 - DNA, 635 bp, Cannabis indica
aataaataataataataaatacaatcaatgctcataaattatctaatgtctaatgttcatcttgatcctcttcattaattaaacctatccaaaaaaaaaaatatataacaaacacaaaaataaataaataaatacaaaagaaaagtcaacggagagcaaaccactaccagtggcaaaacaagacaaggacaagtaaagaagccaagcaaatttctttttttatttttctactttccagtatacaactatcatttattattttaaataaaaataaattacgtaaatcacacaaaactttaacacatatgtcgcaagtcactttaatactttaataaataagactcatcttaactaaaaataatttaaaattatgtactacataaatgtatcaagtttgtggtgcaaatataatcatatcctagaaaatagaaaaattctatggtgtactcaggcccggccctaggcataggcgggctaggcctgtgcctagggcccacccagcccaagggcccaatttcttttttctcttttaaaattatacattttttttaccaattttgaaaaataccacattttttctaacataagggcccaaaaattttttttctccctatgacccactttgtttcagggcc

SEQ ID NO: 390704 - DNA, 906 bp, Cannabis indica
ataaactaaatattaaaataaaatctttcaattcgctttctctgtaaagatagtaattcatgtgaaaaattaaaatttctaatgtaagaatcaaaaaaataaaaaaggaggataatgaatttttttgttgtcacttttaaaaggacaatttgggttaccatgcttaaatgtaaagcatggacctaaattaatccacccattaaacacataacaaaaatatattattattccacctaaactcaaaaatacccttctcatttcaacttctcccattctctctcctcttcctttcattcactttctctctcccatataaggccatctaaactcactacaatgcattgctcaccaccgcgctccgctcaccactgtgcacttctcatcctcttgctctctatttgggcgattcccaaactatatgtatattgtttatttttcaatagatctacacatttttgtttgtttttattgactttttgtcctaaaattaaattttgaatattatgtgtttttttcttatggttttttttttagttttttgtcgatattttataatatttagcaatgtatttgtaatgataaaccgaatatgaggttagtgatgattagtgatgtttcgtgatatttgactataataataaatatttgcatacttagtgatgtttagcaatgtatttgcgacataagataaaaatacaaagcacattgctaattattgtaaacaattgagtgcaatttagcgatgtgttttacaatttttagtcttgtatcacaaatacatcacaaaaagcattgctaaatatcgctaaatacgcaaacatttattattttagtcaaactttacaaaatattactaaacttcatccctaacctcaaatttggtctatcattgcaaatacatcgcta

SEQ ID NO: 390705 - DNA, 1324 bp, Cannabis indica
gtggataccactaatctggtacgacctcttaagaatttgcatttttagtacaatattgttgttcctgctgtgggttatgcgggggtttaattttagcttggaaggtgggctatagattcgaaagtatttatatttctaaaaatcatatctctcacattgtgtattctaaccttaagcataatccttgattgttgtcttgtgtttacgagcctccatacttccataagaagaaaaaaatttggtcgaacattatggtccttggaaacaagtttggcgggccctggttgatcctaggaaatgtgaattttattatgagtaactctaagcgtgttcgatctaaggggaaggactagttcatcccctttattactgagttaattaattgtcatactttaatagatatgcccataaaaggtggcaatctgacatgggacaaccatagagatggatcaactcatattaagtcagcccttgataaagctctggtcaatgaagattggttacagatttttcctaaagtggtggtcagttcattcctcacttgcaattcagatcactgacccctttgtgttagtaatgtaaatcctaatactagaactagacgacctttccaattaaggcatggcggaccagggacccgagaagtccactggttttggatcatgcttgggcatcagttttccatgactgggtcccaggtagagtgtttaataaaatgggtgccatacgtctggcccagagctggtagaattgggagcaatttggtaaattggatacttgcatctcacagctggaagtccaactcctgaatattcaaaagatgcttgttggttctaaaagttgggccaaggaggttgaggtgagaaaggcccttaatggggctttaagaaggaaagctttacattgacagtaaagatcctgcgtttcttggattaaggatggtgataagtgctctagtttcttcttcatatctaccaatattcgaaataggcaaaattctgtggagagtatcttaaataaggatggggtgtggatcactggtagaaaagaaattggtagagaattctctaattttctggggggacatctttactaacccagtccaaggccctttggagaatatgcaccatctgatttcgaatcatctttccccccttgaacagaatgaattagagattatctcagagcatgagtaaattagacaaaaactcttcctatgggaagtttgaaggctccaagtcctgatggtatgtctgttattttctttaaacattactggaactcagctggtgtggatttctgtgacacaattgtggacttttcc

SEQ ID NO: 390706 - DNA, 555 bp, Cannabis indica
aaataaaaataaaaattgtaaataaaattatgtgtaccctatattttccactcacttattacaataagaattacattactaaaattacttctttcaatctcttcaataacaataataatcatacaatattagctaaggagcaatacaatgttgtttagtttcctttaaatttcaaccaagaaaagtgtttttgctatgttaatatgattcattttgaattaattcaaagtcactaagactcacaaaattatttagtacctaagtataatggtatgattttaaaattttgagaattaaatgatactagtttagtaatttacaacaatattgtagagataaaggttatatatggggttgtttattaaactattcaaactgcctacactgaaaaaaaaaatacgatttgaaatttgttacagtgcagtcgcagtttgaatttttcttaaaccgcgtggtgcggtgcggtttgggttttaaattgttaatatccagttcaaatcgcatcgcaccgcatattataaaaatatcaatttttatatttatttaggtctaata

SEQ ID NO: 390707 - DNA, 565 bp, Cannabis indica
aatatttttttttttcatattatataacagaacaatcttgatcgattttgccaatatatagatgaaatttagaattttggggcagttatgaaaataataagagaatttattatttttgttataaaaattctaggaaggaagtaatatagatggtgatgaaattttattaaatcaaaagtaatattaatacgtggagggtacgtggagatgtagccattcgacaggttttacgttaatctaattcaattttgtttttggttgtgtttttacgtaggaatagggcctaattaggatacagctttttctaaaaaaaaattcttgggaggaggaagattgcattattcttcgtgaagtaggagattattggttaaatatacgtggcattaagctgaaatgccactctatttttgttgatgccgatgaattttttaaattagttttaagtagtctttttagttctgattattatattattatatcccatgactgactgactgactcatcatgagtggtccggtctccggtgactggggaaaatatctttgacaccataaatatatgtata

SEQ ID NO: 390708 - DNA, 881 bp, Cannabis indica
gctacttgaactagccccaagtggttttttcaagatcttggattgtatcttagattcctagactttctaatatttgtaaagggtggcatgaatgcatatttgtatattcatttttagtcaattattaaatggaaaagtgtttatttttgtatagatttgatgtgttttttccaagtatgtaggttcgtgctgaaaaaataattttgtgacgatttttgagtctatttttgacgatttcatcattttctcaaagatcttgtgaaacccaaaatgatagaattcgtttccaactcatttggagtctagatacaaaatttttacatgatttactgagcaaccaaccaaattttatcgcttttttttttaggatggggaaatagtatcccttgttactatcgtttgatttttgtttggtttgattaacgaagtagactagtagataccccaaacaacctaaaggcacacaaccttgaatcattttcaaattgtagttaatttaagttagcaaatgatcgacactaattagcaatataacactataaatattaattttaaaatattatgagctatatatttgtataacaaaagaaggaaaagcctttaataatcatgatatccagggccgtctcaaggtgtgaagaggcctggggcaaaatttaaaaataggcctttttttatataaaaattaaagataaatattaattaaatttttgacacaatatcaattttaattattttatgtaataaataaatttttgccacataaactctcgataaagtaatatttaattaattattacgaacatctctattgaaaagttatattttttagcattttttttaaaaaaaaatatgtcaaaaattatataatttttttacat

SEQ ID NO: 390709 - DNA, 692 bp, Cannabis indica
gattcttgagtaagagtgtgagacatacacttagagaatatccaaacgaagaattgatcttgatcgactgtattgtatccctgttcttaatcaacaataaagacgttcacggtggtgttctagaactagaatggtgtcatagatcacatcaatctattagacttgaaccaatatatatatatattggtgttaattttattgttttaatcatttctggctataatactctgttcgtctctgttatatctttgattcctagttcatgatttattgatcttgtcattgttgattgtttcttaattcaatttttagttgattaatttcattgtgcacattagttgtaattttctcacatttcctaatgttaggacgtaccatccaatgtaattatgtaagctaaatatcttaacttagctatatgtgtttcaacttgttaaatgcgtatatattgttcaagcaaataaaatacaatatcccttgaaatttcatcataccaaacttttccagaaatggtatatggaggatatagatgaatgcatacacaaaaacatattgataattattaattctctggtggaaatggtatatgtcatacttattgatatagctgtgtataagtataacataaggccatccaaattccttagccctagggtgatattttctctgaatgagatgttggtttcatccaa

SEQ ID NO: 390710 - DNA, 780 bp, Cannabis indica
gaaaagaagaagaaaaaaaaatccaaaacagtgactagttttgtagctatccaaaacttcaaccttatgtcatttctcaaaattttggtgcaatcaaacagattgtgttgtattacctaattattaaatgggatttgtaactaattaattatattcaaaagcaaaggaacaaataagctcacttttgattatcttttccacaagtccaattccaacagtttcctttttacagctagacttgacaactttgaatccaaggaaaaagaaaagaaaaaagaatcactatcaatacaagttatgatatatcaaaacaatgaatcttatgtatggatttggtgatcttttggattaatatttttttttttcattgtaaaataaaataagattatataaataaatatatgtattccacatcaaatattaaatgtgtgtgtacatatatagctttctatctttttctggtgtatttggtgggaatctgagcatgccctattggccttaggatatcaattttgtatagaaaaacttaaaaaagaaattgcttaaggaattgacaaatgatttgtcctcttcctcttccttacttttctattctatgttattattttaaaaaaatatttaaagcctcgtgtgaccaatattattattatatatagaattttaatggataagaaaaaaaaaatatgacttttgaaataatatttaggatttattattattattagatctgtgctgattcgttttttttttttttgaaaaatgatgaattttattaaatca

SEQ ID NO: 390711 - DNA, 1401 bp, Cannabis indica
gtttgattaatatgttctaaaaacagttttatttctattttattttattttataaataattatatttacacacataatttatacacaaacattacatacacccatctggtaaactattttttttataagtgagaccgatcttaaataaaattaattattgattgaaattacttaccgtaccgtataagtgtatacatattgttgttagttgttctgtgtaaccatttttagttgttaaattaaagttatggtataagagaactacacaagctctatacaaaccctttacttgtattaatcgattcattcaattcaatattaatgaacaagattgcttaaactgatcaactccactaataaaaagaagcataattaatgaaaaccccaaacgactgtgatacactataaaaaaatcagctgatcaaggaaatattcaacaaaggcattatatatataaactcataatgagttcatttatttataatttattgcactgcaacaccaacaaagttagctattattattattattattattattattattattattattattattattattattattatagttaatttatggaaaaatttggtcccaatcgagtacttggtacacctcacaatggtcttgatcgaactcagcatatccagcatacaccccatctgtgtaaggctgttccgccctccacagacaaccgtagtttccggtttggacgtggacgaggcggaaacagtcattgtcctggctgaaatcattagccgggacaaacttgaacatggtacatgagaatgattcggtgtcctccacacgacagtcagaccccgcgacgatccacagatggctcgggcttaggcgtgttaagtatttgttgttgtaacagcaacgaatgtgcacgcattcggggtctgtctcggctgtctccagctcgaatttcgctaaggggcttgcggtgttttcttcggcggtgaaattgagaaatgtatctggaagctcagtttgtgaactcacttcttcaggtacctttcttaggtattttccattgtatgtggatttgattgcgatagagtttggtaatggtgacatttttgaatgttttctcttcttcaagtacctttcggatatgactcttctctatatgtatttataggcaaatgttgggactctatatgttactttagtgatagacaaagttgacctttggtataatttaattacttattaattaagctaaattaaaataataaaatatttatatatttataaggacattatacttgcactttcaaaatttatattcccatataattaattataatcttatatttataaagtggaaatatcattacaaaaaacgggtacttttagtgataattttttaattataatataattttt

SEQ ID NO: 390712 - DNA, 1157 bp, Cannabis indica
ttaaaaaaaaaaattaaaagaaagcaatcgaaatggaaagaaaagtataaaagtccagcccaaggtggggccatacgcccagaaacaacacaaactagaaatgtttctcgatcatcgaacccaaagatccggacgaacaaaacccaacatcaaccacaaacgaaaagcctccccaaacatagactacgctgacttgggataaacaaaaataaataaatataaatataaataaaaaaataaaaaagttcttcaaaattaaaaacacaacacgaacatattcaacttctgacctggaaacaaaaagtaaaaactaaaaaaccaaaaaacaaaattgaaagatttttttttttattaaaaaaaatatataaatcaaattttgggtgttggggttctttctcaatcctattaaacttacatctcatcaattcgcacatgtttgacataatcacacccattcatttaaatactccaaaacaaaacaaaaaaaattaataaaattcaaaagcaaaaacaaaaacaaaaattaataattataattatgaaagttggaattagaagagcgaggagggactgttggattttttatgtcttgaaattcttttattcaaggaaaataagattattattaatattattattattctttttcgtaccaatctcatcagaaaaactcgaacttttcttttttggttgggttggcatttattgttttagtttaattagtttattgaatgttgttaaaaattggtacttttattcgttgataattttatgatgataattctaagcctcaccctttttgttccttgactattacggtgtttttgggttaaaagaaaagaaaagaaaacaacaaatcagattcctttctctttttcttcttccccaaaccctagttctttcgtctctcagatcttgatcgtcttctccaatggaggctgcctcagaagaagaaaaccagattaagaatgatcataatgttaataacaagatcaatagctctaatgaaggacagagcaaacctaagcgtcagatgaagactccttttcagcttgaaaccctagaaaaggcttatgcttgtatgtataaatttttgcaagtttatttcttttttgggatttttctaattttgtttttatttattttcaagttttttt

SEQ ID NO: 390713 - DNA, 976 bp, Cannabis indica
gtggaaagaatagcatatatataatagaaagtatatatattgaatttcaacttgcaatgaaaaattatttaattgagcgatagtatatatatgtgtggttgaatatatttcaaagatcaatcttaatttttaatcaataaaatattacaatgtggtgtttagcactttaaagaaattaagtgatacataacactaatctatataataataaacatggacatcatgacatagatataatgctataaatggcaaatgtacacattgtacaattattctcaagttaagtgttatatatttagtacatatatataatggatttagctttagttgagtcttgatgatcaataataggtattaatttctcaacattgtgctatagattatatagtacacaatacataatgccaatatataatattcatctttgactttgtaataataagcatacttttttaggcatatatactttttcctatatgtagaaatattttttagtaggggcatgtttttggtcctattaatattataatttgattttccttatatgaccgtcgttatttaaaaaaaataagatttttataaaattttgaataatttacaatatcaaaaataaatattaaaatactaatcttaggtacacattttttttttgaagaaaagcgtgcaatatattaacataaatcagttagacctgtcggtcattacagaaaatattgtcgggcaaggaggtcggaggcacagatccgaacctctgatgggaaaaggcctacttggccacattatgggccgcaaaattacaaagtctactaacatgttcaaaactacaaccgataaaagaaggagagattctgttacaaaaagagacatagttctcaagctcccaaggagaatctttcccattgagggcattgatcactaccctcgaatcactctcaacaataatataatgaaaacctagagtcctagccgcctctaa

SEQ ID NO: 390714 - DNA, 1094 bp, Cannabis indica
ggtcaattcgctaaacggaaaggagtcttgctggaggcttgtcatttatgcctcattttgtaaaagttcttcttctctttttacgagttatattttgactaatattagtagaacttataattttgctgcacacaatgtggctaagtcggcgtttacccacaaacagtatggagggatccccgtctcctctatcccgactaatctattttgtaatcaccacgagatctaactcctattattaatacacgctcaattaaaaaaaaaaaaaaaaaaacgattattacttatctagataaggcaggatatgagggatattaaacgtgatgttcatgtcttactacacaaaagtcaaaacagtgggcaccgtacctttagttgaccaggtccaacctggaccattacgcgttctgttataattttatcataaagagatcactcacttttttttttttattttttgaaaggagaggtccctatatataattaccaaaatatctaatatgtacaacaaaatcaaatgtcttaaacagcttctttgaaaaaagaaaaattaaatatcaaaataagagtgataattataatctcgcattattttttcatcaaatttcatatagaaaattttatgttgaaatagttcttttaaatttttttatagggtattatttatagttatagtatcatctttgtaaattttcaaaaaattctgaatagtttacaatacttaaaagtagatatcttgatattcaaatttactaagtgcattcaaaaaacttcaaacttattttcgacactataaactatttaaaatttttcaaaaatttataaggatggtgttgtaagcaaaacgaataccgtcataaaaaaaaattaaaaaaataataccagtatgtgtttttgggcacgaatattaactaaaagatcgtaattaatgagaaattgacagtagcactccttttattttattataaaataagcagaccaagtgtacaatatatattttaatccgtaattttttgttgacttgtcactaattaatgtgtttatcactaaggtacaaaataataataataaaagattaatatatattttttttt

SEQ ID NO: 390715 - DNA, 1987 bp, Cannabis indica
tattccatataatttaaatcctacccctatgtgaagtagtataaaaggaataggatggtctgattctcatccaactcttataacctagtttacattctgtcagacaactagggtttttgagagcctccattccttctcctatttcgaaatcctctctctccctcttcataaattttgaacctatagtgaaagagtgcatgcccacccatagcaagtcaagtactcaattatactgtgtaagagtgtgaagaatccaacacttgaagtagaattcggctcaaatcttgataatactttgcaacagaaaggaataagggttagagatctgagtgagaggagacatattatgctgatgcaatcaatgtaaggttacttaaactttctatgtgtttaattatattattttagagaattcatatttagggtgttaataaacatacttgttagtgaatctagatcctggtaaaatatattctaacatcaagttcttcaacaacatctcttatagtctctacatgtttttcagttgcacgatctttgccaaaaactgcacacaagtcatcataccaatataaaccaataatattttaaggagaaattgttgtagtaataaatgatgatgcatgattaagaaagaactagaatataaaaacttcatataatatatcatatataagtacttgtaaatatgcttcccacactgatttttctgcagttacagtttttctgttactgtcccatccaaacccaccacaaaatggcctagttaacatttcatgtactacttgaaaatgagtcttcaaagtgtgtggcttaacttgtatgtcatatccaggcattctctcctttagtttcatcttgagagctctaagatgatatggcttgaagtttccttcaactttaaacttccttttattagtcagctccattagtgctttaataaagtgtttttctttatcttcactccaaaatcttttattttatcctagacctcttccttttaaagtcttcatgccgaaataaggaatcacagtaatgtaaaactaaaaactaaagctaaaatgttgaacttaaatgaaaaataaagacaatcaacagtaaaaaaaacaaaactaaattgatatatacaccaataataaaacataaattgaaagttaaattttaattttgtcaattacacaagtagtcaaatgaattccatagctaagtgaatacaaatataaaaacttagataaacattgtgcattttatctaagaaaaaaaaaactagcttgctctcctatgtttcctccattcgctatacatttcatgtgctaaattgtttttaaacattgtctactcttcagaagcttcaatacttcttatggatccatcaacatcttcttcatctccactatcaatctcattctctgaaagcatataattatcagttggtatttttcttcttataaaattgtgaagcaaacaacatgccaaaatgattcgattttgagtctttattggatagaatgacgaactcctaagaattgcccatcgattcttaattggaccaaacatctctcaatgacattcctaacagatgaatgcttcatattaaatattcttgtggatttttaggaggattcccatcttcccaatagttgaggtgataacgttggcctcggtatgaagcaagaaatctcttacaattagtatatctagcatctgcaaggtaataataacctaaaataaattaaagatggggattaagttgtctcctaaatgagctactactcaaaaataaaaaatatacaatctaaaacaccaaccttaccatttggaacacaaaactatttgttttatggcatcacataaaactctaccatctactgcaaagtcttcccaacaaggtaacacatatatgaatttcatgtctttggagcatacacctaagacatttgtagctattttacttttttgagtacgatattttggtttatcatccata

SEQ ID NO: 390716 - DNA, 950 bp, Cannabis indica
attggtgattgcaatggtacaagatggagatcttattggtgtcttatgtcaaagtctcttgaaaatgaaggtcaggcggcatgttttgttggtgatagcggtggtgcaagatggaggatcggtttgaggggaggctatgtggtcctataatttaaggggaggattgttgggtgtgcaaccaaagcgctccacattgattaggaatgggaaagatcgtgggtatataaggatgaacactatctctattggtatgagcctttcagcaaggtgcccatgagcaaaactgtgagagcttaagctcaaaacggataatatcatacttggagtagagatggatggtgtccaaagatcattaacaattattattattattataagatttttatgtgttgtgtttttgtgctagtctattcgcgtgcttacgtattgtgacttgtgtcttcaagtttgtcgtggcgtgtcatgcttatgtccattttttacgtgtagtgtcgtgccaattcacatcatcgtgttatgtcgtgctcaagcccatatttatttgtgatgagttgtgcttgtgcctctcggtcttatcccaattatgtgtcgtgtcaaaaaattcgattcgtatttataacattatttctaagtagttatcccaagcaccaaaaatgccttagtggcagtttggatgatgttatggcattactgtgctaataatttgtgtataatttaaataataaataatatttttgcttaccaattatcatcattattaaggcacgtcctctgaattttaaaattataaaattaaacaaattttttgaatattaacataataaagtagatgatgagaaagatataggcacagtctggttcccggtgacattcagctttccttaagatgacgacaatcattagtgtaataattaacgtcattattgtgatatatgtattttttttttttt

SEQ ID NO: 390717 - DNA, 2195 bp, Cannabis indica
ttaaaaatttaaagatgaaattagatacttaacttctaactattgatagtatttgcagagatgatcaacattccatgctcttgggattacggacccatacattcgtttaagtttgtaggtcccagagcctatttcatcctcaatctcataagtccttcccagtttgggcccaacacccccattctagggtcttgtgaagctggaaagatccttcttaagaccaggtctcctatggagaattttctatttttcactttagaattaaagtgttttgccactttcctctagtacgtagccagtaaaatttatgactcctcccggagctcttctacgagatccaacactcttgcaacagtgattgattggtggaaagatcgtagttagttcttctatgggagggaatagtgctttctactgggaccattgcttcacatctatataccattgaaaacaaagagtatcctgtggtggtctgggcggtagtcctataagcctagagtacttgcggcaattctctaggccaattatttttgcaagccatgagattctttttgagtgtgacttttagtatcttattcatggcttctgcttgaccatttgcttgaggccttgcaactgcggagaagctttttgtgattctgtacctttcgcaaaactcgtgaatatgtcgctgtcaaattgcttaccattatttgagactattttatgaggtagcccataccgacaaacaatatttttttatcacaaaatctaggctttcctttgacgtaattgagtttattggttatgcttctgtccattttgtgaaataatccaccacaactatagcctgtttaaccccaccctttcccgttgggagggacctaatcagatctataccccacactacaaatgaccacgagcttgtcatcaacgtgatttcatttggtggggccttcaggatgtttacaaacctttggcatgggtcacacttctcaacatgatcaatgcagtcctttttcattataggccaaaaatatccttgtgtgaggatcttcttggacaggctaggacccctagtgtggtctccacagaaccctttatggatttcttccattatttgtttagtttcaggattagaaacacaccttacgtagggcatactagagcctctcaagtataaggtgctatcgatcatgagatattaaggggcttggtattgaaccttttaggaggctgtgcgatcttggggtgactctcccctagtcaaataattgactattgggtccaaccagctgggctcttggttggtgactgcaacctctgccttttccaagatgctcagatccagaaggtattcaatgggtaccaccccagtctttccacttccttgttcaaagccaactttgctaaacagtcgtgagcattcttctctcttgaaatctactcaattttatagcctttgaactcctgaagctgctctcttacaacagcaacataagaaaccattctttctttgcgagtttgttggctaacaaccaattgcaaatcgttcaatacttctatcttttgagctcctacaacttttgatagtcttaacccaaccaatgtagcttcgtactctgcctcattgttaaggcagggaacttaaattgcaaagctatttggagcctcaagcctttgagtgacaccatcactatccttgctcccaatccattcttgtttgaagccccatccacatatattttccaagtgcaggaacatattttaggttcatgagaagttgcctcaattttgttgcattccacgataaagcctattagggtttgccctttaattgagatgcaggacatactgtatgtcgaattgactaagctccattgcccatttgagcagtctcccagaagcttctggcttttgtaggacttgtcgtagtggatggttggtcaagaacttagtcaaatgtacttggaaataaggtcgcagctttagagaagctatcaatagacagaaggccaatttctcttttaaagggtactggacttctgctcttaccttccttttactcacgtatagactgttgggttttgtgccctaaataaaacccttttacaatctgattagttatcaatagaagaaatttgaagtgatttatgtttgcatgaattttttcatgctaatggtttaatatgtttattacatttatacacaaaatc

SEQ ID NO: 390718 - DNA, 436 bp, Cannabis indica
aaaaaggaagaagtacggaagaagaaataagaagaatgacaggtttggtttgcatgactgactggtatgtacacctgttttcctaagaattggcggttgctcttgttctctctccttgtttttctttttttaaataaagaaataataattcaacaagaaaataaataaatcaattttttaaaaaaaaattatatttatcattacatttaattttatattactattaatactttaattttatattactaaaataatattatatttttatatgaaatttttccaccacatattaaaatttagttaaatgttacaattatagagacatgattttgtcacgtgattgtactttcacggaatgtattccgtgatgtacgacacccgttagatgagagagttatttaatctgagggctgagattgatctaggggtaattagg

SEQ ID NO: 390719 - DNA, 2181 bp, Cannabis indica
aaatctaatcacatatctgacgctttcatttcataagaatagaaaaagaaaaaaatgaaaagcctcctcctcctccttcatgtcacaacatcaacagttgacgaagtaaggaaccatctaaccataaccaatggattagatgggattgagctattttccccatataaaaacacagcccattgggcccaaatttctgtcatgtatccatgctttgagtgtttaaattagggatattttcataaatactaaaaaatgacaaaagtttacaaaataccaatttacagtttttatatttttacaatttaattttttaggataaaatagagagttatttttttattgttttatatatatatataaaagacaaataaaaaaacctgtaaaaaataaaagaattaattagataaaggataaatagtgacataattaagtacccaaacttttgaatttgtaagcggcataagtacttacgtttgtaaaactttaattttccttcagtattattattacaaattttgttattatcttaaacacatgatacatataaaactcatattttagattattgagtctatgcagaaatatatagtattaatgacttttaaattttcttcgaagtatatactaacaaaaataaataaaattataattttataaatattaaatacttattgcactagtttcaaaaaaaagaaaaaaaacttatttacactaaaacattattgggtatatttcgttattttattagggtgaagtacgtatagtataggactgaaaatgaatattgtgtacttagtcagctgaccaaagtttttaattaaaccacatgccacatgtaacggccactccacttccattccagtcgtactgatcgaatcaggaaaaaaaaaaactcataattaagatttaaagtacaagaaaaagataccttcaaaaagtgtaaaatctaattaataatattaatttcctgtaaaaactttattattattattattatttgatgacgagcctgtaattatttatgtggattgatctaaaatactacagataaactttaaagctaataatttacctcgaacaatctcctatatacttaattaattattagagggtaatgacaaggctgagctaaccgatttgtttaaactttgttatatgtaaggatgagctatagaaaataaagttggctgggtgctgaatctgacctataataagatatgatcgatccacttaattaatatactacatatacattaatatatagttggatcaattcggtcaatttattgaataaataagtttgacttaatttctaattaataagtaaggtgtatacatctcagtaagggaatgagaatgacattaatttataatcgaggaatagtaatatatatatactattggttaagaaaggttattctaggtagtgggtggtttagttggaaccattacatatcatttcaccaaattcatttagtctcctatatacccaaacccaaggccaacatacatattcttggagtagcttcaaagtaactcatcatatacatatatggaagcctatatataaggctagggccatatttttatacacagaatatatacattattttgctttttttcttcacatgatccaaatgctagtgggtggtttgtgatgctttaaaaagcaaggtttaattattagtgtttgaatattatatattaattcatgctatattatacattgatatgaataagatcactagctatatattaattcatgctatattatatattaatagcttgtttgttgtagtagttctacaaaattatgaaactagtacttaacttttcggaaaaagagaaataaaaactattatacgtacttgttaaagctcagcaatacaattgtaattaaagtacctttagattttagatattctcgaattgttttcatcaattaatacaacattttcctttatacataatctatcaaatttaatccaccggtttatagcttttatggcacattgaagacatgtactactgcattattaaaagtgtaccaattgtactaggtagcattaaaattaaagaataaaccttttgttctattaacttaacctgatcagtgatcattacccatttaattaagttatatatcctttaaaatatcaattatattcatatatatatata

SEQ ID NO: 390720 - DNA, 1134 bp, Cannabis indica
ttgagaattgtgatcccctcatcctgtctagctaagttctgagggctttggaccagctagtccttgaacatgtctcgaatttgatccaactacagaaggatctgttgctgcagaggcctagtttattggccttctttgattgagctgcaacctcggatttgacagagcctgaccggccataccttgggataaggtatactcaaggctggccagccctaagtctagtgcttgtatatggccggccaaccataagctgggcacctggccacccatgcttctttgcctgattggtggagtttgtgcattgacatggagtagatcgcaccaattgctggagtttggtggatctaactatctgaattgattaacttcacttctcaaattgttgtttttggtgttgccatcctctctcaatcctcgtcggttgaaaattgatcttcgggtgactcgctccccttggggagggagtgctcttatctggctagccacggggacttttggaagagtttggccagccataggggctcctgctagtggctggccggccacaggatgggcaaaaggggttgttgttaagcttaagattcctagtcagccccccatgccagtggtcgcctgaatctagcaatttttgctatttgacctttaaggaaaggtttgtcctctctctagcaagggaagatctgtcctagttcctgaggaattgggttaatcaacatattgatagaccctccctgatctatcaacaagtcttccttaaagtggatctctgatgagatcctcgcctcttctattggttctctagttgaactaccttattagattgttggcctctctattgcagcgatctaactctactttgtgagatcgaaggacgtactcttggtcatccattcatcttaggaattcgagtctctgctgagcaagtacatcataatcagtagtgcgtggttcttaaaaggattcacgtctctactaaacaaatatattgcagtcagcagtagggctatacatcggtcagcttaggcggtttatcctatatattttctcactcaatctaaagttcgggttgctaaaattcaaatgcaacccgcccaattttaaaaaaaaaatatgtaaaccgaccaacggttt

SEQ ID NO: 390721 - DNA, 951 bp, Cannabis indica
tttttccttgaaaccctaatcctagcctatcttccttctcatttttattcttctccattgtcacagccaccatgagaaccatcagtattaaattaacacaattacataagattgatattgataaagacccacttaagaaaaactatttaatctcaaccaaataaatattattcaaaaaaatcaatccaaaaccttaaaacaccaaatatccacaaataaataaaaaaaagtgctaatttgctcatacaacctgtaagtgccattattttcacagattattttaatagtgagtctagtcgtatctggtatttctagtctgttataactacacacctgctttctgttacagtccgtgtgagtttgttatgacttaacagttggtgttagtttttgttaggtcgactgaactattgcatataaatagttattttcattctgtaaacgaattagctatctgattgatgtctttggttagttcaggttcatcgtgtgagttagcgtagtattatgcttttcttgttgttgtttttacaggtatgatcgcatagcttgaagatggtgatctatagtagagagatcaaagcctgaggttgatgagttcagactaaagggagttcagtgtcatcttcgtcatcagatctgaaaggatttcagattgaagagaaatgtcgaagacgatctcagttgctgcacaagggattgtgttcatacaattaagattcttgattgttgttggtaattcattactaattgctgtaaagattgttttaaatccctaagagtgaactggatattgtaatacgaatcttttggatttagtagatgttattaccttggttcggggaacccaagcactagtcggctgagatgtgttctcagtgcagatgaagcttgtaaattattgtgtgctttactgccttattctcaatccaattcttgaatgcatgagtt

SEQ ID NO: 390722 - DNA, 1327 bp, Cannabis indica
ttaaaaaaaaaaaaaaaaaaatttttataaaatatatataacttattaatccaaatattaggttgagtaatgacagttgaccatagatagaaaataattaatacgatgaattagtttgatatgtgtactatcgtttaataataataattaatttggtgattgttttagttttattactggtcctacttatatatatatattaaatattgattttactttttcctaagcaaactattcttttttatttttatttttattttaattttaagtatggaaaaattaggggtgttcatcaaatcgcttacattgtgcaaatcgtttacaccgtactacactgcataaagattgtggtttgaaatattctttgtgacacggttgtagtttgcatttttccaaactgtgtggttggtttacaattttaaatttaataattacggttcaaaacacaccgtactatatattataaagttaccaatttttataatatgatttctattttttttcataagaataaatatatgtaatatattattcactatatacatttattttttagagacaatttcatataatgacttgatcattaatatacgatgtttaaactttaataatatttttttttgtaatgttcgataatgatgtagtataaactattcaaaccgcaccgcactatattgtatttttatggtgtagtttttacgattttaagatctcgcgatgcagttgggattcaagattaaaaaaatcgctcgagtttgatttgaaaaaaaaaattacaaatacccgcaccataccccgctaagtataatccaaaaaaacgtatataaatatattgaatgcaatattgttactagattctgctgcgatgagatatatacatagtattgatgctttattatttaatattaaattaaacaaatagaatatggcaaaagaaaaattaatattgtgttatgataataagtaaaacaagagtaattaatagagctttaattattattaggtattttaaagtgttatacacacgttgtgcctatatgtactggttaatagttaatttaggaattattaggatatatattcttaagagtttatttattacgtttgtaatattatatataaatatattaattaattaacgtatataattatgttcttgttccaaaagacccgtatattatggtctttcatcaattaacgggtctttctagaatttaggagattttttaatggaaaatacccttaaatctaggggtgttcattgaatcacatctaatattttgaggcctatccagatccgatccaatcatatattggatgttagatt

SEQ ID NO: 390723 - DNA, 833 bp, Cannabis indica
tatgattaaatgtgtttttagtttcaatatttatttgtgactaaaactaaattagtaataacttgtgtttaaatactatattttagtcacaagtaattttttgttgtaactaaaatcacatttaatcacaaaaaatttatgttgtgattaaaagtttatcactaaagattgtttttttagtgaaaatattcacggtaaccattcaagcggataaaattagtaatatcatttgtgattttaagttgaatcctttttttctccatgagaataatttgcctactcaacttctcgtatttaaagtgatttatgtatttatttcaattatacaattgtttcgaaccatcaagaaagaagattcgggtaaagttgaatcctttttttctccatgagactaatttgcctactcaacttctcgtatttaaagtgatttatgtatttatttcaattatactattgcttcgaaccatcaagaaagaagattcgggtaaattatgtacttcctcgaaaatgaaaaaaaaaataatctactgtcatttagtatttagcttaaattgtttgattcctacatattcaattaaatactgttttttttttttaagattgaatacaaacctatgcaccttctcaatatacacacttttcacttcatcaactcaaagtggccaaaaagcataaatatttatttttagtcaccaattacaaaattttcaaaaaacttcagaattattgaaggagaattttcaaaaatacactaaatatatatgtatatataaagaataataatttataggttaattagtaatttttctatccgaactttgacatgtaccaaa

SEQ ID NO: 390724 - DNA, 638 bp, Cannabis indica
taaaaaaaaaaaaaaaagtcaatgttgccacgattttattatttatgacatcataagccacgagtcacaagctcacaacctattactccactacacttggttctattaaaaattgcattaatatgatgatgatgatgatgatgtgattgattatgaacctaattatattgacaagatgaggttgataattataagtagagtttaaaagtataaattattgaagttgaggtcaacaataattcattctaataaaatcaaaatctcagtgggacaaaatcatgccaatgggattcagcctcaaactagaggtgttccataataattcattatttttttttatgcaataacaaatataaatataaatatgttagattttcattttaatttatctctttctttttctttttgacttattattcttggttgagaatatataattataattatactttgtaattacaatcttggttagacaatttacacacctctaatgtctcatcaattatatatagtaacttaattaatgatttgattcatgcacgcttgctaaagtagttatgaaaatggccctataataacaataaattaatgggccttttttatttttacaattcaaaacagatttttttttttttttt

SEQ ID NO: 390725 - DNA, 822 bp, Cannabis indica
ttcttctttctttttccttggtgcttctgtatttctcataaaatttaagttattgactcgtaatattaatattggtgtaatttatataatttaatataataattttttagatatatctctaaccaattgtatggtaatacatctaaaaggtgttaggcactactagtacttaatagtaatgttctttttttaacatatctttctttatgtattcgaaattggtaacttaattttcaagtcactgttgaaatgattttgcataaatgccatttagtgtcgactatcgaggttgcaagtatactttaagagtattgctattatatatcagtggtactcagtactttttataggtagcactccacgatttgttagcgatattttctaaaaactattttcttaagttatatgggactcgatacttaattacactaataattgtatgacaccgacgagagtgctaagtaccagtagtatcttttagcaattctcatacttttaactatcttaacgtaattgtttgttggaaaaaaaaatactaagatacattttaaggtgtcaagcatgaaaaagaaataatttattcttattagtgcaatttattattaggtctcatatattttcattaaatattgctcttgtttgttgaggttgccatacacatactaagttaaaacacgaagctcaaagattattttaggcatagtgctcctaataaaaatgtattaagagaatgctaaaagacattaatagtgtttaacattctctcacgtgttactatcactattggtacaattaagtatcgagtttcatataatttaatgt

SEQ ID NO: 390726 - DNA, 724 bp, Cannabis indica
tatatatacatatatattcaaaaatggacaaattagtgttttacatgaatattcgttttacattatgtactcaaaatttgtaaattaaaaatgattttaagagtctttggataaaaattaaaaaaataaaactcccacaaatatttgtgaaggatatggcgcataactgtgtgtgaaggtatagtagaaaagaataaatatggtagatttttttgaaaagatgagtgctaattacaatctcctattacaatttcttagtcaacttccacgtttgaaattatatatcgaaataatttttttcaaattcttttttatagcggtattcgttatagttacagtatatcatccctgtaaattttaaaaaaattccaaatagtttacagtaccaaaaatagagttcctttcctgatattccagtttaccacgcgtgttcaaaaaacttcaaatgtatttttggtactgtaaactattcaaaaatttacaagaataatgttgtaatcataacgaatactgctatataaaaaaattgaaaaaaaaatatttcggcatgtgatttcgagcgtggagattgattaagaagttataattgtaatcagcactcctccaatctactaagcactcctccaatctactaagcacatgctttctgatcttatggcacgtttactatacagtattcagaatcagaataatttaaaggagaaatgtaacggaataaatgaaa

SEQ ID NO: 390727 - DNA, 880 bp, Cannabis indica
ttttttttttttggtttaacttaggaagaagaacatgtgtgctctgctaatttggggtttagtcagaactatttttagtctcttttttttttttgatttattttttgttgttttcccccaactcttcttgctatagtaaagaagtttagtttccctttgtatactttttttctatttttctttttttcttacttagaattatcaactataacatctttttcatatatgaactacatgtcgtgtctttgaaactaataacaaataattgttctgaatgcataatggcatgtgtttttagagtactaattataatatcatttgttttttaattctgaatagtttatagtactcgaaatagagttttttatatttaatttaccacccgcgtttaaaaaattttaaatttatttttaacattgtaaattatttgaaatatttcaaaaatttacaagatgtgatgataatgaatgttgctatgaaaaagaatattctgacatagggaagttaactaagaggttgatagtagcactcttcttttattattataggcatttcaaataagatgggtttggtcaaaaggttagaaaatagtttttttttttcaatagaagtttcggtaacaggtgtcttatgagttacgaatatataagatttgccgttgaattatagtgtttgttatgtgttttatgagttacgaatatgtgagatttgacattgaattatacgtatcacgatgtttgttatgtgtcttatgatttaagaataagtatgtgagattcgatattaaattgggtaaatagcagcataagtacctaaagttttgagtttgtaagcggcataaactcaatgattttttttagtggcataagtacccaatgtt

SEQ ID NO: 390728 - DNA, 777 bp, Cannabis indica
ttttttttttttttgttagagtgacccctcttgccaatggaaattggaaaattttggtagaataaatcgggactgagcaggttgggctgagagtaaataagaagaaagaaaaataaataaataaaaaagataacaaaataaactttactttgaaaattatttaattcattcattcatttattttaagttattttaaactaaaattataatttagatcaacaaaatattaatatttagcattttagaagcaacaaatgaagcagttaaattggatatttactaactaacgagaatcatgagcttggggcgattaccactatttttcgagattgagaacttatttgtatcaaaatgaaatttttggagacttatgtcacaatttattaccaatatatggtatttttggagcaactaatacatctgtcaaaataaggatcaacagacttacaagaatcttaaatttagggactattactaccattttttaagattgaaaacttagagcactcacaacaagtgagttaaaaaatagctaagagcttaaaattaagctccaacaaatgctttaaacacttaactgttataactcatcccaaactcaaagaaattcttctctacatttagctcatgaatagtgaagaggtaaaacatattttatatttttcttgctctcttttattaaattaattaattttttattattctttttactcaattttatattttttttgttttaattaataaaatatatgtaatgtaaaaatataatatttaaat

SEQ ID NO: 390729 - DNA, 1589 bp, Cannabis indica
accatgaattagctcaagcaaaaaatttcagaacaattttaatgagatttgacttagtgatgttgtaagtctaaaaagatctgtgttaatacaaaatatattatatacatagtatacaacaaatacaaaaaaataaagaaaaaaatgaaattttacaaaggcttagatacctatgcttttagtaaagaggaaaaggggaaaacaaaaaaatcaaagaaaagagaaacaaatattatagtattaggcttagaaaaagaaaaagttaaaaggatgtttgttatgtattaaatggagtggtaatatgtatttttgttcttgtgggctgggagggtttctgcaagaaaaagaaaaagaaaaaagaaagaaaaagaaaaaagaaaaaagaaaaaaaaaaaagaaaaaaaaaataaaaaaattaattttttaaattaaaaaagtaaaaaagaactaaattgcaagttaatgtgctctataaaattgatgatggattgcaacacctctcaagtgtgttgtataatgtcttaaggataagttataatacgttttttacttagctgtactccattggccacatctgatgtgtcaaaaaaaaaggtaataaaatctctgaattccaaatttaatacacgtgtacacgtagggggttttgttaaatatcatacttatccatcaatcactttttttcccaaaaacaaattaatagtgaagcggtatttttgtaacgtacaagaatggttgacttcattaaaagatgttggtataggcccattaatatcattccaatggatttaaatgggaccaactacccatactactaaaaaatctaagtactttaaactcattaattaattttccttattttccaaacttatttttttaaaaaaacaaaaagtacaatatttcatttcggacgtacaaaaatggttcaattcattctaaaacgtagatgaaggcccattaacaaatggccaatgaatttaaatgtgaccaccaaccctttgaactcaatcatattaggcatttacactcataaaataaccttatttcagaattaaatttggaataaaaaaaattttgtgctattgtactgttctgacgtacgagaggagttgaattcagattctaatattgtaaaaggccattaatatcagcccaacagctttaaatgggatcactaacccgtacaactctattatctcaggcctttaaactcataaaatctaattttgctcccctcagcactctctttcccttattcttcatctaaaattattaaacatcaataaccaaccaacatgaatgacgaacaaacttatgaatggaaaaccataacagcagagctaaacatcacaaaaccagttaatgagattgaaatacatgacgtgctaggcaagagtctcgacaaactggaaaaacgggaagcattctacgaaatgtacgcgaaacggatgggtttcggcacaagaaaagacaatatacgacgttctcatggggtcattgtaatgcggaggtgggtttgttgttctgagggttcgaaaaaaatcgcatcaccggacataccaaggaaaaaaagacctcatgatgtcact

SEQ ID NO: 390730 - DNA, 1254 bp, Cannabis indica
ttgatcacaaagagaattaataatagcatcattctcatcagtagtattaaaagtcggagtagtaatactagtaatattattactcaagtgaatattagataaagatttacatattatttcctccataataaagtctttatagcacttagagcacatgtttcgattctcaacccttccataaaatccacaccctttaacacaaagattaaatgcatcatccatatccatggtatcacctttgatttaatctcaataatcttcttctttaatgattaattaatctcttcactaagcttacttaattaagttcttgaataagtttaattttgttcaatgtaatatgtatatttatagaggttttgagctaaagatctaatttgactaggactataaatacgtgtgaaacaatcttacatcgattagaattataagatattgctaattataagatattttattaaattatatgtataatattgttaatagtatatatttatttaaagtaatttttttaaatttatgtcacatctaatatcaaaacacttgatattttaagaaagaattaaagtaactattttcgctttttttaaggtttgggacttatctgtgaatattttattttgggattaaaagaagatatattaaacgcgcgttttgatttcttcttctttgtctccgacactgagtctcatgaagggtggtggttcggcaactgagttcgcaactcggataagtcgagctctaatcgccgcttccaactacacaaggccaactcgttcatggagtccttccctcgagcacacattgcaccgactcggttgtcggaactcactcaccccatcactcgttgcccgagtcatcgaccccttccttctccctcaccactcacttgcacttggattcttcaactgggcagcccagcaaccaggtttcggtcacacttccataacttaccaatcaatcctcaaatctctttcttgttcccgccaattcaacgctattgatactctcctcaggcaagtgaaaaacccagaaagttactcttcattattctgtttatggctctgtcattgcctcgtttatatcaggaaagaaacctaaagatgctttttttattctaagagaggttacttctattattcaagatataggacccgaaatatgtaactctttattagctgctttagtttctgatggttattttgagcatgctcagaagttgttcgatgaaatgtctaaaaaaggtgtcccttt

SEQ ID NO: 390731 - DNA, 992 bp, Cannabis indica
tatctctttcaaagtatatattattatatttaatttgggtgtagtgtgaaattaataatagcaaatagtaataatataagttgtataattgaaaacaaattcatgggttttgattatcacacacaaatgccaactattttgtctcagtaaatttttcaaatatatataagtgagtatgtgttaattatttaaataatgtatgcatatatgtacgttaaaatgcagacaataaaatagatggttggttggttggattagattttggcagtgtacccaatttaaaggggcaggtggatctagtactatatttttgaacatcgaaattcttttcaattacatgtctcttgtcccttatgcaaggtgaggtgtattagaatgttttagtatatatataaatttacactcacaatttttaaaaattattattcaaatacaaacaaagactaagaagaaaaacatattaataatattaataattagagggaggctaggtaggatttcatttcattagtaatgtacatgtatatttatttatatttatttaactatatatatccgacgcgtttcttaataagtagttttggtttaaatttttcacagaaatttcacgtgatgcatgttatgtaattaatggtactttattaatttttggtcgatatgatcaatactgaaacatgcatgatcaaaacaaactggaatatatatataatataatatacatattgaaattgacataattaatatattaactagagctattttattgctttgctatgcattattttaattagttggtgtgaagataataaagtataagaaataagtcgatggaagagacccctgatcagcaagacttatgcaaaattctctatttctctatctccaattttagttaacggttgagattggaaatgtctgaaagaagtttataaagagcttgaggaggttcgattcggactatatatttatatattatattatatacgagagct

SEQ ID NO: 390732 - DNA, 773 bp, Cannabis indica
ccttcctataaacacaaaacaaataaaatattaataaaaaattaaatatctaaaaaaaataaatgctatacacaaataacatagacaaaaacaccaaaattacatacgtgggtctcttaaacaaaccagatttgaaccaagcatcaaaggctttctcatcattatcattgacatcgtcaacaacagattattgcaaagcacataaacctttaaccttacttgtaactatagtaggcttagatgatgaactcaactgccgagcataaggagactataaatataaaccagactttagaattcttctctcaacaggaggagtgacctcatcaatatcaataaaattctcgactacaacattagggttagactcttctacattaacaacaaatgccaaatcttacataaaaaaagataaaaaaaacatatatattaaaaaaataatatgtaaacataaacaaacacaattagaaaaaaatatttaccagattagcagaagatgctgattgtggatcatatgaaactaaagcattggattgctgcaaaacaacaaaataataacattataacaaaaaaccaacaataaacaaataattaaagaaaataaatgaataaaaaagaaaatacttgaaattttacagtagcttttaaacctgccttaacaacattatcatcctcatcaggtagctggctataacctttgaaaaaatcatcatcaactttttcttttttctcatcgttgacaacatcttctaatacctcaacatcattaccac

SEQ ID NO: 390733 - DNA, 1205 bp, Cannabis indica
aaatttatagtaacataacagaaatatacggtggagaatataaaaaacttgacacaagataattataagtagtatcaatatttttttcaaacactcttattccataggccacacccaaagaatcaaattaattagtaaagtctcaaacaattacaaaatacaattgactgaaacaaatttagtctcaatttctaagctttaccgcagtcctttgcaatttacttcgccaatctgtttttttgaatgccacctaacagcgaactcctttcgtcttttgatgtgtgagtgcttatttcctctcgaagtaagattttatacaagttttctttcgaagatccttctcttgttcagtgaaattcttcaacttgttcaaagaacagtataattaagaacaataaacacggattaaaacctaactgaatagtctaggttttaataaaagaaactatattcacaaagatgaaaatatgaaaaaatgaaactagaaaatgtgagaaatatttgactgctgtctaaattttatttatagacatataaatcttagagatagccacaaacacatttacacaaatgtaccaaagtactttcctaataatgctttgatttggagtgatgaaattgcattctgtagtggcaaatcaatattaaatttggaaacttttcatttaattaagtcaaagaatacaatttggactttaattctttccataaaaaaattatatatgttctgttatatatatagcaaaactaaaattaacaattaattgttatttatctttctgcgtgtatatcttttacatataatacgaaatagcacatacattagtatgatatgcactacaatgaaaaacaagattttttgattggaagaaattccttcttgtttaataaccaaatattgtttaacactcttaaagataaaattgattattatattaaggtaataataataatgataatatacctatttctattaaccaatattattttttgtttttgtaaattgtaaagagttgtggcaagcatatatatttgttaaaaaaaattagaagtattgtttttatttttagttaaaaaatgacatatttttttattatatattaaattgtttatattatttgaaattatatatataataataagatattagtaatgcaatgcatgtttggttggagttgtattagagtttctattacctaattatt

SEQ ID NO: 390734 - DNA, 1948 bp, Cannabis indica
ttttaaaattgagaatggagccatgaaattttgcaaaggttcgatggtggtgataaggggaaataaatcaaatgggattcatactctggaaggcatcacagcgaacaacacaaaggcgtgtgttctaagaaagcatgtaaatgaaactgaagtatggcacaagagacttggccatgtgagtgaaagagggttgtatgaactaaacaagcaatgactacttggaaaagtaaagcttgagcagttgggtttctgtgagtattgtgttcttggtacgacttgtagagtcaagtttggaactggaaaaagggataccaagggaacactggattacgttcatagtaatttatggggaccctcgaggacactatcacaccctgagagcaggtattttctttcaatagttgatgattacttaagaaagttatgggagtttattctaaagaataagatagaagttcttgaaagatttaaatactggaagataatgattgagaatcaaaccgaaaggaaagtgaaacaacttagaacggataatggtctgtaatattgttcaggagagtttgatttgttatgtaagaaggagggaatagcaaggcacaagactgtgaggaagactcctcagcgaaatggactcgcggagagattcaatagaactatcttggaaagagtcatgtgcattgtattgggtgttggattgcctaaagaattttgggcagttgttgtatccactacagcttatttgatatgtttgttaacaacactagattttaagatgccagatgaggtgcagtcaggaaaaccaatgagttatgaacgcttgaaggttttcagatgtgtttgttacgcacacattaggtaagacaaacttgaggcaagggccttaaagtgtattttcttagggtatccagaaggagacaaaggtcatagactgtggtgtttggagtccagaatgaggaaatatataattagtagggatgtgacatttaatgagttcgttatgagagttattgataaacctgctggaagtcaaactaatattgaccgaaatgaaatcgaagctctaagagcggagcttgaggtggagcctctggcaagagtggagactgaaacacatgtagatcatgaaagtgatgattcagaagatgattccaaaagggatgatctaaaaagttacaaactggctagagacaagatacaaagagaagtacaggttctagatagatatgggcatgctgacttaatagcctactgaatgagatgattaagctttaagctaatcctactatttaagttctttgattttttcgttacaagctcttccctatggactagcaaacacttgcattttaggaacttagtaatataattgagtgccagtgttaatcatagatatggacatttatagcttctatttgttttcattgaaacgatagtttcttttgagcttggttaaagacgttaaatgaagaaatctgatttcaataatcatattagtttactgaaatctatttacaaggaaccaagtgttcaaagataaaatatatagaggggtaaaatagtaatttagcccctccttattgtaaactgtctatagaggatcattgattaatttgatagaaattatgaataatacataacgtgtttatattatgtatatagagtgttccgtgaaattaggagtgtaatttcgaatctatagtggagttatgaggaattaataagttaaaaaatttatttgttaaattttagatctattttattaggagcctatatttcatgagcttatggtccccggagtattcgggatatggccatataatctcagagtgtaaggctttatatgccgagattggtaacatctctcttagttttgtaaagcgatctgcgaatagggtagcgcatagtttggcgcgatcctctcttcttgaggctgatcgtatttttaatt

SEQ ID NO: 390735 - DNA, 915 bp, Cannabis indica
ctatcactccaatcagctttcaatgttaccgcaaccaccacgggccaccgacggacattgtcggcttactactctttgggaaactctaatggcgatgactctctgaacttaaagatgagatcaaaagaaaagacagacagatttgtaacaatacatatcaaagcttttaataaccaaacctagcttggcgataacacaaaaaatcacgtcgaaacaaaaaacaagagaaactctttataaaacaaaattaaataatcagaatatgaatataaatataaaagtatataatataaaacttacctgtgtaacatactcaaaggagggaggtatgagggaagaccaaccagcgtttccaaaaacagaatcaagaaatttaattgcggatcaagaaaatggatttttaaatatcaccgtggccgacactaatttaggtgcatgcatccattaatatcgagctgacacccaaggccatctacgaggcgtttgaccaaagcttctccaaccagatctggacatcttcggtgtcagcgtcgactagaacgagggggagagagataggagaatcgtggaggagcttatggtttgagaggttttcatccaaaaatttcacatattacgacgtgctttattaccctttcactgaaccaattaacattatatattaagatgtgagaaaactccatctattgatcctttacaggctacaaggaaaaaaaaaaaaaggtcttgcttcacagcaacgatgagagtagttacagaagagtggatcacaacaataaaaaaccttaatattttattcttaaaccaatacatttcaaactaaaaaatatatgacacttttatcgaaaacccaaaaatacccctctcataactcagccccattttttcccaacccgcatatgcatcggacccccc

SEQ ID NO: 390736 - DNA, 1723 bp, Cannabis indica
taaaaggaggttggcttctaaataaattcatgagccaaactaactgatatgaaatcatcgtcctaaagtaattattacgattcttcaattatattgtaatgaaaaaaatgtataacaataacaattatgttaatttaaaataatactgttcttgcagctctctttgagatggtgccatggctaagacaagatctaagatgcagggaaatcttcaatcgattgtgaaatcgattgcaaaaaagaagaaaaaaggtctttcatcctccattgatgtgaagaaaaccaagtcgatggatgaggtgttgggtagaaccaatcgacttctcggacgaggaagagtattgaaccctggaagatcagcgagccaaatcgtctacgcagaattatcttcaggaggctctatcgcccagaacttccctgaaaacaatactgcaaaacgaagaggttgtgcatgattttaatttcttcatggaggcaaacagacgatattctgaagaggcgacaagaggagttcaagtaacacctccaattctgcgatctgggaatgttgtgagaaatctctccacatctttcgacaacaccaaagcaagcagtcaggtcaagatcacattagatgatatccatgaggaggtaaatttctggaactcatctcttatatgctatatgctgggtgctaacccccctctaactgtactagatggttttgtgagaagattatggaaggataaaatagataaagttggattgctttcatatggcatattttttatcagatttcataaagtggttgatagatattcagtgcttaatggtggctatatatttttcaataaacgaacgattataattaaagcttgggatccaaatgtagatttcaaaaaggaagatgtgagtagggtgccggtttggataaaaatggatgatcagagaaatattggggggaaaagtctttattcaaaatcattgggcaggttggggtgccaataatggttgatgctgtcacaaaggaacgagataagcttagttatcctcgggtcctaattgaagtgtctatccatcaagactttccccataccatttattttgagaatgaatttggaaaactgtaccagctaaggtcacctatgaatggaagccgattctttgtaagaattgcaaaggtatggggcatgagatacctgattgcaggaagagagaaagtaagccacaagaatgggtgattaaaaaggactccaaaaaaaaaaaacagaaggaaaggctggtgaaaaagcgtctgagaaagaattcattcaagtcagaaatggttggaaactaaaagagaaagagcctcctatacaaacagaaacgactaacactttcacagtccttgaacaagctgatgctactgctatggcagcagggggaatttgtagaaggcagtcaagagcaaaacacaagagaggggggaggtccctctcttgttcatggatagaatcatttgttggaacatccggagaatcaatagccagcaaaaacaattgaatgtcaagcaatttattgctctgcaaaaggctggtctagttggtctcctcgagacaagggttaagtcttcaaaacttggagacttataccaaagaaggtttcaggggtggtgtttcacatcaaatttagcgtggcataaaggtggaagaataataatggcttgaaatccgcttctttttaatatcactatcatcaaatgtac

SEQ ID NO: 390737 - DNA, 1054 bp, Cannabis indica
gtcttgtatctctaccccctacccccccaaaaaaaaaaatcatgggatttctttttattaacctgctagacctgtcgcttgaaaaaattcttgaaagggttcattgactaactcaacagacttcaaatttcctttacagaaaattatgagatcatcagcaaagcaaaggttcgttaatctcagattcttacaaagaggatgattgtatgattgtattttgttttgcttgttaaagtattaagattctatttggactttgttatttaaaaattaactttttttaaatatatttattaatcttttgtcgggttaatcactttttttttttgtaacgcacatatgtgtggtggtttacgatgacaaaaaaaaaaaaaaatagccatgtggttataattttcacataaccacactttgtgggttgattaaaaaatttatattttcttcgttcgttcgcaccacactcacctttactactgatacttgccctactctatctgaaggaccaacaaaaggtattaatgctataggagatttcccaggctcaccaagacaaaggtatgatcctttttcaaacacttgcaacgaatgacggcaagactgtgggagcatacgagaatcttgccgaattgaattttttggtgaaacttgaatctgctattgaaactaattggtaatattcgctaattccttgatcaaatcttcaacggaagaaccttgaccttatgttgcaataggtggtgcttgtagatgtctaagtgcaataggtggtctacttggtgcaacttgttactggtttccataacaaaaattaggatagtctcgccatccttgatcgaggagcgaactgtgggagcataggggaatcttgtcaaattgaatttttcagtgaagcttgaatctgctgttgaaattgattggtaatattcgctaattccttgatcaaatcttcaacgaaagaaccttgaccttatgttgcaatattaatgacaactgtatttattttattagaaaattactccatatactattttttaactttttttttttcaaattt

SEQ ID NO: 390738 - DNA, 755 bp, Cannabis indica
ctcgctggaggcttcccaaaacttagaagtaaactttagattcctgtctgatacaattgacttttagagccccgtgcaacctttactattttccttttacatataatttttgcatatttgatctactatgtatgttgttttcactggttgaaagttatgttgacttggtaattcatccacaaatacccatatggaatcgaacatacttgtgggtctaggtaatccaacctcaaaatccatggtgacatccttaaatttccacttagtttgactcaaaggctgcaataatcctacatgtctttgatgttcagccttaatatgctgacaagtcaagcatcgagatacgtattccagcgcatcctttttcatcctgcaccaccaataaaagggttttaagtcttgatacaatttggtagtgacaggatgtaatgaatagggagtggtatgagcttcctcgagaatctctttctaagttccacactattcggaacacaaacttgagttttgtaaagtaatattctactacttgacactgtaaaatctttagcttggtcaagtaaaacttcttctcgagtcttcactaactctggatcctctaattgggcagctctaactttatctaacaaatttgattccaatgtcaaattattaagttaccccacaacaaactcaatccttgatctaaccatgtcatattctgttgtgaatattttactaggatctagatttactaacaagtatgtttcattaacatc

SEQ ID NO: 390739 - DNA, 778 bp, Cannabis indica
gctaattagcctaaattttaaaaatgattgaaataagatcaatgtaagaaaaatagtagatattaaattgggattataacatttatttctttactaataaagtggctacttgtctagcattattaaaaggtggtgtcctctgtgattgttggttaattatatttaaattattacattaaattagatgtaattagatatttaattgcattaataatattatactttaaaaaaatattttttagcatgtttttttattttaatgttatttatttatatgatattgaaagtggggtaattatatggtaggtcctcctatttttaccctatattatagggaagaaaatttaaccaattaaaattaaaagaaaagagaatgtatatagtatttgcttacataggtgtaggagattattgcaacattttctattattttcttattattattttacattatgataaaatacgtttatgtatatgaaatgtaattactggggttcacatgaccatttttcaagtaaaatttagcttaactgatattctgatattaataactaatatactatatttattttaatatatttttattattatatcaaaaataaaaaaataataataagatttttaatcaaaacaataaataaataatattgggtatgtttaaagcccttcaaagactatataggtagactcttacctattgtagcatttaagagaatattttagtccaattttttttaagattgtgtacatcatagttgtttagaaccacctgtaaaat

SEQ ID NO: 390740 - DNA, 551 bp, Cannabis indica
cccgataccttgagacggccctggtaggatggaaggagaatagagagaactgatagtttttttgaagctcaccattcactttgagtgcatgcacaatcaattcatatgcggtcatattggctgagcgacgaacatgaattaaggaccctccagaaaaattagatagtaaactataaatatcatccaatactgatcctaaatcattacaaaaagaagattttctaaaaagagtagacaccattgctaaacaagagaggactgatagttatgaaaagatgaataatataaaggagtgagaaaaaaaatatagtaatccttcttaattgttcaatgaaaaagctcaatgatagaactaaaaaataatatagatcactatttatttttaaaattactaaagtaatttcataatattttcagatagtaattttgtaattttgaacaaatcaaaatagagagtcagagtaccaattcttctattataatagaaggatttaaaattttcaactaaaattattggggagttatatttgcaccctataaaattataaata

SEQ ID NO: 390741 - DNA, 1038 bp, Cannabis indica
ttaaaagtttttccaaactatcgaaattgatagatttaaagacttctgtctaaatttattcaattttactaacaattgtctaatatgatgattatttatgtatcaaaccgtatttcttaaacctccattcatgtcaagctgccgttagtaaaattgaagaaaagtttagggtgacatatcctaattaggctaaagcaagaatgaggctaaccaatgaccaccatcccatcattagaatcattacttaagagcattttcaaaggagttgcgtagtcttgccacatatgtaatgtagtacaatttcaagaataattttatgtgaagtgttgttcaatataaaaaatgaatacatgtactttttttctttttttttttaaattttttttatttaagtaattaagtttttttttaatttgaaaaattattaattcggccaagataaacaatatgtatattttggcaagtataagtgttctctctattaaacatgctcaaaggagcaacaacaacaagggtatatatgataaaaaaaaactacacagtccccacatatattctctctgatttctccaaacttcactttgttcacagtctccaggtctgtattacagtcatatatattctctctgattgttccattcttaggttatggtatcatattggtctcctgtcccccccgttgttgaaatcttctagcaaatactaccccatagttcatagacaactaccctgcagttatcttgtttttaggctctcgaatgtctctgtccaacctccaaccaatttgctgtcatccctgatccacaataacctgcccaatttaatctttcaagcttcgtataggtgttcatttagtttgcctactcggtcctattgcattaacatcatctctcttgatcctattcactacttgctcacttgcaccatggatgatctaaccaaatctctttctgttgctctcaatctcatagaaactgaatgtaccattcaaactctccatgagcccgccccctcaaacactcccgattccgagataca

SEQ ID NO: 390742 - DNA, 777 bp, Cannabis indica
tttgatgttatctcagagaagttaaatggatatgttaagcctcttatctttttggctgaaaattttgctgatgagtttgaggttgattctaatccttagaagcatttaatcaatttagttggcattttggttccgtgtaataagttgattactatattataagggactagggtctctcgacaagttacccatccctatttttttttaaatttcaaagttcgaattaatctacattagaaaactcaatcacgacaataataaaatttttgagtacttcaataaatctacagacaatgtgagagtgagacaactacatcacttgtaacgccgtgatctataaagacgttatgtctgtaattttataaactagtttaatattaataaaataattaattgttaagaatcatgataatactaaaaacttgactaacatgaaacattaaaaacggacatcataatagtagtaaaaaaatgtttccggaaatcactgttataaaaagttttacaaaagaactatatataatgacacctcaaaaacataaaaccaaaacacatgatagatacaacccaaaataactcttgacaacccaacacgcaggtcagtgatgtcaatatgtacattgctgaaagagactgtcttctcatagctgctctaactttctcttccccttacctgcaccacagagtactggtgagtcacataaactcagcaagaaaagtaataaagaggggtatattaaataacatattatacatttcattatcataaaatgatta

SEQ ID NO: 390743 - DNA, 992 bp, Cannabis indica
ctttgaacgtaataatgtattttgtttttaacaaaaggaactttagtcaaagaaacaagcaaatacaagcaaggcataaagccacaaacacaaatagtagcagcagctgcaaaaagcagtagccccaaccgaacccctaccagtttttgataacattaattacatactggtttcttttacaatctttaaagggacccttgctaagaatcctaagctgaactattttccttatctccaaactcaaactactaggagtagcacaacaaagttcatagatacaagtattcctatttttccaaagaaagtacaagggggcagccaaaacaacgttccaaatgcgaaaaaccagaccagtatccatattgcagcagttacaaagcaactcagcagtcaatcttggccaatggaaataccctagccaagtattaatagcaacaataacctacaaagcgaagctgcaagtgaaaaataagtgatcgtgagtttccattttagcttcacaaactggacagagatgacttggaatagccataatccgctgtaagtaatcccgagtgagcagttgggaatcagctatctgccagaaattgaatctgtggttaggcacaacaagtttgtcccaaatagccccagcaaagtcaaccttaatcccctccacaaacagattatagcatccttttgcgctgaatttatttcccctcacagccctgattgagattcatttcattcatgttgtcccttaagttcaatattttcttgaagtaccaatttgcatcaacctttttccggcaattccatatatcataatccttcaagtaaatggaatttatccatttgacccaaagacaatccgccttgctagccagagcccacagatacttagccaagagagccttgttccactcactacaagaaaaatgagtattactaaggacaaatttcgttggtaaaaacccttgttttcgtcagtattgcgcatcaatgaggacatt

SEQ ID NO: 390744 - DNA, 784 bp, Cannabis indica
aaaaattataaaaatgatattaaaataaaaatagatacacatattataaaatataaaatataaataaaaaatagttaatatacaaacactcagagtaatataaatgtatttttatttaactttttaatttaattttgacttatacttattatatataatttatacattatttaattattttaatgataaaataatatataagaagaagtaaaattagattttaaataaatattaaaaaatttatgttaaaatacaaaattttaaaggtaaaaaaatcatagaaagcctctatggagtcagtttataataaccgactctatgttatttaataataatcgacgcggtataagattcctatgtcgtcgattgtttttaatccctacaacgccgcttaaaacagcatcggtagcgaattttactaaaattgatgctgaaatattttaaaaactgcttttaaagtccaattttataatagtgaacaatttgaaaattcacttcaatattggtattaaatcaagaaaaatgtgtttagatgtaaattttcctatacatatttaatgtaggggaattacctcatatactatttttaaaactttttttttcaaatttacggtttgggtttctaaagtggttgcagtgctagttgcaatagggatttctatacgattttttattgcaatttaggttgcagcgctagttgcaatagaggtttctatatacaatttcgtaaaaaaaaaaaaaaaaaaaaaaaaaacaaaaaacttgtttagagtaagtaaataag

SEQ ID NO: 390745 - DNA, 1431 bp, Cannabis indica
ttgatttctctaggttgctcaattttcaccatgtacaaaggcttccaaatatccaaaggtcgcatgagaatgcaataccaaaactccttgcaacttttttttaactcttgctcttcgtcttaccatctttgagacactatcttggaggtgaagatttcgatagagaatagttaatcactttgtttttgaatttaaaaggaagaataagaaggatattagcaacaatgggaaatctctaagacaattaagcactgcttgggagggagtgatgtggacattgtggtcaataactcaaacgacaatcaagaaccgcttgtaagagagccaagcggatattatcaagatttctacgccaccataaccataactaaagcaagattcgagaaatttgttagttaatgcctcttaaagttaaccgttaaactaataaaatacgttaaataactacattttatatataaagttaaaaatgcaataaatatattgatttttattattttttttttcccaggtagcaaaacatataaagatgtaataaatatttctgttatataagcatataaaataggaaatttaattggtgtcttagttatttaattttattagagattattacattccacatttgattaatttatttacatagaagatcttgcaatggagtctgctccagcaatcttgatactgcttgtttctttcaacaaatcaaatgatgttatagaatgcggcggcagtaccacctccatatcacctccatcagtttccagcagactttgtgtcggtacgatctgcaatcagccaaaggatgattacaactgaagattaacatttcattaagatctgcagcattacatacagggaaacagagaagcttgttcaagtaccttattcggctccttgaaagaattctcgtccatcaaatttttcgacgtcaaaacagtctttgttgatcccgaaagttttacagagtttggatccaatccatcgacggaaattatgatattgaccgtctcagctccgtagtttacaatctgtacaccaaccagtaatataagtaactatatttgatgcattttttaagcattaagatacatgggtgagttaactaatacctttattctgagataagttttgtcatcctctgaagatttccaagatatagcagactcggtaatcgaattataggaattcatttgtagggttgttttgtgaagagttgctccacttgattctgtgaaaaatctttgcacccaatagctaggagttccatatgcattggacgagttgaagacaattgcatccgggttccatctaaaccattagaaaagaacatattacttgtgatgttctaaatagagtaatttgcggcataaatacctaaatttaactgccagttgcaaataaataactaagtttaatttttggcggtaa

SEQ ID NO: 390746 - DNA, 1734 bp, Cannabis indica
aaataataacttgtaattaataactttcacatttgggatcccataaaactttttcaaaatattacaagttattagtacacgtcgacctaagtgataaaagtggagattacaaaattttcccctagtaaacccaactcttgttgtctagcttggctgaacatgtacaatataccacaaaagtcctcgatctcatggctgatcaacaactaacttaccctttactgcacaatagagcacccgtgagcaaaggcccagaatggcaataaaaataataatattaatattattaaaaacacataaatattgatgccaatgcacctactgtctatttgacatagacgtacatgttacactcacaagtttatttacactaaggttaagattggtttatctcagttctaattactgagtctaaccaaattatgccttaagtgcataattctttatatcaatgtatacaacagattattatattcatacacttaaattctagagtaataaccctagatcacataaccgctaaatttagggtaataaccctaatctcggtttctcacataacatacatgagcaccactatgctaaactctatgtgctaggttactatcttacctagtgatccaagtatgtggagattcccaacgcctgagtgttctgggcaagcactggtaatcctagtcatacatttgcaagattttacaaataaggttaatcccaaattcattttcacacacatacataatttgaatcccatttatatatcaacatatagagctgaaatgagcttttgaacgataccaagaacatccaaaatggagtttcgagtcaaaagttatggcaaaaatgagaaaaatgaaaaacccagggaaaataggggcctcaccgcagggagccctactgtggccgcagcgacaggccctgaaaccccaaaacaaaaacaaatttttcatacacttgatttttatccaatctcataccaaaactcaatgaaaaccataataaactcatactccaatcaatactaaatcaacataatattggagaccaatagagttccataaaagctcaaaatgacctattcacaaacatcagaaagcatgttataaaaggatcaatatagtacaaaactcatcaaacttagatgctcaaacttcaagcttaaacccaaaaatttaaagcaaattcccagaaatttaacttcaatatttgactccacaatcatcgaaaactatcaaaatgcatcaatcacaaacctaatagcaccactacacaataatcactaaaattcccttaatctcatcaacgtgcatccacaaacataagaacatcaagaacaagattataaagctttaaatttcagaattaacataagcaaaagagattaaagatctttaccacaagttcctcaagctccaagcaagatcaagcataaactcacacccgaaattccaaacttttcttccaaaaatcaatttgaaatcacaaatggagagggtgacaaagagggtggaggttaaggagtttcaaaacccagaaaatgttgttcaatatttgttaaaaaatctaattttgttgaataatagcttatttggtcaaatgactaaattgcccctaaaggacacatgtaaccataaacacatcaaaggacaatttttccatttccactcacacacataaattacaagtagatgttgggctttgtgccctaaataaaacccatttcaatataattag

SEQ ID NO: 390747 - DNA, 888 bp, Cannabis indica
gagaagaaagcttagagatattttcacagagcttcggctattactttttttgattccccatttacgtataaataaatgggcatttataggcaaaaatacaagcatgggcatgcccatcactcatctagggtttctacaaaaagcccatccactattaggtaaaatacgaaaaatatctaactattaggcccttaagatgattcttcctcgtgtggcaaattatccatactgtggagaccattgttgataaagggcacatgtcaagcaaaggcttgcactgggtggagaaaatgctcagaggagctgttggacaaagaagagtattcaaaggaaagtgtgcgcactatcatggtttgacataggggacgagatctgattatgtgtcagaaaataataactgtcatgcagccatctagctctccccttgcaagtggcttacggttctccttacgcaactggcatctatcttagacacttcgcatggctctctggcatttgcctacacttataggtaagttggtcttctccaggtcccggagcaatgataaggcttttgggtcatggatggtcattgcctttgtaactaacctttgtgcctcttctgggtcagacctttcttaagccagcacaatctctttgtgacctttcatgattaaggacacttaatcggtgatgattgtgattatagtcttctatttttttccatgtgtccttcctccagaaatatggagaacatatattcttactattgttagcattaattcacacttttctatattgccaaatatacatatcatcgacatccaggtgcaactctatgtacactaacaccgccttactgatatgttatgtaaattgttgacagtgagaacacatcaactaatctaa

SEQ ID NO: 390748 - DNA, 841 bp, Cannabis indica
ttggctcatcatctgaaattgaaggaaccacaacgtcttcagtaacaactgctcgtgctcttttcagcatgctacgaacggaatctccaacttgggcagtttgacgcgtgaaaggccacctggttcctgaggaaatgcctggagaagttgtggggcgtggttcactaataaccacacctatgcttccacggctgtgaggaggagggctgggaggagacacaacaatagttttgcctttgtcaatgtgggttgtaacggattcagtcataattggtgggggaatggtagagtgggccaaagatgaaggcacagaaatttaaggatggttgaaaccaacagttacagcagcagggtgtgaagctggatgcaaaacaggggtatccacacgaaggaattggtcaacggcttgttgtaagctttggtcatcagtcctggttcgaggaaagtactcctcataaggaatagaattagatagctcaaacgggttccttttatgctgggcaaatgttgtggcacggagagtttccttgtactccaaggcaggagggatagagaaattatcgcaacgcagaaggtacttggtgcatttgttgtaggtgtgatcaacaagaccacaaaagtaacagaaattggggaggctttcatacttaaaactgatccaattagggtcaataataccacggaagcggattgtcattgattagtggttaaaaatacacttttatttattttaaatgataaaataaattgagttttaattgatattttcatgaaattattgtaatatattttataaatgaaaatatttgattttgattcaatttatgtctttcttgtagga

SEQ ID NO: 390749 - DNA, 801 bp, Cannabis indica
aaacacgaacaacaacaatgaaatcattaacattggcataaccaacgtttcggtttcgattgctggtagagggatattgatattggaccattggttctctgaaagtgtagtttaagactaaatatgcgaaaaaaaaaaaaaaagagttacacatttgatagctaagaattgtttgcttggcaaaacatgtggatttaggatggagatgtttcacaaatggctagttctatcttattaaaatatacattgttccatatgttaattttcttccatagatttcacaggattattcaactattaaaacttaattatagggttaaggcattgtagttggttgattgtactgctactctatctttttttcattaaaaaaagtcaaaatgaagatgaaaaacgatacaatttttaattataaattaagatagtcagcattctagaaaggacaaataagtggaatttgggtaaggttttttttttttttttgaatattgtacaaaaatattggattttgagtaaaagtttacaattttactgtcacgtgaaaatttttaaaaaaatactgtctttttaaaaataaccgtaaaacaacaaagtggaacaactaaaaaataattgtagaataatagtgaaagcttaacacttaacacaatataaaaaatacatgatatttttttaaaaaaaatccgctctacagtaaaaaagaaaaaaattgggaaattttagtatgtagtgtgaaaatcctttttcttagctaacataaaagggagaagttaaagaatactttttttatatacattaatc

SEQ ID NO: 390750 - DNA, 1004 bp, Cannabis indica
cactttgttacgtattattattattatgatatatatatatataaattaattgctatgaattgtttcatctagctatagccgacctatccttcttcccaacatgccattcttcacactcgtcttttccagctttattattaattttccattggaatatatatcactagtatactagtatatggaacctttttatgaatatatatatataaagagattaaaaaaaaaaaaaattagtatttttacttacaaactcgtgggaccatatgcttcgtcttacctaaaaactatgtcactatatatgataacatattattttctctccactatgtattgtttttggtccattacaaacttatggttagtatgaattaatatattactttacattaacttgtatagagtacatgacaaaggccttaaagctaagttgttgctttaagagaaggcatatatggtattggcatatgtatgtagtgaattaatatgagatttggttaagtgggtttttggtagtaaatttaattaattaattaattaataatgagttaagttggaaaagtgttgttaattagaaagtgatgaaggtgggacccaccaaaagaaaaagaagtgtaagtgtagatagatgtgagggtcccatgttgtcggttggctacccctttgggtggcataaagatggaccattacgccatttgtggttaaccaatctctctctcatcacgtaaggtggacatcaacttatgcccacatatatctatatctatccatttatttatttttttatgtataaaagccagggtatatactataaggattttttttttctttacatttcatttcaatctcactattaacatttattcaattaactaaacccaataaaccactcatgaataatgttatagttctttgaatgaactcttacaaaatgaacgagttgtgattttttttttcatttcagacggtcaaaaaaaactctacatgtagtgataacttttagtcac

SEQ ID NO: 390751 - DNA, 566 bp, Cannabis indica
ttgcttgactctggttctaggcagaggagctttaccaaagcatttggctagagcccctttcttcaccatctcctatgatatctcgaaagatgcttccagttccattgacgactcctccaaaaatttcctcctcatctcctccatgctatctgggggttcagagctttcccctttctcaccagactctgagcctaccatcggcgttggcctcagatgttcattaaccctcgtcacacctgtttcaccacatcttgcagtgttttgaggactacccaccagaccttccccattatccctagctccgttcatccctggtctttcccgatagccacttgaccttccccctgattactcatcgtcacacatcccaccttaacccggcgacacacagattacaaaagataaaaagaaaaagactctaggtcagtattggacgagccaacttctcatagagagaacatttttttactgtcatttttaatgactaatcttccaaacagttacctactccaaagcttttcgtaaacccatcagcggacccatagagtgttggaaatttattttac

SEQ ID NO: 390752 - DNA, 878 bp, Cannabis indica
ttttttttttttttgccaaaagatgttctgtttagttttctgttttatctctgtttgtctaatgagaaagtagtaaaaaaaagagagaaaataaaatatgatgaatgttgaatttaaaacactactaggtgagagactcacatttgttgtgccctatgataatgttgatcttaggctgtaaaattaaatagtaagaccctattatcattgttttaaaagaaagtcttgagtaaagatttgacaattacttaaatctgatagtgtagtaataatcttgaatttagttggagcgagtcactacacaagtttacacttcatctcaaataatttttgaaatcaactaatccattcattatcaaatgaaatgctgttcagttgcccattctctaaatcgacaaaattatttttatttttatttaaaatttaaaaatatttttatattaggtgtggaaattaagttaatattgattcaagttagtgttttaattatttatttgtctttgcatatataataaataggctgatgcatatagaatctttctaagcatctacagggttggctcgacaatttgacaaattaggactaaaaccaaagttttattttcagagacaaataggctgatatatataatttttttttagtttttaaattattttaattaaaattattatttggactaattaaaaattgacatgtggcatttaacggatcagttagaaagagggaccaacggacttacaaacaatgtgatcttagggactatcaccaccaatttttgaagttggggattaatctgcttcaactctaagtttttggggacttttgccgcaattatcccaaataataactatctaaccaaatctattttaaaattggt

SEQ ID NO: 390753 - DNA, 714 bp, Cannabis indica
tataatgaatttgtatacatttacacgagcattaactggccgtaacgactcttattgatgtgataaaaacaaggatggcggttcaggtggtgaatttgtatccccgttatctagacataaattttacttactcttctacacagacttgcactttatacacatgattagcaaacgaaagtcaataattcatgaaagttttcctgtaataaaaccattcagttttgagctatccaattctctacgtatgaatttaaagagacttaagtgaatttgcagctgatttaaaaactattggtttggtgatacatagcatcatgttccttggagttaaactcctatgttttcacatatttctttcattctcctttaaagaaatcagctcaagcccaatacttttgggtagagaatgatagtaggaaataacgtacgagtggttgtagtcactcatggaagactggtcagacgttgtacaaaagggcaaaagggcttgttcaaatgagaagattggacccaaggtacttaacacttctgtcaatgtgtttcacttgcatgaaaataaatatacatgtgttgggaatatagagcaaaaaatattccttgaataccacaactgacatggagtgctatcaaacaacctattttttttgtggtgagggcatctccaatggagaaattcaaatttgctgttaaatcaacaccaaaaaattactattt

SEQ ID NO: 390754 - DNA, 776 bp, Cannabis indica
attggcctaaaagtggtataaattgggcccacgcataaagcccccacccttgctcaaaaaatgatcaatgtaatttaaaaggaaattaacttatataccatctaattagaaatagtatatatatacttttaataattttttcttttaaaaatacctttacatttacaaaaaaacttctttctctaactctctcattctcaggcgttaaccccagcccagacccctatcgttgaacacagacccgaaaccccggtcgcaaagcctcaccgtcatcttctctcacgacctctcttgttttttacattttttctgttggttttctagttttttacgatattttacgatgtatttacaatgatagaataaatctgaggttagggatgaaatttagcgatgattagagatatttggcaatcagggccgaccttcaaaatatatgggcccaagacgaattaaattttggggccctaaaaaatatatatataaaaaagatcaatagaagagtgttatgggatttaaactcatgacattagacattatgtcatccacctcaaccaactaagctatgaatatttgttgcttataatatacttaaataaaagcctaataattttttttattttttattttgggcccccggaaagtgtgggccctaggcacgggcctagcccgcctatgcctaaggtcggccctgttggcaatattttgcttatttaacgatgatattagcaatttatttgtgatatgagactaaaaaatgcacagcacatcgctaa

SEQ ID NO: 390755 - DNA, 513 bp, Cannabis indica
ctaagatgcaattaacagtggctccctctactacaaaagcccacactgaagccataaaagaatcaagtatttcacaaaaggaccaatcacatttcacatttatattaggctccatttcatatcagatgagaagctaaaacttgagaaagtatttacagctaaaaacctttctcacatgctcactaacactctacccagtttattgaggtggataattattaatattggtgagccttagcttctgttaataggaattatttgtatttctaattaaattaaaaaaaaaaaatactatatatcagtttttctatgtacctatatgagctctaatttactaattaagtattcattattgcatttattattaataattaaacatgatgaaacttctatatatttagaacaaaatgacgtataccataagacgtcactctaaaaaataaataaattatgtaccaatccattccataaacccaatttatagtcttctttttatacaataaatatatgttt

SEQ ID NO: 390756 - DNA, 1341 bp, Cannabis indica
ttatttataggaagatattcagaacctgctttctgttacttgactattctcttatagaaatctaactgttgttatcaattattagacaccaataattataacaattctttaaaattctgagtgaaattggaaaacaataaaagagaaatatttattggtccttggattataccattttggtatgacctgtgtttatacagttttacattagcaattcataggactactacttcatagggacagtctcaaatattcccaataaacaatctcatctggccttgatttacttgatttgtgctcttagaattggaatgataatataaagaaaagttacttctctgctcatattctgaattgttaaaaactacactcaaaaaatagattgatgtaggttttgtgtccaaacattgtcagcttgaagaatagcaccaatttgtcttgtgtcttttaaacatttttgaaagcactgattttaagatgtttggtgaatgaatagctaggtgacctatgtctctttttatctttgcctggaattatatgtttatattgattgattcattcatgcatattcatatacaaataaccttggaatatatgcatgtctctgtctgtatcaatacatcatgtatggatatattatcttgactttcatatgggtactgtccaactgcgagagagtgatcattaattgacattgaatttataacctaaaattaatgcaatgttttgggaatcagagacattggccagagtaaaaaattatgaagctaacatgctcaataattctatataattcaacttaaccagggaaacattttcttattaacaaatatatgttgaagtatctgatatacatatttatataatgttttgatgtatgtgctaaaggacaggaaacaaaagatgtactagacaagttaaagggaagataccaaagcagaggagccctctatttgaataagaaaatgtatcatgtcagtaattgtctcttgcattatatgaatttgattaattattttgcttaggttgctaaacatacgtgtgtatattatatatatttatatatacatatacatatattttcattataccaaattagttttggtgaatatccttggccagctcatgtttcatggagcagaaggttggcaattgcacgtgcaaacaaccctctgacttcactaattcaaatttggcgaccttgttttttcaaattaaaattaattattaccagttacttttaatttttcaccatagaattttcttgaaaaattaattaagatttaggggttttaactaggggtgttcataaaatatttaattcaatccaatccgcaaagt

SEQ ID NO: 390757 - DNA, 923 bp, Cannabis indica
caaagaatgttagtaagttaaatcagttacactaccttcagttttagagactattatatattttattcaatagcaaggaaggttattaaggatcatacatttttctcccaatatatcacacattctaaaatttattgaacatgttatataggatataaactacaaaggcctgaagatatttttggcctaaattattgttaattctcacacttgaacaacttatatatcagcaaattaaggaaaaattggtattaattttaaccattgctgggatgatgagtgaacttgacaactaactgtgcaaatgtaagtaatagatattattaagttcgtttatatattatgttatgttacatttagttttgaattaattctttatttttgtattaaatttataactcaacttaaaaataaaatacgtcgaatcccttagctcaagtcgttgatgaaccagaaacttcatgatgcttactaggttttagcaatggagagaaatattgtagaagaaaaccttaatttatggcatttgaaattaattggctcaagatgtggaaggagtatcattatggaacttttaaaaaaaggtgtgactataagagtaagtatgtaatggaatactctagcatcttgttctcaagcttattaagtaaatgaggattaagaaatattttttagaatttttctttgatggcttagagatgggaagcaacgatgccgttagtgtaaatagtattgtgaattgaaatgcataccatatttcatgtcctttgtttttcttctaacttatgtcatgaaataattaggctacaataatcagaattggtctaataattggataagatattgtatttaattgttgcctttattttgttttatcttgactgttttgtttgtattaattttgaatcacccctttattattt

SEQ ID NO: 390758 - DNA, 994 bp, Cannabis indica
tattaactcacaatgagtcacattgatttaatgttaggcaccttaaagtgtccaataacaatattcttagtcgagatacaatcacaaactaagagccctgaagaaaggtaagtgacgcctaatcaagaaacaatagagtcctgagataaatattcaagatagaaatctaaaatatttatacaaaataaaagaatatttccaaaagagagaaatgaaaatgaaggaataagtaattttcgatataaacaacatcttaccaattaaaactgaaatcattaagtacaaattgacaaaatcgaaataacttagacaatatacgaaagaatgtaatgaaaggaacccaaagagggaagatcgacacaagaataagaaataataataaatttgtagtaattaagtgcattataaacaaagcaataattagtaatcataaaactaaaaacacatctcaaaaaaaaaataataaatgaaagacagcttagcatgaccatgcatgcagagaaacatattataaaagaaaagaatagtagcaacgtaaaagtagaaaaatagagggggggaaagctcactatgaacaacgaaaagaacgaatcccatacaaataaattcttgactgtagtgtacgtgttcttgatcaaagattgataatttttttatcaaaacatctactatttaaaaggatagtattcattcattaatttaaaatatgaaatcacacaaatctataatcagataccaaataaacaccaaatcgcaaagattacattataagagcctaaccatccaagaataaaaatccctaaccaagaaaagacaaccaaaggatagggtcatgaccctaacaacggaacacaccacattggaagtctcacatttgagatattgatcttactcttaggcaacattgctcccaaattacgtccttacacttggtaggaaggagaagtggagagatggagaggagaggagggagagaggtgagaggagatgataa

SEQ ID NO: 390759 - DNA, 1668 bp, Cannabis indica
gattaggaaaatttctatacgagtcaaccaggaaaccaatacatattaattttcgaagaaaatatgatacaagtagatggacctttaaacaataaagaagcactgaggcacctcatccaactttgtctttctccaattttacccacttatgcaaaagggtcttattattttttcaacaaaacaaagaaattcatctactaccaggaaatgtactaatgggaaagagatatccattcatcccctaataaattttaaccagaatatttataaacgaagttacgcagaaaaatttatcgagataacaaatcccactcacttcgaagctcttcagcttcatgaaacccaacaacgcttaagctaattgtccccaaatacatccttgatgtaaattctagggattacgtagcagggaagaaaaaataatcacaaaagctcgaaacaagtgaaaacttaaaaggggacaacaactgcaacaaaacaactccgcttcaaaattaacaaataaacaatacatattacatgtttatagaattaattcagtaatgatttaaacataccaaattttttaaccaataagatcagagtaaaatcttacatattaacatctccaaaagaattgggaatttcttacaataaatgggagcagcccacccggaaccctaaacctaacactagtttcagattgtctataaataagataaatgataatagcaaagctttgcttggaagacgtacctttgttcagagaaaatgggtcgggtcgccggagtagatgatctgatcggattgaagtattgaacagagctaacacagcacccaccaactcctcaaatcaaatattctttccttattaataataattatatgcttttattcgagagagcaacttagctgagctgcagaaccaggaggaatagctatttgcccactaaaatcacgccacgtttgatataagctacgtggaaatgaatggtagggtcaacaaggttaattaagttgatttatatgtggtcttgcactcaggagaaacaatgcctcagagtaagtccaccaaacttttgttaaagaaattgtcaatctagtacactcctattttctttagcatttaagaaaggtttttaattatcattttaggtttgtagtgtaaaaaataaggtttaaatttaaataattgtttatcacatttataagaaaaattaatcacacctataaaatatttaaaatttattttaaacataataaattattcaaaaaaatttaaatatgtaaatatttttaaataactacaatgtatacaataaaaaaaaatacttaaaaatctctccaacttaaacaaaataagaaatatactgaaataagatgtttgcagcctatttaattatatgaagcactatctatatatatatataagaaaaagtatgagggcggtgacgtggcactctataatcactcctaataggcttatatgatctctccttaattatctcagtttctaattttttattcaatttataaatattaatgaattaaataattaagaaaaatattataattaattaattaataaaatatctaaaatatgtacattttaaaaaaactaaaaatatctaatgttaaatttaaatctttattaatttattatatatatacacattatctctctcactc

SEQ ID NO: 390760 - DNA, 1029 bp, Cannabis indica
atgaagttttagatgaatttaactactgattggactttgattaattcaatctttatcagataaaccgtatcaatttgttatgtgtcactttttctcattttgtttaatgatttagttttggtattatatcacccgtttccaaataatcatatgtcacttttcaactattttacctgtgattccaagaaaaatattgaaaaaaaaatgattttaaaaaagacaaataagtagtacaatacaattgggcagttgggcagtttcactattgtttattgacaatgtcattcatgattgactaccattgtgaaatgtgacatctcagattgtttttgttttgttctcattttttgatatttcagttatgcaagcatattctctactcaagaagagagtatatttgttagtcttcataagaaattggtatgtacataatgtcgttattataccaaaattacctcacacacacacaaaaggtggaacaggtatgtcattacaatatccttatctatcaaaaaaggcagcagagaaagcaacataaaaataaactacccaaaagaggtggaccaggaccatacacaatataaaacacaaccatccaattaaaaagttctctcttataagtatggctttccttgtactcaatgatcaagcaaagccatgattcaagagatgaccttctatacctattgctcaagctaatcatcacttaggcactatcacgaaatgggtgtcaaattgaaaacttgtataaatgaacttttcttaaaataaagggaatataagatttgacacaataagcaaatcttttaatgttaacaaagtttatgctaaatccaaacccttgagatgagcatcacttactcgtgtgccgatagtacttccagctatgtatccacctgaccaagcattctgcataaagaaatgaagtagtggattagctagagtttgctagtgatggacaaatcacttgcaatacaaaaaggaatggacaaaatcttacacctacaacttgggcatctaataatatgt

SEQ ID NO: 390761 - DNA, 670 bp, Cannabis indica
attatcgtataacagtaaaaacgaaagaaaataggaaaaacaataaaaggtgtaaatttctctataatgaacgacatttaagagaccacaacgaatcacacaaggccaaattgagaaattgaagacgccaacattaaaaactagcagacattagtcgaacggtcccaatggaggttaaaggttgagaagtagaagcttttaattgctctgataccatgttagaatttaagattaaggtgcatcgtttccatctcaaaaccaattgtcaatgagagaaatatctcattcatcgtatagatatggtataatttttctacgcattaataatatggactatttctaataatattttgaaaacaccaaacctttaattaactcaatgatactaaaaaataattatcaaaaggtaaaaaaaaaaattgtataaagatttattctcattcccgagtgcttttgtcaggctttgtcagtgctttttacaatatatagtgtcggtaaaagtgacttttgtcaacactattcggattgacacaagcaaaagtaggggtgttcattggatcaaatctaatatttttaggcctatctagatccgatccaattatatattggatgttaaattttaccattcgatccgatccaattaattttagtcatccaatcgatccaacat

SEQ ID NO: 390762 - DNA, 1678 bp, Cannabis indica
ttttgtacattctatctatgtgccttggtttttttggggaagaaagaaagaaataaagaaaaggggtggtggtgggaaagtcatagaagcttattctcgtccattctctgactagtctctgaattaagtgagagtgtgtagttgatgagtttggtttttggatttgtagtacataaattatgtgtcacgggaagaggtctactctgaaacttgagccagaaaaagttaaaaagggttcgaaagttgaggttagtagggctccaaatgtagagtgatgagatcttatgcagagacgtgtctgagctggatatgcccttgttttagcctcccgtgaactttatctttggaatttaattacccaattcttaaagggtatgttgtttgttggcattattattattattattctgaatgtgactaggagtatcacaagtcacagtaatcgtaataaaagtggcccgtaatgaaatttggtcggtaagtgattttattaaaacgacagcagaagctcaacctttctaattatatatatatatataaaaaaaatgaaattggaaaatatatatcatgattcatgagtctcaatcaacatgatcttctctgtacattttgtgagcaagtaagatcatgaaaatggtaaactttcatattgaaatgtatagaaaaacttacactacaatggactaagaaaattagttgtttattgagattatcttaaggaaaaaggaaaaccccaaatggaaggaaggaaccatatccatctgaatcttcgaaaatgaatatctggtagtacatttctttatttctttttttttttttaagagtaagtggtttttgttatgcacaaacaggattgcaaataagtggaatgagttgatagtgtaatggggtacatgtccctactcacatacatactcatatgcaatcatctttgtcttttgctcaagtgctacttaggctccacacattgtcttgcccttaaaatggagaaaggaccactcaaaattcacatggcaaatgacccaaaaaaaaaacgtacattagaaaagaaaaagaaacttacttattaaatacatgagactaaaataatagatatatgacatttacgttttattcaacgtcatatacacataggcaataaagaggtaattaattacataccaattaaagatcaataaaaccatctttaagataactttagtgtatattttcaaatggggttttctttattaatacaaaacccgtgactaagtagaggactaatcaaatacttagattgaaaaagtaccattttttttttacataaagaagaaaatatatctatgtactgaatggttttaacttcatttaagttactactatcattttcgaacatttatggattagtgcattatgaagtaagcatgcatgcactgctgagcatacttgttaggtgctctactatatacatatacacacacatatatatatatatgctaagtgttcatgattatgtgtggtagtgcacttgttataatagattttcttttgagaaataattgttgttggtgggttttctttaattcttattggtagttaaagtccacacaagacttccactgtctcacattatatccttaaagtggtacagtagtatatgtaaaatagttataaattaacccaatatatatatatatat

SEQ ID NO: 390763 - DNA, 2118 bp, Cannabis indica
catatggtgaaaatagatgaatttggagtacattcctatagatagccaggtatgccaatgttacaattccttttatagaatatgtttctatttgttttcatttatttcttactttgattaatttctcaaaagggttttgttaccaacaatgagaggtctttagaagaactttatggaggagatgatgataatgaaacaaatgaaaagatggcatgtttgaatgccatagctactcgaatcgccacagttttcgcttctttgagggtaattataagaatcatctgtctaaaatttcggtattacaattgctgtctaattataaattattatttttaacataaacatgacatgcacttaacataattgtatgattatattgtgtgcaacaattttttttttaaaatgtgtaggaatttccttgtgtgcgctaccgagctgcgaagtgtggtggtgatgtaactgaaacaacgaattttcgcgatttaataccaacaaaacttgctgatggtgtgttggattgtcttatgaaatataagaaaacaattcctgataaatttccacaaacagaaacatgtcaattgctaatccttgacagagctatagaccaggtgattttacatgtttaaatagttataataatttatgagcaattgatgaaaatgtcactttgtgaaaaagaaagggaaaagaaattatcaaaacaaagaaaattttaaactcatgtttttttatttttcagattgctcctgtaatacatgaatggacatatgatgcaatgtgtcatgatttactaaactttgaaggaaacaagtatgtgaaagaggttagttttgttagttgaaaattttactaattgaaaatttgtgatacacatattaagggttataatacaattacaatatgttaggtttctagtgaaaatgattgccctatagaggagaaagaagtctttttagacgatcatgatcctatttggcttgaacttcgtcacgctcacatcgcagaagtatgtattcagtgcttatacgaaactaaattattcaaaaaatttctgcagcataaaaatcatagtagaatttcgatcatgatttctaatttcgtaggttggtgaaaagttacatgaaaaaatgacaaatttcatatcaaagaacaaggcagcacaattccaacatagttcaaggtatgctcgtttgagaaagtacgcttcgatactatgttaaaatctatctttatgtattagattttatctcaaaatcaattgataataaccagaataaccaataatattcaagatacgtcttagactaaggcgagttaagcttgggcttaatgcccactcagttcaagaatctaaatagatttttttatttattcttataataagagcctaaaaatattatttttcgaaagacccaatacaagtttttctagttcatctaatttgtatgtttgtagtgaccatgaaaaattatctacattcgacttgcaaaatatggttcaagcattgccacaatataccaaagaaattgacaagctttcacttcatatagaggtaactatatcatgtatatttatgaccatatatatataacaaatattttagtgttcatttccttaaggtttcattttttgggttttttttttagattgcagggaaaattgacaaagggatcaaggaacttgggcttaaagagctaggaaagctagaacaaagtcttgtttttggagaagctggattgaatgaagtactaaaatatttgaccaagaaatatgtaagaaaaagaaaccaataaaaactatatggtcaaaaaaataatgttataaatcaaaaatcaaaccactaataattttaccaatactaatgtaggacactactggttttatgggttgcacaagggaaaacaagttgcgattattgatgattcttgcagccatttaccccgaaaaattcgagggcgataagggagtgaggttgatgaaggtttgtttattgggttaatttcacaaatgcacaaaaacaataaaaaaataacaaaaaatacggttttacggaattttaaatatttttacgaattttttgattttatttacataaaatacggtctttttatgttgaaa

SEQ ID NO: 390764 - DNA, 661 bp, Cannabis indica
tttattcattgcaaaaaaaaaaactttttctaaattattagagaataaacaattcatactttttatcaaaaataaacaaataccaaacttccaaataattccctaattttcggagtgtgtttcaaagtgactgtataatgattaggtagtgtaattactaaagtggtaattacacggtttaataattatactatattttaaaatataagatgtgtttagatatgaagtggtaattacatatgaattcataatatcttgtttggaaaaatagttagtaattacacttaattctcataggaccacgagaattagagagtttaattggaacccctcaattacctctaattacactattacaagatatggtcagacaaacatgtaaaattgtacaattacctctaattacacacaaatctaattacaccgtagctttctaaacgcatactagttgtggtttcaaatgactatgaaaaatatacaaatttcaaatatatatatacgcccaacttttgtaatctttttatatatatttgtacttattgagtgatataatcttaaatataacattttgatgtgtgtgtattataaataaagtaatagtattaaaataagaaacataatttgttatttttaaaatatatagaaagatggtgatattgtg

SEQ ID NO: 390765 - DNA, 1644 bp, Cannabis indica
tatatctttatatattaaaagtgcttatctaacggcaattcttggtttaacagaatattcttttcttattctgttaaatttaacgatatactttaacatcaaccttaactacaaaaaagaaataaaaaaatattaaaattaaaaccatagtaagcctaatttcctaaaaaattgtaatttttttatttttttttatgaaattataggtttgatggtgatgatgaaactaattccactaaaatcttaagtttgttgatggcaatgagaaaattacgatttctttattgagaaaatggtgaaattacgattctggtagatgtatatttccttgtctctgaagcttatctcaacgtcttatctcagaagcttttagccaaccccatttgttttgttagggtattgggtctcaagaatgtttcagtttaacagtagataaaaaaatcggtggaatggagacatttggggatttaataattgggaaagcactacaagagaattggggttttaatcacaactttttagtctttgtgtgcctcccaccaaatcgcatgcacggtgatttattttcttgtctttctttactttgaaccataatggtaaaggtgaagaaattataccatgtttatgatgttttctttggaaatctgataagtacctaaattttgtaattcaagtgtgtgtttgttattgtctgatttccattgtcaagtaattacaatacaactccgtccataaatgagaaggagtcttccagcaatggaggatccgatcacattgcagcacagacgttcacattctgtgagttggcagctgcaactagaaattttagggcagaatgtctcttgggtgaaggaggttttggtcgagtatacaaagggcctttagaaagcactaaccaggttagtccagtgcaataatacgattaccattttatgaaaaaaaactaagatgctaattgaccttcttaatttgtcaatatgttttctttcatgcttttcatcttctgagttttggaccaatttatttacagagcccaccagttatggcatagttatctcaatttatcttaatttgagtcatttttgggcggtgtttgtattgcaagctaactgcggattctgttattttgtgtgttttgtataggttgtagcaatcaagcaacttgatcgtaacggcttgcaggggaacagggaattcctggttgaagttttgatgttaagtcttcttcatcaccctaaccttgttaaccttactggttattgtgctgatggtgatcaaaggcttcttgtttatgaatatatgtccctaggatctttggaagaccatttacatggtatctatttcattttgtccatttcttaacctcatttgtctatttattcttttgcacatgctaaagtttcataagcttactttgcagacattacaccaggaaagaaacgactcgactggaatacaagaatgaaaattgcagccggggcagcaaaaggattggaatatttacatgacaaagctagccctcctgttatatacagagatctgaaatgctccaatattttgctggatcaagggtaccatcctaagctttctgattttggcttggcaaaactcgggcctgttggggataacactcatgtgtcaaca

SEQ ID NO: 390766 - DNA, 1820 bp, Cannabis indica
ttgcttagttactaaattcttaacaaaaccactagaacttacgtaaaactacgtaactctcatcaagtatagtaaaataagactagagagagggtaagtcttaatgcatactcagtcctcttttttcatctatagttatttagaatgaattgtcaatttttaacaaattttgagtaatttatattatattgataaaaatgaaattaaatattttattacatttattgttatgtcaaatcaaataggggtctattatctcttagaagaaaataaaataggggtctaccacatatagaaatttccaagactcctgattgcatacgatttcctaattaagtattgtttaattagttaatgtttccaaaaagtgaatgaatattataatgcatgcgacacagctgttaattaaaaatgccttccaccaatgacatacgtctaatgagtgtgcatcacccaatctttctcatttaagaaacaaattagaaaatatgattatgaaagttataattatgttgaaaatgatccagggtgtttcatagtaatttaacatttaaattgaacatcatttgaattactaaatgtataattgtagatgttcatgtgaattgccaggttgatacttaatggtagtattgcattagataataagtagttattcaattattaatttaatacaattaatgtgaattgtattatttaatacttaactaatgatctatataaagttatttatgatatttacacacggtcttaggttggagactccggtcccaatattgaacccgaaccccgactcaacctcggactcgaaccccgatcttaaccttgactcagatctggtgtctgactcagctccaaactctaacacaaaccccgaacactggacccccgaacccagacccgacttgatcccgaccccgacctcgacccagcccagaccccagacccaactagagatcaaagttgggatccaatttatggtaaaaataatataattttacacaaaatattaatacaaattaatatcaacacatagtattgtataaaataatattaatacaatacaatcaaataaaatacattataacacaatataacatgacgtaccaaaccacttttttgtaaaccgtctaacctgaacaatctgctcaaaccaaaccaagataacccgataaaaaatacaaaccgaaaaacctgacaaaaatataacccacctaatctttatattgggaggattaaaaataaattgaccaaaccgaccgacgtacacccctaatttatatgtcattggcgcggtttttcgtcaatggatctaaaaagattgtaaacaaacaagatgaacacaagtgaatgtcgatcaaaagtaaactatacaatgaaatttgacagtgatgaacaacaaatttttatagtggttcaccctctatcaacggtaataggcttggccaattagagtgttattgatctcaatgcttgagaaaagtttcccaaagttatgttctccaagaattcaatcctcaagtgagttttttagagtaaaaatagtgtaactttaagagagtgagagccaatccttttacaattgactttatagcctttatataggtttacatctagggtttaggattttcttaacctaacatatctttttttctaattatagttaagttaagtttaaaatataaaataacattttaaaaaaaaaatatctccaaaaatgatagttgttgtagatattcttggactagctttgatggcacgtgccaacacgaaagtgcctctttacgtagactcaagttcgttgtaacgtccccgcttca

SEQ ID NO: 390767 - DNA, 550 bp, Cannabis indica
atttaattttatcgtaaaataaacaaagtgatagataataattaataaatgaatacaaattaaatacttttaactctttttatattaatgaataataaaataaatactttttttttctgtaataatttataattttattttagtattttaatcattcaactaaaaaaggtaaaaatatttaatatgcatctatttatcaactgctatttattttgccactcgatttacaatcaaattgaataaaatataataaaaggaccacattactgtaaatattatattttaaaggatattattaacaaaacatatactataacgtacacatcttgctagaataaaaactttaagaacaaaaatattaattattctagtttaactaatcggtgatgatgtgctactaagaacatctataatagaatgctatataaagattgtgtatgtgtattttttagcatatgttcttaaaattaaaattaaatctaatggtagtatataatatagtttaaaacttaatacatatactattctttcttcctatttttcctatttt

SEQ ID NO: 390768 - DNA, 1045 bp, Cannabis indica
  modified_base (26)..(26): a, c, t, g, unknown or other
ttttcaaaaggtagctagttttttcnccatccataatccattggtaactgttaattagcccacatgtatggattaacatgctttggaaatggaaagatcaataaaataaaaataaaggaaataaatttgagccaaaataaaaattcatatttttttgttataataaatgaaatggaatccattacagctagagtagattggagtaggataatatcccccaactaagtacaatctttatccaaccgaagatgaaattttggagaatattatgtcaattattactccaatggatttttttttatatataataactttggtagttatgtacataataaataatataaaaaataaaaaataattatacgagtgttggaaacgtaaatcaaagaaaagaaagagttgtgatggcatgcctatattgatgggctgcagcatcagcagcagcgtccaatggtgcagctctgtgtaacccgccattgccacttcgtgcagtagggttgttttgagtagtagcaccactgctaatagaactattcctttgtctctgtcttggtctagggataatgatacgattacaacacaccagagcacacaacaactctataaaaaacaatgtcatagtgatccatatgaatatggatatcttccaatgccacaatacccttttcaacaatggaagttcagactcaacgattagggaagcatcgtacatttcaggaataccagcaccaggtcggtattccgctctttgttcgattgtcacctttatgcatccagtagggacatctccttccctgaaacctttaaacttaacatttaaagtttgagattcggattgatagccggcaacaagagggacagccttaaggaaggtccatagaatgcgaataggctcgcttttgaattgtaacatgcaaggatggcttgaacttgaaagaatttcacctttcacagacaggaactctagcctcgcctatcattatttataatagaaaactgaatttctaagctattttttggatgataacaagtactaaaatgcaga

SEQ ID NO: 390769 - DNA, 624 bp, Cannabis indica
aagaagagagagagagagagctatataccacagctttccgcaaagaatgagttatctaaccggaacttacaataagcgacttataattacgttcccattgctttttttattagttcataatatttgtttgcttttttatatttttccagggttagaaattaaagaggcaatatctttacaacccaataaattatacatgcccctcaatattaaacaaaaagaaaaaaaaccttcaataaaaattttctttcacattacgtacattttgttaattttaataatttattttagttttatatttatatatattttgaataattaattttttaattttaattttaataaagatttcatgtatatttttttatattgaaacttaaaatatatattactagaaatagtgtcagaatgttaatatatgtggtaactaaatactattattacccgcatttctaaagaggtgatatgtgacccctcgcgaaggctcactagagtacttgatccatcaactggcccaagtgaatggactagacgacccatctcctgaatagacatgaatccggacaacatgtctggagatgatctagatctttcgagttttttgatggataatcaactctaatt

SEQ ID NO: 390770 - DNA, 507 bp, Cannabis indica
ctctctctctctctcttttctgtcgatacaccagaccaccataacaccatacctaccactaccacaataccaccattcttgccaccacccaccaccattaccacgagaactatgtttactctattattcaaaattaaacgataataaaaaggagaattattttacttttttttaagaccaaaattaacaaataaaattaagaaaataaatgaaatgtgatactatgatattcaagaaatagttaaaagttaatctccaccctcaacaatcatccttatttactaataacgaatgtgatttcaattttccaatcaaattattaattccgcagataatattaaagcaaacaattatcccaaccaccctattacaagtaattaaggtgaagtgctcaataattgactcttttaactaagtaataaatctatgaagcatataatttatttaacttagataaaactttaaattcattggagatagactaatctaggcaataaattaatgaag

SEQ ID NO: 390771 - DNA, 706 bp, Cannabis indica
agtaggaggaattgccaaaatataagaactgggggttgagagaatgcatttccatgactaagacttgagataaatttcatctactaacaatttactaactactgaatcaaccaaagaaagcgaagaatgatgtaatatagaaccacgaagtctctcaataaattactatgaagcgctgttgaaaattgaaccaatatttgttcctctctctacgagcaatatacaatgcaaaatcacgtaactgattcagtgagttccaatattgatcccaaagatctatcatcacaaaatagaactcttgaatgctcacatctttctattcaatatctctaatatcagttttcagctgaaattgctttgtgaaattggactttgtatacaatctcgcaagatggtcccaaacttcgtttgctatctcatactttgctaactgagtaccaatagattgttcgacagagttatttatcctgataaaaattttcaaattgtctacttcccaattgtctaacaaatctacattatcatctgctagtttcctctttgttccagaaatataaccccacatttatttcatttcaaaaaaaaattcataacataattccaatacgaatgattctttccatccaatctcacactgatcacttgaagggaatcatctttattggtagtcaatgcacaaaaaagaacaaattgcaaaaaaaaaaaa

SEQ ID NO: 390772 - DNA, 1808 bp, Cannabis indica
gagagtataaaagtttgagtattgtaagttaactgtaatgaaactataatgcaacgcttatatctgttgtgagccaattaatataaaaccacaaaataactaattatatttaatacaaacaaatattacaactgtcgtgttttatctgtttaggtcacatatttgacaatttcaagcgctgtttatataatattatgatattgtagtagcaaaatcattattcaactaacatacaacttaattgcaactagaaatattaaatgtgaatgtgtatctataaaagaactatttgtcagtattttttttggtcactaattgataattaattgtaccttaataataatatgtggtgaaataactattaaatctctgtaaactaactttatatcaattaatttagtatattaataaaactaaatgttataaaagtttctttaaagagctttgtattgtattgacgatatgaaacacttgcaaatatgataaaattcattgtatcattatcagtttgtaataattgatatgtcaagtttcagagagttaacaaaatagttatgcaattgttatggaatataaaaaattagaattgtgtttctatgtacgtggctctgtctacatgtgaatttactattctattcgtgacgtaatgtgaacaaattcaccattagaaatctagaaaactacaaaaaatacatcaagatacatatttaactatattattgattcattttttttattatacctgagttagattgtttaggaacttcagttcaactttttaaggtttgcatttcatggatctgaaaattgaagtcaggatattagttttatgcgaattaaatcagaattctagttgagatttagttttgtagtagttttattacacattttttcatgattttggaacaacctctattttgattgattctggtcgtcttctcatgtgaagtcgtagaaattaatggtggttctcttttgtttgggtttcatttcaattgtgttgggttactgggttggtcgatcgaagattgcgtgtgtgagattgtttgttttgttcagtacagctaaagtagtagaataagtggtatttatgtaatatttggtttttgagttgtattaatattcctagggccggcaataaatattgttgtaatttaattatatttttctttatatacatgaaaaaaaacccctttaataattataccctcttacctaaagaggcaaccattaaaagtacaacataaacacccattcggtgaagcatcatgaaaaccacacacccactagtgaagcattattatgaaaaccaaatatattaaatatatatttgtgttcaatcaccaaattattcaggataaatacatgcatgcacatatataatttcatttgcaatgttgttttgtttggaaaaaaaaatgatacatacgcacatagtagtatattactatattgttatataattaattacatatagtttacaattattctttgatcaattatttgagaaaaaaaagtcatctctttctctcaagccacaaaaactcaatttagaaatggataaataacatacacaactaataattaagtttgttcattaatttacataatttttttataatttattgaaatacaaaccaaatatataaactaaaatttatttattattttattctttataaaaatatatattaatgtaataagtaaaaataatatgttcaatatttaaaaaaaaatataatataatgatgaatctaccaaagaacacagattcatatagctaataattatgtttgtttattagtttg

SEQ ID NO: 390773 - DNA, 1054 bp, Cannabis indica
ccgtatattttaaaggacaaaattaagtagtgccgaaaattaaggggacaaaaatactattgggaaattcttcaatgcatccctttaaaatggatatattgatgcacctttatttgttttagcacccgaaataattttttagtcaaattttttctcattgtcatgtatgttatagttatttaagacatcttgcaaaattttaagaaatttgaaaaagtttaatacgtccaaaactaattcaaacagtgtattgcacgcgtgactattttattttatacgcatgtaaaataaactgtttgaacatttttttctatattataaattattcgaaatttgtcaaaattttgtacgttatcttaaatagctataacgtacatgaatatgaaaataaattagactaaattttttttttgatgccgaaacaagtcaagagtgtatcaatatattccttttaagagggtgcattgtagaatcacccaatactatttactctaatatttacactatccttagttccatcgaaataaatgtcgacacatattcacaatactttaagagcacatgacccatattgtaagttttatatttattgggtaaaatgtcattttcatactttatttttggattccctctctatgcaaaattgtgtctatatatttatataattaaataatatattacactcattttgtgtttgttctacactatttatgtaggaatattttatgaaatttatattacactcatagttattgaattataatcacctaataaaattttgctaggattaatattatgagtatgattaaaatttatatatttattgtttatatacttactttatttttaacataataatacgtcattgaaaactaatagtgtcatacaggttaaataactaaaaatctcgaaaaaaaaaagaagaaaattatttaactaaacaagtacgtagttcattcatctaaagagcatgcacaaccagtggcggacccagaatttaaagtgagggggggcataaataaattttaaaaaaaaatataaagtgtagttagtg

SEQ ID NO: 390774 - DNA, 1227 bp, Cannabis indica
aaaagtgaaaatatgaagttttgaatttgactctttttacttatagctcttagtactatgaaaaaatagacgaatgatcgagacggaatcagaatcggataagcaaaatccaatgcactaggccatatgttaactttggagttgggtgctctttttggagcttctaggatgtcattttgaaaattccaaggttcttgaaattagggagaaggtctcctaccccgttttggaccatttcggagagaatgcttggagcagaatttgcatttgagtgattgaaaccagcacatcaggttgattgtcaacctgtacgttgggctcaattttttgaagcccctgtaattattgttttctccccaagtttagttgtatcttcgttgttttttatgacaaaaaaaatgcccaaaacactttttcagaaaattgattagaaatagcccaggttaacaatatgtcaacctcagctctaggcctagtgtcatgtgtcaacttgggcgttgggtgctaattctagtttcaagcatcttggaagttctgtttgctccccagaaatagttgaatcttaatctttgatggaaatggagaatataccagaaagactttttagaaaaaatcctcaaaattgacctaggttgacaaaatgtcaacttgggggctaggctagtgcgaagtgtcaacctgggcgttggtcccttgttttggcctccatgttggtctatttcttccctgaaaatacttatttccccattttcgataaagacaaaaagatatacgagttggatttttagtttgatgcttgaattgtcaacctgggtagtgagtgctcgagcaactggtgctcaaaaattaaatttctctgaatatgattctgatgcctcaaatatattcgtagtatgtctagttcatgtctcatagcaaagtttgacccatttctgctatgacagtcccaaaaactgcgaccctagttgggttgtcaacttgggcattgagtgaaaccctaagcgcctaggttgatttttgaggtattgttttgtgtgtttttagctcccaaggcctggacttggatgcttcatatcttcatcatatagaatattgaaagatggttagttagaacaacttggtagaatttgaacacctattctggagttcccagagtcaacctgggcgcatggctagggagccctcccaggtcgtctactatgactcgggactactcaactccgagat

SEQ ID NO: 390775 - DNA, 1557 bp, Cannabis indica
agagagagagagatctagagaaagagaaaagaaaaaagaagcagaaaagcaaaactcaattattaacagaacaatacataagtatttatagagatacaaatacactcattacaagaagactaaaaactaagaaaaggaaaataacaaatagattctgttatgcaacagtaactaacaataacagaatttttaatatgattttatattaacatcccctgcaaacgaaatggtgtggacaacattttttgtttggacttcaagtaaagaaaacattctgttgtaagagctttagtgaggacatcaacagcttgatcataagcaggaacataatggacagacaattgcttgtcgatgatttaatccctgacaaaatggaggtcaatttttatgtgtttggaccaagcattgaagagagggttagctgctaaagctgttacactttgattatcaacctaaatgacaggactgtgaataattggtacatgtaactcttttagtagagactgaattcatttgaactcaggatacaacatacgataagtttcttgtgtgtggtggatcgatttggaagactacggtgtaagtttctaatcaactaaaaggatacaacatacgataaattttgaggataccctaatagtcatcaagaggtatatattcttatattgtattttatgtttagatttaatgtataaacatcttgagatcaaatgggctatggtacaatgataatcagataatatgaattttcccactgcgtacctaatttagtaccattaaaaccaacaagtttaatggtggagagcgactttgccttagttagaaagctagtttatgaggttgagactttaaagattaaatgtgaccaagctattaaagctttgagcgatgtcaaggcatgtgatcaaacaaagagttgaagcttctctcaacaatgttgtctccaactacaagacttctgctaaggcggtgaaagagcgtgccagtaaatacaaggattcttacaaacaggctcattctcacttttccactcttgaggtgaaagtaactgatcttcaggctaagattaaggatttggagcaaaaatcgataacttcttcctaaactataatattcaaatagaggcccttaatgataagattatagcatataccagcatagagaataaattatggcatcaccaagatctccaacaaaaagttgaagctgctgaacaagaggccttggagaatcttaagaatattgaggttgatctctcaaccaaactcaaagaggtagagaaggctttggaggagtctcaaaagtgcgcctacgaggagattcgaaaggcctaagctgatgctatgaagcctaaaaattatgctaaaagcttggaggataaacttgtcatcatgaaggaaaaacatcaagaggaggtgaagaagtctttcgtagtgaccttgttccacatatcataaataaataatgaagtgctaaattatttggatgaggatgataaggaagtgcttattcttcagattttggttgtgcattaatctatattagtggagaataaaa

SEQ ID NO: 390776 - DNA, 590 bp, Cannabis indica
catctcaatttactgaatgaagagttcaaataaatcttaacatgcaataaattagaagagaaataaataaaaatctgtactaattttctcacgatgatactctgaattctattcaaaaaaataaattaaaacaaaattgagggagaaatggaaccttaaaaggaatatacttcatcatccctaatcaaaatttcaaaactcaggaaaattaataataattaattgaggtgattttcaatatttcttcttcttctatcgttcttttgaacaatgttagcagtggaaatccaaaaacttattaacttgaacgacaccaactcaaatttcatcaatggaaaagaaaaaaagaaatgaaaaggccaagtgtaatataggaacgtagagaatgaaaatcacctgcactgttggaaaccccgacgaagtctcttgctcctttgagaacccaggtgcccaatccgtcgcgagttcccgtcgaagtcgcctgtgagtagagccgattaccatggaaggtcgacacagtgaaagccttcttactctcaacactctaacggaaatgacctaactacccttcattttcccccttttttttt

SEQ ID NO: 390777 - DNA, 951 bp, Cannabis indica
ctttcttgaaacttattgggaaatcatactcatttattgttcttatattcatgcatatatattacatactaccatatatatagttgaatgtattaccatttatggtcttgataaaggttgataaattattttgaatgattctcttcattcttttccgatttccaatgacttttattttttgctattgcagcggtatgtgttctgattttcgaactttggatcgaaaaggtagaaacaaagctgaacaatttcataaattgttcaaggtatcacattgctctctccactttttatgtttatatttcacaacataacaagtttgttattaagtttggaatattacagcaaacttttcatgaatttgaagaatacttattgcttattagattgttttctgtattagaaatttattatcatttttaaggtatcaaatcatttaaaaatcgcagttttgtaagtttttttatgattaattatattttcatcatttttaataggtacaatgagcaatccaataaatcatctcatcaaatttctctattcccgcggtgagaatttataattgataactaattgatataatatgatatgatattgagacctactttattattctttgggatatattgtttactttagtggttgaattaaactttatgtctacatacttaatacttagtgttcagatttgaatttttggagattttttttccttaattatgttgatttgttttctagaataagataaaaatattaacaaactagtttaaatattgtggaaattacgtgcagtatggttttttaaaatgttttgtaaaaattacccaaattatgagattttttttaccattttcttttttatggcatttttaaataaaactttgtgtatatgggatttatgttttgttttcctttttatgagttttttaaagagaaaattacactatatac

SEQ ID NO: 390778 - DNA, 571 bp, Cannabis indica
catgcttcatgagctttgccacacaagctttgggatgaacttaaaaagatatatacatatttggtatacatctgtatatatagctcttgttatttttagtgcgactttaaatttcctttcatgtgtactttttttaaaagaaaagataaattttttttattttatacatattatatatgcacatgtaaattaatgttagaattctgctatgtgtatgtaatgtgttgagatattaccttgttcattatggccctgaaaatctagattatcaatattatatttacactatgtttggtagggggagagaaggagggagaggggtggagggagagagataaatgagagaaagggagattaaattcttctaaatacacaaatttcgattcctctaaagataagagaatctaaaaaaagacaaaaaaactaaaatgtctctttccctctttaaaaattaatatataataatgttagaaaaattaataataaacccaagatcaatttgtatataacatagaacacaataataatatataataattaaatatgcgtatctgattgatctataacaatt

SEQ ID NO: 390779 - DNA, 885 bp, Cannabis indica
ggctctactggttcatcaaggcatacatcaggctatagacaaagaagaattgaaagaactagggtgaagataaaaaaaagataaaggaaattgagattaaagcacaaagtgccatacttctgagcttgggagatgaggttcttagacaagtttcagataaagggacaacaatatggttttgggagaaacttactttaatttatttcaagaagtctttggtcaacaaactctatttaaagaagaagatgtataccttgaagatggatgatacaaagaatcttagaaaccatcttaatgaattcaacagaatcatccttgatcttagaaacataggtgttaagattgaggatgacgatcaagggattctgttgttaagctctttgccaatatgttatgaacatttgtggataccatactatatgagaatgaaaccttgacaatgtcaaaggttaaagctgctttgaattcaaaagaaattagaggaaagattggacaacaatggtgtaggaatgtttgcgagaagcaaatcagaatcaagagataccaagaatggaaatcacaagtcaaacaacaaaggtaaccattcggtctctgctttttcggccacttgattgggatcttgtacctcaacaccttaaatgcgactgtcatctctttgattctgaaagtgacaaatccttcttcagctaaggactatagacccattgcttgttgcaacactgtctataaatgcatctcgaagatgatctgttccagattttctgaagttctgccatccatagtcaacaacaatcaaggtgcgtttatcaaaaacagacttctagatcataacataatgattttttaacgatctcttgaagggttagtactagaaagaatatctct

SEQ ID NO: 390780 - DNA, 616 bp, Cannabis indica
tatagtgttatttattatttaatacaatatgatctttatatgacctaacaaacaaatctttaaaaataatattaactcgcatgtttatttggggaagaaaaatgtggacaaaaaagaaagtatatctctcaatgcttaatattattaatttgttgaattaatttttttatatataaaaacaaaattaatgagaaattgatatgttatatcagtcaactttcaaatatagttttaataaattcttcgtgattataaaattattgcagatatcaaagttttttattattttttttttaaatgagaacaaattagttatgaaaaaggtaaattttcgaatagtcaaagagttaaaaatatatatttagtattctcaacattccataaattacaatttcaactcgaagcataaagatataaggttgcatattgggtgagttttttgggtctaagtttcaagttttaggttttgcaaaattgtgtatcgaaccactcattttggggaccgagtttttcaggtgagtcaagtgtgcgcgggtaaggcaccaactttgcatttggactgggctactaaattaagctttatgttttattaaataatatctttttttttttaaaa

SEQ ID NO: 390781 - DNA, 578 bp, Cannabis indica
aaaaataagttttttttttaaaaagaaaaaaaataataaatctcaaaaactataggtgcatctagtaacatttttttaaatagtattttatttttttagttagaaaatgaaaatattagaaaaaaaaagtgttctacaaaaatgttcactttttaattattaaatgaaaatctaattttgaaggaaaaaaatcattttcaaaatttatttaaacaactttttttcttaattataatttattcgtactttttttcactaatattttggacctcgaccctaaccctaactcggaccctcaacttggatttggatctggacccaaaccctaaaccttggtctcagctcagccctcagatttggacccagacccgaaccagcctcaaacccgaaaaaaaaaaaattaggagaaaaattactagttattaatgtgtaatgccattaggcacaaagaacataaactaaggtagaatttaattagaaggaatgaaattataggataggaatagaaatggaaataggaataggaatagaatggaatcaaatttaaaacgcataaaaaattgataacaaaattatta

SEQ ID NO: 390782 - DNA, 511 bp, Cannabis indica
gccccccccccccccccccccacaccatgggcacgcatgcgaccctcacacgcacacaatacacacaacacacacatgcatgcacatgactcgcatgcatgtctcgcacggacatcaccacggctcacacgaattgcataaaggctccactactctcacaaatactccatagctcagcccaatactcactgaattgcacaataactcataggctcgcacaatggcacatggattggcacaccccattgccacctttcaaaagtcttagtactctcgatatataacgaaattagacgattcaaaatgcgttggtaagatgaaaaaagatctatggattttagtgtttatgaaaagatttaattctaaatacatcattataaaaatcctcagacaattgtcacttaataagttgatcttattaactttactcgtgcccgccgacctccatcgaaaatacctcaaaccatcacatatgcatgatagaccttttaaaatcttcatagagtgatgt

SEQ ID NO: 390783 - DNA, 992 bp, Cannabis indica
tcttttgttgtgtgtgtacaaataggtcttgcacgtaataaaagtgagaaatatcagcaaagttgcatgccattccctatggttgtatcttgtttatcatctttttaagtttagagtggaaaaatctgctttgatttttttatttttaaaggtttctatgatcttgcttttgttttgataatttgtttattctatttgtcaaagggtcgagttaatttgaaaaatccagttcacaagttctggctgatggaaactgatgattatgggtgtaataatggacttccacccatagatcaaagaagaatcttttttggccgagagataggtggcgctgacagaaaacttctacctacttatcagttaaaaagccgcaattatcttggcccaactgccatggatgcagaaatggccttcttaatggccaatcaagctctagtaatgccagggaagcttgtctatgacccctttgttggtactgggagtattcttgttgctgctgctcattttggggcaatgacaatggtcagcattttttaatgtttttagctgtctctttatctttcatagttattgtcttttgaggttagtcatggtcatggagatgatttgctttcagtttgaactgatgtaaaattttcagggtgcagacatagacataagggtggtacgtgatggacgtggtcctgactgtaatgtctggagtaatttcaagcaggtgaatccgcttaatgatatttatctgctacatgttaaaatggtgtaggaattatctccaggattaaatgttgtttgattcatttcgtcatgcttgagggagaaacctaaaggtgactttttttcttctcattttgcagtatggattaccaatgccaattgctttgttaagagcagataacaatctcccaccttggcgctctggattaaaagaggtgtccccctctttcgttgcatttacatattggagtattgcaaattttttcttttcttttttt

SEQ ID NO: 390784 - DNA, 727 bp, Cannabis indica
aacccccaacacaacataacaacctccctacacttgcccttactgtacctttgtaaaatttgatcaaaccaactgtaaaatttagcagcaacaattgacctaaccccagccaaaagcctctgccaacattgagcagcgattgaataggaaataagtgcatagaaaatagtttcttcacttttttgacaaatcggacacatgatttgaactgggaccatcttactacttaattgagtcaaggtgggcaaacaatttgaaggagctcgccatactaaattgagagctttcagtggtacctccaaattctagaacttgtgccagaacccagaagaatcaacgcctgcaatccaattttctctctgaacttgtataaacttgtatacactatacatcaagtagaaactatgatgctccttagaccaaaaaaaaaaacgatcatcagctatattcaaactcaataaaattgaaaatatattattaatggggctcgttaaaaaaatctttaataatatctaaatcctatagatattattagtcaactaaagaacattgatatagcatatatatatcataatggagtacactaaatattgagcattaagtaatgattggtatgcgagtggaggatatacaataagtccattcaaaaaccaaactaactatataaagagaaatgttaaaaggcattagtggtgtctagcaccttcccactgtgtcaatatcgcta

SEQ ID NO: 390785 - DNA, 1436 bp, Cannabis indica
gtcatgtccaagaaaaccacaattaaagcatagctttggtaacttgaaatatctgaattgtatccactcttttactcccctactcgtttaaatgtccaggaaaaaaaccagaaattaattggtgggaggtgtctatctccactttggaactttaaggaatccccttcttgtgatggtgcgttgatttgcacgatcgctcccaacaaaacgtcctgctttggatgcgattgtacgagtgttaacggcattgagatagggcgtgggtaatcctgcagccattacccaaaagactgatatccccatattcaagttataccagttcccatcttcaggccattctcgaatgataaggagcttcccattgatggtccatggtcggtttcgaagaatggtcgtacaatcctcagatttatcaaagaaaatgccccacacacctggtttcatagttttaaatttccaattcccttttagtttccaaatctggtttaggatgtctttcaggcgagttctggacactccgttacctcccaaaaagcttactaatacaccagtactaaccacttcagctgtgagttcgaagtcaggttctagttcgagggtcatggactccaagaagttgttgcggaggacttcaatatctgtttctgccctgtttgcattgatggtactaggagataccaccacatcttctgtatcgacagtaataggctcaaccatagtaatatcaggtggttgaggtggttggaaagaatctgcagccgccattacttcaggggccccattatttggagcggtttcctgaataatggcctcacgtggggtgccattattgaccccagaactactaccaatgtcccccatgacaccagtaggaaagacaagacaagaaaagaaaagactttggcaatggaacagtaacagtatagcacagtaacagtatagtgctgaatatcactattttgtaacaaagagctctaagagtacttaaagttgtgagaaaggaaaaacaggggagagttgtgtgtcgatggagtggaaagaaaaggaggaattcactttcgaagaagagagctgggggatagagttggtgatcagtgaagggttcactggaaggacacaaggtcaagttggactcccaacactctcactagagagaaaaactttttaaaaattattttttatattatataaaatttgataattaattgtagagttattggatactaataatacctatcattttttatacgtgatgttttataattaattaataatattcttttaaagactattttcataaagttatgtaagactcaggcctggccctgggcataggcggtctaggcctggccttgggcataggcggtctaggcctgtgcctagggcccacccagcccagggtccaattttttttctcttttaaaattatatatttt

SEQ ID NO: 390786 - DNA, 1187 bp, Cannabis indica
attaatatgactctatttcggtctaactggtcctgttgaattcgaagacaagagtttgatcattataagtaccctgtttattcaattttacatgcatttatatatcatttatggcttagtagattgaatatgtatgtataaaatcaggtaaaaggtctaaaatgatgaaaaaggaaatagacaaccttttcaatgattctcacaacaaataactttttgaatcgaatataatcgcgtataactcacgagagagaaagacaaacacacacataatagtagacaatgataagtaaagacgaaccatgaaaaggtaagcgagaagaatccaaccaacattgtgttgagtgaaaatgaactgaagaacaaacccaattacagagagctgaacaaaggctctgacaatggaataaaccatctcactctccattccgagtttctgtaagaaggacaacgctacagccaagagaaccagcacggtggcagccagtggcttcaccatgccctttaaaaactcccccatgaacgaccagtccatgtcaacgacggcgaacagggccgcggacgaggaaaacgacgagtggttctgtgtcgtttgagtgaacgccattataattagttagtttagtgaagaaagaatgagaagaggataggattatatatacctaaaggaaaggattatactgttttcagaatcagaaagtgcctacccctcagaccgaaccatctcgtggagttaacttctttggggactattctgcagatagctactgattgggggatgctttagcaaataatatagtacataaaattgatgagctcattgaaatgattgcgcagtaacttattggaaaatcaacgtgtcgtacgacgtacgaaattgttacggtgaggcaaaattgatttgacctgcacgcgcgccaagtgtggggaggagtgacttgataataatctacgtgggacaactcatttttgaacattattatgagccgtccgtgctgccttgtatcacgattaactgttgtttaataattggtttgtgatttttataatatttattaaaataaaacaaacagaattggatatgagttgcactaataataataataatagggaaatttgaatttttcatacctacataactttataatttttttcttaaatgcatacttattaaaatttgtaatgta

SEQ ID NO: 390787 - DNA, 1345 bp, Cannabis indica
ttattagatttctgatggttttttagtgcccttttttgatctaacttgcctttatttataatcacatagtaggcagttaattacaaggttgactgattaatggatacaaaaaagagatattcctcaacttctccaaatttttattggtaaatttgtaccaaattcatatttacatgtatagggatggcaatttgggttattttcgcaggttggaacggcggttcgactcgcatgatttgggtttttatcgggctcctaccccagtctggctcggcccgacctaacacattttattttggattaggcctagtctgacccgatttcaaattttttttaaaacaaaaataagtcaactagggttaaacgatggttaggtcagtccagaacaaattaactatcaaaatctaatttccaaaattgctctgatatttaacacacatagcaatttctcccaacctaaattgttatctatctatatatatatatatatgtatctatatatgaagaagatacattgagatcgtcatcaacgtaaattacagatccatctttataagggagcaaagatgttccgttcctagcatgaaacctaatcggaaccccatgactagtttgggtactaaaagcgaagagagatttgaacccatatttattgagaatattcctaacctctaatttatcctgtacccaaccaccagctcaacttgaagacattaatcagactttttctcgtcctgtatagatggacctcaacctctaaaactttagtcatcaccgatttgggacgtagtttattattccgattgggattcgaatcagagattggtgggactggccaatcacaaactaatctttttttgtcttaaaaaaaattcgagttaaatttgacctgcttaacccaggtcgggcctgacttgcctcgattcaagacagctatcggctcaggccagttcgggccaaattgttaacggaccgggttggggctgacctgtcccatttttccattcctatgcatgtagaaatttgagtttctatacttagaaggaaacttaacaacaaaattaacttagaattggatgaaaaaaatttctctccatccctctatctcactttatctctcattttctctcaattccaagcttcccactgactcgagaattaagaacattaccatgaactttctagccatatcatctcacgtagtaatagaatcgggctagagagactgtaaccaacttcttactctatcccttacagagaaatgaaagagacgtagtcttatggtgtaacctcctcgcttcaagcctccattgtgcccttacacccacggaatgaatggctctta

SEQ ID NO: 390788 - DNA, 1212 bp, Cannabis indica
gggttaaaattgaaaggtttttatagtaaagctttacgttagaaaactcacttaagtttaacaagtgtataaagagtggtgagacactaaaactctacttatatggattagaggtggtgcctcctcttatgagaattgagagtattctctagagagtccatgaattggaattttgcacatggccatcaatggtgcaagagcgagacatgcaatctcaagtgaacattagtaagggtgtgtgtgttatcaccggtttgtactaaaacaatagtggttcaatgttacggcaactaaaatttcatcagactttgtgttaattatactaaggtaaaattcaagtcgaaaaatattttacttaatgcacctaagtaagacttctatttagtatatatttattcaatcaaagtgggagaatattatattttaatacaatatttattttattgattaaataaatattacaatagtgtgtcacaaattttaatttagtgggaattgttatattatttaataatttaatgtagattaaattatgataaatatatgttattatgagaataagatatattatagtatttggtgaataaattgtataacctatagtttaatataaactaattattataacataaataagaattcaaaatagtaactattttgtaacttttggatcataaacataaatgtgtaatttactcaaaatagtaactattttgtaacttatagatcacaaatataaatgtgtaatttaagtaagtaaattgtatatatgttatagaaatcaaatgctattttatagttgttggaagaggataaatactcatacatatcaaattatgatgtatcaaaatattaaaaattaatgtagcttagagaggttacaaaattcaaaattaagttttctagaaacggttgttttaattacctagagccaattttggaataacattcatgagcgtgcatgaatttattaagcatgtttttcagctctcttttctaatatttttatcctattgaacacttattaaagtgctaataacaaccttgagggtggagaatttgattttctaaagtgatcatcaaacactataaatatagaggtttaaagtgttcattttgtgataatcagttttctatcaacaagaacttgctagaaaatacaatacttgataatttctaaagttatttcctagagagttcccttagtgctta

SEQ ID NO: 390789 - DNA, 1000 bp, Cannabis indica
taagttacattaaaaaaatgtaacctcaaagtatcttaaataataaaataatataatatatcttataattaaatatataaaaaaattaatattagtcgtcttttttttgagacagaaaattagaagtttctcacacattaaaatcattattttattatttatatatgtgtataattctaaaataaattttttaatggaaaagtaaccacttgatatcttattcacatcaaaagcaactaaatggttgctttttcaaaactcccaaaaaataaaaaaattcggaaaatgagatttttccaattttttctattttcgataattattttaaatttcggcatgcatgctgacgtggcacaatgatatttgtgcaaaaaaaattttgaaagatacttttgcaaataaaatcaattttacgtaaaatattgaaaaacctcttaataagagtgatttaatctttaattactattacttaattattaaaaaaatagaggagtaagggtaacttattttattgttacacaatattttcaatttgtcattaattatttactattttaaagagaattatctcttttattagtaaataaatgattaaaaacaattaaataactctggaattctagtaaaaattattctcacctcttttttatttgtcaaattatattggttgttcatgaaaaaaaaattaatttgtccaattttactattgaattaaataaataataatgaatgtgaaaaacaatatatatatatataatttcattactagtattaatattttatagattgttataagaaaaaattacggcataagtcctcaaaaatattaatttgatacaaatatattctcaacctcgaaaaattaaagtaatagtcccaaagctcactattttcataagttcattagtcttattttctaacagctctattactaattaaaaattccacgtgacgacaaattatttgtcaaaattatattttaatttaaaaattaaaaaat

SEQ ID NO: 390790 - DNA, 1672 bp, Cannabis indica
acagaaattcatagttggtgtatccttgtctcgcctaagactatacagtcagcgagttacaaatatattctattgattctatatttaatgagttagtctattttacatttaatgatataatagttattatacctgttggttcacattccacaagatcgacatgtctcactctctgaagtacagccgaattttgggtataacaattgctccttaaaaagtattttttaaatgattacaaagggtattttggtcttaacccaatttgaataaatgcatgcttttgaatttggtaatttatggtttcgaagcacatcaatagcattaatgagccttcttttctaattctctctcattcctatccgttggatccctgtcctttaatcttacggtgatcaaatccaaagtataaaactggaaaaggaaccgcctttccttcattttttccatttaaaaaattctcgtacatttttctgctaaaaaacctccattgaagtctcaaaaccttacatgcccaccttgtcgttgacatatttcctccacgtctattcagatttattgtccaacttcacgattccacagaggtcatcacgccgtttattttgtcctcagttttagagttcttctttgtgtgacaactcgagtttgaacagtaagtgatccatcctctttcttctgatctttttcattttcatgggttataattattattctgttatttgcactttgtcattctatttggttttagcgattttgatttgaattttttgggtaacttttagggtttaggcagagtaaaaatttaggtttattgtgtttatatgtttctgatttgataaatttcatccaggaattgggattgctcttttggtaaaaatgtcccaatctagttctaaagtttatcctccagagtccttagaaatagaatgtcctaaagaattcgccctcctgtacaaacctaaaaattcaaaacctcagtccaaactggagataaatgatgcaaaaattagagaccatttaaaaaccaacctatgaaaatacacattgatgtcctgaaatcaaacttgtatttgttgtatggtctaagtaagggaaaagaagcacaaccaaaggtttctaaaaaattataatcaagtttggagtgaaagatattttcataaggagatatgtactgatttttttggatataagaagtctgtttatgagatatgtagatgaaataaaggcaatccgccagaaagataggggcaattgtgcttgtgctaaaagtgtaagtcccatatcagtgatgtgtctatgttttctcttgaccctaccctattgttgatgtctgtgaggaaatggatgtctaaagataatgccaagatcatataaaattgattttaatggtctgtaatctcccccacaatcagcctgaatagattttattttagtgttgaactgcttttctgcatagttattaaagtgtttaaaaacagtggaggtttcagattttatagtaaggggaaaaatccatgaaaactttgtaaaatcatcaatgaaacatatgtagtatttaaaccttcaagtgaaggatgaggggaggggccccaaagatcagtgtgcactatttcaaatggagcattggtgctgttttgtgaagaaagaaatgaaaattatgttggaaattatttta

SEQ ID NO: 390791 - DNA, 883 bp, Cannabis indica
tatttaatcaaattttcctattataattactataatgtatgtatgtatcacacgtattataaataacatggcatgttaattataactattattttaggtttaaatttttattagctggatgtttttaattgactcttaatttataagagtaatttgcggcataaatacttaagtttatcttgtagttgcacataaatacctaagtaaaaattttggcggtaaaaataccttctgttaagattttagaacttccgtaggtacctcgacgttaagtgacaaatcattgcacacgtggcaatatcttattggtccatatcattaattttttttattatttttaaaaatttcatataaaactattaaaaaagaaattaaagattaaaaaaaatactaagaatttaaaattaataaaagcaaaattttttaaactgataaaaaaacattaattaaaaaaataaaagattaaaaactaaatcaaaatttgaaaagtaaatgaaactaaacctaaacgaataaaccctatcgctaacccagattcaccaacccacccacccctctttttctttcttcttctacagcccaaatcaatccagaacaaataaattaaaccatttcatccttttcgttctgtgatgttgagcatgatgagactttctgagttgtgtgagatgggcttctgtttcttcttcagcattggtagggagatctggtgttggtatgactaacatcggcggcgacactaacaatggcagcggagggagagtggctgactgagatcaccgacggtaccgagaaaaatgacgtaccgattcggaggagaaatcgcggcggaagacttcgatttggcctcattttctggctgtgtagagagagagagagagag

SEQ ID NO: 390792 - DNA, 1234 bp, Cannabis indica
cggccaggttcctaggtaaaaaatatgtgctggccaaggtgataaacaaaccctgtgtgccagccaggggactcctaaggatcaaattcctatttttcaaaaactcaaatacaattctgcgtgttcttattgactcaaagagtcaagagtctaaacaaaggtcaaattctaatcccttttatcaagaagtcatacattatgcgtcataaagctatcatgttgattataatgtaaaaaagactacaatacaacccgagaatcaaagatttgaaaaaagcttgaaaattctcaaagtcattaatggcagatttaagaaaacaatgagaacgtgagatttgaagacttacccactgatgaagtttgctatagatggtcgggggatgcttggatcattgaaaaaaattgaaaacttcaagaaatgggagagcttgaaccttcaggcttggatgaggaagttggaggtttttttcttctttttcttgaagggaattcgaaggagtacgagagggaggatgaagtgcagagaaatgaaaagttaatcaaaatgagccttacatagattctgatacacttttccccccaaaacttaatgggtggttatttctccacaagaatagccatatagaagactaacagtttgtaagtgagaaaatgtgcagccaaaacaaaaatctccaaataattccaataaagtcattttttgtcataaagtgggtcatctgaaaggtgaaatatttggccaaccattgctacccggttaagatttttacagccaaagtcagagttgaaaagtccctatctgtacagacatccgcacagggatttggggagaaaattttatcccaagttttgcccacttgatatggcatgtccacataggtaaaactgagaccatgtggaatacaacatgtcaatagaattaacaaagtcatcttgcacaacatgtcaatcaacaaggttttcaaatactcaagcaagactaaattacaagaaaatggccaaccaggagggtctgcctagaccatatcctggccagccaatgaagtttatatgtcggtcagggcctaggaaaagagtaggctggccagcacaagcaaagagcatcaaaggggatccgattgaaaggtggggtctgcaccatctttctggacgattcgcagctgggttttagttacgagacaactccaaaacccactaaattagggattcaacctcaaattatctacctatgttt

SEQ ID NO: 390793 - DNA, 627 bp, Cannabis indica
cattagttgggtgtccagactcttgaaactcagatgtttatatataagaagaaaactggcggattaattatatattacattatttaaatgtttttcatagattttaagattatcattattgattaataataataaaaaagacaatagtcttcttacgttaggtaagaatacattcatttagcgtaatcaacactcaataacaaatagttcaaaatgaaaaacatttaaataatgtaatatataattaatccgccagttttcttcttatatataaacatctgagtttcaagagtctggacacccaaatatcgatttccaaattaaaatatataaaaatggatggattaatggtgaggatgatgaataagaagcaaatgaaaatgggtatgtttgttgttgttatggtgggtctgctaaaggtggcagctgctgacacttacaccgtcggaggtgatatgggatggactaatcctctatttggtgaggcagcctactctgcttgggctaaatccaacagatttgacgtcggcgatgtaattggtaagctattaacggattattatattattatgggtaaataaaagggaaatgcacaaaaataacaaaaaaacaataaaaatacagttt

SEQ ID NO: 390794 - DNA, 795 bp, Cannabis indica
atttttcatgaaataatttttcaagtactcacaatcttgaactcctactgtcaaagttacatcaatttacaaccccgaagcccacacttactctttgaagtgtaggtatacatgctgaaaatagaaaatgtttagtgaagtactaacagattggtcggatataagccagcatccaagattgatttgatttttaaaaatttgtgtatgtttggtgaacctgtacttttcaattgcttggtggaagagaacattgcatacagatttaatggaaaacttagctttactgaaacagaaaatgcttctgttcttttcaagtgtactggatgctacgagaattgtaataataacattaatacgagtgttgtgatttacaggatgccaagatgccatgtttgatgaagggaaggattgttgtttagtaattaattaaaattaaatattgaaaataaattcaacttaaaaattataattcaatttaaattagtttgcaacaaaattttagtagcaaaattaatatacctaactatttgttatgatattttgttagtaaaattaattttttttaactatatatttgctactaattcaataactatttacatattttatttaaaaaatataatttatattaatcacatttttttaaggattaaatttgtagttgatatattcaatatagtaataattaatcttatgttttaaggtaactaaatgattacttggtacatataagttattactacttgtaaaaataaattattttaagactaatatattagttgtaaaagatcatta

SEQ ID NO: 390795 - DNA, 577 bp, Cannabis indica
ttcttcttcttctcgttcactcctagcccaaccttcctaaaattcttcaatttccattagcaagaggggccactctaaaaaaaacctatctaagtaaatttttgttatacccatattttaagcaagcaatatggtgatgacatgtatgaagaggctggaaaataaaccagctcatgttataaagcaacaaatatgttcaaaaactcgcctaagaaaatataattggtagaaatattcgaacttatcctttcaaagataaaggcaagccgtgaataataactgtcgtttttgtaagaccagcgagatgaacaataaacgtagaaggtccatctcgtgatacacatactatactacagaacaacaatcagttggaaagggtagataataaattatttaagagcttgtagcttattaacccacatactcgtgagtatgttggaagactaaggggtctacatacaataaaatttatcttggaattatcacattatgatagtacatcgtgtttttgttaaaaatattttaccaggatctagatttactaacaagtatgttgaattaacatcctaaatatgaa

SEQ ID NO: 390796 - DNA, 2156 bp, Cannabis indica
ttacattactatttaatttaaaaaaaaaaattacattactatttactttttttttctttcaaaaacaaaacattatattatttattctttcttattatttttagtcttatgttttgtttcttgtactttcgtttttgtggcaaaataaaatataatttactaagttaatttttagatttttataaaataatgagttactaatcacttttaactgtcattttatttacactttataactttttaaatttaaaatttggtggtaaaatctactaaactacttaagtgtttattaatttaagatgtcatttattttttacattatcaattttttttacgactaaactatctccactataactttattttcactgaaaaattaattgtaagtaaaacgatagttgggcttaactaacaaaaacgcttaaatatataaaccgagttaatatttatcaattttttaaatagcattattattaggtactttaaagtgtccaatactatactaatgtagcgtgttgtaagtggttagtaattttttatattatttattaaatcaatatgcgtgttgtaatgataacaatatgttacctcttgtagtcctttgaagtacccttagttttttttttaaaactacaatcatagatttaataataattaaatattgtttatacaatatttgtaaaactatatatatatttttaatttctttagtatagactacattattgtattaaacgagcccttttattagtgatcgtcgtgttatggatgagatgagtgtgggtatgtatcaaacatgtttgattctaatcaaaaaaggaaagtaataatgatttgaaacttgattaaggaataaatcaaatcgatcttgaactaaaacaatatccatttcttgttgtgtcaccaagttacgtagttagatctgtgtgttttgttcttcaacttgtaaatgatgagtttcatcttgaacttatcgcccaatttaaattaaaatttaatttcattagtatttttaattcaacaaaaatattttccatctttctctctttattttttttttcagctaaattaaaaccatgacatttgtattaattattacaaatttaaacaatatgtaatataaagtctcaaataaaatagtttctttctacaaaaagagatttggtttgtcttaaataattgagcatttgatttgtcttaacaacatgtttaaccagaaaaatgtaggaattaagtactaactaataacaatcaaatactttacatattaaagatgtaaaccagatcagatctaatctaagagctggtgaacttagtaacagccttggtaccctcagacacggcgtgcttagcaagctcaccgggaagaacaagccgaacggcggtctgaatctcccgagaggtgatggttggcttcttgttgtagcgagcgagcttggaggcttcttgagcgagtttctcgaagatatcgttgatgaaactgttcatgattcccatagctttgctggagattccgatatctggatgaacttgtttcagaactttgaagatgtagatcttgtaagtctccacactcttcttcgttctctttttcttcttatcggttccggaagcgtcctttggcaacttcttctcggcacgtggcttcttctctgccggagccttctcggccttctccaccggtttcttctcagctggcttcttctctgcctttggcgccattgttatgagctctgaagattactgggctttctaaagagagaaattggaaagaatgggttgagtgagttgagatattgggtttgtttgataatttatatggaaaggaaatagattttcattgggtcaaagagtgagacgcggattgatgacgtggatgagttgatccgtggaaaggagtgaatggacggtggatgtttattggatcatgacaaggattgtttggattttgaaaatttaagagatttgattttggcgggtaggagtttcatgtttttggggaaatatttggattaggcaggtatcactattcatatcaaaattaattgggaaatttgaaattatatgcatattaggcattaaaattggtatcctaatctaaaactatacataatttgtaaaatgggataacttttacttaaacccaattttacccc

SEQ ID NO: 390797 - DNA, 1832 bp, Cannabis indica
aaacaatccactaagggtgcaagataagccaattcctatagacccgtgtcaaccagagagtggagctggctagacaaagggcgaccagagttgatcctgacgtgcaggcacaattggatcaactcaagagccttgtacaaggcatgtccagcccaaagctttctgacctggaattgtataggactcaagggtcacattactctggacgcattaatgcgttgcctttaccaaccaagttcaagatgccaatttagaaaatgtatactgggaaagaagatcattttgtccatatcaaatactttgagatctagatggatctgcaagtggtgatagacgaaattcgttggaggatttttccagcaaccttgtctgacatcgcacatcaatggtattttaagctatccccaggaagaattaattcctggaatgctttcaccgttgagttttacacacagttctcgtcttctagaaaaataccttcctaaatggagaagttggttgacataaagaaaaggtcagaagaaccattgaaagtctatatccaaagtttcatgatcgaggccataaaggttaaaggcttgacggaagaagggcaacatacaaccattctagggggtatccagcctctgattgacctttagagggacatcaaaaaaagattaaccaacattatgagagagtttttagacagaccagacagtttcataaaacttggagaaactgtccgacaagtgcaaattggcaggcaaaaaatagctaattcctgcaacacacctaccttagttagggccaatattaccacctagccccaaaccaacaacaatcatggagggaaacagaacaataatggttctggccaaggaaatggcaagaaggggaaattcaataatcccctgcacatgacagcaggggtgttcaacaaaatttacaaaccgcccaacccgaataaattgcctaaactaaaccgaataaatcgacaaaaaatacaacctgaaatagtataataaaaatccaaatcgcccaatgaatatattgggtagttttcaaattattctaaaccgccctgttatctctaacaaaatccaagataattgtgcatgctatttcttctagatatggaagtccaacaaatggaacactttggccaaaagggagcactttggtcacagaggagcactttggccaaaaagggagcactttggtcaaagaggatcactttggccaaaatggagcactttgggcgtactaagctcccggctctgtcagttgctaaggcgcaaagagctcattagctgttgaattacctcaaggacttgatgggcacgaaccgactcaattggctccccttgtgtgcccatgaccatctgggtcctctaaatatgagagacacgtgctcttgaggctatctcgaaaacatagtcaaaaaatgataagtgaagagatatttatttttttaaatgattattttattattattattttgtatcttgaatctaacccaactatagttacgggaaggtacacccatgaataagggattttaaatcctagatgaaaatctatataagggagtgaaatcacttgtaaagggaccctgaacttgatactcacgaaatcatactcttgagctcccactctcaaattctaaaaactcacttgaggagtgaactcttggagaacacaactctggagaactctcctcaagcattgagatcaataacactccaagtggactagcctattatcgttgaaagggggtgaaccactataaaattcttgtgttcgtcttgggtgaatttacttttggaaaccggtttactttgattaactat

SEQ ID NO: 390798 - DNA, 1152 bp, Cannabis indica
ttactgtaaagtccaaaattagattcatatattttagacatttcataaaatggaacaatatgtctcacacctataatttttatcgaaactccataattttaattcgaaataatttatctaataaaaaaacattcacttcttgattggataaggctacttccaactctagtgtaataataatgtaattcaaaaaaaaaaattggtgcttattgaatatactactacattttatactaacagaaaatgaacaataagacaggaagaaatgaatgaattctcattgactcaaatgaagagcaatacagtgtttatataaacgagaaaatcagagaaaaaactagaacagagaaggttgttacaaactaatttctaacagattttgacagctcactatctaactctaactaacatacacaacaccttaacaatctttaatactctcccttaaagtggagtgtatatattgcagagattcattttgtctttcaaggcagtaaattgagcgggttgtagggctttagtgcagatgtctgcaatctgttcaagtgtgagccgttttgatgatcccttcttgcactttctctcttacaagatgacaatctatttcaatgtgctttgttctctcgtgaaacactggatttgcagcaatttattgtgcagccttgttgactcgattattatgagaaataataggagattgaatattaatacattatattatatgaatattatataaatattcaatacattatgaatattcaatacattatattatatgaatattcaactaaatattatatgaatattcagggtcgtcttaaacattttggaggccctgttctaatttaaaatttgggcccttacaaaaaaatgtaatttataaataatatttttaaatattatcattcagttatatattttacaaaacaccaaaaaactccaactatttataaaaattgttattgattccaatagaacaaaaaaaaatataagaaaaaaagaatataaaaaatttgaaaaaaataataaatagcagtaatagatttttttacttaaaagcattaatagaattgaaaatgggcttttggcattgggtagaagtgactaatgacaaattgttagctctttcaaaaattaggttcattaaaaaaa

SEQ ID NO: 390799 - DNA, 942 bp, Cannabis indica
tatatatatatataaaagtgaaaataattcgctggttacaatttcagaatgtatatataaagtgaaaattgattagtgaatgactaggaaaagactttgaaattcatacgagaaaaggcaaagaaaaaaaaatagaaaagaatgaaaagaaagatagttacaaataatataaagtaatttactaatttctttgatgacactctacagtaaaacatgggaccgaggaaagtaggtattgatgattgacttcattctaaagctcccccaacatggaattacccaatatataaccaataaccttaaaccacataaacctcagcatatacctatatataagcacatgacaacacacactcgttcactacacaaaacaaacatacttattaaattccccaaaaagcaaataataactcaaacaccctttttccaaattctagttctttattactttccaattttgatagtggtcaagaaattatgggtgttccttctcctcttcaatcttcaccacatatggtggttttttcatttgttataataataagctctatttgggcctttccgatggctgcagccatcactaggcattacaattttaatgtatgatatatttgattttagttttttttttcattttttacatgcacacatataaaaatgtatagctatagtaattaaggtaattatatatagcatatatatttatatacattgcattgtgtatatgcagataacactgaaaaatgtgacacggttgtgccacacgaagagcatcatcacagtgaatggtgaattcccaggccctcccatcattgctagagagggagataggcttttgattaaggtggtcaaccaagttccaaacaacgtctccattcattggtatgtactatgtaataattaataattaatattaaataaatcatattgcaccaaaatatt

SEQ ID NO: 390800 - DNA, 1093 bp, Cannabis indica
gtgtttatatattacaataatgtaaaccctaaacatcaggacctccaacacatccacgaactcaagtggtttaattaaggatcctttaattaaatgaattctcatcccaataaattgtacctaaaggtctagctctttatttaatattaaatgaagactcgtttttttttgtttgaaaaggaaatgaagactagtttaatatattattttaaagaaaaacacgaacaaggaaaaagcaaaatataaaatactcaaataaaataataaaagtaagtaaataaattatttctttttgtaaagaaatgaattatttctagatagttattttaatgaaaatacttttcaagccaaaaattagattttgatttcacttcgcaattataaatttgatagttaatatataaatttatttttactgcatgttcttaaattataaaaaatttgataaattggttctcaaattttattttttttataaattagttgcaaatttatataagttttagcaagttgttctacaaacttaattttttgacaagttggtccgtaaacttttattttcttggtgttgaccttacttttagcgaacgacaatgagtctaatttgtaaacaacaagtagtataatacgagtgtaatataatatagtaaataaagagacaagaattttatagaggttcagcccgagcagttcgtaatagcctaatcctcgtagtttgtattgacttaagaataaagagaatgggtcttttacttagagcatctttgaatataaattcttagacaagtttttcgatcctttgcccagtaagtatgaatcactatttgtagtgctataagcttgggagggaagtatttcttttctagttacaattgatataagtggaaagattacatagtaaatacagaatacactaatcatgggattcggacagcttggcatatatgcttaatttcggggttccatacatgtgttcttgactttgctgtaggggataagtagaaaatctaggtttaaaactttgcgattttctttgtaatgatctgtgaagcttcatgattgatgacgtctagccttttatcgcacattgtct

SEQ ID NO: 390801 - DNA, 1075 bp, Cannabis indica
ccgtacagtagttatgccctataatatagatacacatgtaagttacgcattgatcattgttaacacatatatatttttgatttgatatgggtataaggggtaagggacgatgagaaagggtagtggtttatttaagataaaagcttatcacatgcaatgagatgaaaatgaaaataatatgtagcaggcggggttgttcaactaagagctacattattaggatgactgatgaggtgtccaatatatatatcttgtttgatgagattttgtttagcattataaatgggttgcccccacataaattttataatatatggatccaattaatcacttatctctctatattagataactcacccactactacctctcccctccacgtacctccaaacatataatgccacctccttaccaaaaaaagaaagaaaaacataatacaccaaccctttttgtataatgtatcttcactacattttagtagtaataggtagagttttgataaaatagttaatttaattcaatccatatcattcaattcaattttaatttataaagtacagaattgtatttattcagattagattagagtagattgaaaaattcaaaatttatacttgtgcggattgaatatgttgattaacatataaaaataactaatttaatctaatctacatatatatttatataaaattttaaaaaattatataaacaaaattagttattcaaaaatttaatacatagaatataaatatatttcaaaactcactacaaaaaattttactcttagtcacaacaaaacttgtgactaaaagtaaaaaaattgtgactaataattataaattattattcctatgttgtaactaaaaggcccgtggcaaaaactattagtcacaaaaattacaatttgttgtacatttagtcacaatacttattgtgactaaaactaaattagtgacaacgtgtatgtaaaaactatgttttggtcacaagtaccattttgttgtgactaaaagtcacatttagccacaaaaaaattatgttgtgactaaaagattgtcactaaaagtaacagttt

SEQ ID NO: 390802 - DNA, 1328 bp, Cannabis indica
ggtgatccccttgaccgatctagctaaagatctgaaggttttgaaccaactaggcccttgatcatgtcccttagttggtccaattgtgcttgtatcaaaggatttgttgctgtagggatttcactaactagccctccttggagggattgcaggctcaaggtctggccggccatactctgagagagtgtatggtggaggtttgccataacagtgttgtgttgtaggccttggccggtcactcttaagtagggatgttggctctggctggccaagcctacactaggcagttgcgcatggctggccagacctacattaggcagggcctggtcgcctataactccctagttggctaatgttgttggtgtgttgataggaggtagatcacaccaattgttggagtttagtggatttagatacctaaagtgatcagtttcacttcttaaattgttactttgggtgtttccacccattttagttctagctggttgaagattggcctttgagtggctctctcccctcagggagagagtgtacttctttggctggccagaggtattccaacaggtgggcgaccgaccaaaggttagttgatggggctgttgttgatcttgagatccttggatggcccccatgctgttgttacagagatctggctattcttgccagtagacctttgtgggaaggcatgtcctccttcgaatagaggaaggtctgtcttggttcctaaagaactggatttgtcagcttgctaatagtgttggctttgtgccctaaataaattttatttcaatataatcttttctttcaattatcaataaagaaacagatttaaatttcattacttgtttaatgtgttatttgcttcatgtgatcatcaatgtacttatttgattaaaaaattcatccaaacccttatcacactggtattcttatttattgtgttgtcaacacagtggaaagtaatcaaaattgtgtgattaaatgtattcctagatttatcagtacacagggttgaacaaatatgataatctccaacgtagtttactcaattacttgcaccttggataagtgctatgtcctttccagtgcattggttaaagtaagctgggttggatgtatggagtatgcatcggaagggaccgacattgaacttgaactagatatgataatcttaccgtaatatctattcaaatcaatatcacctagttgatcttagatcaaatgatctcaatcctgagagggttaggttcgatctcaggagtgttatttgtgttctttgatttgttagttaagcctacttttttgcctgagtgatacgtacattttgg

SEQ ID NO: 390803 - DNA, 1648 bp, Cannabis indica
attgtttaagttaaattaagttgaaattgttggttgtgatgatgcttgagtaaagtttgagttgaagaattcagaccttgctctctaatggtgaattaggattctgtgtaaattgttaggttctgttacttgaaatgagtttattatggtagatataggtattttggagattattggagagtttggggttaaattgtgttgttgggaacatttttagtggttcctacactgagaagatcgactagttcaggggaacctgtagtaccggtcgaccggttggtccccaggaaatcccatcgaaacagaatttcagttggggaactgatctaccagttaggacaattttagaaccccagtttttcttgtttttgtgttatttaggttattgccatgtcattcatcgatagggttattcctagtttaattttaaagtcctgggatgtgttttagcgtgtctctcatcgaaatttcgaatattgtggtttacggccctataaagcatcgagctgcagttccactcaggctaaccggtacacctgagcacagaaacgaggtaagatagcataaagtatacatatgtgaatgtgtgcatgttattaattatttacactactaacactaacgaaaatatagttttaagggtgttagtacagtgtagggttttagggtagttatagtgttaccaacacgagtacaagggggtacggtcgtgcatgtggtacaactgcatgtggtacaacactcaataactcctggtagtacaataatggtcctaccaacacaagtacagaggttgtacgctagtgcatatggtacagtggtcgcacttccattgagaacgttcttaaccatttgtggagcttaacaattgagctcaggacggcttaggcataaagccagtataagcattgcttgtatataattatgcatatcttactgagtctatcgactcaccaatttgctaccttgtgtaggtaaaggtaaagctaagctggaggagtagtgatatgagcttgataagaattgtacatatcgcagcagtgcaacctggagggtttcgatcttattgcattttgaatttcattttgtggttgccctgtagtttataaaaaaaaaatatcatgtaactttaaatacagtacatgtattttcaacaagtcattttaaactcgggatcccgattaatgaaattatatagatataataaaagaagtttaaatctaaattagtcaatttttaaatacgagcattacaataaggttttttcagtcttaacataatagtatcgattcgtgaactaaggcatgttcacgccctaaccacgtaaaaattctaatttatttctttgttattcatctatttctttaactttaacatattttatatcgatttctaaaaattttaattaacaatatgcataataaatacaagtaatattacaattttaaaagaaaatacttatgtcgttaaataaaaattattaatagatattatgatctgttgttaaatttcaagtcttcaaaaaattatgacatgcatgagagccactgcaaggctttctcagctgcctactcaagttcaagtgtcgtagcaaccacctgttataggaaatttgaaattgaatgtagatgttgttgggttttatgcc

SEQ ID NO: 390804 - DNA, 1182 bp, Cannabis indica
tttttttttttttgaaaaatcaattttttgaaaatctagtctggaaaaaaattggattttttttctctttgccggatagtgtacagtatggtttcgatagtctcatgttaataactagaatttgaggttaaagatgagtatagagttattggtacgattaaaataataatatgtaagtgcacacagttacaatttgtaataatcttggaagaccaagtatcgtgccacaatgactaattatcaattaccaaataatatgtagaaaaatatagattattatgatccccaattagtttttcttttagttcttaagcatccaaagattcaattaaaaacataaaaaatgaaaagagatgagaaagaacactaattggagtcctctaatggtgtcctatgctttcagacatcctcctcttctcaattttgactccaaagtcgaatatatcatgaaaacctagcatccaatcatttttaggtcaaaaataagacactagtcaaatttagctaagtattgtgaccttacttcgagagtcgcgactcttaaattttcttacaaaaacgactccttttgaatttctcaagcaccgcgaccttcaggggaaagtcgtgactcttgacttttcttcaaaatccgcttcctgtaacaattggagagtcatggccttcaacgaaaggttgtgacctttgatgctgattcttgaaaatttgactttttaaatcatctaggttgcaccaagccaaaaaattcaatctcgagattccctttcgcaaaagttaatcatttcatcaccaagaaacccgaaaaacaacatattttcaccaaaaggtaaaaatctctttatctaaaacctaaaattaacataaaaataaaaataagctagcgtaaatccgaacaataaagcataaaaaataaacctaaaattagactctaaaataacctaaaattagacctaacaacgatacgatatgattgtttacccgatactttgaaagaaatattcactttttgttgctcaatgtgttactttaataattacaaaagtacaaataaatatatgatttttttatttaaaaaaaggtctttattttattattcattaatgtaaaaagggtgaagagtatttcattccacttattaattattaacattttctacttcacctattttataataaaattcaa

SEQ ID NO: 390805 - DNA, 706 bp, Cannabis indica
aaaaaaaaagaaaacaaacaaacatggaacaccgtaggttaggttggttgcgtggaaccgacttgcactgcaaaacctcataggtcggttaaataaccgacctcccatgttgtacgttatatgtctcccatgttgcacatcaaaagtcggttaggctccaaccgacttcccatgttttacatggtaagtcactgcatggaaggtcggttcccaactgacttatgaatatttagaggtcggtttttaaccgacttctcatgtcatttttgtagtagtatatgtttgatattttataatacattacttatccttcatattttagttactctaaaatattgttttaattaaattattgaggcttacacatcaatttacgcctcaatggtcaatgcgccttgaggcttacgcctcgtctcacagaagaaaaaaaaatgccatgaggcttaaatttgtaattttaaacattggagcaaatgatgaggggatcgcattatatgaccctggctgtctaaacataacccagttcaattattgattgacggtgatgaagtgaattttaaatacagggcctacccaacaaggtaattcgatgagattaattatttttgtaagtattttgatcatgctttttaatggccttataatctatttaaactctagattacaacatatatatatatatatatatatataaaatatactatac

SEQ ID NO: 390806 - DNA, 1262 bp, Cannabis indica
attatatttataagacccaatacgtattaatttgactaatatcgatattagcacctacaaaaaatattaattagcattcatacaattctcatttgtttaatatatcgatatagttatatcactttattgaggtcggcctacacgtgatcgaacacaaagtaaataatcattggatcttatatactggcacagttaaattttgtacgaatttgatgatttggattcagtaatcatgcattgaaaattggtgaaagttccggaaatgcatgggaatctatttgttttctgaaaaagatattaagtggtaatgatataacatattattcatttgtcttttttgtttttttgatcagaagatattattcatttgtcagtacattaactaattacagctttttcttattattggttttcttaatgaggatatatattgttgcatgaaaatatgaaatttataaatcatgatgtgaatgtatgcaactccggtgggatttttttttttaataaaataactaattttattgttgaaagtcaaataatacattgactattcaacaagaaaaaaattactttcaactaataaaattaatcttgttttttatttgtagtgcataaacttactacctactgcagtattactattttacattatatgtaaaaacatacaaccagaatataattaaataaccccactcagagatacaactcaaaaaaaaaaaaaaaaacaaaaaaaaaacgaaaataagtaaaagtaacgtaaaaaaaaaagtaaaaaaaagtaaaagtaaagtaaagaaaaaaaaagaaaaaaaaaaaaaaaaaaaaaataaaaagtaaaaatatgtttgaaaaaaaaaagagattcagtgatgttggaaaaataatagagatatcttctatcaatcttggtaaatttggggaacattatgggattctagaaaaaaaagaaagtaagaagcttgtgggttctatttgtgtgcttatgatattttgagccaaaaattgtcttttgcctatccctgaatatctgagccattatacttaagcctttaaaagacctaatgattccgaagaacactgtcaacattagtggagaaaggtaagcatgcaagcttatgagttatcggattgtggaactgttggaaagagtaaaacttttataacaatgtttcacatttgaataaattgttgcagttgtacatagtgttattaattgagcatccgagttaattgttagagttagtaggatcaaaattctagtt

SEQ ID NO: 390807 - DNA, 1257 bp, Cannabis indica
  modified_base (56)..(56): a, c, t, g, unknown or other
  modified_base (132)..(132): a, c, t, g, unknown or other
cgaaaatcacctttccacttcctgcaggaccaattacaagactgagcataccccangacaccttcaaacagcccacaataaccaaatcaagttgggcagagaaaattgaagattcgaagagattcaagaacngcagcagcaatataggcaaaacaccaaaccccaaccgcaaacaacaaattcaggatgtcagagaggccataccatacacactgatcacagagagaataaaacctgaattattaataactgcaataaaaatttaataagaatttcactctaatcatgcatacactaacaataaactgttctagttcatgtcatcattcatcagggaacaaacaatagtataaacagaacaaggaaaggataaaaggaaactcagtttaaaccatttaatgcctacccaccagatgaaggtaattaaaaagaacagaaaagaaaaaaaaaattgtcccaccaatgcagcaattatcggatacctcaaatcaattccatggaggatggagttttacagaagaagaagaaaaagaggagaagaaactgtgaaggaaaagatgaagaggagacaaaagtgaaacgtgggagagaatagggtttctgaatttagggattcaactgaggttttcaacttttaagttctgatttgaaaactttttgaaaatgcggaatgggaccaacagtttttagttttggaatttatactagggaaatatatatataaaggtttgtaatcagtattttcaataatgctaaaatcatattttgagattctggtactttaaattcaaaaaattttttattaactttgaccaaattgctcttactaacataattaaataattagctttagaaaaactaattaaataattaaatttaattttaaaactcaactaattgaagaccattgatcatattaacaaattttttatttattaaattgaattcaaaataccaacatgtacaattcaaaatgcagagtatcaaaacatagaaggtaccagatatatacattattgaaagcacacagcactaaatttagtaccaaataagtacacatcctttataaatagacttgcataatcatttttaacttgccttggtgttagaaacttaaaattaaatcaagtgaacacactaacgaaatctttaggctagctaatcttataaaaaaaaaagtttaaaccaattttgagttgcatagtattgcatatagccattggaggatggacttaacatactaaccagcatgaggca

SEQ ID NO: 390808 - DNA, 1754 bp, Cannabis indica
aatttattctaattgatatttatgataatgttattgtgggtattatgacgcttaaacttgacataaacaaagcctatataactgagtagagtaaaaaaaatttaggggcattatgaggaaatttggatttgataaagatgggttaagcttattatggattgtgtgactactctagctagagtatgcttttggcgccctagggggcgagtggttcctaccaggagttgcgaaaaggttgtcccttacctttttatttatttttattttgtccggatgcgttatcatctttaatcaagcaagcagagactatcagagatggttagctttcgttgtttaagaacgagaccctgggtatacatttgttctttattgatgacaacttaatgttttagagaagtaatgctaatgatattgaaactattaggaagattctaacaaaagtatgaagaggcttcgagtcagaaaataaacatggataagtttgcaatttacttttagttctaatgtgcaacaactcgataaatatatatatttttacaaattttggggttaacttctgtgattcccatgataagtatctagggttaccaactattgttggtaggaataaaaaaagacatttgaaggtctttgtgagaaggttcgaaagagagtacgaggctggaagaggagtctctttttagctattggtagcgaagtgcttatcaagatcattttacaatctatttcaacatacttgatgatcattttcaagttgccagtgtcggtttgtgagaatttgaaatccataatcttgcagttttgttgggttcttcaagcaataaaaagaaaattgcttggcaggagtgggaggtggtgtgtcaacctaaggtgaaggggggatgggatatcgagacttgcacttattcaatcaagctctggttgctaatcaagtttggcacattctgcagttttcggagatgcttgttgctagagtgttaaaacacaagtatgttctgtgtggttctctccttgatgatattgatagaaatggttcgtctcatttatggattagtctcatttgggggttggagttgttaaagtatggatttaagctttcggttggaaatgggaggctcataagggtgcttaatgactcgtggttgccttggcctcgatcttttaggcctattactgtgagacgagatgatgataggttagttagtgaatacatcactgctactggggttcgggatgtggggaagttgatccatgattttctacctatggatgtggatgttattctcaatattcccttggcttgtggtgtgaaaatgataggtggtattggcactttgatagagatgggaattacaatgtgagtaatagttattctcttgcttggtgtcttaaatttgataatgggtgtgcggattcctcgaggttggcttggtggtggaatgttttatagagttttgatatactacctaagatgagcaaactcacatagaggcgagggcgggaggggcacagtcatcccctaaaaaaattagaaaaataatgtctatgtattttagttaattacagtatacatttgtacgtaaaagtgatattaataaatataatgtaagcttttgtataatagttacattattttacacacttagtagatatcatgagttcaaattctaacaaaaatatgtctactttttaatatttttaagttttttttaacctctaccaataagacttgtaatttactttaaactattaat

SEQ ID NO: 390809 - DNA, 589 bp, Cannabis indica
aacagctacgtttatgaagaaatcaatccaagttgtcacaagccacctgaaacaaattaattagaaaatgactgattaattatttgctaaacctatacaaattatatatatatagagagagagagaaagagagagtacgaactgggaaactgttatgtctgaaattggtgtaacgattatggtgtaaattagagtgatgaacatggctaaacctgtggtagcgaacagaaattttaagctaatggcctttaaattccccatttttagagaaaattagagagaattgaattgaattagaagaaagaaagaaagaaagaaaaatgaagaatgagaatgaaattgagagagtgataataaatatgcatggacattagagttccacgtaacacataatcacattctcatactccatggaacttttttaatgcactaattatataacgccacgtgtcttctttaccattttcagttgacaatttcggctgttttgttttgaaaattcaaaaatattgacttctcttttgttaataatataattgaaataattttacaaaaaaaataatacaccataaataaattattattatta

SEQ ID NO: 390810 - DNA, 1115 bp, Cannabis indica
gctatttgacactaagtcagagaactggcttccagattaaagtcattcgctacaaactattttctgaacattgcttgtagatccttctagttgtggattgatctcggagataatctctaccacgagtcttccgcggattagcttaaatttaatgaaagcaaaggtattttgcattatcaatagccttggagacttgcatcatgcaattatacttggacaattggtctctggaatctgtcctacctccatataatttcatttgtggcattctggagcgctccgatagtggtgcatctatgattcttttcacacatggctctatgtcttcttcctcaaaatttgatacagtattttgttttctggagatcttctctgtagcttcatcaactctttgacctttttctctttctctaagcgtggagttttgtcactcgaagattctcttccatggacaggatcattgatgtggtttctcaaatcgtccatgcggggtctggccttttccattcttgctttctcttttttcttgtttagtattcttcaaagatcaatcgtggagagacttccactgttgtcgtctgagacggatacacctcatcaacatccttgctttgacttgtagagttgtttggatgatgcttgtccttcctggaagcaaacttcttgactctggcatcaaccttatctttttgtacgactctgcctctagaattaatctagtcaccctaccctagagcatggttccctttcattttttgttgaggttggtcaacagttttagacttcttttgttgcttagtcgtgggagtcttctgcgaagtgtcacccattatttctttccctttattcttgtaagggtttgaggttctaggatcatttggatccactcttctgggatcatcagttgttggaggtgtttgcacattagggattcctttggttagggctgtcatcacagtctctattcttgtcatcttttcgagtagtatctcattgaactgatttgccgagatagtctgtttttagttagttggaacttttgggccattataaccatgggatctgtaacaccctaactaacttaggcgtattacgtgatttttaaacgtactgtg

SEQ ID NO: 390811 - DNA, 678 bp, Cannabis indica
atttttccatttaaatattcaatttaagaggatgcaaaatcatcgaacatgtgagacaagaagcacactaagcttggcgagagcatacgtgcatttgctatcgacttgattttcaatcgttgacgatgagttgatgacaggtgaacgatttcagatgaacgatttgattttcaatcattatattcgaaatctcactatcaactgaatgtgctcggagaagaagaataagaagctttatattgtatgaagggcactgtatatcgcttgaagttcgaaatgacgaggaagaaggtgagagagaaaatcaagatcatcttcaaccattttatgcctaacttatgaaataaaagcttcaatcgacttgattttcaatcgttaacgatgagtcgacgacaggtgaacgatttgagatgaacgagaccagcacattcgcccaaattaaagcttcaatagacttgattttcaatcgttaacgatgagtcgacttgatttggcaattcaagaatcagtgaaaggagagaatgcttccgtaaaagtttctgacttgaaagcttattttagtttatctggagggtaaatttctgttactttatcataatttattatgaataaaaagtgcaaaatacaaaacttacactattttctctgtcaagcaaatgaagattgaaatccaccaat

SEQ ID NO: 390812 - DNA, 1301 bp, Cannabis indica
gagtaataatatggatatagtttattgtctagctaaacaatatagtaaaactaattcaaatctctttttctacaaattgaaagataaaggtttttgtgaagggtgaggttccaacttaatgttatttggtattaagtgaaggaactgaaccactatgttaagttatttttcatgtatttttaatgtgagactattcagaaacatcattgttatgtttggacctaaaagtgtgagtacaataaacagtctttaagggactataacagcgacattttaaaagaaatccacaaggctgaatctaaaaatttgtagatttgttttaaaataaggcaaagatcctaattttagaaacaagcatacattgatcgaaaggtctcaaataaaaattaaaagtggagacaacaaaaactttaattactctaataacattgtacaaattgaaaagaatgtcttttggttagagattgaggttccaacttaaaattggttggtgttaagtggagcaactcaattactatattaagctataatattttctatatatatattctcaaagtggtggaactatttctaatagtagacgtatatgaaatagtgatgctttgaaaagttatataataaattttaaaatcataaaatgaatgatgatgaaaaagcaagattttgaactcaaatgagtactaccaataagacataaatgaataataaaccacttgaaaattaaataaaatcgatacaatataaatatatttagggaaatttattgtacaaatatttattttgttgagtttgttattactcaaaatttaaaaattacggtaaaaatagtcaaaactcaatttttgttatctttttaatactctttttaacagttcttttaattattttagaatcgcacatgtatgtcaccatataattgctttaatctaaaaaaatttgtcaaaatatattaaaataaaaaaataagaaaattaatttaaaaaaataaataatttgaaaacttatgccttatttctttcattctctcttctttttctctcttgctctatgtacaacacatcatgagcgaagtttggtagatcttaactaggctgaggatgtgatgtcacgaccccgagccctaagccgtggcaaatatgtaatatccataacttgagtggtcaaaggtcacactttgacccttattgaaagataaagcttataaatgatcctttaatttatatcacaaaatactaacttaaaagtaatggattaactcctatattaataggaaaatatttagtaacaaaatcaggaccact

SEQ ID NO: 390813 - DNA, 2318 bp, Cannabis indica
aaatataataataacattatgacaactattaatcaggcaattgaaaatctttttaatttttttaggaaaaacaatataaatagaacataataaataaaactaatttattttttctaaacaattgattggacaaattattacatcttctccttttgttttttggctaaaatttgtttaggtcatattcaaatatatatatatatatatatatttatatatatatagatgaaagtaaaaataaatgcttaattatctcttagtctatattagttggacattattttttttaataaataaaataataatcacatatattgttggactattcattttgctaaataattgtaaacatgtgttatgattttattttagagattttattttaatatttattcaagtttaaagccatttccaattacactttaattaaaaacttatatttagtgtaatttttccaataaaattcttaaatttttttttaattaaatatttcatttatgaagtaaatatttttattatattaataaaaaagcattataataaaaaatatagattttaatgtaatttttagtgttgtggttggaattgaaaaaaaaaaattagtgctaaaatagtactcttttagtttgatttaacactaaaattaggtttttgcattagagttaccctagaaaaaaattagtaggataattttattgtgatggcatagttgtaataaggtaataatattatgtctagttattaaatacaaataaagtaatctcaaagaatgacatttgtcactaaattataaagagagtgcaaaagagagtctccttagcactcctctctaaagtatcaatcgtcctacatcaatagtactcattttaacacaattgatcgtgatagatagctagttcggatgataaaacttatattgaatgtgatatgaccttttatggggtaatacaagaaatttggaattatattatactaatttttgaatcccagttttactttgtgattgagtaagtgacaatggagttagatgatgagttcggagtcaaattagtagtcttgaatagagtaggacaaaaaaatgataggtttataatggcatcacaagatattcaagtgttttacatgagtgatctattagatgcccgctgatctgttgtcctcacaacacaaccaaaagattatgaaaaaaagagtctagtggagatgatctcatgctcagtgatcaaacttttaaaatcaatccatcacctattattgtgactgttggggatgatatcatatcttcacgtgaggataaagaaggattatgggttgatattggttgacatcaatatcaccccataatcgatatccgcattgatacgtgatgtaatggtacttttataatgttatttaatatttgttttgttttattatgtaggtacgttctttatgaatgacccaaatttgagtttggacctcttcggtcaatctgctggcgatgacattaaagaggatgtacaacaagatcactcagaagaagaggggaatgagtaaagatatgataaatatgaggagcaaagggaagaagacggaagttgagtacaactcatggggtcaagctgttagtgacggtgcagaaaaacttcgtagcgagattggtaaatatgttcgccaccacgttatattgcttgtggatgattgacgacttgtatcgatagaagtgaaagataagttgtggaatgaaatgcttgtaattttttatataactatagtaaattaaattaagtacatttgtttataactggcacaaagatgaaatcctatgtgttgtcagttaatggtgataggtggagggaatttaaatccaacctaaccaacttcatctacacacacaaagatgacaacccgtaacttctagacaagcctccaaagttttatgaaaatatgattgacattataatttttggacattataattttttttttctagtccaataagaatagactagaaaactccccaaaaccttttcatgtccaacaataattttgttggacttaaaataagggacattaaaaaggttttttgtagtagtgagatagtgaagaatggcatgtaaaaaaaagttagcataaggcagcaggaaacaaaacaaatacaatcaccgcactggacgaggtggtgtgaggaaggtgcgagagaagatagagaaagaattgggtcaccagatagatgatgtaatgccctgacccgcagggacgccacctgtgtacttttacaaacttatttctaactaatctattagtttaagaaatgtgttgtttaattaaaaactttt

SEQ ID NO: 390814 - DNA, 847 bp, Cannabis indica
atcattcatcatataatcgatcgaacgattttaaattaattagtcatcatataatggtcatgatctgatctcatatatatatatatgtatatatataataaaaaaatatgaaagctgtattattaatttttaaaaataattaactaatttcagaggcaactcccaagcgaattttgcagacaatgagtgtcaagggactgaaaatttctcatgtcaaaagccatctccaggtatatatataatctattttcttcttcttcttattattattgttattgaacaataaatcatctaaaatgcaagtatatatcatatatattcatacatttatatgataaattatacactatatatttaatgatgtatagtctgtgaattaggtgaaattaaacaaaagaaaaacaaggggttcaagtaatcaaatgtatatatatataattaatccctcttatttagggtataaaacctaatataactttactaatttaacaacacatgcaataattcctaatagacttgtaaatataatgtaattatgtcccttcccttcctttgaattcctttattaattatttatatatatataatagttggcgcatgcatgcatatataattatatatacatgatttcagaggtctcaatgattgaggtaaagaaaatggttatgcatagtaaaagttaattataaattggcaggcgccatgccctagctcctaattttcaaaataactaattaattatcgagaattagataggattgcattatgtgtgtatatatatactagtatattgttacgtgcgatgcacgtatgctatgttttatattaagtattatattatgagttc

SEQ ID NO: 390815 - DNA, 1470 bp, Cannabis indica
ttttctccttaatttgtgtgggcttcactagtttcttccattctaaattttagtaaacaaatgaataagaatcaatcacatacaattaattgtcattctcttttaataaacaagtttattattgtggtgagatatagaactcctatagctgaaaaagtagaaagagatatggatgacatgattgtttttttaaaatattaataatgataaaaaaaaatatgcgcaatgtagatcgcatatattaaaaacagcttgtgcaatctgtggctaagatccacaagtttagactttggatttaacagaatattataaatatttatgcataggaaatactctaatttaattatttgatcttacgaacaacaaaaaaacaaaatacattatatattgtcgatggaagatagcttgtaggattctctgccaaagattttgttataaaatattgtggaacatggcacacaatttcgattagaaaatacttgttagactaaggtattaaactaatgggcaataacgttttgagaagtgttaaagatgtagacaccttagtgggaaccaatatatgtagtatgttaaaaaaaattgctaactaatataatgactgtttattaaaatttttagaaactgattatagtaagaattaagtcaaaaagtaagattagaaagaataataaaataaaattttttacgtgattggaataataactagacctaatctacgagttgcttttattaagcttgttataccctattatcaaaaaattaaaaagtcaaacctaagactttaataagattcaagacaaccaaatggggttgagaaatctgttgtgaaccactcaataacttacgatgtaattatactggaccaacaaacacgcaatgaaaaacaatacttccaaagaatcacaagaaccaaataaagaattaaagctggaaatcaatgagaaaatagcaccagggtttaacgatttcgagccttgtgcattgctctacatctcgatcagaataacatcagtcatatctttattgatattagtgttgggaatattttaacaggatctatatttactaacaagtatgttgaattaacatcctaaatatgaatatctctaatacaatgaaatgaaacacataagagtttagaaaatcttacatcgattgcagcaaaatactatgactccttccactcagatctctagccattgttcctttttatcccagagtgttatcaagatctgagcctgaatctctttctctcctttggttaccaccgtcatctgcactatgattgagtacttgacttgctatgtgtgtgcatgacactctatcaataagggcgaattagttgaagaacaatgaagaagggttcgaatcactatagaaggtgtctctcatctactagttatcaaagaatgagaactaggtttgatttgattgaagtgaatagttggatgagatgagagcattatg

SEQ ID NO: 390816 - DNA, 757 bp, Cannabis indica
aaaataacttccaacattatgttttcccgctaagttcatagtgtggattaggacttgtttgagaggttcgtcctatactttgatgatcaatggtagattacatgactcttttaggggtgaaaaggggttgcatcaaggggaccctatctctcctcttctttttgtaatagtcatggattaccttgctagattgttgattcaagcctctcgctccaagggtttcagtttccatccaatgtgaaaaactttgaatcctgtgaatttgtgcttcccagatgatttggttattttttgtaagggcaatgttgctaccctgagtatcattcagaaggcttttgatgaattttgtgctgcaactgggcttgttgacttctcaaaatctcatatttattttggaggaataaattctgctttgaaacaacatctgtgtaatatctcccatatggctgaaggttcttttcccttgaaatatcttgggatcaatctaagacctaccaaatggaaggcttcttgtgattgcattattgaaaaggtccgtaaaaatattcatcattgggctagtagacatatctcctatgctggtggagcccaactgagtcattcggttctcttgggcattagtaattattggatggagatttttattttaccccaaaaagtcacagttgaaatcgataaactctgcaggatgtttctttggagaaccaaaggcatgttggaaattattttaccaggatcttagatttactcacaagta

SEQ ID NO: 390817 - DNA, 3596 bp, Cannabis indica
agagagagagagagaaaagagaatatgtctttcagacttagaactatttggtggctaggtgacctagaggcaacttagagaacttaggtttctaggctagggttaaggcctttatgtaggaagccttaaaccctagatttaaaacttaaatcccttaaaaataggatacttagcgagatatttacatgagactaaaatgcccttagactctagaaacttctcagcctgtctattgggcttttggggccaaatttgcagcccatgccttggtccacgtatagagttgtacatggagtcttgctaggtcaatcttggttgtccataggcctacatggaaatttggtcggccatggtcttgtcaggtcaatcctggccagccatggtcctgcaggacctagcaggacaaggcctacatcgtctggcaggactttatagctccaccaagaggaggccaacctttgagtgtggaggctagccttttgcaagttgatgacagctttgaacatcgtttccatgaagaggttaggttcctttggccgaacaaagtctccttgggtccagaagtcacttcttagacggacagcttgtgcgtacatatcctggacggcctataggctcaccctagccggcctataggctcctcttggccagccaagtatgttggtacagctccttgtgggctcgcttcactctcttcagtcgctgcttgacatttttgctaaatctttcacagaggctgtgctattggcagggttgtactccacatgtactctatgttggcttatgtggacatgccatgttaggtggacaaaattaaggataacattttcgtcgaagtccctattcgaacgtttggtcgaatagggactttctagccatcgtcttgtctgcaaagtcttgttgagcagcttatctagccaagtgttggcttttttcctgggatgcttgtgtatctttgatcttttctctctgtatgcatctcatcttctcttcttgggtatctcttctacgtacctgccattaacaagtttcaagctttttaagcttttggaaactttttgattcacatgttagtttatactctctttggtatatagatcctcatgacagttttggaatgtgcagtgtgctactttttgattaaaaagattcaattttggccttaactatgattcttgactctttaagtcataaggaatacgaggcacataatcgagttttaaaagaaaaacacacattaggattcaaaacttaccttggccagcctaggaggtcttgcctgagacttggtcggcccaaaggcttaatcatggcagttggccagctttatggttttaccctataaagcttcttgttcatgcatgggtttggtgacgctggccagttcttggctgagtcatgggaccctggccgaccctttcaagacttgagaactttgggcgacatggaccatggttccaagtgggtagccaattttctgtcctcttgtgacttcaacaagagtttggatctgtaggcatatacaaccttagcttcatacgtggtttccttggaaactatgtatgaagcttaatggtgagtctattatagtcgaatgtttaatttaagactcaacatcgcttggttcctgcaaggaactttgccttagctatagcccgatatgtgaacattataggagatctgtctaggtcttttctggctacacggttctagcagcgccttggcctcatgcaggcgaaccgatctcatattcggtctcaaggctttcatgttcttgctttggcctatacgccctctgtttttgaacactactattgtttagccttaaagccatctatgatggacaaatgatcgtcctggctgtcttcttatgtcttgataggtaacggtctgaatttgctttgtcaagctaaagtatgcctacacgacttagaggcaggtttagtagcttatttaaagccttacaatttctctgaataagttcattgtaacagtttaatgtgttgtacagtatgggcacccctcaagcgaccatgcaagcaagtctcttggtcacttgctattcaccaagtttcacagactttgcctggattcttccttagggtggtgtccatagtatgcatgtggaacggaaagactaactttaagaagttaatcttgtgagcaagtggtttagacatagtcggtctaacgtgtaacaaaagcttacagcttagtgtcttcttttgaaatcacatagtggctacccctacgtggcttaacaaagcagaggccaccgttgaagaatggtgggagaccaagccaagaaggccatgggtctagcgcttttaagggttcctagacgatgaaacgttagaggaacttaattgacaagttggatagtgagagtacttgccaagatgctccctattttagtgtttgggtagaagttctgacttcaagttcctcatcatactcgccagacttgtatgcacctttactgttatcttgtaacatggtgcggaccttttcagtttggtccaaatatgcttactacatgaaatttgctgtcaaggaatattttttagcgagtaattctcttatgaggaatttctttcctcgatctatttgttgacgggcctagtaactccttatgcgtagccatactgctttaagttggcttggtctcttattctttccctttttcaagtgatcctactagtaagatgttgtgtaccacttgttcactgtagaccagaagtatgagagcagactgctggtggatcgggctggccaaggcaaaaccaggtggcctaccatactaagggagcattacctgggcaattggatgaggctatggccggccagcatgtggaggtggtggtcggccagaatgtggattctatggctatccaacttgttgtggacatggttggctagccttctaaaggcccaatcgatgttgtagtttgatcccgtctgcatttgattgcctttgtcccttgaaaaaattgtcgtagagcctttgtgcactttctttaatagttatacaacttctttcttggaaacactccttggtggtgttgaagtacacttctaggtgttatgttgtgtaggatttgacaccttgtagacgtcctccctgtccctactctctcgcaaggtctttgtttggaggtaagctgcaataggtgtcatccatgttggaatgtcatccagcatgtcgacctcctctgggacaacaatgttaggttcttctaggaactggatgggcactagatttgctttgtcagctatggtactgatcgataggcgagcaagtgcatttcctgtggcattttgttctttttaaagcaagacttagttctttgaagaactgacgaggtaccaagtttgccttggttgtcaatgcatagttggctaattgaatgagtgcatcgattgttgtgttgtctttgtgggctagccttttagtatagcctttgagctatcttaatagctctggtaggccatcatcttcttgtattgagctatatattcacttaggacataacctatgactagctgagagtcgtggtgcatgtttaggtggttagcccgcacttcatgtgctagcc

SEQ ID NO: 390818 - DNA, 2774 bp, Cannabis indica
ccaaacagggtttggggtgcgttctgatgtaagctaatagggttattgcatatgcttcttgacagttgaaggagtatgagcaacgttacacaacacatgatttgaaaccttttgttattgtgttttccctaaagatatggcaacattacttgtacagagagaagggtgagatctatactgaccataagagtctcaagtatttttttactcagaaagatttgaatatgagacaaaggcaatggttagatttagtcaaggattatgactgtgagattttgtatcaccctaggaaagccaatgtggtggcagacgctttgagcaaaaaaggtcttggggacgtttatagtaccatagtgatcgcacttagttggcttcagatatggctaaagatggtattgaatttgtagttgggaaacatcataacctaatgtttcaatctgacttattaaaaaggatcaaaggtgctcagttgaaagattcagtgttggttaagacttgagaggaggtattagatggtcagcctaaggacttttcaatcttgaacaatgggatgttactttataaagcttgggtatgtgtaccaagcagtgatgagttccggtaagaaatactagttgaggcccatactacaccatattcattacacctggggtaccaccaaaatgtaccaagatctgaaaacctatcattggtggtgcagaatgaagaaagatgtagtgaaatatgtgttcaagtgtttgacatgccagcaaattaaagcagaatatcaagcagggttactacaaccactaacacttctcgagtggaagtgggaagatgttatcatggaccttgtggttaatttatctaaaactatgggaatgtatgatttagtatgggtcatagtgaatcatttcacaagtcagcacactttctgccggtaaaagcaacctatatagtagatcaatatgcagagttttatgtgaaagtgatagttcgtctttatggaactctaaaatctattgttttttggatagagatccaaagtttatatcaaagttttggatacatcttcagagagctatgggtacaatgctaaagtttagtataactttgcaccctctaactgatggacagtctgagaagacgattcaagtactagaagatttattacaagcttatgttatggactttgagagttcatggagtaaatatttgcctttgatagaattttcttacaacaacaactatcaaagtacaatagggatggctccctacgagatggtttatagtaggaaatgtcgttctccaattcattgggatgagactagagaacgacattgtaacttgtataagcaataatcctatcagcttgcatcagaacgcaccctagaccatgcttggatgcctcacaatacaccacgaaatttttttgatctgactgtagggctaatacatgaattgtgatcaatcgttgcttcagctcttgaaaacttgcttcacacttttctaaccatataaactgctgactctttttagttaattctattaagggcatcaaaatcttggaaagcccttcaacaaaatggcagaatagcctgctaaccctagaaagcttctaacttctgtaactgttttcagccttggctaatacttgacgaattcaatcttcctcagatcaaccatgatcccatctttactaacaatatgcgctaggaaggacacttagaataaccaaaattcacacttcttaaatttggcataacttttatgttcctgtagtcgctataaaataatctatacatgttgttcatgctctgctttagattgagagtacacaaggatatcgtcaataaatactataacatgtatatcgaggaaatccttaaataccatattcatcaaatccataaaagtttttgaagcattggtagtccaaaagacataacaaagaattcataagggttgtacctagaatgaaagacagtctttggaatgttctcctctctgattctcaactgatgataggccaagcgaagatcaatcttagagaagattgtctttccctaaatccgatcaaacaattcatcgatcctaggcagagagtgcttattcttgattattaacttgtttgattctcgataatcaatacaaatgtgaagtgatccatctttcttcttaacgaacaacaatggagctccccagggtgacacacgagtcgagaaaaccctaagttaagcatcccctaaaattgtatctttaattccttgagttcagtaggacccattctatagggtgccttagaaactagccctgttctaggtgctaagttaatgataaaatctatttcttgttgcggtggtaaccctggaacatcttctggaaatacatctaagaactcttgtatcaccttaatgtgttttggctaaattagcttgggtcgagtggtatctaacaccaacgctagaaaccctaagcacccatcctgcaacaagtctttagcctttaacactgagattatgggaacttgagaaaccccgaactaatcccataaatacaaatggttcctcacccttaggttgaaaggtcaccatcttccgcttacaatcagtattagtagtgtacttagagaagaaatctattccaagtctaatatcaaactctgttatactcaattccactaggttagcaatcaacttcctatcctcaatcctaattggtatagacctaatccacattttggagataactaattctttgtcaggcagcagggttccaaatcctatttcataact

SEQ ID NO: 390819 - DNA, 898 bp, Cannabis indica
tcgcacaatacgtgtcgtgccaattatttgcagcatcgtaccatatcgtgttcatgtttatatttttttttttatatcaagtcatacttgtatctcttaagttcgtattaatttcgtgccctgtcaaaaaatctaacttgtatttacagcactctgacgtgctcatgatttttgtttattcatacgaactcctactccaaacaattaatattttgtcctataacattacaaaatagtagaaacgtggccattatttatacatgtccataacatatatggaaaagcttagagaatatgaaaaaaaaaaaaaaaaaatctatccacatgaatttgcatgatgaatatataataacatttgaattgtcacactaaattttagtgtagaatcttttactttcagtataataactttaataattcatactaaatatccactaaaaaatattatttacttaaaaaatattttatatttttaatatcttcaaattatgattctcaactgattaatctgactattaaatcatattatttttgtgataaattttaatttaaggactaaaacataaaattattttttaaaataaaataaaataaaagtgagaatgtaaaaaaatattttaaacaggtgtatatttaaaatctaatactatcactagtgtataatttaatacatactaatttaatgcataattagtatactattaaaatataacaaaaaaaattcatactaatttaatgaaatagtacataaaaaaatactctaccagaaaaaaagaatattcaagatggacattatatataaaacaaaacacattgtcgtttcaaccttgaattgtcccctttaataatattatttattttatttattactagagaataatttatatatataaaaaaa

SEQ ID NO: 390820 - DNA, 880 bp, Cannabis indica
aaagagctttgtataattcgctttacacaaatatattaaaaaaaaaaaacatttcatatatatcatattaatatattttcttaattttacatttttttcttcttcttcttgtttttataatataaacagctagctttatggacttattaattttcatgcattgcattatattaattgtcccaatcatgcattataattataaccccacataactaattatcattattaacaataattattaaacaacttaataaaaatcatagtctaattaaatggcaagaagaagactagggagagaccggcgaaagagatccctaggcatgctctgccaaacagtggacaagctccggtgaccggtggagacatcccatccattcaccgccggtgactgaagatcactgacggtaagccacgtgttaaagtactctctaaactgagtaataacaccatctttgactgtccaaacatgaacccaataagcctttgctccttcccatccctcggcgatgacacacgcgcccccaataggagtaacgctcctcggctcaaacctaaaaggcacagagtcggcctgtgactcgcctgttagcacccgcatcatgtggtggcaacgtggcgggccgtggaaccagtactcgaggtctgtagccacgagatttgccactgtctcaagggctagcccttgagacaaggccttgtagagtttctctacggtcgccttgttttggactattattaggtctgatgaggactcataaatcttctcattggctgttgagatttcagtacttgccatatatatatatatatatactagcaaaacatacgtgcgaggcacgtatactaaatttatgctagtttttttctatgttatttgaaa

SEQ ID NO: 390821 - DNA, 1171 bp, Cannabis indica
ctcaaatctatgaaagcttagtgttcttttagggatcacaaaatcgacccttaatctgagtttgtgaatattctgcagatggacatacaacgatcctcttcgagcaaagtacaacgcgaaaatggccggaatgaacgcaccaatagctaaacctaaaggaagcaagaaattgaaagactgggaatctcgttgaaatatatgcaaatgacaccttagacagttttgtattttatttttacctttaatatttagttatgttagttaagctcatattgtaacatatagcaaagtttattattgtaattttcattgaaggggttcgaacttctaaagttctttttttttaatatcttgaattgaaaagcagagctaaatgtatatggctttgaattctgtcctagttggtgtcaaattcctttatgttatatcggatggttgtgtgggtcgaaaagaattgcccaaccaaatctcatttgggaggaaaatgcaaattggtacccaaaataaaccttttgaaagtgatttttcttaccaacttttcacaaaacagtactccagttcagttatgtcatttgactagtactaaaaacatcataatccaactataaaagaaaattttcagtttggtgcactattattttagagaaacgcaactaaatggccttatttttaactttataaatagttaatgtgcatcttttaaaataataaagtaaatgccattttttattttttaatcgaaatttctctactaagtttttatcaactatttttttattatataaaaagtattatatgttttattcttttagattttgccgttgttgttgctgtctaatatgttatttaagcatataattagttttttattaatatatcgtatgatatacaaacaatataccttaaaccaatatacatatatcacaaacttaaactaatacattaaatgaattgttttccacaatatacagtagcatacaaaaacttataccacaatcataagcagatataccatagtcaaaaattaatataccaccagcatagtgaaaaaaaaatatacaaaaaacttaatttaatattccacaagtttttttttcttgttctttccttcatgaaataccaatgaacataaaatcaatatacctcagtcaaatataactatacctcatac

SEQ ID NO: 390822 - DNA, 1092 bp, Cannabis indica
tgattactggctttaaggtgagcagtcggagcccttcaatcactcaccttatgtatgctgacgatactatcattttttgtatggctaatattgaggatgtgggagccgttctcgagtgtatcaatgagtatgggtcgtggacggggcaacggctaaatgtgcagaaatctgcctatattgttttggtatcacggcccgtgatactcaattggagattgtggatggcttgggtttcgcaagttggggactgaggataaatttttgggtaacccgattctttggacaaagagtaaggtgaaggatttcaagttcttaaaggagaagatcgtatcgaagagctacccttattagaactgtggcccagagcgtccctctttactcgatgtcttcttttcttctccctaaggttctatgtagagaacttgatcaagtgattcgtaaattctggtggataggagaaggagataaagatcgttatctcacccttgtggagtgggatgctttgtgtctaccggtggaccagggggtcttaatttcaaaaaatgtggattcttggttgcatttgttctgtcattgtccgttggccaaggccacctggtatggtagtcaatgggcgattcgtggtgagcatttgaacttttcctgtcttagagattttcttctgtggctgcttgatccaggtttcttagggagtgcaagcaaggaggatagagaggctttttccaagtttggtatctgtttgtgtgatgaactttggaatgccaggaaccgtgcctaccatgatcaggtgttcccgtcgtgtatgggagttttagcaagggttaactctgcttgttcgacaatggtgggggcctgggaagctccggctttgtcccactctcaggtcggttgggagaatggtatggattggatcaatggtagaagtgtatatattatattactctataaagtagtgtatattggtctgactagtagaattaataaaaattttgtatattaaaatagattatgttgttgtattattttcaagtaatagttttaataacatgcacaggagcaattaatcaaatgacaaagaatttggcatgtgaa

SEQ ID NO: 390823 - DNA, 840 bp, Cannabis indica
aggtgttttgtggtgtaagtaagaaaaggactgagctaggtcagctatgagttagaggtcttccccaacaaatatacatatcaacttatccagctagtagtgtagagtagtcagtattttgatttatggtgactttgataagtataagtgctttatcgtaaaattgtaatgtatcttttgtaaaattttaaaaatggaattcccaatcctaaataattttgttgtgccaacatccattttatattttaattaattattaagttttcattaaaatataatttttattaaaccattagtttattgttataaattattttataaaaacacgtggtgtctctataagttacaactttacatcttgcatagttaaattatttttattttttaattagtccatattgtactatataaacatactacattgaaaataaataaataactaaatatattgtagaggtagcctacttattccctttacttttcatgtaataatgttacaattttaatcattgcttttaaaaaaaatgccctgaatgattttaaaaaatattaaataagctaatatatatacttcccgaaaacaaagtaaaaaagaaggaattaagattggaattgcgactaacttcacaaactatttgatgataaaatagtggatttggactaaaaaagctaaatggtaaattttttaccaaattggcttacttaatagttttggaccctgcatcatattgagtggtttctcccttgttagaatttaagaataaggtgaaggaaaacttacaaaaatactggaatttgggttaatttttacaaaaatactgtcacacggaaattttttca

SEQ ID NO: 390824 - DNA, 1164 bp, Cannabis indica
cacacacacacacacatgcacacccgactcgcatgcgagccccctacccgcacacggcacttgcgttcccacacttctatgctatcttcgtgggattcccaggggcgattcttgtgacggtgcggacgcgccttgacatgcgggtactatttttgagaagtaggcctcaggcaagtatgctaacttggcgcacttttgcgggtcttttttcctttaggccaataatcccaaaaattaaatgtgccgatttttggggttaacacttgcccccagtccactagaattcttttaagtgttctggtagactgttggaatgagagaacttgtgctgctgcaaagcaattactgtccgtcacgcttatcaaggttgtgtctactatatatagagggcttcccttgctttagttatcacttcacaccatccctttggcgtagtggcaatcctccttccctttgtccaagagctcttgagttcgattcttctccaagtcgcttctcatactctttatttctattattttggcatgggtacttttctttgcttttgctattagggcgaggctccatcatccttgctttgtctttggtggcaaacgtctttcctatcttaaggcgacccatctatcctcgtggctcttcttgcacccagaggtacgtcatctccccttgttttttttacttttgttacttttattccacgggccttggattctagtagtcgtaacccgagtgctaatcttgtggcactgattgcattgtttgcatcactttcgggacgcgcgtcctagtgaactcaacaccttggttttacctcttaggtggagctgtcaaggcaacgcgccttctttgattcattttgtcttgggtctcgcctagtgtcagctacttagagcaatgttccccactgccgaaatcattgatatctcgtcctctgattcagaagacgcttcacatagcccgttcactagatatgctatattaatgtttgagagggctaaccatcttgaacacatcatcgcttgtcgagagcgcgccgagaagattcaggtagaaattctttaagttttgaacggagagagacatgacctggttgccgaccctagtgagtacctttccagacttaaagcttctcttgtggaatcccaactgttgggttttgtgccc

SEQ ID NO: 390825 - DNA, 613 bp, Cannabis indica
aagtggaatttactcaacattcctcatgatgagatttgtgtgtgagttgagagagttttctggttatgtaatagagcctgagatttgataactctggtgctctcgagtgacatgtgtgtgtgtgttgtaggagcatgactccattcagacttgtgttgtaatcggttgttctctctgagctgaatctcataatattaaaggcaaagcctcaaggcagttcctcccaaggattagatccaagtgctcctcacttgtgattgaaccttgtaactctgtgttcaatttcttattgtatacccttgctgatattgttgtttactggttttatgtttctggtgtgatactgaccggttttgttcttaatcttgttaatgtttgtgatgttcttggttggtgttattcaccacattactttttttaattacagttaaataattgttaaaaaaattatatttaaataatgacatagtgtaatataggttcatttattgaaatgtagaaattactggaaaaattataagggtttacatttttttggcataaatgttagaattattattgtggactaatataatcataagcttaataccataaacacaatcattaactatgt

SEQ ID NO: 390826 - DNA, 1414 bp, Cannabis indica
gagatgacattatatcacttttagtgatttataatacgatcgacgtgaaaagttaaaacacaacgctatatctcgcttcattattcttcatttcttactactataaatacaaatatatatatatagttttctgatgtgaagatgagctgagccagcgttttctttataggtgaatgaggctcacaaaaatatgaaaaaaaatacaaataagtctttctttatcgttgatgatgatctagcagtgagaataacttctggtgatgatagctattttttagtgctcggggaatccagttgcaggttacttgaagcttattttcataactctctaaaagtaaattttgatgacgatagcttcaaaattgcaattgaagtgtgaaacatgacttgataaagcacttaaatagcttcaaaatccaaattgaatcacatcaatcatataaaaattgaatgagttataaccgttttactgaaggtagttcatgtcccagtgcccaaattgaatgagcccagcaccatgcatgtcaacttaggtgttggaccctgcacaaggtcaacttgggcactgggcctagtaccaggtcaacttgggcactgggcccagcaccaagtcaacctgagtgttggatcctatttctagggactcagatttgtagtatctcctcgaatttacttgaatctttattatttttttatgacggtgacgatgcccgaagtaatttttgctaaattgaattggaaatagataggttgacaaaatatcaactggttctctcttctgcccctttgaaagttccatttggtcctaaaaaatagttgattctcaatattttctgaagacggagatggtgctcaaaaaaattatgaaaactctattttttgtggcccatgttggaaaattatcaacattggcgtagggctagcaccaagtgtcaacctaggcattgggccctattttttatgcctagaaattattgtttttccttcgaaaggacctatttctctatttttgatgaagacaaattcaaagtgaaagtagaatcttcgattagacacttagaaggccccaagattgatagattatcaacctaggcgctgggtggtcggggccccaggaccctaggtgctaaaaaatcaacttatttcgaatctaattctcatgcctcaaacatgtacataatatgtcaagtcgatgtcccaatgcaattttcgcccactttgtactaagacggtcccgaaaattaaaaccctagttgaagatgtcaacctgggtgctgggtggataccctagatgcccaagttggcttttggattgcaggttcgtgtaatatcagctaccgaaccttgtattaggttgcttcatgtcttcatggtacaaaatagtgaaagatatatagtgagttggattcaagtt

SEQ ID NO: 390827 - DNA, 784 bp, Cannabis indica
tttttatttttattttgaaggggacaaaatactttttaattaattaggcattttctgcctcttttcttgtcttttttggaggctaatatatatcatgcttcattcttttctttcttcctcctctttttcccacttacattattcacattcaatattttaaatattattattttttcattaaaaaaaaaaaacttgtgttacattcatttagtaattaatttgttataatatatattttcaataaattcaagcaatccataactcccaaataaaaatttcctaccggtaaaattgtgacaacccattcaaaataaattgattataaattttgttaattaataaatgtaatatttttatatatatataatttttttatattaaaatgagttgtaaaacaggtgagatgatcataagaatatggttttaattctttaacttaataaattcccctacctagtttcccatcaagtgatttactattacacttttatttttatttatatctacatatattacattattatacttcacactactttaattaatgtgcttgtgtgtgtataagattttatttatttatttattttagaaaaattttattaattaacatatatcttcaattggttgacttttagccaaatttaaaacttgtatagtgaaaatatacattttaatatttatatatattgcacacattaaaccaaatatgactcaaattaattttcagctccaatggggggctgctaaagtagatgatcaattaattagtactcatgatcatttt

SEQ ID NO: 390828 - DNA, 1362 bp, Cannabis indica
tagcaaagacagttgaatattaatgctctgtattcattaatgcttgtacaagtacaactaccacctttgcctacccatggaatcaaatcaaacagcgcgcggggactcaattacaattactgattctcccttccaatgggctcacaattattattatttttggggcctgtaatatcctgtaaaaaattatttattttaaaataaaaataaataaattacattgagaaataattaaaaaaaatctataaaagtaaataaatgtacatgtatattagaaataaataataattaaactgatgaattccagcagggaaagaaatttcctctcgtcatttaacattctgggatatgaaaaattattctcatattcccgctggtgcttcatttctaccttttcatttttttttttatttttacattacataagatttttatttcttttactttattttattatagtacagaatttttttttataaatattgttttaattttctacactattttacgattattttttaattgatatattgttgttttaattattttataaaaatataatgttttggtaaaaaacattcgtgacactaaaattataatttttactcaaaatgtaatatttgtgtaaaattcttttctttttccctgaaaataacctcctttgcgcctattaattatcattaattaattaacgtgagaatgacatgttaggaacaatcatatgtgacaactatttaacatagaccaactcttctaagttactagttactactacatgaggtggtgaaagtaatccgactactgactatatattttaatgacatgtggcttaccttccacttctgtcatgactttcactattgtattaaagttacaccatcatttatgtgttacatctatttgaaactaatagatttattattattatgaaagaagggggtgtagatccctttttactctttcttttagtgatttagataattttgggatcatctcttagttatagttttatattttattatctacctcacaagagttctcatcccaatgaaggctctaccatatataagaagctcgccttcaagagtcaagtataatcttacataataaaaagggatattggcggctaaaccacctgaactttacggtttgtaacacttaaccaccaaaactgaatttttggcggctaaactacctaaactcccatttcgttttgctctgcacacctccgtccaaaaatcaccgttaagtgccacagtggactgtccacgtgtacacacttgtacacgtgacaaatttttagtggtccacgtaatattaattttttaaaaaaattaaaatattataaaaattaaaaaatca

SEQ ID NO: 390829 - DNA, 672 bp, Cannabis indica
tggtattatttgttgtagtgaacaatgtaatatatagagaattacatctacagataataaaactagtaactgatttttggaagagcaaaaatcataacttttttgtaactcttcatcacaattatttcaaagtgtgcaattaagaaaaatattacacaaattaatgtaggatcaaagctattaacatatagcttttagaggaggttattattatactcatttaaatgattaaattgtggtagaaaaaattagaaattaagagaggtcaaaaaagagttacaaaaaattccataatttgttgtgttgaaaacatgtcatctcgcgtaggtggaaaactctcttttcgacatgaaaatagtatgttgcttattgttttgagttgtaatattctcttcattttctttttctctatttatgtgtaacttttatttagtatcgtaacattatttattctcttttattattcttgtattattttgcatagaatatatttgttggttttattatttctattgaacaactttttccaacaattaccgaataatataaaataatataaagtagaagagaagaaagaagaagaagatgaagagagaaagagaaagtgaatgagaatttctgagttgtttattccaatggggtgaacccctatttatacaaatacaagagtga

SEQ ID NO: 390830 - DNA, 658 bp, Cannabis indica
cattaataagtgtgatctgccacatacatgttcattcagggtagaaatctaattttcttcacgttgttttgatgtttcacagctggcggtttatgagtcatttagttgaagatgctattagggtttgtgtcttatttaatgtaaacaacctagttcgcttattttgttgattgtgttcaatgagcaaaatttctatgtaatggactatgttcgatttacctattaatagaaattctatttacctttaaaaaaaaacttaaatagtaagaaaaacaaagaaaaaaaaataaatgaatattatatcaaggtatgattatttattgtaatatatatatttattgaaatgtaaatttcttcatttagtaaacacaaagggaaaatcttcgatccagttactcacaatgcatttggtcgtagtacatactcccaatgtatttggtcgtagaacatactcccaatgcatttggtcgtagtatatactctcaatgcatctagtcacaatacctattccaccacgtatttggtcgtagtacatatcactactacaaaaatcccctttagaggcggtttttaagccctttcagcgtcgattttcgcgaaattcgctaccgacgctgatcagggcaacgctaaagggtttatatgaaccgacgccata

SEQ ID NO: 390831 - DNA, 2040 bp, Cannabis indica
cttttttttttttgatgaattttatggtatttttatttatatactcatatatatatatatatagtttgtttggttaagaaatgatatatttaatgacattaaatttaattctaaataaaagatgggatgggcacccaactctaaactactaaactgtataacataaaatgcacataatttcttatttctatttgtacttatccctaaaagaataatcacaaacaataatgggtgtataacattccgacgcatagataaaggagagaaaaaacatagataagataaaatttgggtcgttgattagatacataggtatatatatggttgtcataaatatattattatatatatcatctcatatattattgaaggactttaattaaatgtctttaactttaagttaaggggttttctttgaccaaaaccaaataaacccgacagagaaacccataagcattgattaaaaaaagtaaaataataatttatattagagaaatgttaaaaaatatcagtgtctagcacttttttatgggttaatatcgctattggttcaattaattatcgaatcttatataatttaatataataatttttatgaagtatcgctaaccaatcataacgcgacatgtgtaaaaagtactagacaactagtggtgtcttatattaataaagatgaaggtacttgaccatctctagttctctaatccctttctcatgtggttcgaatatattgcacgtctatagacaaccctacacaattataaacagacaataactgtatgattgagccttttttttttctttatatccggccaataataatactaataataatatataggaaccgactttgtaattctctatatattatatattatttttattatatatatataatactgattgtggattgtgttctaaattttcttttcaatagttggaattgatgaataaatattaattaacgtaaactaattattaataattagtatatatatatacgtacatgaaagctagtccacatgtatatatataatgacataataagtttggggtttggtgaagtattattgttagtacttatttaattggtttcttcttctatcaattaactttaatatagagagcccctctttttctaaatcgaagactaaaacatacaaaactttattaaatattattaggttcaatcctatataaatgtatttgttcaaaaaagaaaaaaaatcctacataaatgtatatatgcatatggaaggcaattataatatgcatgtatcaaaaattgtcaaagtaggaaaaatcccatttcaaagaaaggaaatggggttattaatggagaagatttttctggtcttggtcacttgttgttggtagttgaaacattaaaatataaataaattaataaataaaaaggaggttattttcataccatctttgtatggcttgtgcatgcatatataatttaaaaaaaaatagtataattatatttcaaagtaattgtgtaatattaggtagtgtaattactaatttattagagtagtaattatattctattttaaaatacaagatgttggatatggggtgataatatcactaatgttttgttggcaaaatcattagtaattatacaatttattgattaaactcaattctcatggggatatgagaattgaaaagggtaattaccttattttacttatgcaattacaatatataattacgtagttaaacaaacttataaaaatagcgtaatattatcttcaattatatttaatttcaattttttatttgacttattcgaaatgcatcctatatttggtgttgttttgaggtgtaagaaaataagaatcataatgatgatggtaatgaaatttaataaggtttatactattttagattttatattttgtcgaattaccaatttaaactctatatttttttattattctattttagaccctatattattaaaattgattaaaaataatttttttcaactttaaaaaatttaaattaattggaaaaaaattactctag

SEQ ID NO: 390832 - DNA, 706 bp, Cannabis indica
  modified_base (183)..(183): a, c, t, g, unknown or other
aattttctaatgctagtaggaaatgtaattatgcggcacacaatgtcgctaagtgggcttttacccaccaagtgtatggatcgatcccgatcaattctgttaccggaaaattattttatgtaatgaccatgaggtctagttttattcaatataaattacgctttaattttttttaaaaaaaanaaaaaaaaaaaaaagtaaagtgggttgtttaattttctaattatttgtttctaagtttaatttgtatcaaatattcaaaatagttttagaaaaaattaattatatagacaaaataaataaatagttttccaatccaaaatctaacctatctaataattagaacattgcatcgccaatgtagtcaaataaaactcacaatgataattgtagctaattagaatttaaagtgctcgcttaagaacctatgtaaatttgcctaacccttgacacaggtattagaagtgggtaagaataccaccaaatgaaaaaaaataaaaatagtagatcaacatgatccatgattaataggatccacttgttaaagagttttacattaataatattgtgtgaaaatttaatatatctattctatatgaaatatgattatgtagccgcaacagttaaaaaaattcttaaagattaaaatctcaaatgcgctattataaaaattaaaaaataaaaatacattacttaactaaaaaaa

SEQ ID NO: 390833 - DNA, 1366 bp, Cannabis indica
aaaagggcacttagggttatttttggaaattcgaaaatcccgactattcccgacatttccaatgtctaaactattatcccgctactaaaaaaatactaagttgtgattctaatagccatacactgcgttccaatgttgtcgggcacaaaatatgcaaaattatgaaatttctatttgtgacataaaaatgcattcaaaattcaaataaatcatcataaataattaattcaatattaataaataattttcataataaagccctaattatttgctaatttccaaattaaagctaagcggtctttacagggtagtacaaaagagacatttaataaattgggtgagaatcctagtcacatatctaggataggcagttgcacatggatagctttttcgttccaagacagtatggttccataaatcctcctcagggagtaggccatccacaagttcttggaatacaagctccgaatgtgcaagcccttcagggggcccaaaacactctagcagcggtagtagttgtagcatttggtcttagaaatttgtaccatcctggagctgcattaccagctttagatggacatgcaacgacaatttcaggtggatctcatactacaagaggcactcagaatggacagaagaatgagttgaatcaaggcgaagcttgccacttggtgtaatcacttacccagtgtccaagaatgatgaattttcccatgacttttacaaaagacgacgccatgcacgtgcacttcccttgtaatgactcgttggtaatagaagctcaaatagtaaataaaagagtttccaaaattctcgtggataatcgaagctttgaaaacatcattttcaaaagaaccttccacaccattggtctggtagaagccaatctataaccatgtctaattcaactacaaggcttcaatagatctattcccatgggaaagatacaacttccaatgactgtaaatggggaagtggcaggaagtaacgtagtatcatccttcgagtacaacacatttgtgatagttgagtgccctacagcttataatgctatcttgggtagaccgttgttaatggattttcgaatggtgaagtccatcccacatatgtgcttaaaatttcccagcaataccggaagcatggaaactatcaaaggagatcaaagaagtgcgtgaagttattacattgtttcaaccagaactgtacttatggtccataaaggaaataactctgaagccagaccatcttcccagccagcataggggtgatcccgaaagatgagcttaatccataaattggtgtggagcgtgtcatagaactaatggaggaagtggaggaagtatgcatagatgatggagaccccacc

SEQ ID NO: 390834 - DNA, 651 bp, Cannabis indica
aagtcatggccctgtgaatagtattagttgtggttcatggaatttttgtgacgaaaagacttatccgcatgtgaatttttgtgagtagtattagtaacgtatcatgtggtttaaggtcaagacacaattttgacactaagtaatttgaattaattatctttatttaagatgcattccacgcctcctatcgaaaattgactacatagatgtgtatcatgtgtttgtgtgtgagatttacattggcgatattgatggcaaaattatgtgaactatatagattgtaacctttaatctcacaaactgattatttaatggtattatcactaagttttagaggtagtttttaaaggtattctaagcaatacaaaaggggtataaaataaacgtggctatagggattttatggcgtcagttatttcatatagggaccttatggtgtcgggtcataataactgacgccataaggtccctatagcgtcagttattttaaaataaccaagtccataagagtttccttaattttttttttacttttttaattataatatccaataggggtgttcatccgatccaatccgcacttttttggtctaaacaacatccaatccgcactaagtgcggatttcatattttggatccaatccgatccgc

SEQ ID NO: 390835 - DNA, 1205 bp, Cannabis indica
agaaaagaaaaaaagactagtatatgaatatactagtatagtaaaacacattaaactaattaaacgtattctttataagattcaaattttttaacataatccaaatatagaatataacaacctattttttgatgtgaaggttaaacataacaaatggcatagtttagtctccgtataacacaacagcgatgtgagctcattaattttgatagaaacaatgcagatttgaaaagattcaataaggagacaaaaatcccaaaatgttagaaaataaaaaattaatcttaaaaattgggggatgatttggtaaaaaaaaaattcatttataattcgttcttttcctgatctctctcaacaaactaattgtatatgcggtttaaggatcaatttattttatatatatatatttttaatttctagagttatagttgtgattatatgtagagtattattaataattattatatttatattattgtatttttttttattaatgcaatgtttattaaaaaaaagtgttcaaacttcaaagtaaacaatgtggtatcaaaaaaataatgttattattattatttaaaataaatcaagtaatttagtaattattatttctatacataaaattagaaagaaaaaaaataagtttaagaacatatttctttttacgataggaaatttgttgttatcgaatgattagtattttgaatatatatagtattaatattgggatatataatatgtatgatatacgatatttttttatatattaataagattttttttatttgaatggaggatgatagtttacagttgtttgagtttttctttatttaataatttattttaaaattttattatatatatatcttttttgaaagcaagacttttatcatataaaataggatataataaaataaaatatattatttatggagaaggtttcaatgttacattaatagttacatttttttagttattaaattactattgaatgattgtaattaatttaaaaattaaataaaaataaataataattaacttataacctaaaagtcacctaataatttattttcttataaatttttaatgaagattaattatattttaaaataaatttaattataagtattaattaatttttataatttattattaaataaaaatattttagcaatttttttgcctttaaattattaaaatttttatag

SEQ ID NO: 390836 - DNA, 563 bp, Cannabis indica
ttttttaaaaaaaaaaccttgaaaatgaaacctctattaataataatattatattgatataaatatatctatattagagtacatgaataaatatgcgattaataattaattaatgaaaaaaaattaaaacatatgtacggtgacctccacatgggtatgaaaattcaattggtagacttgaaaggataatgtaatgtcggttgaaactcttaatataatatcctagattctcttcaaattaccaaactcaaaataaaattaaacaaacaataaaataaaataaatgattctcataaattaatttagcttatattattatatgattgagacggttagcagtgtctttatcagtttatataaaatatgctttaatttttttttaacattcctatttggaatgctttttaaggtgttatataaatttgatatcgtttggtaacatttttgttttctaattttttaatcacaaaatgaaagtaaaatttttgtttttaaaaattttgctcttaaaaaacaaaaatgcgttctgtaaccacttttgttttataattttaaaaacagaa

SEQ ID NO: 390837 - DNA, 1321 bp, Cannabis indica
cccacccccattattagtcttgagtcttagcagaaatttcaacaactaatcatcttgtcttttctttggtatttatttcttatttctatctaaattgatcccttcttacaagttaattaagttggtacaatgtatttattattagattttttttttcttatacgtagttagtagatcttacctgttatcattatctgatcaatcattttctcaagagattagttcacatatcagtgaatggattatttatgaaatctaaaaatatgcatgattttgttgcacaaaaatattggtggtgttatttctgaggctgattttatgcaataaaggctttttacatgaatttttaaaaagaagtttgtttgattttggggtaagaatatttggagtacgaaaattgatgccaatagttttaattaatatactgaaagaagtttttgagaatcaattataatcttcttcgtgttacaaaatgttaaacatgttccgtacaaattctaactttaacatctactattactattctatattattgttacagcaacacatatggtttggccttaaaagtaagtatagcacattcatgtatgttttaataatagtagttgtaggatgagcctcaaagtaagtatatagctcattcatgtatgttttaataatagtagtagtagttggatgaggcctcaaagtaagtatatagtgttagaatatttttatgtagtaacaagtattgtttacttagtgtcggtattagtatataatgataactatataaatcggtaatgtatggtattattattaggccatattagaatgcatataacgtactaacacgctcgggactcatagacatgctctaaaatgtttttggtcagcctattaggccaaggcaactaattctttcatattgggtatgttggcccaattgacccataatttcttataaagagggttgtactctttattggtttttaaggtaggatgggtgtggctatggtgttgagagaatgaaagagtagtgttcatcatacccaagctcttttttatgtgtagatcaaaaaagtataatcaacatggtcattggagatcaaggtcaagattggaggtatgtttatcattatgttaatgctaattaaatgtttgatcttggtttatatgagcatggtttgttgttgattagtattgataatacatgctcattatgtagtatttattaacaattggtatctagagccatctcatttgattttagtgcttagcataaacctatttattttatatcaaatttgattttataaaaaaaaaatagaaattttatatt

SEQ ID NO: 390838 - DNA, 877 bp, Cannabis indica
tatgttccctactttagttaaaatttgatactatttataatattttataatttaaatttattaaatataaattaatgtgataaaataataaaaaagtaatattgtttttattagaataatatgaaaaaaaattagcaaaaaaaaataaaaaaatttatacttcctatctattctctattatatggagctattttttttaataattggagctcatttttttattcactccctattttaattaaagaatgcatttagaaagtataattagagatactaataattatagtagaatttggcttaaatattaaataaaatacattatttttaaataagagcattagtattaagtactagtaatgttcaataccttttataaatagcgcttaatggtttgtcaattgtttaaggttcccttagcatttctaatggtataaattataatccgcacaaaagtcaaagttgttcagctacaagtcctaatagataaagttacacgagttccataaatataagtgtcttctttttcttttcatttccttgaaaatatctgggtaaaggttgaatatttaaaccaaaattgtaaggctcaagtaacatttggcatcattgtacctcgacttgtgaaatcattaaattgcatgaaactgtttgcccaaaatctaaacattgtgctccccaccaatgtaagacacacaagcctaattttcagacaatatttgtacagctattatattcaagagaaatgctaaagggcaccactggtgcctagcaccctcttacgtgtcaatatcgttattggtgcaattaagtatcgggtcccatatagtttaatataataattttaatagagtatcgctagccaattgcaagtcgacac

SEQ ID NO: 390839 - DNA, 666 bp, Cannabis indica
aaaacagattaaaatgtactcacaatgaaatgagaaagagaaagacaaacggccaaaattactagttactatgacgaagcgagcagcattcaactatattcaaaacacctaaaacaaaattcactaaacacacattctccatagattagacaaaaattcacagttaaaccaaaattcagatcattaaagaaaatggtaccttatggtgatgacaacgaacatgaaaggagatggagatctcggagttagagtccgtggactggggagttgggaatgtcggggagtcagccgagttagagcggtcgcagagagaaatggtgttgtgaggtgagaatgatagtgtctttcaagaatggtgaaaaggaaggaagggaaagagaggacagagaaggagaagatctacggtcactctcattcaacagctgtcggtggcgagttcaacggtcccattcaattaacttccatctaatcaacggcccaaatcagccctcaacacatacacacggttaattccagatctggttctttcatttacagcttgtgttactcattaacccactattattatttacaactaaaaattgactcactattaaataataataataaataataatgggtggttctacaatgcacccccttaaaagggatgtactgttgcaccct

SEQ ID NO: 390840 - DNA, 1304 bp, Cannabis indica
aaaaaatcagttcaaaaagattagatttttttgccacaccaggaactaaactcacaaagacatggcgtccccatcctttttagtaaaagctttgagacagctctcatccacaataagggggccagtgacttttccaaaaagacaaagggagttaaggctcttgatagttgagtcacaagggattaacgaaatagtggccacaaagagagaaagattcttaccaaccaccaactcagaatgacacacgaactccatagcagtaaaagcaaacaccaactaacaaaaccaaataaccacaagcaccccaccaaccagacaacacaagataaaaggaaacaaaaaggttaggaccaggctagggaacacacgagacacgggatacagtttaagcaagaagaggagacaaacaagaaagtcaaaagggagaggagaaaggaggaaaataaagaggaaaagataaaagactaacaaaagacaacaagtgaaagccaacagcaaaacaaagccactgggttaactagtttgaactagggtagagcaaggagaaaaggggccaaccaataaccaagagttacaaaggagcaggacgagaagtgggacaaggaagctggaggatgatagatgaccatcttgtaattgcattaggtaacagtgtgataatagtgataaaaaattaataatatattgagacaaaaaaatttagatatactactaataataatcataatttaaattttttattatctaacatttataaatattttgattttataatataactaatacactgcattatcttgttttataaatatacattttaagaatgtgaaaaagaagaaatttaaaaaagaaaaaactaatataaattaaaaatatattttatataaaataaaataataaaatttagtgtatttataaagtgttggggtacaaataaaactaaggtaaatataattgtattataatattgtatgtattatgtaactacaatataatttaaaagcataatgttgacttcagatttggccaaccgacagcggagtcgtatttaatgttgatgcttgccacgtgttacacaataagaacaataaagtacatgaacacaagattttatagaggtttgactcccttagttagcgagtaataatctactctccttttagttgtattgataccgagagataatgctactcaggtcactatagtgatgggataggaagtagctctctaaaggttacaatgtaggaatcagagttagaaaatctcaagtatgagtatagcagtgggcgtgagagagagagaga

SEQ ID NO: 390841 - DNA, 1626 bp, Cannabis indica
agtacctaaccgttaaatattaatatattaaatctatgtgtcattttcttattggtatatttgaactaatttttttaaaataataaaaatttaatgtcttgaaccagttagggattgccacgtgacaatttatttaactatgtacttacagaagtttcaaaatttaatgacttggaccaagccatatgacaatttactgaactatgtacttaaccatctgagcattgctattaggtactagtagtgcttagcaccttctcgacatgtcgcgttgcgattagctagcgatattccctaaaagttattatattaaattatatgggaccgatacttagttggaccaatagtgatattgacacataggagggtgctaggcatcactagtgccctttagcatttctctaaccatcttaaataacctaaaataaaatattaaaggatgctggagatggtgtcagtcaacttatcccctagcttacccataaaactggtgcccacgctgtcttatctttggtggtcggtttttcaattaatagtccatcagagttgtgaaatgttagttagttagttacctattgtacacgtgtcaagatagtaggctctagttcggtatgttaggtaagttagttaataactaactcttagctattcctaagacatgtatataaatgtctaactagtgctaattcattgttgtaacattcatacacactcaaatcaatacaattcagtattactgaaacttatcttgtgttcaaatggccaatcggctaatgctcttgtgagttcatcttgagtgtttgagagagatcaatgcaaggctttgcaccacaagagtttctaggaaatgggcaaaaaggtgcatccacaacaaaacaataatgatctcagtcagtatatcatttacactaaaacaaagtaagatattgttttttaaaaaagtaaatcaacagttgctataaaatcctactactactacttctatcaacacacacacaaacaattcgattaactaacaatggctttctcattttgtttccttctgttcacctatcttttcttctccaatattattactccctccatagctaaaccaccagtcttcaaaccccaaactgtgcttatcccactaatcaaagatgcttccaccaaacaatacatagcaaaaataaaccaaagaacacctctagtcccactcaaactcaccatagatctcggaggtgatatccttatgatcagctgccaaaagggctatgtctcttcaacctacaagccatcgagatgcggctctgcgccgtgcaaccgcgctggccaaatctcgacgagctgtaatgattgtgtggagggaccaaaaccaggctgcaacaacaacacctgcagtgtctccccttacaaccctttcacccttagttgtttatctcgctggttttacaaatggtagttgatatttatgactcgttgtaatgccctactagattatgtgtgttatcgtgattttatattaattgtgcaatccgttgttaatcaatgggcttcttaaaaatcgtgattattaaaattttatttaattactaataaattgaaaaagcccatacaaaattaaataaattaaataaagtagaccta

SEQ ID NO: 390842 - DNA, 1208 bp, Cannabis indica
agttttaaaaaagctctactcaattcaacttttttgttttggttcattcatttttaatttgttagttcgtttgctctatcattatttgataatatctatctatcttatattttttttttaaatattaatcttaaaaaaaattagaatttaacttagtatgcttaaatataaaatatagtgtttcaatatactacctaattgaaaatagtatatttatatttttgatatcctttccttccaaaaataccattgatcaccccgacccagaacccctgccgtcgaacacacagacccaaattcccaactgtaagcccccgctgttgccttctctcacagcttctctcattttttgtatttttttcttctggttttttatttttttgcaatatttattgatatttagcgatgtatttgcaatgataaactaaatctgagattatggataaagtttagcgatgattagtaatatttggcgatgttttgcgtatttagatgtttcataatgtatttgtgatatatgagactaaaaaatacacatcacattgctaaacatcgctaatcatcgtgaaaacttgagtgtgatttaacgacatttaacgatattaattgtgaattagagacattttgtgataatcgcgacattgtcaaaagttagaaaaaaaaaaagcacaaaaaacgaacaggttgagaactctagcaatgagtagggattttggggtgattagtctcatgaattttggggctttgggtggagataacaagacttaaagtgaaagaatgagagagttagagagagggatttttttgaaatgcaagggtatttttaggagaaaaatatattaaaattataagtatcttatttctaatggagtggtatattaaaccaattttcttcttatcttttactttatcaaaaaatttatatatgttttactttggaccaaaatatttctttcgcactgcacataagtgtagtgtaatttgtgattaacgctaaaaaaaattaattaagtggtttgcaccatgctctcctctattagtaagaatctccgaaaagctaaaaataaaattgcagaagctaataaaaaaccgtagacatatagattatataaattaggataaatattattttagactctgtgttttgtaaaaattataaattggaccttctatttgttaaatgaaaaaatagattctgtattttctaa

SEQ ID NO: 390843 - DNA, 1529 bp, Cannabis indica
atatatatatatttgtcgacagacctggctagccgcaatcctgagcagagctctcctaactcgagaatccatggcttcagaaaccttcatttggatcctcatcagctcaccaacagttaatgccttcttcgacttcccctgacccgaaccaggactcgaaccagaaacaccaggactcttcttagagccattggagctaggtgatttaagaccaaacgccttcttaaccttactagcagcggcagaagtgagagaccgctgtaaagctggagagttcggcgagttgctgtgttgactcggcgaatcggaattagactgattcggaacgaaagtaagaggtttaccggaagaagtacggcaagcggcgacaaagatctcgtaagctgtgagtcgaaggtcggaatcggtgagttgaaccgattccgaaaggtctccgagcggcgaagggagatcggccaccactaaattcttggtgacggtaatggagggtttagtgaaggagattgatgatgatgaagaagcttctctcttggaatggcccagtgagaggtctctgaagagatgagccattgttgagaaagagagagaaaaacacacagagagtagtcagacacgatggactatcgctatatacagtaacacacacctatagatataaaaaatatatataataaagaaagaaagagaaaggtaatggtagaaaatttgttgtgttctgtaattttcttattttattttttttcttgagaaacaaacagaaaaagagagaggaaaatactgagatcagtgtttctttttcttatttatttttattattaaagtattttgagttgttctgattttctcagcgccgaaatttcttttttttttttttttaattttttttttaaaatttacacatcagattaacaaagcaataattcataatcagcggtgccgccttctcgaaccaggataacctatcgtctatcgaagggcgggcatacttttaccaaaccatgcgccacatgcgataaaattatccccgaaaaatttaaacaataaaactatgacatccttaaatagcacacccaactcattaaagaacactcttcttttgttgatagttgttttgaatttgaattacatttaaccaaattataatatctagtaaaataataataataataatggagcaaaaaataataataataatattttttttttaaaaaaaaaaatgcatcttattcatgattggacaaatcatctattaaaataacttgaaaagtagtagggacaagcctcccaccatagctacaacctggggaagaacaagcggtagtcgccaaataattggctgtcttgttcgcagatcgtttgacaaaaacacaaaaaatattgttaagattagacattaaagtacaacaatcagaaatagctaaaccaaataataaagtagctgaactatacagtgttgggttttatgccctaaataaaactcatttcaatataatcagatttactcattaatatagatcataaataacatt

SEQ ID NO: 390844 - DNA, 681 bp, Cannabis indica
cctcctccttcttcttcttctaagaaaattataacatgtccgtaatctcatttcatatcaggtaagaatatatcgaaacaaatcaaagtataattttaaaaactgggttttgtttcctaccttcaaatcagcaccagcacaaaacacattcggaaccaaactacgaatcaaaaccacattagcagaggaatccttgctcacagcttcaagacactctttaaaccctctaagaaaatctttcccaatcgcatttcttctctcagatctgttcaaagtcaactcaatgattcctcccatccaattcaaacacatttaagcttttcaactcaaacccataattaaattcaaccgaatacatctaagcttttgaacttgatcctttctcggttcaaaatccaagaaaaatgaacacagcaatatcacaacctctcggttcacacaacccagaaaactcacatctcaaactcaagaacacaagcacacgaacccgaaaaattctagctcacaaaacaaaacccagaaaatttcttgcaaactctcggacaaacttatcacaccaaacccaagaccaagaacagcaatattcaaacacaatatcagagaaatcaccgagaaaagaaatatgactttttaagtaattactaactccagctccccggacttgtacatcgtcacgcaaat

SEQ ID NO: 390845 - DNA, 2047 bp, Cannabis indica
ttaatagtaaatacaggaagaattaataaggtacgaaattacacttggtaaatttcaaaatttgctcattaggagcttggttacacaggcccatggtccctaaactttttaagataatatcatcttgtaggctcaactaattgatttaataaattaattaaaattcaaaaaagactatgtcttatttgataattttcaccaagtttgggcaattttgagaagaaaagaaaaatagggatttgtgtgttaattagtactatttgtaggtctaattaataaatatatttgaattgtattttatttgataattattaaaataaaattagtatttaaataattagataagataagtgatgaaattagaaaagacacttcagtttcatttgttgatataaagtggcaaaaatctaactctaaagcccatgtgtaattttgggcctaaaagaaagattcccaagtctttatttaagcccatctcatctaaatctaaccctatgtgaatgcctataaaaaaaaagtgacgagaagagaaaatctatccctaattctatgtcatataactctattctcttctttcttagtctatttcgaattcattatgaaaactctctctcaaaattgttccaagggtgtttttagtatcagctcatactattcaagttgatactcaagcctttgtggaagactgatgaacacaatcgaaggaggagaagattcaggttcattcttggtaatactctgcgacaaaaagaaaaaaaagtttagagaactgaacggaaggagataatatattccgctgcaactactgtaaggatttcttaatccctttatgtgttcattttaattatttttggaatccatattagaatgttagattagtcttaatttaacatacataaatagtaaataacattctggtaaaacaagctttccaacaatcactcactgtcttgctgatggtggaactcgaggaggcagatgggtgctcggatcaggatcttccactattggattgctcctattaataggattttacacattaagatttgtagccatcagatctttcagtggtttgggacctcctggtagttatagccatctttgaagatgatcaaattagctataaacagtttttttgctctcaatgaaagtatgatcaaaatgtgaaacgatcacttttagccaacgatgctaagtcaattaaagcaataagaataaatgctaattattaaatgaaattaaacaataagaatacaaagatttatagagatttgaccctgtgatagtaataatagcctactctccttttacttgtattacttgtgagaaaataagcaattgagtttcttgattttttttgaaagcttacaattttacagcataagagctctcttgaagaataaaattcaaatccttaaataatggaatgactccaccatttgtagggaagaaatacatcaattatgttttacaaataaatgagaaataagaagaaaaactaggaatgtttcctattttacaacaataacatgtgaaaattattaaaataggaactcaattggtaaaataaataagaaaaatatctccaaatatatttcagccgcatttactctggctggtgtatgtggacttgctacgagattgacgctggtcggacggtgtcatttacgtactctttctagatgttccaacttattcttcaaataagttttttgagaaataacccaccctgaacgacatgtcgaagatagtatctgtgacagtcagtagtcccgtgatccgtaaagagaaatatcgggtaagctgtgcaatcccacatcgcctggagaaggtcaagtgtgttgattctgagactgtgtaggtatgggactacacagttgaggagagcttaactggattgattggtactatcaacaaggagcgtcttgttttctggtagcccatcacgaaagaactctacagttaagcgtgcttaacctggagtaatttcaggatgtgggtgacctccacagtattaacctggggtaatttcaggatggatgacctc

SEQ ID NO: 390846 - DNA, 662 bp, Cannabis indica
tttggacttgtgttatttccttgatctaaatttagtttcaacaaggtaacttggatagttttatagatttaagagcaccccaaagtatttttactctatcttttaaaatactcttattaaaacttttaaaatactcttattaaaactttaatttttttattttacgtcacacatttatattacacgatatatatacttctttatatttttctctatatcatttaaatattatatctttaaatatattttattaataaaataaaaaattaattaaaaaaaatataaaatatatttatctcttcgagttatatgtaaatttgggatgggatataataccttaattttaaaagagctaaattttaaatttttaactattttattttacctagtattatcttgttgtgagtgctctaacactatgatttggctttttgtgtcattttctttttagttgctctttttattcgacgtcctttacttttttgaattatagaaaaaatgttgtcattctagtgttttttcaattcaataataattaatgaatttaatattttgaattttactctaaaatgtttgccatgtagttgtaggcttgtaccaaaactcataatatataacttgacaataataatacaaaagtaataatacattattattattat

SEQ ID NO: 390847 - DNA, 1790 bp, Cannabis indica
ttacaaaaaaaagcaacattgttacaaaaatttacgacaatattatattctatggaaaaaaatatatataatataagagctctcttagttgttttccacatctcattaaacatttactcttttcaaataattactaccaataaattaatcccatccacttgtgcttattaagcaaaattacatgaaaaatcaaataatgacaaaagaagacataatatttcaagctttggcttttctctattatcttcaagcagcatcttccatggcatcagacatttttggtcatgatcctttgaagaagaaagacttctacacagtgtagtgttgctgaatagtatcaatgtcaagccccttcaacttcaccacagactcaacgtgacccttcaatgtgtggagctccctcagcctaaaagatcagaatccaagtttaaatgttaatttgataacaaagtatcaaagtaacatattgaacaatttgttaaagccatgaaagatgatgttatttagattttacctagcaacttcagcacgccttttggcttgctcagctatctcagaaagttcatggttatcgctgttgtaaagagctaccggtggctgaagaccatgaattgttcgttgagccaatgcccactgagcttccctttcacctcttccataatccttctttgttgtgaaagcagtcttaattggttttcaaacaaaagaacgtaacaaaatgttagtgagaaggaagaatgagtgattatattggtggatatatatattttgtgaagagagagttaagaaagaaaaccttgttttgaagcaaggtattccaggctttgccactcaatgcatatcgaatcatgaacttgagaacatcaagagggaagtaagtgactatgctgaaaacccagatggcaccagcccatccccacccaatgccttggattctagcaaaaccccagtttgaatacacagcaattaaagtggcaacctgtttggataagcagagaaactcactaagtggggcttgttatttacactagaaatgaaaagagaaaagatataaaacaacaaaccagttgtgctgcaatgaaggcaccaagaagcaaaaatccagggcgttcaacaaaggaccagctccttgaacgggtcacaaagataagtgcttgactaataatgctcacttgaaggtagagagctgagttaagctcagccagggtcgtaagaggcttcacatggaaggtttcctgcaaattgttggagtttagagtttgttctaagagataaacattgaatagttggtgaaagttttgaactagtttgatattacatacagagaaaaattctgtttcatgtgcaagccagaagaagactactgtcatgacagccatgtaggttccaagaacaacaccagtagcgaaaatctccttcagtttccatgagtcaggcagaggagatggcttcaccctgtcctttgaaatggtcatgattgtcccatcatttaagatggcaatgatcaaaaccatgaaaggtgagaaatcaaattcccaaatgagagcaaccaacaagaatcccaacacaatacggattgtgatggaaactgcgtaaattgtgtagttcttcattctttggaagatggctcgacttgtcaacacagcactgatgatgacactcaatcctggctctgtcaaaacaatgtcagatgcacttctagctgcatcagttgcatcagcaacagctataccaatgtctgccttcttaagtgccggagcatcattgacaccatctccagtcataccaca

SEQ ID NO: 390848 - DNA, 717 bp, Cannabis indica
agcaacaatcagtttaagtagttgaaagatgtgaccaaaagtccactttttttaagtcactaaggctaatttagtggtgagggagaaatggacaaaaaaaaaaaggcatgggttggaatctaaaatttttaagctattaattgattataataccattatactacactaaaaaaaaaagtccaatttttttagtaaggacaccaatacaaagttaagattttcatccattctaatttgaaatttgcatattgattagaaggtgcatattagtttagatagattaactatttcatggaacaccttgatcagctcctagaattcgtaaagaggcaaagatataactaaacattaaattaataaagtataacaataacatgattgtaattagatcaaattatatatggaaaatggtgtttttataaaaataattaaaaaaaaccaaattattggttttatccatttcaattttcttgtgatttttttttttttcataactttaacttgtattattatgttaatggtactagtatatgtagttaatccattacatatagaattccttataaagaaaggcttaaactaataattaagccgactcttatgtacattgacgaactcactagtactaatgtgagcgctatagtttcactaacaaaaatattgtcttttaaaaaattaaatgttaattttttaatatgataattatagaccaaaata

SEQ ID NO: 390849 - DNA, 673 bp, Cannabis indica
gaaagattgcgcaagattgttgcggctgaggagtcctcaacaacctcaacctcaacccctgcaggtgcctcctccatcgaaaatgttcgaccacctgtaaagccttcaaatgagtgaataatctgctgattttggtcagtttatcctttccctgaaaaagttgcttggggatttcaaaacaagggtcctcacttctcgataatttattattattttttttttaagaatgaatagatttgagagtaaagcccatcgattttgtcagacttggtgggttaattttgaaccatatataaatgactgttttaccatatatagatggtggacttgtacaagcttataatgacggttgagctcatggtccttgtgtaatttacttccagtgtaatctgtttaaaccttataataatctcgatcaaaagtagtctcaattctcatgcttcagcctttctggtttttccattcctacaatataagtagggaccaaaaaaagcataatggcgtatagcatcatcaaatataaagataactaaaacaatattcttgcacgatttacaattctgtagtgtgacatagattgcttagttattttacatttgagtagggctgtttatcagatccaatccgcatatttttagtcaaaaaacatccaatccgcacttagtgcggattt

SEQ ID NO: 390850 - DNA, 1254 bp, Cannabis indica
aaagggttttcttgaaaatcatgctaaattaaaattttgataaaactttaaacttttattatcataaacatatatttacatataatcgggatcccaatctaaacttttacaatcattttcaaaataatttattacaaacatattgcacatcgactacaaaatacagcccaagtcgtcccgagaccgaacactctaggtcacaccgtctcgacatgtacaatcatcgcatgagcttggaactcactgctcttcaacttttacctgtctacttacacatgaaagtaataactatgagtcaatagactcaataagaaaagcacatagcatacaatatattactgacttgtatctaggcacccatgcacctatccacaaggcttatcagattagtaagaacgttctttactaaggtacgaccactatacaacatgcactttgtaccgctactgtactagtgttggtagggtttgcatcgtattttgagtaccactaagtgttgcaccacatacattctatacctattcgtaccagtgttggcaacaccatactatactcattgaacatcatacactataccactattgtactagtgttggtagtataccaatcacaaattgcatgcatatattacacatacacatattcatatataaacacgttctatgctattcttacctcgttttcgaattcaagtgtgttggccagcctgaacggaaaatcacacgctggatggatgccttatgtcacattcacgcaaatgggtaaacaacttgctaaagcccgatctgggaacctaaattcacaactacaagttttgctatcgataactaacatgataataccttaattatcaaggaaacactaaaactaaggccctaaaataacacaaattgataaactgagtttttctagggtcttgcctatgaaaaggttaaccggttctacctatagaaccggttatccgattcataccagaattcctaaaccagttcgaatctcacttaattcttcccaaaattttctcaaactttgcagaacacccgtaccaacatccaacaacagtttccaagcattaataataagaaaaacatacaaaatctgaaagtgccactaatgaattctcctctcaaactaagaaaaccagcaacaagcaacttaaatccactcaaaacaacctcaaaaatcacacaagaacaaagcctaacctaaacagcctccaattctcaaaatttgcatgacaaaaccaaacttaaa

SEQ ID NO: 390851 - DNA, 1412 bp, Cannabis indica
gattaaagaagatgagaaattaataagatacattgatatctaagagagaaatgagaacaaattatagtaagtgttggagtgcttgattttagtcacttttcattaatgtacatattatggtgttggaaagattaaaatagtatcactcatcgagtacatgtagtccatagttgttgatttcttttccaactttctttttttgttcttatatagagttgtatccataagactttttataggcatgccaaatatatagaaaataaatatttttatattcgagctaataaaaaatgaaaagctttatatatatatatatagatttgttgtagatagatctacacttaaataacaattatctaaaaaaaaaaaataattaatattgtattataataattattaacgcagatttcgtcaaccaatatataattttacgtaataattactacaaatataataataataatagaacacaaatatttacgttcattttataattaaaatctatatgctctggttcaaaaaaaaaatctatatgctcttattattagggatatttatatatttatttgaatacagagtatagatctcagtaataacaaataatagaattctctctattttatcatctattttctcatggatttgcccctatttataagtatacatgttggctgttatttttattggaatcgattcatttacaattactcatgaaacgtggacattcctcaaggttgtttctcgctgagaatgagttatccttcttatccatctttagtggaaaaaatgttgtgtaaacatatttcttctcgcaatattctcatattgtagtaatgatgtgagatgactattaccttgcgtagaaagcgagatggtttgagtgtagttattttcacgctgctcgtgtatgtcgatcgatgagttacaagcttcttaatatctcatcttgtaatctttttatcttatactctgttcatctcgagatggacatattacctcgtcaattgtattagtttaatagttattattcttatctcacatgtgattaggtagtcagcgagtttgaacatttttatcaactctagataattggattgaattatttaaatcgcatttaataatgcaatttaattgcatttcttcaatctctgatgaatagccgaattttaggataacaattgcccctaaaaagtacttgtgctttttaattaaaaagaactttttaaatgctcttaggggtataatcgtatttaacatgttttgaaaaattgcatgctttgagttttggcagttcagaattttgagacacatcattacccttttaatgttctgatcgttccattctcactagttcttacccgttagatcagatttcctttgatcgaacagtgatcacttattaggtataaaat

SEQ ID NO: 390852 - DNA, 510 bp, Cannabis indica
attaataattgttcaaaaaaaaattgagagaaacggctcaattatccttattaatgacaattatgaaattatttcaaaaaaataaattatggaattaggtcccctaagaaaataatggaattagacagggaccggggtaaggcgaagattacggggattgaataattagaaagggcttcaatactaaaagaaaaataacagctaaaagaaagaaaaaagcatttatatttatttttttattttttaaaaattaaaatactaaaagcatttatatttattacaaacataattattatgtgtattcatataatataataatactacgtgtaagccttgactccttttgtagctaaataaaataataaaataatatataatttataatataaatatttaaatttaatttttaaatatataaatattaaaatttaatttttaacgttataaaaaatataatataaatattattattaaaaaaattaaatttaaatatttataccataaattaat

SEQ ID NO: 390853 - DNA, 1329 bp, Cannabis indica
acatttattttttccgagtagtgagtaagatcttgctagatgtgtctcctaaggtaggagtgcatgttttagaagatcccgaggttgtggtggtaccgtatatcatcaaggaccaccaaacatttcaactcttcagaagtcatgaaggttcttggtaattcagcatcagttaactttttatgtgggagaagtgaaacccaagcatgacaatcaaagtgttccctaacatgaggatgctgatagacctttcttgcaagagtagccttccccaaacctcccgttcctcgtaacgaaataaccttatatttacgagagttctctttttcagtcaaaaaggctaccaactcttcaatgtcattgccaagtccaacaacatggttgtcttcaactttttcagtccaagggctaccaactcttcaatgaagcttcttcaatgtcaatcaaccttaaatttttacttgccaaatagaaagttgaaaaataattattagtatttggtaataatttttgtaggacgatatttgtacttagacactttattacttggaacaatacgtatagttataaattttcattatcatttatattacttcaatgtctgcttaagtttaatctaacaattaattcgatatttataaattattttgatcaaaagttcaactgttatcttaattaaataatggtagtttgtgattgtagcaatgaaatgccatgtggtataacttgagaatctttgtagaaaatacatatttaaataatggtttctaagataaattatgataattttgcatgtggtatgaataaattattgtcgttgtatcattgattttaaatcatatatatagaaagagatggacaatttgaatctgaatgttgcaacacatataagaatcaatctcaacaaatgtatacaaaaaagaaaaataaaaataattaatcacaactaggatataccataacctagctagagcttggttctttttttttttttttgaaaaaagaaaacactaagatattgaggctacattaacatcaacatggttagtatagcatatgttaagcactcacatcaaatactataaaataaagaagattttaaaatattttaagataaatactattttagactttatatcttacaaaattaattagttgaaaagcaataaaagtatataaattaaatatataattaatatatactagttcgcatggggcggtgtatactagtattgtactcgcactacacacaaatatgtgcaatgtggtaattcccccatctttattattttcccatttgaactgttatttctctcccagttcagatcaaat

SEQ ID NO: 390854 - DNA, 1456 bp, Cannabis indica
tacgatacgaacaatttatgttagatattacggtctaccaacaccaacttataataaattatatttatataagtgaaattcaaattaatatattaggatacgtagtatcaaataatactacttattacttttaccaaaaaaataagaaaaatatactactgacttatcaaaattataataaatgagattttaattttaaatttattatccactagctaaaaaaaaaaaaattataatatcaaaaaaattaattacaaattcattttatatatgtcgtgtttgtttggtgtcataaggtgtaactgtacctagcaacatttaaaataaaataaaaataattatattaaatattaattggtttgaaatttgaaactgtagagtacacataaaatataattgattgacataatatttcaaaagctagattttattttcaaattattattgtaaaaatttcttttaatatttatatttttcctttgaaaaaaatcctttgtataaatatattttctacatttttcacttaaaatgaattctaataaatcataattttttcatattaggacacattaacaccttcttctttcggtatagaacatggaacgttaaagaaatgaaagcgagaaaagataactgacaaataaagagcaaaaagacattcgtcaactcttttttctttcactccaattcttttgcaaataactttacatctctgttttgacaagtggtcttcactcgaagccaatcttcgagtgaagccaatattcatcctttcgatataagatattaactcaaaacaccaaagagaaatattatatatatccagaaagctaatttaattatttccaagtatctaaactcattacaactcacacattcatttcttttttcttctacaaataaattcaaattatttattagaaatttctcaatcccattgttaattcaatacgagtctgcgagtcgcacgactccaactcatcatcaaaagaaaaagattacaaagttcatagacttataaaaagtaattggctcacccttcgtttattaatatgtgacacttacatttgttgtttagaaaggctatactttaaagcatatatactatatatttgaaataatttataatatactctaccaaaaaaaaaaaaaaattattttcatgtttgtttcgataattaaaatattttttagtctatattattttacaaatacacaaaaattaataaaaaaattataaaatacagttatacgtaattttaaatattttaaagattttattattacaaaaaatattatcttttgatgtatatttttatgttgtttagattgctattttcttgttatgtaatttttgttaagaatactgtaaaacttaagttagccctaattaattcaagagaatcaaacaataaaattaaaggaatagcggaagcgtaccggagtccatagaatc

SEQ ID NO: 390855 - DNA, 1053 bp, Cannabis indica
ccaaactaatttagtacaactaactattattataacactaagtttaattatatacattctaaatttaaaactaagtgcataatgtgttacatatattttaaattcaaaataaagacgagaaataaaagataatatttgtaagcttctcaatattttaattgatttatttcgtatttgattaattaacaaattattcattttttttcttaaaaaaattattcaattcttgttgatatatattatttagaaagaaaaagaaaacacttaatttgacagtgaaaaggaatcttgggccgagtggaacatgcaatgagatatatcaatgattaaattaagaaaattttatattattgaaatataatgtcctgtactactactactactaataataataataattagggatttttgtgacgaaatccttttaatatttataattattatacatatgattttaataaaaaaaataataataaaaatattttattttttttttattaatatcatatgtataacaattataaatgttatgaaaattttgtcgcaaatattcctaataataataataataataataaagtatataaaacatatatattgtataaattgttatgattgagtaatttattagtttgggaaggaaacatgtaaacatcatattccatattcatcatcaactactttttttaacctcttaaccaccctttttttaattataatttattttaagtcattgggtcttaactatattataaatattgattaaaaaatagcaacaaaattgttaggaaaatgtatttatttaggaaaatataaaaggtagagggtttcttctattaaataaaattatcattttcatttattttaagagcatatttaacaaatccatgaattgcaatattaataacatacgaaaaactaaataataaaacatttaaggtgattctacaatgcacagtcttaaaaagaatgtactgatgcattatctacttatttcggcatctagaaggattttttagttctatttttttttctatattcacgtacgttata

SEQ ID NO: 390856 - DNA, 1535 bp, Cannabis indica
caccatgatcatgaagaagagtctgaaggtaacaactctctctctgaaattgaacatactgctgctggtttatctccaataactgacagtgcagctgagctgccacattctgactctgaaagttcaccagcacaattaactaagctcgtacctacgcatcctatggtaactcgaagcaaggcagggatattcaagcctaaggtgtaccttgggcagtcgaaatggaccaacattagtgaagaacctgcctctgttgaagctgcacttgcccatctaggatggaacaatgctatggggagtgaaattgtagccttgaaaagaaacaagacttggacgttagtgcgacaaagggctggtatgtatatcatatcgaacaagtgggtctataagattaaaagaaatgcagatggaagtctccaacggcttaaagcacgccttgtagccaaatgattcacacaaaggccaggaatagactttggagagacgtttagtcccgtgattaaagcctctactgtcaggattgttctcactctggctgttgcaaaatcatgggatgtaaggcaactagatattaataatgccttcctaaatggaaccttggaagaagatgtgttcatgtaccaaccaaagggctttgaagatagtgagaaaccagatttcgtatgcaagcttcataagtcattgtacggtcttcgacaatcaccaagagcttggtttgataagctaaagactactcttctcagctgaaactttgtaaattcaagagctgattgttccctattcttctacaaaacacagaagctgatcattatagttctcatctatgtagacgacattatagtcacgggaaatgatgcagaaatgctacagcagttcatttttaaattaaacaagatgttctccttgaaagatctcggtccactccactatttctttctcaaattttgtcgtcccctttcccgtgaattctaccgctatttataggtacataggctggcagttattctttttgggattggttcattcataattgttcatgaaatgtggacaatctctacgtttcatttaatcacacatgggataatatctaataactactcaactgttctttattttaatcctctagatgattattgttgacttggaaggttatgcctcgtcagacatgagttctccttcttggacatcttaatagaaatgaatgctaagtgttgaagaataactcatcacgttatatcccttcattaatattagcaatgtgaggtgatcttcgtgctatgtgtgacgcgaggcggttgagtgttgccacttttaatctacccgagtaagtgagtatcctcttcatgtatatttatctgagtgtatcccacggtaaatatatgtctcgccaatacttgtttaatagtcattatccttgtctcgcgtaaggccacacagggtcggcccaagcattttgggggcctcgtgcaaaattttaaaattgggtttttttttttaaaaaaaaaaacgtgcacattaaaactacaattttatta

SEQ ID NO: 390857 - DNA, 950 bp, Cannabis indica
  modified_base (257)..(257): a, c, t, g, unknown or other
attggatctgagattgatttctatcattgacaatctaaatacgatggaggtgggagaaggagaaggtgagtcaggtggaacgatcactgaatgttttttttttgttaaccattgatcgatgatcggatccatggtgggtgggaagtcgtaaatattttagtatggtggtggtgggtggtggccattgacgatatgggcgagtgagcatgaacaaattagaaagaagaaaaggaaaaatagaaaaatagaaaaaaaanaaaaaaaaaaaaaaaagtaagaaaaataaacaaataattttatattattaaaaaaattttagtttttaaatcatttattttatttttttaatttaaatcattttaaattaaaaatataatttaaaccaataatttgttgacacgtggtattttttttgaacaattctaataaaaaaagactaatagacttacgaaaatagtgagtttggagattattacttctaattttttaagttgagaacttatttgtattaaattgaagtttttgagaatttatgccgtaacttttcttttaagaaaataagtcatttacttcaaataaagtatattcttttaattgtttagagtgtaaattggagattatttttttatcatctagatcagttagtgttgcattttattttatttttttttaataatcttaattttagtcatctggtttttaatttttttgttttctttcaacctatttttttggggggaaataaaactagagagaaaggattgttcttgtgaaaattatataattagattggtttaagaaaataaattataaaatgaacaagattaaatttaatttttgagacatggtgaatttcattcgaatttttctgaaaagttcaaagaaatgtatgtggatgaatgaaaaaaagagagaaaaaaaaagagagaaaatatattattttattaatt

SEQ ID NO: 390858 - DNA, 774 bp, Cannabis indica
gtgactgaaagtaagatttttggtagtgtgattttttttaggggctcagtagggtaggccctaggtgcgacaaatctatcttaagtgataaccttttagttacaatataaattttttgtgactaaacataatttttagtcacaacaaaaagttacttaattatgactaaaatatatatttagatacaagttgtcactaatttaattttaatcacaacaagtattgtgacaaaaaatattaagtcacaataaattgtaatttttgtgattaatacctataaccacattattttttagttataatataagtataatgatttataattagtcacaatttttttttatttttaaaaattaattttttttaagtgtgggcctactccgccacattaccttcaaggtcgggcctcattcaatattttcatacatacactccacgtataaatattaaaataaggctagttaggatttttaccctcactctgacatgtacccaatcatgccctctaaacttttctagtcgttaaaaattttccctgaactattgagattgttagatttaaggtcttttgtctaatttcattcaattttaatatttcagtgattatttatgtactaatccatgctcctcagattttgatatctaccaaatcatgtccctcgaactttgacatgtactaaatcatgtcccctgaacttttattcatgttaggctttttttactaaaattagataaaaatccttaaattcaacaatctcaatagttcaggggcat

SEQ ID NO: 390859 - DNA, 1479 bp, Cannabis indica
ttattatttgtttttcttttattgtttttttatttgatttaaaaataactagtgatattcattactttttgttaaagataagaaatataaaaattgaattcatattagttgttttgaaatttgataaacaaaagttgttactgaatatattttttttattttataaattaaaaaataaaaataattgtagattttgtttttaaattaaaaacaaatagttataaaacatacttgaattttcctgggtccataaaataagttcttaattaattgtgttacctttgatgtgtttgaaaagtcggagtataacttctataaaattgttaataataatagtatttatacgagaaatgataaactatcactagtcagtgatgcttaagattttataaagtttaatatcgttattagtgtatttaagtattgactcttatataatttaatataatatttttgtatagtgtatagttgaccaatcagaatgtaccgcctttagataatgctaagtactactaatgcttaattgcaatttacttattattatttataaatataatgaattaagttgcatgactcttactcattttctcttaaggaaagtgacaattaattaatttataatttgtagtggacttcgtgaattttatgcatggattaagaaattaataagaaatatagactgcatagtgttgttattaatgaatattaattattcatcagcttggaggatcttaatgtaattaattaattaatgaataaattatgagaaattgccacttataagcagcaaaaggtcatatgaccttttttttcaggttacaataaaaaattgtttggaatacaactattttaaataacctcttgattttttttctaatgctcttctagccataatatgagctaacatattagtctctgcttcaattcttaaaaactacattcacatcgatcagtttaggtgaatttgttattctttcttgttaaattaatcacactactacaaaattaggctttagagacggtttttaagtgctttcagcgtcggtattggtgaaatttgctactgccgttgctccgggtgacgctaaaaggttaaaaacaaccgacgctataggacccctatggcgtcggttatttcataataattgatgccataggggtcctatggcgtcggttgtttcatataaccgacgccataggacacatatggagtcggttattatgaaataaccgactccatagggtcttcttatggtttttttttttcagctttgcaattttgtattttagcataatttatacatattattttattattaatataattaaattaagtataaattatgtataataaccataaatacaaattaaattaaaaagttgaataaatacacatctacattactctaagtgtttgtatattagctatctttctattaatattttatattatgtgtttgtattttttttatagcttac

SEQ ID NO: 390860 - DNA, 1577 bp, Cannabis indica
atatgcttggaccatccactatcaaaataccacaaattagcagtatgagatttatgacaagcaaaagtaactagacatctagaatcatttttctttacccaaacctttttggaagaacttctttttctcatactattttgattgaaataatttgatttaaagaaattattcatggtaaagcacttaggtcgaatgtgacctttcacaccacaaagtgacaaactggtatgaattttggtgtcttaccaaaagattggaaagtcttacttgaggctagagagactgtttcgccaagaactttttttgtacctgcagaaacttgcaacgaagggtcagagcagataaatgatgaacttttagctttgacaaattgattttacacaaatgattgagattcagcaaaccccaacatagcatgacttctttgtctagaattttggacctccttaaaaattaaagaacctggattgagcattttcacattcttctttagactcaaaatcttttaaaagcctagcattttcttgattttcaaactcaagatcattttcaaaatttttgcatttggattcaagatctttatttttcttagtcaaacttatgatagtctttgacatcaacttgtttttagaacaaacctccaaccacttaccatacattaacttgtaggattctgccaaagaatctttgtccaatttagattcattagattcatattctataacatcgttagaacctttattatttgaaacagtgttgtttaggcaaacaaggtttctattttttttgtaaaagatgagacatgctagaaagaacagatgttaaagcaactaattcatcatcactactttcataattattgtcactccaagtagcattcaaactatttttattctttttcaaattattagaacattcagattgtatgtgaccaaaaccatcatattctctacattgaacaactcttttattgttatgcacaaatttttttgaagatgagttactatatgaaaccttagaaaaattctttttgtatcgcatttttttcatgtattggaaaaaatttcttattattatggccaaatcattatcttcctcatcatcaattctaatattctccgaacttttgaaagcaattgatttttctttttttaacttattgggtttctccttttgtcggatttgttgattaagctcaaatgttcgaagtgatcccatcaactcttcaactttcatcgtgttaaaatctttagcctcctccatagccaaaagtttcacattaaacctgtcaggaagaactcgaacaattttcctaactaaaacagattcatcaagtttttcacccaaggaaaaaaattcattagaaatgtcagataatctttcataaaattcagagagagtttcagaattagacattctaagatcatcaaatctactttgtaacataatgagacgagaacgcttgacatctgaagttccttcaaattgagtttcaaggattagccaagcttctcgagtagattcacatgaggatattaatttaataaaaccttcaccaacaccattaaaaatagcat

SEQ ID NO: 390861 - DNA, 785 bp, Cannabis indica
ttttcaggggtagtagataggagattttacttgaatgtgctcgcttacgagtgttgggaatatcgtctaataaaccctatagggatttgatgagctccccgatcaacattcactggtacctcctctcaagactctatttccttcctccatgcggatgtatttctccaccctctcgtagaagtcatctaagtcatccaaccctcttttcaacatatttttccataacctgcccctcgagtgtacccgtgcggctatggagaacttgatcttatccttggacattttccctactttggtaacctcagtgttgaagcgctggatgtagcttcgtaaactttcttctctcccttgcttcacattggtgatacttgtgacaagcacaatattaccacatgcagtctgatgttgctagaggaattcatctgaaagttgcttccaagatatgattgtctctaattttaatcgtgtgaacaatttatacgcggctccttttgatgtgatcacaaaacattgataccttgcctgacatgatacctttttcatcttcattagctcattaaatgtatgtcatgataggtcatgtgtctataactaatacgtactcatagttcaccaagatatttacacattacatttcattagctcattaaaatatttttccatcatttttctttattattttccttaatcatttttccttactaaaatctaacacattcaaatataactaatacgtactcatagttcaccaagatatttacacattactttaataaggtgataat

SEQ ID NO: 390862 - DNA, 1103 bp, Cannabis indica
acctgttgcaatcaaaaataataaaaggtggaccattttaaaaaagcaataataataataaaatatggtgtagggtaataagccaacccaatttttagatgagtcatttttgacaataactcctttcttaattagagaagttttgattttacattctaatatttaaaaaaaattaatttttaatatttttcaagtaaaattcacattattttctcataatatcaataattattttaattttattttcatatttttttcaaaaatcatctatacttttttttctaataaaagtttaaataatttttattttaacatttttattttaatatttttaaatatattttatttttattttatagatttttttttctaagaatatgagatagtgattttcttattcaattatcagaaacacatactaaatctgatttggaaaagattatattcacaatcactacaaaattttttacttttagtcacaacagaatttgtgactaattataaaacatcctttttatgttgtgactaaaatgtccgtgtctaaatatattagtcacaaaaattacaatttgttgtgattaaatgtgtttttagtcgcaatacttattatgactaacactaaattagtgacaacttgtaactaaatactatattttagtcatatgtaacattttgtagtgactaaaagtcatatttagtcaaaaaaaaaatatgttgtgactaaaaaattgtcgctaaaagtaactattttttgtaataaatgtagtccatttaatctgacaggaataatataattcataataaaacactctaaaaaccagctgcaattgactcaactttaatggcatatctcagcaagttccaacaggcctcccttaagaactcaattcctgatttgagacatactgtggttgattgtgttccttggcatctcctcctcagaggcaaaataaattgaatgtagatgcaacaacacactctttgccaaacagaattagtaatgtcaatctgggctattttcgcgggccgggccgggcccccgacccgacgggccgactgtggcccgaattattcgggctcttctcgggcttctggcccggccc

SEQ ID NO: 390863 - DNA, 542 bp, Cannabis indica
tgaaagaatgaataactcaaaatttgattgggacaactcgttcgaagctcgtagcataacttatttaaaacttacatccactaaaaccttatcaataaaactaaagtgtaagaatttttaaatttgacaaaaaacactacaccaaaaaattacatgcctattaatatttatatcaaaactacataaaggccaactcgaatgtagaaccaccttttgttttttaagtcccatgtggtaggtaatatttcataaaaatctctacatgcaaaattaaaaattttatttggcaagtgcaatttctaaaaacatttctcccaataagaaaagatttctctagggagaaccatctacatgtatgcatcgaaatatgaactccttttttatggaaaatttactttttcatgcatgttttaagataaaattggttaaccatttcaaaatttaaagtttcttcaatagaaagataaaaataaagtttaaatgttttaaatttaaatattaacgatttcaaaaaaatacatatatatatatatattaacttt

SEQ ID NO: 390864 - DNA, 1240 bp, Cannabis indica
tttttttaaaaaaaaacgattttcatcacccacaacaattagatgttgttggtgatactctcactattagtgaggatttctcagcgttagtaatagtgccgttagtgatgctattaattcttgtggttagacggctaattattttgttcgtttttctaaatttaatcctgatcgtatctctaataggagagacgtcccaattaaactgcatactattattttcgttgattgctatcatgattttttttaaaaaaaaacacttccattatggaaatattaattacacaattttttaaggggaattgccccatatattatctttttaatttttttttttaaatttacggtttgagttgctccgatagtttctatgtgggttgttataatgattttgattgcgatttaagttgttctgttagtttctatgtgtgggttgctgtataggattctgtgtgaaattatgtaaaaatgtaaaaaaaactattttaaagtgtaaaaataaaaaaaatcctatttttaatttattctcttatctaatttcggccaaaataataaataaataaaatagcttagagttatacagaaatgatatcattatcccacaattaactaaaaattaaaattaaatatttgatattaacaattgaaaataaaaggaggggagaaaggacacttttggttaattagacaaataattaaggataatttacatctacaaacactattttttttttctattttattattaatagtaatttagtctatagcatttacaattttaacgtgatttcataccctttttaaaactattgcactgttctatattttatagctaaacttatgtttctttctttattttctttttctttttttatttaaatttagacttgtggtttcatacaatatactttagggtttttttatttttatttttaaataatgtgtttgtatattatataaggcggttatatatgtgcattttttttatatggtattaagatatattttcatttttgagggtgttttttgaagaaaaaaaaaatcattagagtatatatttgtatctgtattaattttgaacttttattgtgattttaattttgtatgcttaatggtttttttttcttcattttttttaagatttttttaaaatatttgttttgaatgtgtttttgatattgtatctctcagggtttctatgttatagggttgtatagtgtatactatatatatatatata

SEQ ID NO: 390865 - DNA, 1516 bp, Cannabis indica
agagatgctcttatatataacctcgatttatttatatagattggtaataaatgttaaaatatgattagtttcttcatactctaaatgctaaagtttttaccaccattattattaatggtttttaggtcaatgtatttatttttaataacattaatttgttattataagtaaatacctcaataattaatatggaactatagtttttatttgtttacatatatgacataaaacattcatgctgtttagagtatttttaataaagatgcaaatattagtgatttattactaaaatataaaataaaatgtaaaaaatttactttagtgtgatgtgctaaaaatttatcaaaatttgtcacacagtaaaattttatattttcttcggatcgcaatgaatacattacttttatatttacttagttattatgaagaggtttgtataatataaagggttaatgtatatgaagataatgaaatattatgatataatattatggtattcagccattcaaggtagagagaaaagtaaccttttgctttaatgataaaattcagctcaaaagcatgctgaggtataggccatccatttatagaaatgttcagagtacaaagaagaaagaagagaacacttgtcactctattacagaccaatggaccacaaggataacagaaaagttcactgaggacacgattacatattgatgggaccatacaatacaatagcagagtaattaaacaataacagagtaattaacaacaaagaggatgattactgattaaccagtttcttaacaccacccctcaagcgagagggtgatagagttacaccaagcttgtctataaggaactggaaccttgaatgagacaatcctttagtaaagcaatctgcaatttggtctgatgatggcacgtactgaatgtttagctttttctgtaggactctatctcgaacaaaatggaggtcaaattcaacatgctttgttcgagcatggtaaactgggtttgttgcaagagcacttgaagtcatattatcacaccataccactgaagatgtaggcagaggaaacttaatctcattgagcaaagactcaatccaaataatctcagctgtaacatgtgcaagcgccctgtactcggactcagtgcttcaccttgagacaacagattgttttttagatgaccaggacacaagtgtgtctccaaggtacacgaagtatcctcctactgacttcctgtcatctggacaacatgcccagtcagcatcggagtacccagttatattcaggttgttgctatgttgtatgtgtaggccatgatgttgtgtccctttcagataccttaggatcctctttgcagcattgtagtgtgttgttgtgggacacttcaagaactggcttagcttatttacagcataagctatatctagtctggtgtggacaaggtactgcagccctccaattagacttctgtagtgagctggattttccagagcagtacctgttggaatttattttactag

SEQ ID NO: 390866 - DNA, 1485 bp, Cannabis indica
ttaagtacttacgtaaagagaatctccgatcatgacaatgaaagaggtagtattagatgagggtttgacactaaaccattggccatctttggtttggacctctaatccatcaacatgattctgattcaaaatagtgacaatgtttttatctgtgtgagcattcaaacccaacttggtctcattggtttgaggccccttatatttcatcagtcgaagaacgtagttggaagagtccatgtgttcctccaaatatttctcaactcccaaactctccaaaatcatccttcttatcattccatccaactcacataattgttcagaataagaatgaatagtttcactgtacaattatatatattcaaattacaaatggttaattattattaattataataatttattattgtagtaaaattgaaaatttacgtaccaaaaagttggatttccattatcgggccataaagcagtagtgaaaatttcaacattttcacgaatatgggaatggttaattgggatggtttcatacaaaggggcaactggttgttggcccacataaccatgaaacagtttctttgaaatgttttgttgtttggtttgtaaaggaagatcgaaaacctcttctattgcatcaaataaggccttttcaatgtctattggtattttatcgaactttgcctcgaaacaaccaaattcttccagtgcttcgcggacttgggtccttacggtgttccactcgggtgtacctggtttcagtacctgttcaactgaaaaatcaataataggaagcctaagaacgctttccgacgccattaattaagtatattaattagaattaatgtctttatatataaatattgttttggtttgagatttttggtactttaatttcaaattcaactagacccgtatttatagcttttttaaaaaatataattatagagaaatgcatgcatgcctagatcatggtgattaacttattattatttgtgtccttttttattttttaattttttatacgtactcaattattcattataaactataaagtattgtaaattgtaatacattatttgtaatcggagaagatataagttgtttttatatattatattctccatccctcaataaatataatatgatcatctgacaaaaaaaaatgtacgtataatatataatatgagtttttttccattttttgggctatataattacaaattaatgacgtttcttccctccttttcttgcattaattagtatagatatatttgaaaattcaaataaaagaatcaaaaatttcagaactacaataatgctaataaaaaatattaaacagctgaatgtgagtattattaaaaaaatagtaggcaagaatttgttgttttaattattattttaaactttagtttgcattacacttacaacaattaatatttttatagagtattaaatttaaataaattataaatatttaatttttactatatt

SEQ ID NO: 390867 - DNA, 710 bp, Cannabis indica
aatgcatcaaatatttgaaaagaggctccaaaagatttgaatcgatggcttagttcgtcatgagtattcatctgacacgtgtcacctcattcatgtagtacgtgggtcgggcaagtccacaaaccaaccagaaaattcgcacgcggatttgggggcaaatgttatcctgaatttattcgggtgacgtggcatgtttttttgagtgacgtattatgtcatcaagacctagatggaggaaaagttcttctaaagtgcccgcccaagatatcaacttgccaaagataataaacaaacaaggtaaaactcgtcgtacatgatagaagaagttgacttggttggagagattcagttagcacctcaggtaacccaatcaagggaaaacacgtgagatagattcattaaagttactttcccattttatgtgtaatcaaatcccaatttaagatggtttctatatatatttctcataatttaagaaagtcctttattttttagaaattttgacatcaaaaatataaaatgataactttattacctaaataccactacacggtaaactaaacatttgtatccttcatctttattttattactatttcaccacatgtacactcttcccatgcatcaatcatgtgagtggccactatcaatcaatcccactatcaatcaatcaaccatctatcatgtccctttctttttttctttcttttt

SEQ ID NO: 390868 - DNA, 1140 bp, Cannabis indica
ctctctctctctctctcaccaattgaagcttctttggttttcttgagattttggttaaaaaatttgtgtcttggagttaaatctcgtagaaattattggtaccaactgaggagcacttgaggtagttcaatttctataatttcttgttgttttaaattcataaattggattattagtatgttattgtataccttgtgtaaatgatcttaaaatgaagtttatggactggaaaactagattttttttgtgattttatcttttgatcttgaatctaaatttgggttaattgttagttgtattgatgttgtgattaatgtaatttttgccatgatttttatttggtgttcttaggagctttaaagattttgatgattgtgaattgtatgattttgagttatttcttttgaagtgtttaagcatgataatttgaagtatggatgtttaaaaacactttggtttggtacagaaatcaattactaagttttgttagattttgatatgaaatggtaaatgttctgtttttgtaaaaacttgtttcttgggcatttttgggcttttaagcccattcgccacgactagatatagggttatcgtgagaggctcgaacccagaataagggttagtccctgcccaatctggtcgcagtgagcttatatctagcagcgatgataaatggtcccagccaatatgcggcgagagtttaattttacccgttttgtttcaagcataaattttgacttcgaactccgatttggacgttctatatatcatcagaaagctcgtttcgagatatattacttggtctagggttgaattctgaattgtgaattgttgataaatatgattttggtgattaaccctattttgtgaaacccaaaaatggtgactagggataccgacgcttggtcagaattacctatagattgagatttctcaacatacactaaaaattaggtaagaaaatgaactaagcatatggagaatagcgtagtggcacaattatatgttgtttgattgctattataaatcgtgaatttggattattaccctaagtacgtactgtgataaataggcaataatatgttaagtgaataaatgagtagagttatgtgagtaaggcataactaggttagactcgat

SEQ ID NO: 390869 - DNA, 1182 bp, Cannabis indica
tattattaataataatatatattgcttatataccaaactaattaataaataaagtataaaacgtatataatgtcgtgatatgcaaatctagaaagaattttcctctaaaaagctatatatgaatcatatgtatcatttataataaaaaatatatatatacacacatacatatatatagggatcgagttaatgttataattaatatcttcttcaatatagatatcacggacctttcaattaaatgatctaattaatttgatttaaattccttctttaataataatcatatttcacaatcatattgtacgtatatatagttgtcataattatatatgtatatataccaaacttgcaagtatataaaaaaattaaataactttttaattgaatacagcccttcagaaaataacaaaagagaagtgacattgaatatatttttttaaaaagtaaaatataaaataatttgttattatttgtttgcatatactgtttttttttttttattattattattgttttacctaacttttgtttttgatctatgatttaaaaataattgactgaattgagatgacacactatagtctcgaccacttttaaaatagattaaaatgggtatctcaatacacatgtgatgatgtgaaatagcttaagaagtggtaataataaagaaacttatataaagtggctttatatatacatatgtatatatatttatatatattgatgcagttcccttattagagcatacataaacttatgggcaacaaaaatcaagcaatagaatctaacttcatttcaccttttgatcatcatatcatcgatcactactttttatatatatgtatatatgtcaatgtcactaaaagtaattttatatttaaatacgtaagaatagtatagtgacgaatgccatcactctttgttatgatgatgaatatgtaaatatatatataaaataaattaacaaaaaaaaattatgtgcaaaatacaaaacaaaacaatatattgtacctttcttatttataatttaacatacaaaagcaaatatatatatatgagaaatagtacaaaatagtgaatgaaaccatgttgtatacaataaaaatcttgttgatatatttagggtaaaaagaaagagaagcacacatatagctttcgtgtttatttggacttccattc

SEQ ID NO: 390870 - DNA, 2369 bp, Cannabis indica
tattgaaagtcttgtcatacactatacatagttttagaaaaagaggattgctattgtatacaatgctcgataatttgttaaccatattaattttttaaaagttaaattaaatagaatccaatactattacaccaataacaatataacaccgataaaaatacattttagcaattctctttaaaaataaaaaacattgaacattgttgtactttttttttaacaaaaaaacattattgtagttgtgtaattgaatttattgtgaaagacaagtagttcaaataataataggacaattagtatacaatcaatcatgtattaataaaatctcactcttctttaattattttaatataactaattacttaataagttcaaatctatctttgtactcaacgtctcttatatatcatttcaaaaaaaattaaaaaaaaaatctcttatacatattctcaattacacgcatacgtatatgcattctaatttagtatacatacatacgcgcctgcataaattataaagtaaatgtcaaactataatgactcatcatagatcgatgtgacctataactctactccagttttgaaacacctccaaaatcttttttattgattgaacaagaatatggtacaactacagtcgagattaattctctgttggattctctcaaagttttatctctcacactcttacgcaagaatcttcttcatctacagaagattcttcatacaaaattcaaactcctcgtaatagtatcttcacgtaagcataagaaaaagtgctcccaaatgagacgtacgcttcttggaagaaagaccaaagcgtacgttgaagggacttcccgaataggaaaagcaacatctggagtcgattatctgaaactcccttccagaaggaacacctagccatctgaaactcatttccaaaggaagattatatttcttgaagactgcttctgggtggacacgataaacatttaagaatgcctttctggaagacatctaacttttcataaccggaatagcttttaaagatctttttatttggaagaactataacacaaattctacctagtttcttcaaattaaaatattaacgggaatgaagaaagaatgtaaccatcatggttggtattccagatatctcagtatactaacacttaagattgatcaagttcaagaaatgcttgaacttgtaaactgttaagaccttaatcgcaacatcagtagaattatcttctgatctaaccttctctgattcaaccaatccctcctctgtcttcttctaatccaatagagtcttatgtctatatgtttactcttttcatgttaaactagatatattcttacaaagattaatggatgaatgactatccgagtacaatgtcactccactttttatttgtttcaattcaaacagaattttttaaagccataataattccttgaatgcttctgtagtagtcataaattctacttccatagtagaaaggacaaatacagactgtaattgggccttccagcatattataatatcttaaatttagaaataaattagcaatcttaattagcttaattaagaataaatgtaggatgattataatataatcaattttatgatataatttgagaatatttgaaattaagacctcatttgtgtggtaagggtattttcgtaattttgacatgaaaggggtaaaatgataattttgatatattttgataatatactacattattatgtagtatgttcactttattatgttacatgtgaattttgataagttagcacagtatagtcacaatcgagtattttggcttgaaccgagtccgggtctaaaatttatgagttatgtggttagggtaatattatgaaacatctaagagattataagtatatgtgtgatgtaaaatgattgaattacccttgattactaaatatgttgatttatagccctaagggcaaaatagtcttttgaccaaattttagtaaaatcaagttatatgagtttaatgagataaagaccattttttctgtttttggaaaccccaccacccattttcctctcttttcctctttgttgaagtttctttgattttgtgaaaaagtgtagtaaattgaagaggttttggtggtgttgctagaaaacgtagcttgaagattaattgaggtagttgaaatctttctattgttttaatttctgaatttttatcttcacttgctgagtttgcatgttgtggttactaagtgtttgagttatagtttctggtatgttattaggtggagtcaaggttttgtgtgatgatcccttatgataatttaagctagacctaaaatttgagttttgaattgtgtatttgctgtcaaaatga

SEQ ID NO: 390871 - DNA, 1187 bp, Cannabis indica
aatggataagttggagtaggtaaattaaaattaaaatttataatgacataactaaattgaaattaaaaatctaatttaagtttttttttatgttaatacaaaatggtctttctttctattttaaaatgaaatagtcattctaccaaaatgatgggaagaatattccattagaatgatatttcaatactttaaaatgcaaccaaatatgggaatgaaatgaaaattgtttcttttccattctattccatttaattaccttcaactaaacgccaccgcatttggttggaaggaataaaaacataagaataggaatgaaaatatgaataaaatgaaataaaatttaaaaaggaaaaaaaaaaattcaaaaaaaaaattattaaattttttctcatcatgcattaaatgatctttttttctatttcaaaacgaaatagtcattccaccaaaatggtggaaagattggaatgacattccaatactttaatatgcaaccaaaaaaatgaatggaaagaatatttttttctttccattccattccctttcattaccttcaaccaaacgccacctaagtgtgaatttcatattttggatcaaattcaatttgcaatagagctaaaatcaaattcgtaatagcgcggattgaatcaatttttttttgaatgataacttttttaatatttatgaaaatataaattattttcacataatcaacaacacaataaaataaattattattgttgtctagcaacaaattaaaacaaacaaaataaaaaataacaaaatccaaaaaagaaagaaattgtatgtaaaaaagtttagtttattttaaattatatatcctttatacataaattactattttttctctttaaaatatgaaatatatatttataacttttgaaatatctattctatataaagtgtgcctttcttggtttatgagaaatttatgggtgtgactttttatttatatttaataaaataataaaatattatttatatataataaaataataaaataaaaatttaaactgatatttaatatttgaactgatattatttatatatatacaatattatatattgttctcatgtgatattatttaaaccataaatttactatcctattttgaatttaattaaaaccaataaaatatatatacctaatcttgtacgttctcattttt

SEQ ID NO: 390872 - DNA, 972 bp, Cannabis indica
ataattatattagcttatttctatcggctttatacgaaacaatgattaataattagttgagttaatcctaaaagggaatgtattttaattttcaaaaagaaaaagaagaatgtatttaacgcgaatatcgataatatatatttaaattcctcataataattatttgagtatagacagtttatggaaatttgatttgcggagacgagtatccacttcgaatggagtaaggattatttaccttaatagataatggagtaagagtgggatgcaattttatatactcgagttcaagcagagtcaagatataatttaagttttattgtctagctttttagagtatattttttttttataagtcacaatgtttaatattgccacctataaattagtttagtcatatttataaaatagactatatttttttttggatggaataatctctttactttacgtttagtgtttctattttctaacttataatagttatctttactaaaaaaaattaatattattattttattttgaattactttaccttttgatatttctattttctaacttataatagttatctttaaaaattaattacattatactattattatatcattattattattattttaatttaatggatacgtatttcccctactcggaacataattgagaaataaattaatcctctcccttgaaggcttcatttcatattttatgtatgtattgttagactatatatatagtgtatataatatagcatatacaatgatatgaaaatgcggaaaatataatgaaatcatatcaataatatatgcaatgaaaggatcgatgtacctccagccattgatctttgagcttcaatccctgcgatagcttcagtattggagttcgggcttcctcgctctctcaactctctttagatggaatttgctgaatggattcagaatgagtgaggagctcggggaccgagaccct

SEQ ID NO: 390873 - DNA, 1005 bp, Cannabis indica
tttttttaaaaaaagaaaacaaataataattgcttaggagattttcaaatgacaaaaattgataaagtaggtgtaaaatgtaaatgtgcgagtgaaatattgggtaaggaagtgaaagaggagaatggatcatagagtaagttttttatttggttagaaataagttacatttagtgttttgataatgatttgatatgtattgtatggtctcatttattcatgtctaatattatttttttctattttagctataaattaattagtacacaatggtctattttattcccaattttgttgtacaatattgcttttattttctttgtaaaattcaaagtgattttaatgtactaaagttcccatgccttttatcttatattagcttgtttgtttttatttttttagatttatttttatcagatttattcttagattaagcttgtttttgttttttattttttcaaatttcgggagatctcactcatacttttcatgtatttttatttgtataatttgagatatgtttttattgtttgagatttggatttaaaatttgagatccaaatttttattttttggtgtttaaacaaaggttcatattgtgtaaacctatcacaacagatctggcagattttaacgctggttgatttttatataagggaagtttgcaatagctgtgtaaacatgtttgtagttatctctatggttattactatgatctatgaataatacttagagagcaaccaaatgttatctcttattattttaaattttcatatcttagttggtgagaagagtgtttcttttataaaaattaagtcttttgctagatttttgtatctttgccattgatctcatgttgttcatagaataggtttaagagaaacttttgaacaagtgtaggtcttcaagagaatacttttctaagactcacactacaagaaaagggctttttgccggcgcatttcgtgacatgcgccgacaaaagttgtcgacacaaacaaatat

SEQ ID NO: 390874 - DNA, 1713 bp, Cannabis indica
attgcttttatgagctgtaaaatgcgggaccaactctagtgctccattcaaaggtaataattgaattatatatatgcatgggatgggacccttgtgatcaaaattatttcattttgggtcctataacaacaataataataacaataatatatacatatttgttagatattttgtgaacttcaattcaaccaagtccacaaattaataaaattggtcggttcattggttttcgactatgtagtgcactcagttcttgcaaagtcatactatatgatgcgaagtggactatagttaattagtcctctcatatttttgacaaatatgtaatttattattcacaataataattcatattgttgaccaccctatatagactgaataataataataataataataataataataataataataataataataataatgtttagtttagaaaatgattcatctatattcaatattaataatacatatatataatattattaataacaattatggaaaagcaattaatattagggtgacttttggttacaaaatgaaaatagaggaatgatagtaatatagtaatgggaatataggtctttatagtttaatttgatagttttatccattataatagatcttgtaatggtgttgtttatattttggtcaaacttactttgttggcacgtagtaatattatttggtgttcaaaaaattacaattgtattcagaattagttgatagttgatgctatctttgaataaatcctcacccccaccttagtatagtgcttattgcttttggtatttggtggttgagacattttttttttttaaaaaaaagtaataagaatatagaaatagaatagaatttctattcttttatttgataaaaattatgaaataacgtgataaaattactatagtataataaagtataaaatgaaatagaatttttatttattttaacctaattgccataatttattatgatgtacaataaaacaaataatttttttttttgagaaaaagcatttatattataaattcaaataagtttagacctcatggtcgttacaaaatatattgtcaggtaaagaggacatcgggatagtcccaaacacctgatgagcaaacgcccatctagccacattatgagcggcaaaattacaagttctacgaacataagaaaaattacaactaataaaacagggagaagacttagtacaaaatgagaaatagttttcaagactccaacaagaatccatcccattgagagcattgataaccaccctcgagtcattctccacaatcacaaacttggatccgatttctaaagctacagaaacagctaagcagcaggcagccgcttctccgcaaagaacctccgagaaatcttctcgagccgtctgaactctgataactctgccaaaatgattccttgcaacagcagcaatgcacatactattgaatcccaccttaacatcacaattcaacttaatccaatccggaggaggaggggaccaagcttcctttagatctggagtgggactaggaagcaaagaagcatgacaatctgcataagaagtacaaatattatcaatacacttttttatgtcaggagaacagttattatggaccttctcattgcgcaccctccaaatagtatccacaacaatcgaggcatataggaaaacatcatcagctcggatccctctgttgt

SEQ ID NO: 390875 - DNA, 832 bp, Cannabis indica
aaaaaaaaataattaagctttctagcaaactaaaattaattatgggtgagtaggtcttatttccgaagtaatttttggactttcaaatcctaaagcactttaattatttgttagattggaatgaatttcagttctataaagctcaaagccactttataatagctttatgaagaagagctaagaagtttaaatcaaaagtagaagtccaataaaaagtagaagtttaaatgaaactggggatttattgttaaactatagctcttattataaaaagtttgatttaatagtatgttaaatgttgattgacatttgtcatataataaaaattgattcaaatttaaattatatggcaagatacaaaatttgtatcacaataaatatatattacttttatatttatttgttatttttaatattttattattaaatttaattattacattaaattataaacccttagacatttcatttttattgttttatataataaattaatgataatttattatttctattaaaaatattaaatttgcatcaaattttgtaattgtgtatcaaagtataatgttaaaaattaatgtaaatatactacaaaaatacttttgttgtgtcaaatataatataatttttatatctctcattagagacagtcttaggacagggtgtaaaatatttgaaagtaattagacaattattaaacattctaattatacttcatcttaaaaaataagatatgtttaaatgtgaagtattaattatgtataaatttttatttttatatttggtaaatgagttactaagggccagtttggcacagttgtactgtgggaaa

SEQ ID NO: 390876 - DNA, 1278 bp, Cannabis indica
atagtgactaaatttgtaattgattcacctgtttgtcttacgtttatagtttctgacttgttttatgatcacttataatttgaagtttgcgagtcttgaaagttttcagtcattttaagatagaatcacgataaaggtttatgaatatccaaagttgattgaaatggataccgagacttgaatttttttaaggagttgttattatacatttatctagttttgctctatcacaatgctattaaaatgggccgaataactgattatttgaagttaaaatacatataatcaataacaaatcaaagctcttcttgaaaataattgtattacttacattttctgtatagagaaagtaatcatgtagttatcttttagctaattacgctttgactaacaaagaaatgaaaaaaaaacatataatcatcgtacaatcttgtctagaaagttggaaggttatatctctattaagagcatgtaccaggatacacactatattacactgtcatcaaattagggttaaaaaatatttttacccccatcacaacactaaaaattacactaaaataatatatttattattatattaattttttaataaaataaaaaaattcatattaattaataaaaattactacaattattatattcaactaataatttaaataaacttattttttctaatcaaaaaattaactaatcaaatcagctaccaagatagttttcaaatcaacagggacataattctcacgggaaacacaactaagaatagaaccaaaagaacgagctaaacaattagattaaacttactgattagattaaagataataatacaataaaatagataaaactcgataaattaaaatattatattataataacataaatattatattactaaaaactaaacattacattcatgacgaaagaaattatataaaaataatttatggtattcacatttaaatttacacaaaaaaatattataaaatgtttttataatgcatccctctaaataaaaaagtcagatgacaataagtttgaattttatttttggcgtattaaatttttctaaatttttcaaaattttacaggaggtcttaaataaatataatgtacacgaccataaaaagactaaataagtctcaaatgctaaaacaagtataagtatatcagtgcggcacttttaaagaagtacactatttttcagcgtgcttaattttttttttttaattttattaaaattttacaagatgtcttaaataactataatatacatgacta

SEQ ID NO: 390877 - DNA, 881 bp, Cannabis indica
accttttttaggcatttcttatgcttccggaaatgtgtggcgtccaaaaatggttacaacatggtcatccaccagagacagagcgagtcctggtggatatggattgcttggtctgagtgctagagtagtgtttggagcctgggcattttatactccctgaggggcctatattcctagagcttgagggtaacttactccctgaggaggatttatgttttcctgttgtctgggaatgaccaactgtccatgtgctactccctatcccaaatagataatcagaatctaaacccattgggaaagatggccattccagattaggccttccatttcatcattcaagtaattacattcatttgtagtatgcccaatatcaccatgatattcacatttcttgttttgatccctcttgtgtctccctcctttgtacattggaagtggcttcttattaaggttgttcatcaaattgctcacgcctgcaccacaaaaaaaatgcaatttgaaattctttacggtgcggtcacaatttgaatttttcataaactgcacagtgcggtttgtggttttgaattgttagtatgcggttcaaatcataccaaaccgcatattataaaaataccaatttttatatttatttaggtccaatatgtgaagggcccagtccaaagcccactaattattgtattattaaaacttgaaacttttttcatgtttattttcaagtcttatggtatttttgacaagtgttgctcaaattttgttgtatttatgatagtttaattattaggtgatagtccaaaccggagaaaccacgccgcatcgcaccattttgcggtgcaatttctacaattttttagtttcgcggtgcgggttggtttgaaaaa

SEQ ID NO: 390878 - DNA, 726 bp, Cannabis indica
ttagaggaattgctatattgaaaatgacatgttttctgactattctccacaagttttgttcattgtcaacttattttcttattaattattaaattctttatatttatttattaattatcaacttatttatttttattttttaaaaaaatataagaaaaatatctaattatcaactattctccacattatattataattatatttatgatatgattataaataaaaagatatttaattttttaaattaattttatgtcattaaataattatttaattatctatatatttattatttgctaattacataaatctttattattattttttaaaaaataaacaaaattattttcttatttacattattcaatgttaaactttattcattaaaattttaaaataattacttatttaaaaaataatcaattttaattttaattataactttagaataattttattataaagttagtagttaattttaaattatcaaattagcataattgtttttatctcaaaattttattaaaatttccaacagataacatttatttttttaaatacctaaaaatataaaaatctcctctaaatatttcaaaaatttccaaatacatcacacttactattttttacataaacaaaaattacatcacactttataaacatttacaaaaaaaaaaaaaaaaaaaaattacaaaaattaccaaatgcataatcagatttttaagt

SEQ ID NO: 390879 - DNA, 1540 bp, Cannabis indica
aacttgattcccaaaagccaaaaaggatatattgtaataacaagttttccaattccttttattaaaaaaaggttgtacaattccaaattgatacaatttttttttttgttaacaatgaacaaaatttcatcgagaaaaaacttagcgttgagtacattgtaaagaagagatcaaagatcctgtattcaaattagctcaccatccatcctaagtacgtgcgcaactgattcatgcgtagccaaattggccgaataatttgcatgaataagagacgctttaggaaaattggacagtaaactaaaaaaatatcaaaaatatcaaattgatacaactttaactagcaatagattaaaaaatagaaaaaaaaaagagaataacaatagtaattaattcaatacagaaagaagatagatgtttgttactagggttttttctttcttcctcctcttcatttttttcatttttctttccttcttttcttcttcgttaaggtgtctataaataattctacctcttgtacaatcattacaactaatctcaacatccactctatctccagtctctattcgaatagaatttatacgtatttttctaaatatgtgaccgataatcatgtaattattatctaatttaattcgaaacatacaatttgacaatggctctgtcactacacctatttgtgacattcattttcgatttgtgtcattctcaaacccttcatccttagccttagcctcaaccttagccttaggcttcaagatcaccgcgactcctaccaatcacttttgttgcaatttcggattgttggttgaagctattgggattggcaataaaacatgggtcaaaggcctcaagcttcttagcccgaatgaaaggtgaagaagtgagcgctcgagtgtactcaagatcaacatggtattttttttttttgaagaaaaaggggttgaactcttaaccacttcttatggacatattttccttatgtattttttgagttggaaatttagtgatttaatgagaatattaaattacattaaatataataatatttatttattattatatatttttcttatttttattatttgcttcttttacttttctttactttcataaataaggctaattagtatttttgccccctgaactttgacatgtaccaaatattgtctcctgaactattgagattgttggatttaaggtcagtttttactcaacaattttttttttatagtaaatcgtacccctgaacttttttggccgttaaaaattcccctcgaactattgaaattgttaaatttaaatacttttgtctaatttcattcaattttactgttttatgtactaaaccatgctccctagactttgatatctaccaaatcatgcccctcaaactttgatatgtactaaatcatgtctcttgaactttcatccatgtcacaaaatttttttattaaaattagacaaaaatccttacatttaaccatctcaatagtttaggagaatttttaatggccaaaaaagttcaaagacacgattt

SEQ ID NO: 390880 - DNA, 1658 bp, Cannabis indica
ctattgattgtgttcatcttgctcgttttacgatctcctagatccgttgacaaaaaaccgtgtcaacaatttatattctatattatagtctaacagaaatctctgatgttgtacaaccttaagatttgagaagcttcaacctaagcaatgaagaacagaacgacttatcattttgaaattttaaaggcgagatgagaaatccatgtgataaagataaaatgcataaccaagaaaattaataaaaaaaaatacaatacagtaaactaagcagtcaatctttcaatatccaagagtaattcacaaaaaattcttgtaaagtttaaactttgcatacgaagtcaactaatataatactcctacttataataatcgatcacaaaagcatgcaaaagttgaccgtttcattataggatgagccgttgggataagatgaggaagataccatatataacaataaagatcaagaaaattaagatcgcccactctcgtccaactcatcttatatatatatatacacatatattaatattttatacacaactaaataaaacaagttaaactattttctttttttccttaagtggagaattataaaatactattagccacatatttatttcatacctattaaataatctatatatagaacaaagtcatgttaatctgttcaaagaagaaaactagggaccgaataggcctttaccggtgatttgtttccttattctgtttagacccgcaaacccgaaaaacccgactacctgcctcgacccgctgccaaaaacaccgatcacccaaaaacctgtgtggttaggtcgggttcaacccgaaaaagactccaaatgaatttcaggttcaggtttgattatttattttttttggtcgggttataacctgtaatccgaaattataaattttatttattaaaaaattcacacataattaatatacttaattactaatttaataattaataacatttcaaaaagaagcctattcgactattcagaaactaagcctattactaatctattactgtataaatgtgcacccctaaattagtaataaataagtactaatttattttcacaaatctttagatactatttgtatgtagtaaatagtaatactattactaatctattacatttttcaaacaaaagctaagtctattcgtattctcttctcaatagtaatactcaatagtcaattctgtgtgaaatgtgaatctgtatacactcttaaactagtactagtcgactcgtcatcaccgtcgactcacccacaccaatgaccagtcgacttgacacccaccgacgcatggtaggcagccacccatgacggcgactggttctcttctcggctcagttcggtgtcccgtccgtgtccacctactagtcggcgacgacgagcattctcttctccgacgaggtatgttgttctccgactggttctcatatttttcgtttttcatttcgttttcaattttcacctttttattaaaaaaacatatacttattactaacactactatatataaagcggtaaagcactacatattattaataataatattactactaataataataatattagtaataataataacgattcaagttggttggtaattggtatgaagaagtgattatctcaaatgg

SEQ ID NO: 390881 - DNA, 759 bp, Cannabis indica
ttctctcaagaagttagatgaaacttgcttcaattgcccttcattccccaaagaaaatctctacaacatttgtcaatagcagtagtaattttctgagggagaatgaacaaactcatccggtagttctttatccctaacaaaattgagtgaattaattgcactcttccagcaaaggataagttcctactagactaactatggagcttcttgtagattttgtcaagaataatgtcgtagtccgaaactcgccatttggttggcctaagatgattccccaagtaattgagggagaaagatccctccttcattcgtaacagtcttgaaatgcggtctttacaagcgatgtccacactaccaaaataggctaaagatttatcttcattagccttaagacctgttgagtcactaaaaactctaaaagcttcatacacatgttccaccgatctatcattatctttccaaaagataattaggtcatttgcaaagcaaaggttaacgagtttaagagacctacaaagagagtaaaacccgaaaccttttaaattggatctctgaatcaagagtctagtcatgtactccatggtaagaacaaataaaagaagggacattggatccccttaaggcaggcctcttttacttttgaaagaaccatggcatctcccattcattaggagggtgtaagaaattataacaaaacttaaaatttcctataatggtatttttataattttttttcttgtttatatgtatttgtgaaat

SEQ ID NO: 390882 - DNA, 1061 bp, Cannabis indica
cccctcttgaaaaacttgcattacgcctgattgatacatctcgcaaattacgaccatatttccaggcacatccaatcaaagtcctaatggatcagccactaagacaagatttatcaaaaccttatgcctcaggaaaattgataaaatggtcgatcgagctgggacaatttgatgaaacctaccacccgagagcgtcattacaaggtcaagctttggctaactttctaattgaaggaataaattcaagagaagacctagatgttgaacacaatatagaaacttggaggctatatgtagatgggggcttcatatgagaaaggcttaggggcaggggtcataatagtgttgcctgacaacttcaaattccactacgtattgagatttcaatttgatacttcaaacaacgaggtagaatatgaagctttattggctagtttgagaatagctgagacattgaaggttaaaaatcttgtacgctttagcaactcacaattaattataaaccaagttttgggagaataccaagctaaaggcctgaaaatggccaaatatttagagaaggcttggaagaacttggaaaagtttgattattttaaaattgaacaaattccaagagaacaaaactcaaatggcgattcattagcaaaactggcatcccaatatgatctgcacaagttgaatttggtatcggttgaggttttgagcaacccaagcatatatgaagaggaagaagttgagatgttagatacttcaccaacatggatgacacctagagtcaattatctactcaacagggaacttcctacaaacaaaactgaggcacgcaaattgttgtattcaatgcctttctatacaatagtcgaatgaaaattttatagaagccagtgaaataatctaggaaattcatgagggcttttgtagggaccacgcaggttggaaaagtttgtcaaagaaaattatccatcaaggatactatgggccaacaatacacaaagacacacatgaacttgttaaaaaatttagcaaatgccaagggttttcacatatacctcgcataccac

SEQ ID NO: 390883 - DNA, 633 bp, Cannabis indica
aatacatttacatttatttttgtgaagcctagaggaccgttacttaaaaagcatcttttatagtttttaccctcactacttcactttcactttcactttcaccactaacttattattaattaattctatctattacaaaatctatatattgggaacatgaatctctctctttctctatttctcttcaatgattacaatacttttcttcctaattaataaacctcatccatgtttaacgtagattgtatagttatccacctataagtatgtggtcacttttgcatatatgcatgcataagtgttttgcttttattttaagctaattaaattgattacaactaataattaaatggttattaattgcatgtagtagttaaatccaccaatctcccaatttcatgaccctacaacaacatcatgaatatgatcaactaaacctgcacaagtgtctctttcgtaaattgtgagtttggcctaaatatatatttatgcatctaaatatatataacacttcttaacggatattatctataaatggttactaaataaatttaactataaatattaattttaaaatatcaaactatcaaattttgatctaataacgaatcaaatttgaatttctatgcttaa

SEQ ID NO: 390884 - DNA, 536 bp, Cannabis indica
taactaactcccttgacaattactaatcaaaataatcttaataaatgtatatacaattaggagtggacattgggcatcacttttgctctaccgtaggatatttggcattgagagattttaattttaattttaatttttttgcatagtatatattatagttataataaatatcttaaaattctgaataatttactatgtaaaagatatagttaagatagtaaaaaattaaaattaaaatagtcaattgcatatatataaaataaaatacacaagtgtgcaactgattaatattgaaatttttgtaatgtaaattattcaaaatttattgaaaataaacaagatacctattataattataatttctctgtatactaaaaataaaagggaaattttcatatatatatatatatacgtaatttacaatctattaacgtaaatgacgttaattaatctaatgcactcctaataacgtgacacgtcatcaccacctaccgtaaatccaaaataaacccagtctgcaatcttcatcaaacgcg

SEQ ID NO: 390885 - DNA, 1012 bp, Cannabis indica
ataaaagttaaatgtaaaaataaaagaaaaaaaattaactaagggttaataaaaaattaaaagtaaaaaaaaaaccatatctaatagatttttatctcaagaaatatagtacttagctaaaagatttttagattttagtgcttatttttgtgatatgttttgtttagttgtttgtaattataaaaattaataaatattttattattagtgtattataaatatattatttaaataatatatataaagaaaaatataaaaaattaatttatagtgtaatataaatgtgtgagataaattaaagaaaataataaaatatatctttcgttatttataatttagagaatgggatataattgtattataagaaatctccgagttcattaaaaataatctattttataaaagtataataaaaatgatatagaagtatagctccatcatcttcttcatatacattctttaaaatagagaacttccgatttttctacgaagtaaaaatgtttcaagtaatatataggtatgaccttatttatttaataaattttatgtgagtggttgtgacagtcagtagtctcgtgatcggtgattcataaggaaaaatattaggtaagttgtgcgatcccacatcatttagggaaggtcaagtgtgatgattctaaaactgtgtagatatgagactacacagttgaagagaacttaaatagattgattgatggtactaccgaaaaacaagatgcacattctgacagtcaatagtcccgtgatctataaggagaaatatcgggtaagttgtgcaatctcacatcgtctggagaaggtcaagtgtgatgatattgagactgtgtaggtatgggactacacagttgaagatggcttaaatggattgattggtatactacctatatcaacaaggtgcatcttttttttcggtagcctatcaagaaagaacttcacggttaagcgttcttgacctggggtgatttcaggatggctgacctcctgggaagttttc

SEQ ID NO: 390886 - DNA, 1599 bp, Cannabis indica
agtcgtataaaaagacgaatgtttcttttctaaaaatactttggtagatgtaaataatgtataatatcttggttatttttatcaaattacattaatgcaatacgtgtatatagtttcacattgatatttaagaactttaaaatctctcattttatctttgtggactattaactaatatatctttcttttagagtttccattaggtgtggatattttaatacttctataaaaaatatctacttttgtctagtatatttttacgctggtaaaaatgaaattttttttttcatgtattgacagaaaggattagcaaaagaagttagcaaattaatgttagtattagaagttttgtcagggcaaaatgaaaagggcttgtaaaaatatttttttaagcacataaatccgctggtaaaaattaaactttgatcactacaaatgtacgttagtaaaattttgacatttttattagtacattttgcgagatacttttactagtataataacgaatttacaggaaaattcattcaagatgtgagagaagaaagtgtaaagataaggtaaacttttctagaatttatgcattaattgaacattttaaaatggaaaattaatgcacataaatatacaccatcaaattatttacaaattattgtatctaaaaatgtgtgtatcatataataacaattcagttattataaagtcaagagtttgataggtcttgccagctggcatgtgtgagatttttctctcaaggttcgtaggtttcagcgtttgacggcttcgaaggtttcagcgtttgacggcttcttgtggctgggtttttcacgttccgattattgtgctttcactggtggagcatgccttcgaacgtataggttcttttttcgtatgttcatagatcttcagcatctcagagttgcgtttaggattgctctctcacgggttctgggttgttcttctacggctttgactggtttcctgcgactggttttctctggttctggttgttgcgttttcatcggagtagcacggcgtcgtgtgtgtagggtccctcaccgatcttcctgggtttcggaaggatcatagtcgtgttctggggttgatcagtttgcgtcatcagtgtctaccccctcggcgactggttcatgcgggttgagcagaggattatttgttgggattgcgtcagtgtgtaggttcccttgttgactatttcttgtgaccgggagtggttggattgtggtttgcgacgaggattgcgggttgggtttgttttactcgggtttttgcgactgggatagttggagtttttctggttttgatggcttcgacaagcacagccatggatgacatggagtttcaatatgggcatatagaattggatgatgaagaagaatgtggttttgagattaaggatgacgttgaggaagcggttctggtagatgatcgttggtgtttggtggggaggtttttgaatgcgagatcgatagattttgaagctatgaaacacacgttggtggggttatggaaaccaggcaaaggattgtttgtcaaggaattggggccgaaccttttcttatttcagttttatcatgagatcga

SEQ ID NO: 390887 - DNA, 987 bp, Cannabis indica
tgcatagccctgctccaagctacgtaattatcctgtcccgtgagtggctgagaaacaagagtgtggcctggattgtccccgtgatgaaggaagtatggatttgcagggtcttcaagaggactccttgaattcgaaatctgcagagaagaattctgggtttcttcaatggaggtttggactgtggcttcatcttgagtgccctgattcgattgattgtttgtagacattgcaggaaatcaatcgaggagaaagacgattgaatcttgcaagaaagaaaggaagattgcagcggaaagagaagcagcttcgtcggagaagatggagaacacgacttagctggaaggagaggatcggacaggaaagcttatctttcctgctctgataccatgttacgaaaaagaatgagaaacatttattgatgtaaattgttcatttattacagagctaagatacagagctatatataggtaagactctatacatgagataagtaaaagttagttaaggaactaaccatactcaaccgactctgctaacactaaacctgaaaaggtagttacagtaataacggtaataaccagaaattaacaaaggccaataaccgaatataactgtattgcaaggcctaataatctgtccctgatactgagaaccatgaatgttagagtggcttgtcaaaggctgagaagatgaaacagctccatttccaaacatgtgagacatgtgatgttgagacggcctagttgaatgcatattcccatcctttcgaattagctcctctttcttattgtctggtggcaaacagtgttcaactggaagctttttactaatgtgttggacttggttttgcaattcaattatcaaccgttccaatctttgtattttctcaagcgattgttgagtaggcacttgtgtctgagtgtacttagtgtgacgggtcgtagattgagactttgataagcggcccactccgcgcctcttaccaag

SEQ ID NO: 390888 - DNA, 2039 bp, Cannabis indica
gaagctaagttgatcctcactactttaatgctttgtttgattaacagtgtaggggccataacttagcaattgaccccttggcttatagatgactttgctgcatctttttggctcaagaggcgactgatttacttgctcaagataaagtgaatctcaatgtgaagcaaacttttctagggaacaattgctatattggtaatattttttcagatgctccctatccagtaccctggtactggcaccaggtttcaagtggtagtcatagttggctagcttgtttgttctaggttataatacttctatgacaatatagggtctcttcctctctcattgggagtcttcaatgttgctttcttggttaacatctttagaagactcaaaggacacatcttcactgctgctcccatgttcctgatacttgttggaaataaaggaagaatgttcgtcactaccccttgtcccgagatgtcttgggaagtaggggagattcttcatcaatgcctatctgctcgagatcatcttgaaaaacaacatgggattcatcgtcactgtctctcttctcaatctcatcttgggaagcagaagaggaatttgtttcaatggaggcattcgatgttgactcttcttccctttcatggtcaatgttcattcgagactcaagaaatggataagcagtgtaattggttgcttctagttgagaagctcctctgaccttcttgatggtctcttcaagcttgatgaaagcatcaactctgtctagaaactcttgaatggtgtgtactggtttgagtttcaagtctttttagaatggactcattattgttagtctaactgtcatttccatgaacttgacatcttcactaagtatctttgtgtgcgtggtcacctctaagagttattgtaggcaatcctttagaggctcgtcttcttgttgcttaatgcatacaaaattcttgggctcgattatctatgccttaagagggagaattggtcatcgaatgcttgctttagtgtctcccaagaatcgatagatctcagagaaatctggaaataccactgctgtgctacttttgatagtgtgcctcaaaagatttgacatcgagaatcgtctcgaatgctttgtaggtcaatttgtactttgaaattgtgcatgtgagagagaaggtcttctttaccagtgtatggatgctacactggatttttaaacgtggaggagatctccaaagctttgatccgatctaagaggggtgaacgtctctcccattctagctcaaactcagttggctttgggttgtcatacttcttactaaggtgacaaaagtatcaaattctgccctatagacatcacaggtggtgatgtgcatatcagttggccgttctcgacttatgttacttcgcaagttcttttgtcttccaagtcgatcaaagtatttggttgacctgagtcttgtggttatgggctggtcgtgtggccttgttggcaactgtggggatttatcccataaaatgatagagtcgtctcttgagtgtttatcttgtgagcggtttcttgtattattataccaactcttcctcagaatgacatgtgtggaggaaattgaattgattgctcaaggtcaacatgtctccatgcacccatggaaagtattagtattggtggctatcaggccctcgggcaaagtctacttttgtggtgatgttttaggttatattaaatacttaatatttttcatttcgggtcttttggtatttatgtttctcggtctcataataaaattgttgataactatgctagaatagaccttggattagataatgagaatggctaaaagatactattggtgcttagcactttcttcagtgtcatactacttttgatataattaagtattgaattccatataattgaaaaaaataatttttaaaaaatattattaacaaatcgtcaggtaaagtgctaaacaactattagttttgaatggttacttatttgtttaagggatattagcggctaaaccacctgaactttacggtttgta

SEQ ID NO: 390889 - DNA, 559 bp, Cannabis indica
tatgtagtttattttcgatagatttgtgcagttatttgaattggtgttgtttcgatagttttttttctttgaaatggtgagatctagttttctcgccaaactgggattttaacaaattgtcgatgctttttatttcttcatatttagagggtgttgtttcttatcatttttagtattttttttatcgttttatgaatttttcggatattgaaagtaaattaaattttatgagtaaaaattaatgaatttattatttttatgattaggtgatgttagcggatgaaaagacgcactaaaataatattttcctagagttttagaagtccatgaagacccaaaacccataatttgtcgctgtagtgaaggctggaggttcattgcaacaagcaaaagaagaaaaaacaaaaactcgttggcatgggtgcggtgagcacgcgatttctttgagttttcgaattatcatcttttttcaaatgagatatttttactagggatgtaaacggagtgggggcggtgcggggattgctctcccacccccatatccgcttcttaaatttac

SEQ ID NO: 390890 - DNA, 1363 bp, Cannabis indica
ttatcaatgtcaccaaacattttgatcgacaccgagatatagaattgtcccaaacttaaacacagcactgaaataaaatatatgtaggaacaaataccagacaaatgggattcacacgaaagaaacagaaattttctaattgaaccaaaatcaaaaaattacgaaagtgtctttggccctggcccttacttttcaaatggaaaaatattgaacaaaatctcggaaccatccagattagaacaaaatctcgtatgatcaataacacatattcatattataacgcataatatacacaatttcaaaatcttagaactaaacattataaactaatcatgacaaacctaactattattaaaaagaagaaaaacaaaagagagaattggattataggtgaatcatatgcagacctctatacaaaatagagcgaatcacttgagaaaaatcaaacaactagagaaagttccaacgcctttatgtatttaatcctcattagctgcctctaaaaagtgcagtacctgttgtgagtgaagtaattgtttatccggtcagtaagtgaaacgtaactcctcctctccgatctctgatctccgatctccgatcagttggtaaacgaggctgataatatttctagggtaccgctgatgacaagagccaaaaaaggccgacagagagagagagattgagtaacggagagagagagtcgtgctacgactttggaaggatgaaataaaaccacctttttatttatatttggctttgggcttctcatataggcctaactcacaaacaattaaaactttttttttcttttaataaaataagtagatatattaaaactagaaaatgttaggcttcatgtcattacataataatttattggtggacagattgattataccagttatattattggcaaaaatccacttaatcacattataggccgcaaaattacatagtctagaaataaactaaaattacaactaatctaaagatttgaaagattttacattgaagtacatagttactaatactctaaacggaacaagtcccctttagcgtgttgatcaccgttttagaatcactctcaataatcacaaacgaatacttccaaatgatcgttgattctgaggctagcaaataggtcgctgcttctccaatgagtgggtcagagaagttggccatgttgataaccacccacaaaactgactccttatggtctctagctaaagccaccacgcacattgagtcacaaccaactttaacattacagttgattttgacccaatcttctagagggggagaccaaacaggagtcgcaaccgtcatcagtgaaggaaacagacaagaactaaaatctgcgtaa

SEQ ID NO: 390891 - DNA, 1477 bp, Cannabis indica
attgtatatctatatttttttaattcgttaagcatgcatgtggctagcacaagttgatttgtagacatttagaataaaaaaatactataataatgttacagtctagataacatgtattttttaagagtttattattaggcatttgaggatattccatgcatatatcaaagttaggtatgtaaaattgtggattaattaatataaaatgtagagttttattaagtatatataactatatgattgttatttatgtctgtatctcattaattagtaagtagtcttaattattgaccaaaaatgtgcaatttaaaattggattatttatatatattatcatccaagacttccaagatggagatttgtatttttgtataaaataataatagcttgttgagctttaatttctttagattaatcatattataataagttataaattttgggggtatggataaattaattcaattcaatgataaaattgaccaatttaattacaaccgactgccaaatattggatgtccaattgtgatcggatcggatttgatataatttttaaatatccaattagatcggatcggatgttagatggggtgtccaaaaatccaatacatccaacatccaatcgaactaattagtattttcatttaatttaaatgagtaattaaattttatattttttatacgtaaaatgtaaaatatatatatgtatatatgaaaattaatattaaaaatttacatttttgtcttagattggatgtatgcaattcaatccaatacatactgggtctacaatattgtatgaatctaatccaaaaaatactagatttaaaatattagataaatttaaattaaacgaataaatatatttaaaatacattcaataaataaaaccgaaccaatctaacacatctaatagatgttgaatcgattagatgactaaaattaattgaatcggatctgaatagatcttaaaaacattagatgtgatacaataaattataatatagtaaatgcataataaattcatctatatcaaatcaaataaaatacaattcaatgatatataatcaaataaataaaattaaaaattcttaatttagatcagagccaacataatagatacaataaatttcttcattactaataataataataataatttccctcaaatactgatatctgaccttttctaatgcatatttctctatgtttgaaacactgtattatactggacagcattatattaaattataatttacattattttatatttagtattaatttatatttatgtatacatataaatatataatattttaatataaattaaaatttaatatcattataaaatataatttaatataatacttatgttggattaaaaatcatttgtgggcacatatgtataatgtatatgctattataaagtgtgatacaaaattaagtgaccaattatgttatgggtatcaaaagggta

SEQ ID NO: 390892 - DNA, 664 bp, Cannabis indica
agagagagagagagaaaccaaagccaagtaattatgttttcctctttaattaattaattattttagataaacctagtttatctccaaatggccagttgtcccctttacccttcagccacctaacaagacctaacattccaattttactctttaaccaaagccttccacacaaaatggcttaggggtaaaatggtccaatgccataaccccgccgaaattcaacattcaaacttaacaaactataattctctataagaaaaggttttatatttacccatgtgacaaaaataatcctcccttgcgttttccatcgctatcgagctagaatcacaagaataacatattttacattttaacatacatactcacatataattaataataataataaaattagtatttataaagccactaatctatatctaaatcatgtggtcattacagtagtggttctccggaacctgagattcagcactactactatttttaccaagtaggtgatgagttttacagtcagttcatttgagaactgaaccaggagtggagacagttcctccccaagtcgtgaacttatattatccaggagtgtatgatttagaagtccacacatactctggaagagttatagataatatacggtgatattttaaaagtgataacaata

SEQ ID NO: 390893 - DNA, 541 bp, Cannabis indica
ttttttattttcttcattattacttacaaccaaatatatataatttatgtcataattaatttcaaacaataattattaaagcctcattaatgttaacaaaattctaaattaaaagtgtgatgcttttattaaaagctatcaataattaagattttaaaaaacacatctcctaacccaaaaaaaaattccatacacatggataacaatcaacaaaatgttccaacaaaataataagaaaccacccatcagctcaagaaagagccttaagaaactcaacttgcaaataattcgaatgtaggaggatgcccatctaagtgggatttcaaaagaaccacagaagatgaatccattccagaaatgatgaatgagagggcttatgagtagagtgaactactacaaatcttgtgtctatctcttattgtaacgccctaaataattaggcacgctatatacccatgttacttaagaaactctaatcccctaaatgggattactaatcaaaaggcgcagaatttaaacttttgtaataaacagaatgaaa

SEQ ID NO: 390894 - DNA, 1723 bp, Cannabis indica
tcaaacagattcatagattttctaaaataaaacaaccatattcaccaagtcaaataataaaatctatacaatctaaaaaatgataaaactaaaagaagaaaaataaaggtttttgttacttacctgaaaaggaattagtaggagatggtggttcttgctctgtagtttcagtttcagtttcagatcctcgagatgagtgggcaagtgttctaaatgagtaagaagaagaagaagaagaagaagaagaatgaagcttaattaagtgttgatgagtgtgtttatttggtatggaagatggtattggaattggtggtggtgtagaagaagggttttggtaaacacaagtgattattgctcttgaattcatagccatcttttgttctctcacttgttattattgtttcactactactaagttgagatgttttgcttttaatttccatggctacaattcactttcctatttccaaatttataataataaaattaataatgtttgtattataaacagcctcagcctcatgagtttatatgggccacaattgataaaagcatttccttccacaaatatttccacatcacctattccaatatgaagaaattaccatcactatcgaattttataagtagtttacttaaatatgataattttaaatataattaatttatatattattcttttaagtattttgatagcattttatatcccatatatatatatttatatatatatatatataaattaagtttttaaatctcatatttaatgtttttatttgattaggcagttttatttgtcactgatgttgaaaagttgtcggcgccgaaaaaatcaccgaaatagttgtcggtgttagaaaaagcattggagttgctgccaacgacttttccgacaccagtagctactccggcaacttttccggcatcgacaacaaacttcgaaaaagtcgtcagaattggcaagttgccgaaaaataccaagaaattggtttcttcatcaagaaaagaaattagtttcttgatgaagaaaccagtttcttggtgatttttccagtgattttttcgatgacaatgccaatctcgacgtttttttggcgtcgacagtaactccgacgaattttttgacaccgacagctactttggagactttttcaataccggcagcaaactccagaaaaatcatcagaactggcattgtcgccagaaatattatcggaaaaattaccatgaagaaaccagtttcttgatgatgagttagaagtattgaaatgatgaaataacttatttcatcatttcaatactttaacacccggacccagactcgaactcgaaacctaggacctagacccagttccggatttggacccagactcggatccagtctcggacctagaccatgacccgggactcaagacccgaaactagatccgaacccgacccgtagtcggtgtttaggtcgtgttgattgaaaatatattataactttaacaatctattaatacaagttaatactaaacatagtattgtattaaataatattaataggcctcgtttggaatgccgtattaggtcgtattgtattgtattttattatattaaattgtattttatgcaatatttttatgtaaaaccatatgtagtattaacttttatgggcacctaaatatataatattttagtataaattaaagtttaacatagtattatataaaaatatgatata

SEQ ID NO: 390895 - DNA, 1178 bp, Cannabis indica
aaaattctatgattattttttttagtcaacaaactcaattttttttatatctagtgctctttaaactaagtataaaattgagagagagtttacaaaatcatgccaggtaaaactaaaaggtaaatttttttacccttgcacccattaagagggagctaatctaatatatattgcttcaattttttcatctctcttttcaaaataattaaatatttgatatcataaaaaagagagagattgttaactcaatcttttaggtctccttattttgatgattaacaaatatttgattaatatttgttactaatgatttgttgattttgtagcataattaaaggaaaaataaatttttctaaggcaaaattaactcggagggaaaaatggtaattttatcaagattctcgaaagtgacctgaagtggatttcaagactcaagaaactcaagacaagactccatgaaggtttatctacattccctagtcttgtataatgattttcaagtccatacttaaaaaagttttaagtacaaattttggctcactaacttgcgcgacaaattttctcaccaaatgatataaaaaaatttaaattgactttttgaatcacatagcatttaactaagagaacaaaattagaatttctgaaattgaataattgagtagagagttatggtcgttttagtgcgaaatattggactttttgccactgccaagaatttgattaactcgttcccatatggttaaccggttctcttgaaatcggtttactagttggggaaatggtgaactggattgtccagtgcagtcttgtttttcgtatctaatggctatatttcaccccaacactatgtaaacttaatttttactcaaaagtaaacgttggttgaccattaatttcatacacctaacttattcaagtgagtttaatgagctcccaagtctaaaaaccaataaacgcttttcacacactttgagccaaaatttctatttaattctttaaagtgtgattgctaatcactatagattttctattgtatcatcacacttctagagtgaattttcttgtaattccaaacatattttcattaagatgatgctagaatcattaagatgatgcttctgttggaaatattttaccaggatctagatttactaccaagtatgttttattaacatcct

SEQ ID NO: 390896 - DNA, 2032 bp, Cannabis indica
cacacagtgattactttgggaacacctgggatcttaatatggacctcctgacagactggttcaaccgcttcatcgggcctcagagttgacgagccactttgtctccaatttgacccagctcccggccaagagatatgcagcctgcgattccacgaactcaatctaccaaattcaggatattagcactgccatgaccgcggtaagtctacctgttattgttctcgggctttgatttatggcgcttgacctcccatgcttacatatttctcttgtgtcgccagattgctgtagagacgggtcacctctcatagactttaattgaccatgggtacatcatgaccgagttcaggggcatggatgaggccatgaagagtcagggagacttggcggctgagaggaaagctatccgagaggaggcccagcagagggaggctcagatggagcggagtcaccaggaggcactgaaggccaaggctaaggaggtaaaggcaaaggatgatgccctaaggacccgagatgaggccgtgatcaaggcgaggtgtgagcttagggaggcgaaggaggcggctgaagaactgagtgccaagatgaagccctagaggagctgcaccagcctgacttgaaaacgacagccaaccttactgttcaggtgaaggagctgtgtgactgcagggagcaggctcaaaagaaagcaaaaagagatgagctcctgacccccgttacctgccagcattgcaacaaacgttttgacgacgatgtcttcatggcctggcagactaacgacgagaatcttaagcttgacttctatcccaagcctgaggaggtcctcgtccacttctggtagaagaagaagagacttgacggcttgctggaggagtgcaggggtccttgccttccacctcaaattgattagccagttgttcaccactattatcattatcattattttcctcttttttttaatgtatttaatccttttcccctctctaagacaatttacttatttttttcttaaggggagacatttaaggcctgtccccaggcccttatcttttttagagcttttctttgggatccaaacactttatattcacatttgaatacatatttagctgttaactttgttaaacttggtctgttttacatttttccgtgtgatatgctttactaccccctgagtcacatgaaaattaattttaggtcactcagttttacaaactttaatttagaggttgcacatacttgtccagtacaaatttaatttacagaacataaaattttattctttcgactattggtaatactttcagaggtgatcagcattccaggccctaggcaccatggttctgtccattcttttaggttccgaagctgatttcgtccttaatttcgtacggaccttccgaatttggcccaagtacccccactccgggttcctgagtggctggaaagacccttcttaggaccagatcaccagtagtgaattttctatttttgaccttcgagttgaagtgtttggccacctttttatgataagctgccattcgtatttgagactcatcccgaagttcgtcaatttgatccaacgcttcttgtaataaagccttgtttattgttggatcgtaagtcgtcctcctatgggatggaataacgtttccaccgggacaattgcctcacaaccgtatgccattgagaatggcgagtggccggttgtggttcttggtgtggtccggtaggcccataagactcttggcaattcttttggccaattgtttttctaggccagcagctttttctttagggtgaccctgaggattttattgtaggcttcttcttgcccatttgtttgtggccttgccactgcggagaagcttttgatgactttgtgtcggttgtagaagttggtaaattcttcgcagtcaaactgcttcgcgttgtctgagactatcttatgaggcaagccatatcaacacactatgtgttttataacaaagtctggtgcttttttagcagttatagtcttcattggctc

SEQ ID NO: 390897 - DNA, 930 bp, Cannabis indica
atataataattaatctaataataagcacaagtaaatatattacatatatatataatataatttacaaaccaaatggacaattcatgtggtggctttatgtgaagtaggtcataagccataaatccatctttgtagaaagaaagttaagatgtctatttttttgtaatagtaaacatgggtaccataccaatcacagcccccacttgaactcaccaatcctaactccattgagaaacaacacctaaaaaaaaatcataaagcaagtaaaatagtatttaatcatgtactggtccaaattgattactacataagatcaaaatatatatacataatttatatatagactatagtggtacatatattttaagtagttatggatttgagactcttaagtatggtctggtactcatattaatatatacaattatattcattgattgatcgatgaccactagttaccctccaaactcatccaacaaaagtctctactgactttatggtgggcggtcaatttagtagagctctgagagtagtgtctcagattttggatcaatatacaccacaaaaatctgctacttttaattataattttttagacaatatatttttttgtaattaaatgtgactgttagtcacaataaaatgttaaacataatatttagttacaagctctcactaatttagttttagtcacaacaaatattgtgactaaaatacatttattcacaacaaattgtaatttttgtgattaatacttttagctatagaccttttgttagacttttatttgggcttacattaaattttattggttttattaaaacttgggttgattggatagttctttgctgtgttagcccatgttgttggtgatcaattgttaatgggcttagcatctgtgagtaaagtctaggtgaagcagaagtgtgg

SEQ ID NO: 390898 - DNA, 772 bp, Cannabis indica
caaactcaacaaagccctgtatggtgtcaaacaggcaccaagagcttggtttgaaaaactgtagaactgcctaatagagaatttcggcttcatatcttctaagtctgaccacagcctattcattcaacataccagcagctcaatgattcttatacttgtatatgttgatgatataatcatcaccggtagtaatcttaaaaagattgcagccttaatcaaagccttgaatttaaagtttgctctcaaaaatcttggcaatcttcattatttccttggcattgaagttcatcataccaaagaaggtttgcatctgtctcaagctaagtatgttagagatttgttgtacagggctcaaatgcaagatgcaaaacctgctcctactcccatgacaagtggtctgaagttttttgcttttgatggggatcctgtggacaatcctcagctgtagagatcaattgttggtgcacttcagtacttgaaaataaccagacctaaaatttcttttagtgtcaacaaggtctgtcaattcatggccaatcctctactactcattagaatgcagttaaaagaatactgagatatctaagtggtacaatttcacatggcctgaatttcaaatgtcccaaagattttgatgttactgccttttgtaatgttgattgagctagtgatctagatgaaatttctaacttggttgcttggcaatgcaagaaatagcatactatttctcgatcaagcactgaaaccgaatatagaagtctagctcaagtgg

SEQ ID NO: 390899 - DNA, 1915 bp, Cannabis indica
gattcattccaacaattctatcccaaaaatatatctcattttcccattgacagcccacactacacccctcaagtactactattactctttttccaacccttcaattttttttatttatttatttaattaattaatcattaattaattatctctcttttaattctctagatcttttactcaattccattcttctttaaaaccctcttcttttgaagaccaagtcatcataataatttatattcttcaaataaaccaaaaaagattattataaccttcatttcattatattttataaaattcatcatcatcatcatcatctcttcactccaaattattaatattaagttcattattattatttcaatttctatggcgaagttatcacagaaaaataatagtgcaaatgttaatactaataataatgggacacatgttccaaaagtgaaaagaacaagaagaagtgttcctagagattctcctcctcaacgcagctctatttatcgaggtgtcacaaggtaatttttaatttttatattatcatatatacatatatttttacatgattttatttccattttttttgtttttataataaaaaatgaaaaatgatatttatgataataaaatgggattttttttttttaattaattaaggcatcgatggactggacggtatgaagctcatttgtgggataagaattgttggaatgaatctcagaacaagaaaggacgtcaaggtacgtaaattattaatttaataattataattaattagctattatcatatttaattttctcataattaattcttaataatctaattgatttttattaattttttttcctttggttgggaattttctggtggtgatggatgatgaaattaatgccgtactaccttcatgcagtttatcttggtatatatactttatttttattattcaataaattaatgggagatttaacttaatttatttttaattttgactaataatgtgttgaataattaattaaaattttcaggtgcatatgatgatgaggaagcagcagcacatgcatatgatttagcagcattgaaatattggggtcatgacaccattctcaattttccagtaatttttttcttttcaatttactatttcccataaataaattctcaagtatctttaattatataaatttttaataagtacattatagaaaattaatcatatttttatatcaattcttggcctgcaatatgtctcaagtaatgacataaaaaaaaccatatataagtaattaggacgtagtttttgaaacctactcgaattaaaaaatttcttgtagcgcttaatgctaattaaggatgtttttttttattaaaacatgatcaattcgacataaaatttgagatgatcaaataacaaaaaaaatattatggccagattaattaattagtttagtcaatattaagaaatatggtaatgcaaaatttattataaccaaatttaacctaaacaacttgactttggttaagtagataactattaattaattataactaactatttgatgatagaaaaaactatataagtgattagttaataactactctaatttctttacattaaatatatatattattttttttaaaaaaaattgtaatatagtacattaatttatatataatcaacaaataaaattaaaatttttagttatttattttctactgtagttatcaacttatgagaaagaattgaaggacatggaaggtgtggctagagaagagtatattggatcacttagaaggtaattataataattgattatacataatttttggagcttgaatattagttaattattatatatatgcatatataagacataactttgtacattaatatatataattgctcgtaaaaatcataca

SEQ ID NO: 390900 - DNA, 1096 bp, Cannabis indica
agagtgatgatatgagtttctatctttctttttaatttttcaaattttttgtttatttatttatagtttttgcgattatttataaccaaaaatttgtagaaaaaaactatttattggattcttaatttgtaactctcggtcatttatgtttatatttatgttttattattaatcattaaaattatttgtattcttccacttttttttaaaaaacttatttgtatattttgtataactattactaatttctccatttttttatttatgttatgtttttatgattacataaaaataaatgtgtaataaaaacattatttattttctttgaaactcttatcatttatgtttatatctccaatcccttctattatctatatatataatgtcacataccttaaattgaaattttgtgtccactctataatttttaagattttttttttctttctaattactattcaatttcagtgttacttggcaatgactatttaattttaaaaattttgttatgttttttcctaattcgtgatgtttcattttttcagattatttatcaatggcaatggcaattcatttataagtctttccaatgtatattttgctgcaaattgttatttggtgatttttttttcttactttagaagactgtcactaaaattatctcaatgataaataaatatgcattttgatacaattttattatgcaattatctatctatctatatgtcttaattttttattttcatcatatatctttctatgtactaactttttttctctccattctactctctcttaagcttaattatcatgagtttgaatcctctattttgatcatgaaatttgtctcaacaacttttacttaatctttcatttagatatacttatatagagcacatatatattatttatatatttctactattttaatgaacgattctcatgtatataattgttctcaactatttcactactacaaaaacaccctttagaggcggtttttaagccctttaggcgtcggttttcgcgaaattcgctaccgacgcctatcagggcgacgctaaagggtttatatgaaccgacgccatatataccc

SEQ ID NO: 390901 - DNA, 991 bp, Cannabis indica
tttccttaaaaaaaaataagttagagaaaagtactgctaatgagttctggtattaatggtgtttgaggagttctttcactttcacaaactatctttttcgtttgcaacagtactactccacacagtttagatatatagctaattatttattattttattaattaacaataatttacaaactagagcaccaattaattagatgtagctaattattatgattattattgtaaaatatatataatatatataataattgtgtcaggaatgcgtgctgttggtctgaatccaattgcttcattttgttttggctatgctcatcaattctgcactcagttattcaactcttccagtaagtatatatatatacaaatatttatatatatatatatataaatacatttctttttcagatttttactgtatagtcgtactagaaaaatattagtacaaataattggcatgtgcccccttttttcaacttattttacattttagtctatttttgatcatttttactcaagttttctttaaaaaaaaaattcattaactttacatttatgaaataccatttattactctaaacatattttattaattcccattatatatatatacatataaataaaattcaatataatgtgattcataaaattaaaaaataattaatgttttcatacatataaatttgatggtaataattatatatttcagggatggctacccaatcctttatttccagtatacattgataacattcataaatccaagcatggttccgactctggggtttatgacacagaaggaaggtaataataactattaaattactaattataattagaataaactcatatcttaacaaataaaaaaaataattaaaaacttaataaaaatataaaattatttaaaaaaaaattagaaattaaactaaaaaaaagttatgtttacttaaataaatctatattttttttttaaaaaaaaaaccaaaata

SEQ ID NO: 390902 - DNA, 919 bp, Cannabis indica
ttgtattaatagtttttaaagagtacgtatggcacaacctgtacacttggtattttcataacatgctcgaattcgtaccctactctactcggctctaacccgttttcttatacagactcgaattcaagctctattttctcaaattttatttttataattaataaaataattactaaactctatgtgtttttcataatttcaattatttttatataatttttcatcaatatattacagataatcataaataagtactcaaatattattatcaaattataaggatttaaatttgtcgtgttttcgggctgaaccattcgtgtttacgtgtcgtgttgtgcttaagcctatatttttcatgctatgtcataccaatttgtagcattgtgctatgtcgtgcccaagcccatatttttttgtgtctgctcatgctcgtgtcgatttcatgtcgtgtcaaaaattctggcccatatttacagcactactgcatacacaggcgaacctacattagataaagggagtagtgggccctatttaatcttttgtgtgaacatacaaatatagagtttttggcggttaaactctcacaactatcacttcacttgcatttaattttctaagctcaaattttagcgataaaactctccaaactacaaaactgttagtaaatttgaggtgtcatccatttactacagttaatgtaacgctctagctattaggcacactacccaagataaataagaaaccctaatcccctagacgggattactaataaaataagcgaggaaattaaactttaaatgcaaacggaatgaaaataaacttgtaataattttaactttacaaacaaacaaaagttacatgtctcgggatcccaaaaacgagttacaaatattactaagtctgtttccaatagccgacc

SEQ ID NO: 390903 - DNA, 963 bp, Cannabis indica
accaaatataagtatattatattgttattcgcatttttagatgaggacacatgtaatttccaaaactaattacaaatcaatcactttaggcccaattaagatagtgtgccacattaattagcgaattcaactgaaagagcgagcaagatagtgcataatcaattctttaaaataattggacctatagtggtctgaaatagtcaattctttaaaataatcgcctatagtcatccaagcgagcgggatagtcatccaacataacttgaatccagaaaatatcatttagagcgtctcgagaagtaatcaagaagtgtccggacatcctgctgagtatcacactcattaattatcaaatcccactaatatataaaaaattgggttttttttcaactaatttaaacagtagggcaaagtgtcttcagtgatctctatgattgtcgcctattcgaccgtcaagaaaacttagaagaataggcaattgtgcaaaactgccagggatactgatcagtataggcacaaatacttaggcgattattttaaagaattgattatgtacttattgtcaacgcttttgcacaatcggctagctatgcaaaactaaaaaaaattaggttttcaatgacgcgcggtttcttttttccacattgggttgcagaatagtgacaaaatgcaaaatttctactatttttccccgcattgcttgtacattttgttgaagcaaaaatctagacacagatatttgaccataatcacttgctagattggcgagaatgtattatgagttaagtataaataagagagagacacaatagtttatagtagttcactccctgtatcgcgataataatagagctacatcagcttcgagttttatttctaactagatggaatctaaaaaaatatttaagtcaccatgctcaaatttctatagagagaaactagagagggatgctgtgaccttat

SEQ ID NO: 390904 - DNA, 614 bp, Cannabis indica
ttgttattttttgaaattatttgtgaagttaagtcaattttgttagagcaattgttgggtagaggttgtaagaacatctttaagggggcaccattctattattagttacatttatttttgctaactaaaaagttaaaatagagagctatttttattgttgttgctccaattatattttttttactatagttaatatttaactattttaataatattttataattcaaaattgtcaaatataaattaattttatagaataataaaaaaataatagtagttttgattaaatagtaaggacaacttcctatatttaaagagctctctatccattctctattataaagagtcattttttgtatagttggaactcattttttcaagtctcactccctattttagttaatgaataatgagtagaggtgttcataaaatagtcgatccaattgaatctgcacgatccaatctaatctaatccgcaaagtgcagattggattggattagaaaattcaaaatttacacttgtgcggattgaatattgtttgacatgtaaaagtaatcactccaatctaatctacacatatttataaaaaaaaataaaaattatatatataatt

SEQ ID NO: 390905 - DNA, 808 bp, Cannabis indica
caatgcaatatttatctagttaccaaaatgttattatggagttaaaatttggtcaaataaattaattgtattgcctattgtaccatttaattaaaataagactaacaactattcaaaataataataattgttgaatcattttttttaaataatctattttattttattcttttattaataaagaataaaaaaaatattaagaactagtcattcgaagtcaaatctttcacctcatcaaatcccaaataaagtcattcatgcacctctataaaaaaagtttaaatgaggtcactcaccttaaaaatcccaaatgagatcatttaccccaaaatatcaaagtgagttaattttccacaaagttctctaagatacaaaatttttgaacactttaaactacgtttgactttattcctataaaagaatatgtaggtaacttaattgctaagacatccagctgccaataccgcaaaatagtataaaacacaactctcaaaatattctataaatagtcttttggaattaaacttacttaacctatcaagttagtaggtccatctatttgctcatctaatgaatctgaagaaagttgatattacttataacagttggctttaatagcaacttaaaggggaccccaccaacaactataaataggtgttcctctatcctcaaagggagttctgagttctgatctctaatctccaagctcatactttagatttcaaagtcgagtttagagagagatagtccaagaccatagtgattgtgtgtggatagatgtaatgggagtaggggtgttcattggatc

SEQ ID NO: 390906 - DNA, 745 bp, Cannabis indica
attattaataagtgatagcaattagcgatgcttattgtgcaactttttcttgttagaaaaaaaaaaaaagaaattaataatgtcacactcacgtgcattaatacaagttaacaacatctcacgtggagatatgttaattttttcagcctttctataatggtgagtttatttgactgattagagaatgagaataaggaattaatgagttgcattactttttagttttttttttttttttttcctttaattttgttaaaaaatgagaaagaaatacgtagatctcatgcaggcccggccttttgtataggcgtgctaggcttgtgcttatggcctacttagcttaagggttcaaaaaaaaattattcttttaaaattatatatttttttattgattttgaaaaataccatattttactctaaataagggtctaaaaatattttttttcttatagctcattaaatttcaggaacggccctgatctcacactagctcgaaattaaaaaatgaaattgacaatctcctaatattgagagatttgtcactttcattcctggttacagtagtcatttttactagtatttaattattaattttttacatatataaatttaaagaaaaatcaaaatatatattttaaaataatgcattattaatattcttttataaatataaatgcattatttattaaatcaaagatatttaatgaaaaaaaaaatatgtatatatattaattaaaaaatctat

SEQ ID NO: 390907 - DNA, 1081 bp, Cannabis indica
acttggcttcatatatctaaaaacccttcaaactggaagaattatccaagcaagctagatttcttcctcctcttcctcaggcgttgttagactcttattaccattgtgcttcttagttcactcacttcagagatcgactacgcttcataactattcagtctcacacttgattttgattgtagattattttttttcttcatttttatcattattttgaatgagttattgcattgaaagtggaggagagtctttgtctgcttattttcactttattacaagaacctagatatttagttgtttggcctaggtggcattttgttttgtcaatggaccatttattttctgtagctgacagagggctaaatcttcttaggttgaggtcctttattctctttttccattgtgggggtatttacttccccttcttgttttccatgctttttttcttcttttgttgttcttcatgcaagtgcattgtatttggcacccgatactctgccttggggagagttaggatgtagtatccagagggggcctcttcctaccagtctaaggacccctagcttgtctgtaattgtagaattggtgtgggggtactaactgctaggtttcttcatgtcttcaaatgaataacactttacgagatcttcaagcacacaaattttatgcatttaatgggagatttaagctctgtacttagagagaaacaatgacatggtgcgtctaggagataagaaaaaccttcctcagaaggccagcaactccctccctccggttcttccgttggacgtggtgctacaagggccagtccctcttccccactatgtttcccgtgaaccagctgggaaggtaatgaactaaattcctccctgtgatgtgttcaccaacttaggaggacgtggtggagaatgggatcgttccttgccttgctaaaggagtttttcactgactccctcgggacaaggaaaccccaaatcataattatgagggctttggtgtgtagagccaagcgcatctgatggtcagggcaaaccttttgcttcaaaattatttcatcaacttcttggtttttgttggacta

SEQ ID NO: 390908 - DNA, 2466 bp, Cannabis indica
aaagggaagttaagttccaggttcatcggtccgtttgactttctggaaaggggagattaggtagcttattagctagccatactccctgccttacttgaagttcataatctgtaattaatattcagaagtatgaggtagaaacgatccatatacggagttacaagaatgttgaatttcaaacaaacttgttatatgaggaacaatcagtacaattttttttctgaatagaaaagagaaagtgttgtggaacaaagactatatcggtagttatagtgttgtgaaagaacaacaagattgaaaggcgatttgggagttaaagttgcagttgcggaagctgtatcctgagttgtttagacaaatttcgaggacgaaatttccataaggaggggataattgtaatatcccagaaaatataatgatatttaattgggcatattttattaaatacgtggttaagtgggtagtagagtaggattataatcctacttaaggtaattacgagtaaataaataaataaagcgtaatttattaattacgaagattttatcgaactatgtgggtatcacagatactatttttgaaataaattattttcgggttcgacagccgtggaaaactcgacggagtggtctgaattgtcacgataatttgagttgtgatacaatggatctttcccggaatagttaagaaatttaagttactagtttatttggggaatttgaaatgactaaaatacccctagggttacttttaggttttaatgttttatgaagggtaaaatggtttggtggggttaggatttttgttttgtatggaatttctaggttgaggttatattaaaattaagtttagattaagttaaacaatattaggaaataagatgggataaagtagaaaaataaggagcatttcatagaatttttttttctccctcctcttctccttcaaagccctagaacccagctgaagccatggggttttctttcaaattcaaccatttctagtaggattgataaggtttaaggattgttcaagcttggaggtaagatcaccttcttcttctctttaattttgtaggttttgagttagattttgtggtgttttcatatattttggggttatagtgctgagttaagttcagagtgcaattctaagttgaatttaaagttgttcaagtgtgtttgtgatatttttgtgagctatgaggtttgaattggaaaattaagttttgaacctagtttttgttcaagcattgtgattttgtgatttgaatgtaattctgagttttggatgttggatatattatttttatattgttaaactgttctgcagagtttgaacaggtttggaggagattaggttcggttttggagcaaaaactcgagtttccatttttctgcagtagggaaactggttaactggtttcacagccatagtgaaactggtcgaccggttttggcagtcgtgggggtaaactctagtttttagcttcaaaactggttttgctcggggtgtttttcaaagcttagaataggatattttagaaacgtttatgttattttgaaccagtggagagttagaatttgttcggttatggagatagggtttgttttgaatatggataagttgtttattggattttgttgtcgtgacataggactcgggatcgtcgagctttattccatttaggtcggcccgcatgcctaatttctggtctgcggtaagaaaagctatacgcattgtacatgttaagtgagaaagaattactattgtttgtgactcgattgtgatcgagatagcgattattaccgtttgtgactcgattatggtcgagatagcgattattactgtttgtgactcgattatgatccagatagagattattactgtttgtgactcgattatgatccagatagcgattattatagtttttgactcgattatgatcgaggtaacgattattatcgttagtgactcgattatgatcgagagaagatagggtcattaccgttatgagtaattactcctgaaactgcggttagatttcttacttatcgttcgctgtatcgggcgacgatagtgacatacacagctcatgaacaacaagtggtaagggtgctttatgaagcactaaaattatgtgattattgaagatatatgtgatttaagtgctttgtgaagcatgtagattatgtgaatatctgtttattgttaaaatgaagtagtcgaccatgacttgttcgactttcttataatgagtagtatatgtatttgtatagatgccaaactatatatgcatgcttatgttttgaatcaaaagtatatatattatgttgtgatgtaagtatttgcatttttttaatgctttctgtctaatagcttttcttgttgagtcattgtgactcacgggtgcttcatggtacatgtaaaaagaatagcagtggtgttcggccatgagttagaggt

SEQ ID NO: 390909 - DNA, 769 bp, Cannabis indica
ggtagaatttgattttttattctttgaaaccaaaaaaaaaatttggcaggtttggacaggttaacccaaccaaaccgttggtcggtttacaattttttttttttttaaatgaagggttgcacttaaattttagcaaaccgaactttagattgggttagaaaatatataggataaaccgcccaaaccgatcgatgtacaaccctaatttttaggtgttataatgtttggatcccatataatttaaggaaacaattttcttattcatatctctcatcaaagaatgttattcgataatatctatctaacaactaattaattgtacgacgctacctacacaaaaaaaattaggcagaatggtacccaatatcacccacccacccacccctctctctctcatctattcccacacgtgttattattttgtgtttaagcttaattaaggagctataaataaaccatgattcttattgcataatgagtgaatgatccggcttgatttacatgattgagcactgttaaataataaattagggcttggcaaagtatgctattatgtaacgtccccgcttcaagcttccattgggcccttacacccacggactcatgactcttatacacgagtacgccactctagctgcttcttagattgatgactgaccttacagaccaacacgagtgtttccagcgtgccttgtcctcactatgcaccttgttgatataggtagtaccaatcaatccatttaagccctcttcaactgtgtagtcccat

SEQ ID NO: 390910 - DNA, 965 bp, Cannabis indica
cttcattggaaagctctcttcaagatctttctacacatttctcacacttatatctcaattttgaagttttttagtcaaaaagttgctcccaagtcgaagtgtgatttttgtcgcaaattccaacctcctgaaattgacgatcgccatccgaagtcaaatttgaacatcttaatcattagatcaaaataaatggtcaaattcaccccatatgagagattccaagaatcttctcaattttcattactacaaatataatatttatctttggaattttccttaaaaaatgaaaaactaaaaataaaagaattttaaggcccgcatcattacttttagcctcgcgcccaatgaattctttttggttttaaaaaaatcgaagataaaagggtcgaattacacctttatgttcggcgtcaattatatatagaagatataggcccctacacgctgaatcaaaaaagggcctaatattgaagatgtgtcttcggttacactttacactctccataaggttagactttctatctttatcttacttattttctctcgagagcttataagtgagaattctctttaggtaattctcttgtatgcacttttcaatgtaataaaatttcgaagtagatataaatttatgaacatcgcaacacgatgatgagtgaattactataaattgttgtctttcttgtattttattattgttgcattatggtttatgagatgatacgttattggctgtttgttggtgtcaatgcgacccactcacaaatatatttgccaaaatattattttaattaaggtaaatagcagcataagtacccaaagttttatgtttgtaagcgacataaacccaatgtttatttttagcggcataagtacctgttgaccgaggttttcggcaaccaataaaataataataatttagagagctgtaagaaattaggagagagattttttacgtggttggg

SEQ ID NO: 390911 - DNA, 1845 bp, Cannabis indica
agagagagagaggggggggaaaggagaggaaaatcatattgtttctttcatcaatgagcaggggcaaattgttgaagactatacagaggtggttaactattttaataaccattttagaagattaatattgattgcatttaaatggggcctcatctatctgtttagacgcatatggggctgattaagaggtttactataggggatatgaagaaagccttatttagcataccgggaacaaaaactgcaggccttgatggatatggctcaaagttttataagtggatgtggcctgaggttgggactgggatctcagatgttgtgcttgatttctttgaggtaggatgggttccaaattgattgaatgaaatagtgattgccctggttccaaaaactgataaaccttctcatatagtggattatagactgatttcttattgtaatacattatataattgtatttctaagataatatacagtaaactttcagaggttctccctcacttaattagtcaaaaccaagaggcttttgtgaaaaatttatcattggcccataatatcttgatttttcatatctgatcaagaattacaataggaagaacacctctcctaaatgtgctctaaagatagacctgagcaaagcctatgatatagtggattgggctttcttgaaaaaattgttagactgtctttgcttcccttcccagttcattaattggattatggtttacttaaaggaacctcatacatgcttatgatgaatggaagaatccaaggtaggttacagggtgctaaagggctaaggcaaggcttaaaggaacctcctacatgcttatgatgaatggaagaatctaaggtaggttacagggtgctaaagggctaaggcaaggggatctcatttctcccttattatttgtaatagttttagagtatcttactagattgctacaattgggggctcaaagcaagggattcaagtatcttccaatgtgtaaaaatcttaagatcattaaccttttcttttttaagatcttataattttttgcaaagccaatagggaatcggtctattgtgtgggaagatgtttgatgatttttgtcgaagcactggtcttggggaaaatctcaacaagtctcaagttcttttggagtttcgagagaagaaaagagcagttgttggtcactactagaaaagggacattttatctcactttttatacttgaaaaaaaaataaaaagtaggataaaaggtatgttgatagtttttaccccacttttgtataaggcacaagggtcatgtttggtttagcactaaaaatggaaacattacacaaaaaagtcaaagattgtttttttattgactagccaaaacacgcccctaatgggtcttctatcacactttggagcaaaggccatgtttggttggtcaccaaaaaatcaaagttacaccctttattgtttcattggagccaaacagggtaaaggggaaacccttttatcccgggttttaacaaaaaactaggataaaaaggattttcctaatctatttaacccgtttaggggttttattttagatctaatatatttttctcacacatgttctctctctttcgttgttccttctccttcctctccacttctatcttcatcaagcagcccagtgacttttttcaggtgacggacgaccaatgaagtttggatctgagctccacagccttcaaaacatccaggtatcgttccatcacgttctttatttaatttttttttttttttttttttttttttggaaaaaccaattttgctcttcgtatatgtaacaccctaactagcataggcgtattacgtgatt

SEQ ID NO: 390912 - DNA, 2570 bp, Cannabis indica
tctagaagcttcatctctttctttcatcatctctttcctcttcatctaactcaacaccaccacgccctactcttttccttgactctttctttttcttttcttcttccatgttctttttcacaaagagatcttcagaatttgagtttcaggttccaggtttggtagattaagaagggattttgtaatgttcgttgcttggaccggaaacggacaataatggctttaattttggtaaagataatgaaaagatcgctattcatgctcatcctttctcctccggtttgaagcccagatttgagatctcactctcatctctggtaccccactcttgcctcccctcatcacaattccaaaacccccaaagcactatcgacgatggcctccggtgttggcagagaacacctagaaatctctcacctttaggatctctcggtttctctctttccatgtggatataaaaaaaattattttaaatttgatatagatttgtttatttttgtggattttagatttgagatgtaggtttgtttttaatcatggaaggtgcgggtttgtttagttgtgtttggatctgagattttaatttttgtttgagtcgtggtggaggtggcagtagaatggatcaaagcataggttgaggtggtgctgggcaatgttggtttaggtggtgaatctagaaaagaagaatgaagaagcagattataaaaaactctgaaaaaaaaaattgtgacagtaaaatgttaaggacactataaatctgaatttagccctaattaattcatgagaatcaaacaataatttagagggtagcggaagcgtaccggagtccaatagaatcgatctttgaatggtatgatcttccaattttgcagtgaaatctttctttataacctttgtctcttgatgatggggtttcaagagaatgaaaagatacgatactacaaattggggaccagctcagtgaactcctttgttttagtgctacggactgcctcattgcagtgacgtcccgagtgagagacaccattttctgccacatgagggcatccttttggaattgaaacgtggcacaggtcacccggtcattgtcggtgacaccaatataattccgaatcctttcaactaatctcaaccattattccaccttcatgacatcgggatctcccaaaaagactggaggcatttgtttacgaaatcgttcatataagggctccatacaattaccagcacatgttgtcctgctggcgccactggaaccaaagcggatggcatttgttgaggaggaatagcaagaggaccctgctgtctcagcctctggatctcttcatcttgctgattaatttgggcttgtatttttgcaaacctttgctcctaatcctaaggagcatgtgctggatttttataaccacctttttggaacctaccacgggctttgcctcgtccatggggatttggaggattttgacctccccgaccgcctccggtctcaaccatattgcccttactccttacgttttgtcggacgtccatattatatgacttagcctacaaacccataagtcagataggtcaaacagtgatcacgtacaattaaattgtcacatatgtggaattttaggcaacacattattcatttaacatattactaacatgcttcttatcatgattttctaatcatataaattactaaacaagtacaagcttactaaacagtgagttgatcttgtctctgatgatgattgtacatatcttgacggtctttggtaaacaatctgacgactctaatttaaattgtaacaccctacttgtttaggcacactaaaatgattttttaattactatgcatacctttgctatatcaaagagtttctcaaaaattatgtcaaatttagacttctaattaaactttaaacttttataaatatataatgtacataaatgacaagatcccgtctttaaaatttacaatcataatcgaaatatattttataaacatgtcgctccgcgactacaaaataaaggcccaagttgtctcgagatcgaactctctaggtctaactatcctgatatgtacgaccaccctcagctctggactcactggttctcaacttttgccttttctttgcctacacatgtaaacagtaactgtgactcgacaaacttagtaagaaaatcataaaacataaaatataatactgacttgtttctaggtgcccatacacctatttacaaggcttcatatacatcaagaacgtccttaatagaagtacggcccctataccacatacactaagtactcgtcccatactagtgttggtagggctaaactgcacctcgagtaccactgagtgttgtaccgaatgtactatgtacatgtaccgtactagtgttggtaacactgtgtcataccctttaaacatcatataatgtactaatgcactctgtaccgcaaccgtactagtgttggtagtgtacaaatcacataatacatcatgcaaattatatatatacacacataagtaaatccactaacttattaattcctcaatgcatccactcatagaacttgg

SEQ ID NO: 390913 - DNA, 830 bp, Cannabis indica
ataataaattaaatatattatttaaaagaacagtaaattaaataatagtaataaagtaattaatgttgatggagttattgctataatgagtgtcaaatattggcttaattttagtacgtgataaatttaatacaacttttactatgaaataactacttttttgaaatgtgttgtcaatgcaacaaatagctgagaattaattaaagtccattgtttcacataaatcataaaatgaaaataataataattattgactaaagctacgaccaacgaatctcttcaaatttaagactaccagtgtggaaggaatatctcctaaaaataactattgatgagttttactttcaattaaccaacttttgtttgggcattgttggatatacactttataattattgatgatttgacttatttattttaatagtggaagactacacatgacattcatgcctaacatatatcttctactatttctttgaaagaagtagttactactgttgacgcggtttttcgtcaacggatctaagaagatcgtaaaacgagcaagatgaacacaagcaatagttaatcaaagtaaaccggtttgcaaaaagaaattcaccataaacgaacacaagaattttatagtggttcaccccctttcagcggtaataggctagtccacttggagtgttattgatctcaatgcttgaggtgagttctccagagttatgttctccaagagttcactcctcaagtgagtttttagaatttgagagagggagctcaagagtatgatctcgtgagtatcaatttcagggtccctttacaagtgatttcaccccccttat

SEQ ID NO: 390914 - DNA, 1677 bp, Cannabis indica
tttttttttagatagaaacaacgatgccctagctgtatacacagtaatatattttttcactttatttactattttcttcattcggttaagatttagagtaatccatgtgatcccagatcaacaactaagatcatgtccaaggaaagacaagataaatcaaacggtctaggaaagttgctagtcacgcatttgatgcgatgcctagaaccaagatatctaaaatgatgatattttcctcgagaactatgctagtgtaatcagctattatttcaaaaagcattgctacacgcactccaccaagagaagtaatccccacaaaccaaagatataatacaatgtgtcgcttcatttcaaaaaattagatgttgtcaaccacaaaaaatttggtttggaattctaaaagatttcaccgttagcctccacctatcctcacatcatctgaaaggaagggtataagcttccacaacatttagagttacggaagcttggggataaatgttatccatgttttacgatgaggacatgtgtaattttcaaagtggttatagcttaatcccttaaggcccaatagcaggcccaaccaagataatgggctatatccactagcgaagtgagctcttctacatggcagacaaacgactcatccaggcgaattagtcctccatcccaacttgtatccagaagactttagccaaagagttgagacaagtagtttaataacatttggacatctagctctgtgtcatactcattaattatcagatctaatgatatcaggatttaactcccaagatcacgtcccacatcgtatcttcccaatatagaaaaatagtaattgagtatcaagaatttaatatatctttattatccatgattatatgacatgaattggacaactatcaacctaatgtggcatccacatcaacctagaattagcacctcatgggctgggctccactagatgggcctaaaagtcaatatattacttgtatttaccctatcagtgggcaatgtctaatgaataagaaccctagcactacaaatataagaaaattcattcaagcaaagggttcaaatctcattcctcaattactgaagcaaattttagggttcaaacacttgtgtagatcttaaggcctttcaatttttatcgtaataatattgactcttggactaaagctagttaacatcccaaccacgttaaaattacattgttatatctctatttttaagccattttttttagatttaatatatattttattaatttctaaaaatctgggtaaacaatcatgatttttgtgatttcattcacaagtttcttgatccctttcctgtggcttctctagagttgattttggttatcatgtgaataatctgatttaggagtaataaaaattttaacgatgataaattgattgctctagagattgttatttcttgaggtcgtgattttcttgttgattactagagagttgactaggttccttatgttggatgttattttacaaggatcttagatctactcacaagtatgttgatttaacaacctaaatatgaacttctaaaacgatagaaaattaaacacataaaactaagagaaatcttacattgggtgctgcggaatatatgtctcctcccactcagatctctaacccttgattcctttctgtcgca

SEQ ID NO: 390915 - DNA, 3340 bp, Cannabis indica
atttatttttttttatttttttttttctaaaactcattcttgagattttaacaaggcctatttttttttcgaaatcaatttactattggtttcagttatgtaaataatattatacatactccattagttactcaaaaaaaaaattactacatacatgattccttttttagctaagtactgtcgaggattatgctttgttagctttgttcagaactaggaaggagaaggcagacagaacagaaaagaatgtttcattggatgtttttagacaacatgacttgactattctatgaaaaagatggtatgtgacttgaccaattagtttgaccatgtttattttcgaagtttctctaatttcactcaaagttgtttatattttgaagatatatttaaattaaaacatttaaattagcaaaaactatctattaaaatattttatataataacaaataagaaccacaaaagttataaatgaaatgagaaaatattaattttgtttttggtcagaatcgggaaaatattaatttgactcttatgtttagtaaaaatactctaaaagttttcgtattttgtcaaataaacattcgaacttcacatatattgcaaaatggaacaaatcactactacaaaattaatttttcccaattttacacagataagtaaagtattaccgtcagtttctataaatgtcgtctattcgaccgtcgcaaaatagaaaaaattagcgactgtttgaaaccgtcgccattttctcattctcgataatttaaaatcgtcgtctatgatagggtataggcaacggtttataaccgtacctaatactataggctacggtttatagtattagtgtaacactctaatccataggaacgtcatctgtgtaattttataaaactaatttaataataatatattaattaattattaaatggggataacaaaaacttgactaaattgaatactaaaaatagacattataacgggagtaaaaacgtgttccagggatccctgttatgaaatatttacccaaaagactatatgcatagcaattcaaaatacatcggatgcagccagtctaaaacaactcttggcaactcgagacacaggctggtggggtcaatatgtacattgctggataagatcgtcatctcatggttgttctaacttttccttgcccctacctaaaccacagagcacctatgaatcacatagactcagtaagaaaagtaataaagaatgatacattaaatagctaatatacatttcattatcataaatgattaaaccataccattcaacaataagtaatataacaaatcttatgcatggaaatagatatgctcacatatttgtattgcctaatcaggcaagcatgtgtcataatacagtatcatattaataccattgcgacacctaattaagtgagcccgtgccataacttggcactaatatatcgcatcgtttaatcagacgagctcgtacctacgcccggaacttatcatatgtcactgacgcctgtacctacacctgatacgttgctaggaagaaacccaacaatgatgttaatctatgccataaccaggcaatttcatatcactaacgcccgtacctaagccctatacgtcaccaggaatattattgcatcacctaatcaggtgagcccgtacctacgctcggtactcatcatatgtcactaacgcctgtacctacaatcggtacatcgcaaggtatatcgcatcacctaatcacgtgagcccatatattatgttcagagtatcatcacattatcattgccaaattagacaatcgataatttcagaacccgtcatgctatgtggtacattatactttccttacctcaagttttgtttcaggtacgttggctgacctgcttggagaacgatctatgatcccggatcctatttcataacaatgataaatcaataagtgtttaccccaaaacagtacttaagagttgcaaatgacaaccgaggatttcctaccaaaccctgtagtacgaatacactaaaataaaatttatattttggctctaaaacaaacaccatatcgtaaagctcattgcaagctttgaaacggtatatagaacgtccaaaacggacactcaagtgaaaagttatgacaaaaatacgatttctgatctcttatgaaattccaaaaaccatgaaacacgaaaatctcaaacttcgcactcaccgaaacactaccaaaacttattcaatcactaccaaaacttatttaaatcactccaaacttcacagggcacatatataccgtaaatactactatttttacgtaacagaaattaaaattgagctcttgaacgaaaaacgctattaaagctcaaattaagctttaaagagttccaaactcaatttctaacccaaaattacttcaactttagcaagaaaacatcggaactagtcccatgactacccgagaacaatcttataaggtcagaacctttataactattctaattcacaaaatccctatacaaaactaattattttaaacttaaaaatgaaatcaaattttgccttaagctttctcgctctgagaatttatttttctgctactaccggagcttagattgttaggtttcggattgaaaatcaaagaaaataaatataaaagaaaaaaaaaaatcgaaagaggagaacgatagtttcattttgttcgtttactgttatgaatttataacatatattatatatatatgttaaaactgatacgttttataaaaatataatataataatattattaaagtaagaattataataatataataatattaataaaaaaaattattaatagttaccctatcgtttcttagctactaaaaatttttacttctaggtactaaattaaatttcacatactctcatttatcccaatatatacattatcaacttatcacaatattcctattaattccatcaatttaagcatgttatgacaattttgactcccgatcgagtctccgaggtcaccaaaacttaaaatatttttattacaccagtaactcatattgcattcacatatgctatataaatctccgtaatttataaattacgcttatttatccacttacagcaaatttataatttatgttaaactagattagtaggatcataatcccacttattacttgattaacgcataatataattataaatcctaattatttaccattaggcttatcaggatattacaattaagcacggttataaaccgtcgcctattacattttataggcgacgattttaaaccgtcacctatagtataataacctatttttttaattattataaaatttt

SEQ ID NO: 390916 - DNA, 421 bp, Cannabis indica
ctttacccaaaatacctttattttttttttttcaaaacctaaaaaaattaaatctctctctacatccccatcagccatgatagccaagtcctccccctttcctatccccatcaatggctcctccccattttttttttaagaaaataataataataataaaaccctcctcccttctctctagctttcccgcctacaccccttgaggatgtcagcccaaccaacttgcaccagcccaaccactgcgctgcctcccctctacctccctttcattgtggatcaatggtgtaacgcccgtattttataataataaactcgaaaattaattataataatttatatattaataatcatatggatcgggatcccgagtatcaaaatacaaatgaaaagtactttactaatatatacatatatttttttt

SEQ ID NO: 390917 - DNA, 2398 bp, Cannabis indica
ctctgatccaactttgtggacattaattccctctctgaagatgttaatagatcttctgagcacaccttcattcttcttcaaagtcactttgaggacataagtctcaataacatcctgcaagtcaagagaattttctctgatctggacaaccaaaaggcgaactctgtcatcaccatttgttacccaagcatcagcatcttttaagaaagcactcatacattgaagcttgatttttgcattcccaacttgggcttcaactccatacaagaacttggcttcatcaattagcaagtctccaagcctttcaatcacaaatgaaacaacagcatctgccatttgatgattttgctcagtaactaaattgaattgaattgaattgtattgtatgatatgatttaaagtgatttataggtgatcctatccgtatatgtgtggagtaggtaaaaggcattaagcattattggtaggcccaccattatcacccacttccaataaggaacccatcattatgtcctctactacatccactccttttgaaccacttgtgggtaactcaaaaatataaatttaaagacacttgtatcaaaaatgtaacttaattttactacatatatatatatatagtcatatattgtatttcatattcagagcagaatttaactatgaaactagtgttttttcttcaaaaaatgagcccaattctattggttataaggtgatatttgatgactttgggcacttgtttgtactaacaacaaacacaatgataaatttggtatcatgaaaccagaataatcagtaccaacttcttatgctactctatacaacttgtttgtcatcaaacattaattgtgggctacttagttagagcattgaacccactaaagtcattttttattattttaatgggacctttttttacttgaatagttgtatgcaatcacttttataaaataccgtaaaaatattaaaagaaaaaatctttcaacgtaaaaatgtaaattttttacaaaaaagagcattttatctactttttttcatttttcaatccctttcaacagcctaggaattgttcctggcaaagtcctccatcccagccaggacttaataaccttcaaacaaacagaacttaagtgacaagaaaaggagatgttaatacagtttcccttatataaaacaatcaagatcaccttcaccaactcacaaaccagttagacaatcaagatctcaactgatcttgagttctaaaccagttagacaatgaaacaaacacaattgattttacaagcacaatcacataatcataagcaattcacaacacacattaaacatgaacataaaccagaaagttgagacataaaaccagattttatagaagttcgcccaaaatgattggagtacatcctcttttgagctcgccacaaggattgctcattccatcttattccacagatcagatttacagctttgatcttcaggagctgaagaaggaatgatgatctgcgtaatctaaagggagttcagatgaaactgttgaagggatttcagctgataagaaggggacttagatatgtaaaattgatttggaatcaagtgttcgggtaacttttatatgaattcatttaggtttactttgattgattgagctgtaatcagaactggatattgtatcttgattgatttcttagtgaagaacccaagcaatagtcacctagaatgtgtttctagggtcagatgaagcttgtaaatctagtgttcttgatttactttctgttttaatattcaagttacaaattttgattcattcaattacaacacatcaacagaagaacacaaaaaccaaaagataggaaaaagagtcactaatgtaattattgaacaaacacacactagtgataggcagtggcaaacgcatcctccacaaaaaattcatatatagtcatcatccccatctgcattcattcatagtaatgccaatacagaaactgcattagctaataataacataattagacattacacatgttaaattatggttgctttgactccatataggatatgtaatttaattattcctaaaaatagggttaccttatgcttatgaggggtctctttttcagtcaaaagagttaccaactcttctatatcttttccaaatccgacaacaacattgtcttcaacataagaatctgcttgcctcaactgtctttgcctttggacgtagcttgaagaagcctcagctgcattgtgtattgatctgtgtactccaaaagcttgtaactgtgaagtccaagtatcaatgttggatgagatcctctcaacaacacgaaaacaacaaaaatattacataaaagtaacatctaaataatattaaaacaacaacaaaaaataacaaaca

SEQ ID NO: 390918 - DNA, 1462 bp, Cannabis indica
accacacttccgactgggtcaaagctctgataataagaatgttattgtgtatttatgtctgtttttgtatgtgtacatatgtattaagtttgcttccttctatcacattgttaatgatatgccttcattcattaatttgccatacttagtttctagtagcctacaaattttgaatttgtagaaaggtgtttttatctttatataattaataaggtaatgtagaatggaatggatagagcattgattctgttgattggtaacatgaaatgaaatgatcaaatcatttaaacttttcttgcttggatggatggtttgataggcctgttatatgaggtgaaaatcatccatgttaccaatcattcaacacaatcatgaaatgatcaaatcaattatactcattatgcaggaatttttttctagttggattcataaaacatatcacttatgattaatgattgttttactgatttttgaagatatttttttttgaatactagtcttcaacatgttacaatgattaatgtaatttataaactattcaggctcatttggtatgctgtataagagtcgtattatattaaataataaataagactatgtttggataaaacaatatattgtattaattattacaaccaaattttttaatacaatgtatgttgtattatttaatacataacaaatggtctatattagtttgtattataatatttgcaaaagattcgaggtcaacaccaatttccgacccggacctgggacctgggacccggacctggactcggaccctgaactccagaccccagacccggaccctggacctagaccccgaacccaaacccaggaccctgacccgagacgcggacccgcacccgaacgtagacgagggcccgaacgcagaccccggacctagacccaaactcaaacccgggacctggactcgggacccagaccctaaccccgaaccccgaactcggactcagacccagactcaggacccagacccggacccgaaccccagacccgggactcagacgcgaacccggacccatagttggtgttggggtcgagtgtattgaaaataaattttaactttagacaatttattaatacaagtcaatatcaaacatagtattgtattaaataatactaatacaatacaatacaacacaatccaacacaatacaatacaatacagcgtattacggcgtaccaaacaatccctcaaactactcaattctacattctctttcctatgtattagctgatagttgatactgcaatgtattttctatattcattattaaatttttaggttatttcctcaaaaatttctgcaatatttggtttagattttgttatagagttggggcttcttgttctaaattacaataattgaaggttgaatccagtataatttacatatctttatatattaaaagtgcctatctaacgacatttcttg

SEQ ID NO: 390919 - DNA, 1292 bp, Cannabis indica
tttaaaaaaattatttaaatatatgaggattggattagaacggttacttttacatatcaatcaacaatcaatccacacaaatgcgaattttagattttccaatccaattcaatctgcacaagtgtagatatctgcactttgtggattagattggattaaatcgtgcgaaatgactattttatgaatacccctagaggaggcccctgaaaaaagaattgaaaaatgtctatgcattatagctggttatgacatatatttataataaaagatgatatttataggcataatattagtttagtgtaatggttaagctagattgcatatgtgtggattgaattagatcgattacattttttatgtcaatcaacattcaattcgcccaagtgtaaattttggatttttcaatccaatccaatcttcactcttcacaagtgcggatatctgcactttatggattggattagatcgtgtgaattgactattttatgaacacctctagaggagggacaaccgcgccctgaaaaaaaaaaatgagaaaaatgtatatgcattatagttaagtaggacaatatatttataataaaaaatgatatttatggacataatattagtttggtgtaatggttaatctacattgtatatatgagagagggggttcgaatctcaccaaaaacttaaatgtatatgcaaaagtaaaaaaaatgctcttggtgagatttgaatctttcaccttaatcatatatatacaatctagtttaataatttcaccatactaatatttatgtatgaatatcattttttaatataaatatatgccataattaatatatatgtcgcttctatgtgattctacccttatgtttatattatatcatacatcaatttatttatattacttaacatcctaaattatattttaccaagatctagatttactaatatatatgtcgcttctatgtggttctatccttgttggattatattttaccaggatctagatttactaacaagtttgtttttaacatcctaatatgaatttctaaaacgatgaaaaataaacacataaaatgtatcagaaaccttacagtggttgcagcggaattaaatgactcctcccgctcagatctctaacccttgtatcctttctgtagcagagtatcaccaaaatctgagcccgattctgttgcgaaaattattaattactatgcaagtgcacgcaatcaagtagtatactcactcaagtgaggtcgaaccagagagaattggattaattactactaaactatacttat

SEQ ID NO: 390920 - DNA, 588 bp, Cannabis indica
aaggcaacatttatataagtgttatcttatataccaacttttttaggagaaaacacttttacaagtgttgtcatttagttttatttagttaaaaaaaaaagtgttgttggaagttaattttgtagtagtgtatcaatttagctggaatagatggaactgaatgtaaatttgcagaattcgaaaagtgttaattaatcaataacttttcctttgtgatgccattctatttacaaagttccagagatcaaaagacgcacagatacgtatgcataagatatatctctataggtcattggtggacttgttctctttgctttttttttttttatgtcaattcaatgttcctaataattaatcgacaaatgcagcgtgctataaaggttatatcaagtatatgaaagttttcaatacaagtttgtgtatcaaattactattaattatcagtattgttaggtcttttttttagcaatttagttgtcaaaatattttttaattaatgtacatttttattgagcatttaaattgtttttattacattgattttgtgcatttaattattcttttcttctaaggaaagattctttctca

SEQ ID NO: 390921 - DNA, 890 bp, Cannabis indica
gggaagtagatcattacctgctatcacaagaggatcagacctctataacaaatcttatagtacttttcattcttatttgtgcgcacacgtggcatgcatcagatttgcacagccgtgttatcggttgatcacttttcgaggtcaacacttaagatctaaattaattttttaagatttactaaaaaatattgactctttctttttattttgagggggtatgatttgatagttgacaaaatttaggggcaaaattgctaattgacagagacatgtcattatttaaatggaataatgggacggaacctaatagaaggactaaatttctataaatgtaaaagttcagtggggattcttaacaagctgtatattttaggggctaaaatcaacattttcaaaagttcagggggaaaaattgttaattattcttatttaaataaattaatagagaaatataacggaataataaaaaataatcggaatcaatatttgtaatataatgtttattaaaattattaaaaaattgaatgataatgatttatcttatttattttaaacatgattaatattaactacaattattttgtaagtgtttgatgtacaaccaaagtcttagaatgaagcaaacaaataagatgaagcttgttgcgtctgaggttcagatttggcaggccttctaggaataaaacaattaatagaaataacaacaaacacactctattttaatatggtagtcattcctttatatttatttattttatgaagtagccattctttacatttatttacttactttattaaacttaagaaaataagaattttattacatatgggataaaaaaaaagaaatttttacaccaaaaatacaaaatacacactttattacatatata

SEQ ID NO: 390922 - DNA, 1313 bp, Cannabis indica
caaccattataatagataaaaattcagcaagaatattatcaatattgaaactgcaatctgggtataaataagagctacgagcaacaccataaacagttttattcacagagaagttaaaaggagcttacaatttgagagcacaataccaaaaggggaaggtaagttcaaagaactaaagacaacttgaattgaaactaaagaatcggtttcaagttgtacaactccccaatttttcgaatcaacccaactcaacgattctttgatctccaaataagcctccacaaaggccgacttcgcccaaccatcatagcacaataagcgagctgatcaatcaacatgccagaactatcacaagccaccaacccaatcccaaacttcctaggtgaagcaaaaatcaccctatcgacattcaccttataattgtgttagaaaccggcttcgtccaatgctttaaatcattatccgatcccgaaggaacaaatagagatctcattttctttgattgagcatataaccattaattaaggacgacacaagccgaaagaataacatatggtgcagaagaagacttctcccgccaaaccgctgaaatctgagcattccacaccgcacaagccaccattgttgcctcttctctcaaaccagatgaagcagagtgctgctgcaatatcttcccaaaccaatcacgaaaatcttgttcgtttatatgctaccacaattcacgtttgaacaagaccaacaagatcttgtaaaatgacaatttaccaacaagtggaagattgattcagcctcttaattacacacaaggcaaatctatcaattagtacatatttagacactaattgaactttagttgcaagatagtcactaagagaatgccataaaaattggtaaactttacaaggaattttcaaactccaagaaattttctacaaaaacacatgattattagttataagaagaacatcatctttatgtaaaaattaattataagctttttcaactaaaactgctcatggatatcaagttattattttatggatgattatatatgatggttatatttttggaatttttctagttttaaaaaaaaaaaaaataacaatattacaaaaaaactttcagctggccaaataaacaaatatacaatccaaataacaaatgaaaccttcgatcaaccacccagcaactcaacacaaccgaaatgaaacccaaccagaaagagaatgttttgaattcatgaaaaaatgtagaaaaactactatgaaactaaaattcaatcagaaatccagtataattcgcataaaactaat

SEQ ID NO: 390923 - DNA, 1393 bp, Cannabis indica
gagagagaagtgaatgatttacctgcctcagttcagttacgaaattcaactcatgatgatcatactctgtttgctcgtgttttatcttccaaggagatttatcggaagacttttcgcatcaagatgagtggacattagaagggtagataccctgttactatctctgatcaccgttctggtctctttatggttacatttggatgcacaggtgacaagaaaatggcccttattatggaacattggcactttcaaaaccatcatattgtcctacgtgcaccctctgctcttcaagaagtcactgtggaatctctgcatcagtcaccattttggattcaattgcaccgccttccgtttctaagcaagtccaaagcgatggctgtgtgggctggcaacatagttggaacttatttagaggtggatgaagactctattcacgagggatggggaccctttcttcatttccaggccttgttagatgatactaaacctcttttatgaggcaaaatggcaagaattcgtgattctagagaggaattttgggtcgagtttcgttatgaacgcctactggaatttttctttgaatgtggtatcattgtccatccttttgaatactgtcctacttttttagaccaaatttataatggcttggaaccttcactgtcatatggtccagaaatgatgggatcacctttgccttcttcgggttcattttttcaagggtaacgcatggccactcatgagtagattagcaaaaaaatctttgctgcagccttacctaacattgtggataggccgaaccctcatcaataccctctcactgtgactgaagcctcatccccgtccactacaaatcagtccatcaaccatctcactcaaccaatgataattcaccacaaagcatttccaatgatgcctctgttatcccttttccatcctatttaccagtctctcttccttcctccattacaaatacatcacttccctttgccacttaccctcccaacactaaccttcattatcctcatcatacttctcacaacactatctcttctaaaaataaggctgtcataacagagtcaacttctactacaattcacttccatgatattaccaatagtgtatcccataactttggtaatataaatacaaacaatgcatctccatcaattgatagagactttctcggacaccataacactctgaaacgaaaaagtgaatctgaatctgttcgcaaattccttaaacgctgtcgttctcaaaacaatgatcagtctttctcatcaaccttggctgatcacattcctgcttcggttgtttctggtattactgcggattaagcattgcaccaccctggttctttcgcggtggatgtttattgggattttatgcccta

SEQ ID NO: 390924 - DNA, 1077 bp, Cannabis indica
ggattccatgatttgaaaacatacaaaacataaaaatagtatttttattttatagcctaaaactcaaaacaatatttaaattttgtttttgaaaactcaacaaataaagaatttttatgtggatcttcagtttttaaattctaaaccaatcacatctttatttataattggtccaaattgggacttaaactttttataataaattaaaagtaattttaaatagagtattgttagatagagtttttactgtaattgtaattggatcttatatcagctaaatcagtttgtattggaaaacctattgtaaataatcacaatactttctctctttgtatgttgaaaatgggacacttatcaaacaatacaatcaacaatatcaaatattaatcaaagcaccacaagcaaataaaatacacgaatctagtataaaagtgagacactaagatttttacgtataaacccaatgctaaaaaaaactaagggactagtgacagactcagattttttgatctgtgagggcttaattgttataaaaatatttatattactttgcataaaaattataatcattttgtggggttgtttttactattttgttgtatataattatttaattaaatagaagatgtttaatattttttaacattattttttttttttgtataagggctatagcccccacactactattcgtgtgtccgtcctcacgggactgtagtctggtcaaatcatccactatctttaatgttcgataatgagattacaatgttttttttagtataactagaggctcacaacaacttcaagattaaataatactggatcataatcattatcatctcaaaagatgaatacacaaatagaaaaaattgagtctcaccaaatgagtattgtagaagagcactttaaaaaaacaatcgcgaaattgaaactgaagatcaaagtgacaaaacttactttctctctcttctcttcttttccatttccatttctttttctttcttctttctctcttggctgctggtttttcacgaccccgccatcagcttctgcatttattttgaggaaattacactc

SEQ ID NO: 390925 - DNA, 1239 bp, Cannabis indica
agtaatgcaaatttgtaatttctagagttttgcgtagtgatctacctcgaggtatccaaacatcttccatctttggaaagaaaatatcattctttttgcataatgaacagacttgatcaaagaagagaatcccacccattctccctcatattttgtaattgttgcttgcatattttaactaaacacatggcatttaaaatatcttgatccttcctttgaagttctcttgacaactcatttgtaacacccaagatgtttttcattcaatgtagagtatatataaaatcaaaggattacatcaattccatcaaattaattgcttgagatcttttttcacttgatccatcatcaacaactatttcaagaactttaatagtagatgaaaacatagtaatgaagctaattaatctacgattgtgggaaccccaacgtgtgtctccagagcatttgagagaagtatttgatttaaaccacgtccttctgaaatttcaccattttgaagtgcttcaaaaattattttagcttgattatcttgaagaatatcacaacgcttagatgacccactaacaacattcatcacactataagttaagaaaaagagaagatcaatctgaatatgttttttagccacagctacaagagctaattgaagttgatgagcaaagcaatgaatgtaaaaggcacaaggattttccttcaaaattagtgcttttagaccattgaactcaccttgcatattactttctccatcataaccttgtgctcttacccttgaaatactcaactcatatcttgaaaatagtttatcaatcgcagccttaagagtcgaagctatgatgctagaaacatgttcaatgccaataaatcattcaataagatgtccattcttatccacataatgcaacacaatagccatttgctccttggtcgagttatcacgagattcatcaaccaaaatagagaaaaaagaatctccaatatcttttataagaaaattcatagtttcaactgcaacaacattaatgatgtctttttgaatgtcaggtgatgttaatttgaaattgtcaggggcattattcgatgtagcaattctaacatcatcactcaaataagtagcgaaccgtaaaagttctaggaagttaccttgatttattgagtttttagattcatcatgtccaggaaatgtaagtccttaccgtaaaagaaatcgtacagaagttattgttggaattattttac

SEQ ID NO: 390926 - DNA, 672 bp, Cannabis indica
aattaaaaaaatattggtagaataataataataataatatgaggttgtattattgtttatatttgttatactgtaattattttacttattttttttaatatttgtcattgtttattttatttttttatttatacggtaagttaataatatattttaatttaagttaattatgaatttttatctcttaaactttaacttgtgttgtattatgttttttaaattttactatttcagtgattgtttatgtactaaagctcctcagactttgatatctaccaaatcatgcccctcgaattttaacatatgctaaatcatgttgctgaacttttgtccatattagaatatttttaataaaattagataaaaaattttaaattcaacaatcttaatagttcttatgagtttgtattttttatttaaaaatggtgaacaaaaaaattgttaaaatataacactatcctcggtgttaattaagtatcgaaatttttaaaataaatcactaactaatagtaccacgtgaattaaaaaacctcttatgtccaataacaaattagtgattgttataaaataatataatataatataaagtagatgagaagaaagaagaagaagatgaagagagaaagagaaagtgaatgagaatttctgagttgtttattccaatggggtgaa

SEQ ID NO: 390927 - DNA, 1604 bp, Cannabis indica
attttgtttagttttgattttatttagttttttctaattgagattatccaccatcgtattagattgataggatttattaatgtccttatgtgagatgcaggtgttgtctactattggtttatttgtatttggtcaatggatttaaatcacttctgcaaggacgtcttagtctctctttggtcgtcaaatctgggagatttttagatctttatattggccttttattatatagtccaatcttatatgattgagcattacaacataattgggcatgttatttatttatttattttattcatgatttaaataattaggttgttgtatcataatttttattggaagatctgtttatttggtttggaaacctaatgtacttcacaatttttagatgcttcaccgatatattattggatcaattgttaaaccctagccttcaatccttaatcataccgatgttgtcgccgctgcaatgtcgctatctctccgtcgatgtcgccgttgttcctggttctagttcttcgccgttgttctagttctggttcttcatctccattttcgatacctccattggctctctcctcttgtatctgaggtaatattactcttacattttcattttctttagattttgtgttatttttctaatttttgatcgaattttctatggatgattttgtgttctttctctaatcttcatttcctaatttggagttgctgctacctcttcgtcgacgtcaccatttttgctagttctcttctcagtggatgacacttcaataattttggttattcatctcttctctataagtttctctctctctatatatatatatatatatatagacaaccatgttgtttgatttacttaacgcctcaatagtgtattgaattttgtgttcattttagaagctaagaagtattgttgatttcaatatatatatatataatgtctataattattggtgaataattgtgtatattttggcactctttttgtcaaattgcattaatattactaccataccatgagagaatgtgacattttttaaatttgaacttaaagaaggttatgactttgctttcatagtggagttactaattttgtgacaattttttttgcctatgattgtactttagttgaggtaatttgagatgagtttcaatttttttttattttatgttatattgaatttttttatgtctgatcttggcttgatattcccttttaattattaattctccagctttgacaaaattgaagaagtttgtgtttttatatgcataataaattgaggagtataatgaatatcataagaaatgttaaggtggggtcaatatctttacctgtgctgtattatgtaactgagtttctgtgacagaatgagttttaattcattctcggtcatactgtaattgttgattgtcttgcaatgtcaagatctaaggaagtatgtggctttatattttgaagcacattttttagtataatctcgaagaagacaatacatgtgcttttacacttctgtatttattattgggtgtactcataagaatcttactcttttgtattataaagatgttatgatggacaaaagagaggattt

SEQ ID NO: 390928 - DNA, 1748 bp, Cannabis indica
atatactcatattactctggcaaattatataaatgttaaaaggtattggttcctcctcggtgtcatattgctattagtgtaattaagtatcaaatctcatatagcttaagataataatttttaagagatatcgctaatcaatcgtaaggcgtcacctgtaaatagtactagacaccactagtatccaacaacaatactcctcaatattacacatattttctatacacaatataatacattataattaatctcaactatataattaaaagtggtatagttccaactcaaaaatataaaaggaataatatttaatacatattattgtatgtaataagtgtatatacaatgtagtgtacattatagttagagaaactctatactaggggtaggggatgccattattaatgacacttctagttcttggctcttttagagcatatggctctttagttggttaatcttaggctattcttctaaaaaaactagatatcatagatgaaatagaaataaagagaaaaataataataattgagagaattttctcatatatcaatgtcttttttgtataacaagactatacttgttttctttcttgttttgtttccaaataagagaatcatagtagataaaatctagcaagaattggattccacaatagaaaatggtccaccacaatgtgaggccacttgaataattttttggcaagagactaacaaaattttctcttattggatctaaattcaaatctatgcatttgcactataaaggttcaatttttttaactctaaaaaatgagaaggaaatattgtcttgtccttttcaaaatttattcactaactatcttcatataggtagaagaaaaataagggtatccaattatgtgataggttgagaaagacatattgttatccaattctctttattattatttttttcactactttaagtacaatagttcaactttttcttttaaagaaaaaaatattaaaggtccaagcaaaagacacaaattttgtttttttttttcttctaaatttcacatggtaattttattgtaaataaaaagaatttttctctatcctaggttaataaaaaattgattaataagaaagtttagtataaaaatatctatatatgtgtaaatgtaatattaccaaccacccactaaataaaagcttgttaaagctatcataaccctatagcaaaagacaaaaagactccactaatgatagtgagggagtcacttatattccaataatcaaatccaaaaagataattaacataaaccaataagatattatgagtgcaaatcatgtattaaaccatgtttattgaacatatccattttttaaagtgcttttaaccaaaattcattcattgctcccatcctttttttttggtataacatatatatatatttatatactagaaaaaaattacgtgcaaagcacgtatacataattttatattaggtggtttataattaaattgaaatcatagaaatttagaaaataattccctaaaattcaatataaaaataaatcacttcaataatgagtattagcatagttcaaagaaaaaaaaaatactaaggcagatcatttcaaaagagagagatttactggaaggatttccaactactgaaatggtggcagaaaaagagtttgaagaattctgagtgatatctcattaatttaatatattgattaactctatataaattgacactttatttccaaaatctaatc

SEQ ID NO: 390929 - DNA, 840 bp, Cannabis indica
aaaaaggacataaagttgagctcactgaggagataataatataataataataataataataattaatctaaggtttttctttttttctttttgaaatttagttttgtttttttttttggatttatagaattagaactgcacgtgcaatggcgcgtaaagaggaagacttgaaaaaaggcatcaattcatagctttgggacctaaaatgaagggccatttaggccatcccataccttcttatgtatctttctctttcttttttattttatttttttttaatttttctttctcaaagaaaataaataaagaattaagttattattaataaagcgatagcaaacacaatatcaaaaccgaatacatgtgttctgttttcaggttaaaaaaagcaaaaccagaaaacatagtagcaacaaactggaaagtattattttataggaaaatcttatgacaccccaaaatcttaggataaatatatatataatttggaagaaaatgtaaagtacttaaaacccatcaaagagttttactgattaattttaattatatacattataatcaggctgtgttatcttaaatctttgattaagtgaattttattttttaattaatcatcgtaatttctctgctcaaataattgatattacatgccatcaaatcaaaatctaggcttgcctaatgaatgaatggtatatatattttcatgcaaattcctaatatctattgatctttgaaaaaaaaaaagtaaaagaatattggaacaatatctatgtagtccattcggtggatataaaatttctgaaaaggcagaagagatatagtggatatatatatatatat

SEQ ID NO: 390930 - DNA, 603 bp, Cannabis indica
ccctttacaattaacttcataacttttaaataggtttacatctagggtttaaggtttcttaaccagacacatttttttttctaactaaagttaagttaaatttaaaatataaattaataataaaatactattttaaaacaaatatctcaaaacatgatagttgttgtagatattcttggactagctttggtggcatgtgcctagcacaaaagtaccccttcacgtagactcaacttcgtatgagtcacttaaacttcagaggtagaccttgtatggagcactgagtgtcaatccaacatggagccctgaaggtcgtcggtcacgtgtcctcataactgtagctctagaggtagttggtcacatgtcctcatgtgttttcacgaggggtggaaaaacgggttttgacacggtacatgaacacaaacacgacatgattttacaggctagggtccgaaaaattagatgcggatcgaaaaatgggtcgacacgacttaacacgaaataaaaacgggtcaaatatgacacgatccgcttaacacgaatttgacacgtttgacacaatttttttttttaaatataataaaataaaaattatatataata

SEQ ID NO: 390931 - DNA, 950 bp, Cannabis indica
ataagcagtcagagggtgataagggaaggaaaaaggttgagaagaatgatttgaacatggataaaggaacgagtagtcaagctggtgaaaaacaggctatagttcaagaggttaatttagatgttgatgagaccaatggtggcagcttattgtcacaacctgcaaccagtgagaattttataggtggaatgaatagctgtgttaataacgtgagcagggagcagaagggatgtgtccaagaaaaggaggctgatgttaatctaagatcaaaaatggaagtcacgtggtagtacaactcaccaaaaggaaggctaaccaagcacctgaacaaacgaagaccccgacactcaaacgggcatcaactgacagactagcttcctctcaggagctatccagcaacccctgaccggccacccttgggactgcaccatggctagctagcctggtcactgcagggggcctagccggccaaggagtgcactgcaggctttcctggacacttctacacgtggacaacaggctatgggttgcgaattgggccttataagacaataagatggctgaataatatctagaatcaatggcgttttgattttttgtaaatatctaacaaactatgcaagtattaaaggatttgaatagtaaacttagggtttcaggcctcctatataaaagccttaaccttaggttaaaaacctaagttgcttcgaagcgagaaacctgcttctaaactttaagtgtctgataaaacccatttcaatataatcagatttactagttaataaagaacagaaataacattttatgttacatggttcacatgatttatttcattttaatgtataaattctattaggtccagaacatatgaatttgttcatgattatagtgttgtatgcacagtggaatataatcatgtttatatgttcgaaagtttaattccctgattt

SEQ ID NO: 390932 - DNA, 681 bp, Cannabis indica
aattacacctaatatgggatttttaatctttttatgaaaaatatggcagatttaagtttgcccacattttatgggcttaggcattttcttttcattttgtatggtattcacatgccatatttttgatactataagtttcaaataccataatctaaattttatattaatttttttgcgtatgaactaatttttcaatgtttttctctctcatctcttcagaggaatcgctgctctgcccatgccgtttgcggccacaaatcaccaaaacctacaccactaccatgataactcgtggctgttggtttcccctcttcctctctcattttctttcccttaacctccagttgagatgaatcttccatttacagacgaggcggaccaccctgcatctcaaagcctctagcctgacgttctccttctcaccctttctcttagtctattaatgaatgactaagctgctacagaaaggttgcatggaaaccaaaacccacgccaaaagcatcaaaacagtgtcgtttcattcttctccatcttgcgttcttcatccattaaagtacggaattaaatttcagtgcatttattttctatatatatttctttagaaagtttgtagggaggttctgttggaaattattttacctaggatctagattactaccaagtatgtttgattacatccta

SEQ ID NO: 390933 - DNA, 602 bp, Cannabis indica
ggagacaattttgtatacccaaatctgattcgaagcaggtcggggcactgatagtatccacctcacatccgatcctaattataattttcatataattttctaaatatttattcgtataatcgtattaaagttattaactacaagattattgatctttttttttactatcataataaatgttttataatatagtgttctacgtattcatttagattttcaatattttttttaaattgttattacttacaaacttaacatcaatatacgtggttagttatgtttctggctatataaaatataaagtaaaaataatatcggttagacataatgtttatctaaaattaaaaaaagctctatactttcattttgaattacatacattacattattatattatcatcattttttttaatcttcatgggtacctaatagatcttcatgcccaatggggattttcctaccccaaacctgctgggagcggggcgaggggggcgggggcgggggagtaagtaaaaagggaagtggggagtggggttcgggtggcattccccgctcattacaactcagtttccatacatggctagtcaaataagaactttaaa

SEQ ID NO: 390934 - DNA, 2206 bp, Cannabis indica
taatatgggcttgtgtaccaaacaggctttttggatcagggcccaacttccttgggcttttcgagtattgttttgttccacttgggctatgtcatctttagacccttttagtttgtcgttaccatcctttgccacctggattccaacggctagcaaattaggggcttctataatcgactcttctccagtagcatcacccaacacctctgcgacttgatgatcagatggggaatgtggtatcgcgtgcctggttccaacctttgcagacacgagtttcgtaccactgcagctgggtacatcttttttcttttgcattgtccttatcacctccaaaggaggaaggtctgggagtatcttttcaacaattaggtttgctgtgttctcaaatggggtaacttctccaatccccagcaaagtgaccgctgggtaccggttaatgactagttcaccggagctaactctggtctccaccaccgtctccacttgtcttctcttccctgggtattgcgttcgaagctcccttgaatccgcgcattcgatctgcaaactaagtctctgattcttcaacaattgtctcatcttttcatcctttgccgccttttggttcacaatccactcactgaaccattttggcagaggtaaagtgaagggagaccgttcaatagcatcttcagccatccagtttccaaacattggaaagaattcgcctttggtgtttttaatcacaaccggagtcttgaagcaaaatttgtgttcatgtgtcattaggccacacttgtagcatattctaggtagtttctcatattgatattggagccataggtccttaatcccagttctccgaagaaagaaaccagagaatagtggtttagatagctcaaccgtggctcggaatcttaaagtccccataccaaaagaacccctttcaaagtttttttcgatatgccgaggaagctcataaactgtagaaacttttcccgccatctcttgtaaattcgttttgttccaatataatggaggaatgctctttaatcggatccatattggagtatgatcaaacttaacctcctcgggagtgagccatgaaggccagggcatgaggactaacaaatagccacacaccaaccacggtctcctgagaagacattttcagcatcaaaacttgttctgaatgagaattgtagtagcccatcctctcgttccttccagctccatccagagatggaagcccaagcattgttcagtgaaccctgtatcgcctttctgccaagtctagtgtgacaaaagagttttcccagaataaccttgcaaggctcatttgggggatccacttcaccgggatgaagatcacaagttatgtcctccacactaacttgaacagactcctcaaataactcattaagtgttgtatcagccatatctcgataaaagaagataaaatggaacttagcaccctgtagtcttgtgaacaaactaaatgaaacaatggtaaactcctttatgtagaagaagcttccatacacttccaccggaagttagcacaatattttgaaatttatcaaaataggctaataatattgcaattctaaaagggtctatttggtacatattttaaaaatgttaaaagttgttttttttttaaataattgtgataaaaatatgtttgataagtagttaaaaaataggttattgagtgatttatggagaagctaaaatgggtacaaccaaacttttggaaatatctattttcattaaaaaaaactctatatataataaattattatgtaagaaaattttattttattatttatgatgtattacaaaaattaagaatctttttttgaaacagaaaaatatttaaaatgaataatatttatatttcttatttttaaattttgttttacaaaaatttatatttatatttatatttttattataggcgaatatcattttcgacctgtgttttacaaaagttaccgattggaccttctattttgtcaaatgacccaatatggaccctgtattttttaaattgataacaatgagaccctgagctcaattttcgaatatttttcaatataaccaacttgaagataattcttcgcacgaacatatacaaaaactataaccagttttgtcataacacctctagatcaggttattacaaatttttattatcagttgagagtcttatttgtaccatttt

SEQ ID NO: 390935 - DNA, 1278 bp, Cannabis indica
tggtgcttgcccctcgtcataacactaagaagtgctctaaagctggttcttctagattggtcttcttgcattgttaataaagaacaacaagacagatcttctcttgatcatggcccttagtctttcaacataatcacgagtatgtgaattaataggctaatcaagctcttaaaaaacttgttatctaccctttccagtgatatcacttcgagttccattatgcttctgggtcatcctagttaaatctgagataatctcataacattttcgccttgctatatactgtgtatttttatcgctatcatatgttagtgatattgtaacacaacgcgacatggatatctctgctaattgtaacctatcccgagacaagataactgttgtatttatgaatcccctcaatttttgagaccaatatccacgtgtcatattcatatttatggctcaaaatatgaacataacaatcgccccataaaaagctctttttagaattgaaagaatttttttaataaatctcggtaggttaattcagtcttttccaaattagtaatgagtacactcctttggcagttttatttttctcgagaaatgttatttcctcattaattaaatgtcctttcatctaacagaattttcacctatcctttcatatttcctagaagagccgtttgattcaattttgaacaagaggaacggttcctcatcttttgatataagagatctctttacggttatcttcttcatttttccttatgaggtacaaaaccagagaaatacccacttcagcttcaaagaattttcaaaaatattgcatgcctatatggtttatctttgacgtatttcttctgtgtgattaacaatattttttccaaatcttgctcttgttacattattccggacccttggtactgtagatttcctgtaagaaatcatcaacgccttcagagaaacccaaaatctggtaactctttgatatttatcttttttctttctttgttatttttattattttttttttcttgcatgattttcgccctaaagtaataaggtagttagattttaaaaatttccttctctgaattaaattctttctaaaatttcagatccctgaaacattttcttttctgaggaaaagaatatttatatttggtttgaaatttcaatttctaaagtttttagagcgggaaaacctaaaattgcttgctttacccttcaaatcacgacttgaacacctaaaaaaattttagaaataaacgatgagagaattaggttattcaa

SEQ ID NO: 390936 - DNA, 1605 bp, Cannabis indica
ttagtttttgttagctttttttggtgtttattagccttgaggcctaatagtattttgtcatttagaccttttaaaattttgactctttctttaagaggaaaaaaattatttatttattattttttattttgtggctgcatccaattttgtttagattttctacgtaccttgtaatgaccgcatttcataatactgattaaaaaaggtaattagcactaattattaatattttagtaattatttgtgaattcatttaattgtgggtcccattgttagaaatgggcattagagttattatttcaaaattccagagattttattaaactctaggtgtattatttgtgttatatatgaattatgcaatttttataatttttgctcggcgaaaacgagaaatgcgatggatggctagtttgatcacatgggtaggtctagaaccttatttcttagtggggtgtatgttggaggaaatagagtacctgggttgggcggggttatggattttgataattttacccctagtcttgaaaatgcttaagttattgaagaaaggggcattttagtaatttgccacatgggtgatttggtggttgccctagattttgacacctagcctctactttcagctaagattaatgcaattaaccttattttcatttgaggaaaataaagaaaactaagaaagaaaagccaaaattgaagaacactctctttcccttatctctcttcgaaccagctagaaccaaaggagtttgttgctgatctttgtgttttctgcaagaatttgaggaggttttgatcaaggtaacccttagacactctttgattatgtttctctcaaggttttaatcagcttcaactattgatttttgagaattggggctgttagggtttgattaggttatggatcagttttaatgttcatttttggttgattctaagttctgctagctggttttagtgtattgtgttggaatttcataagtttgagctttgaaactcaagctgaggtctttaatggaatgttttgatttagtcagtttttctgggttttattggtaggaatgtgttgtttataccctgtttaggtactctggaaagtttagtggcaattggttgagttttgagcgaattggaggctgtttggggaaacctggtgcaaaccggttaaccggttttccaagtcatgtaaaaccggttaatcgattttgacagattccctgaacaacttattttctcaaattcttgccgattcagtgccttagttgggtgtttccctgtttcctaggttaatgtattccctaatgaatataacagaaccttgagttgtaggtttgggtttcccagattagggttttggacatgtgatttacccgattttaatatgtgattaggacatccatccaacacgagactttctgttcaggtcgtccaactcacttgaatctggaaagaaggtaagaactgtgtataatgtgtaatatgaatatgcgaatgtatgtatatgttaagtgtatatgcatccttattgtttgtaacactaccaacacttgacggttatggtacagagtgcattggtatcgtgtatattgttaaggagtacat

SEQ ID NO: 390937 - DNA, 1316 bp, Cannabis indica
aaaaaaaaataaacaaaaacggatggatgattgatgaatgcaaaataaattggtgacaattaaaacatgcttaaaataagacaacaaacactgaaaaattaactacaaggaaaagtatcgatggaatggtagacttgaataactaattcttcctatgttaaacctacccaattttgacagcattacctcagaaaagttgcacagagttacaataattcacaatatgttagtgacgtttttccaaacctcactaatacaattctaccacttaatttcatataatcctacattaaatcaggttgtagaacatcatttaaaaaccaattttcaagttttgcaaggtaataaaatattcttatcttactcactaagaagaacctaaatatggtaattcacttgcatcatccaagttgaatccactagatccaacctttccagaatgagatctagcttagtaaaattgctattcatgtccagttaataacaatcaaaaaacagtaagctcacttgaatgaacaaaggcaaaattgctaaaaccatgcagaaaattagtcatgttgttgccctaaaatttggccaaccaaaagcggggtcgtatttattactgacgcttgccacaataagaataaaaaagtaaatgagaaacaagattttatagaggattatcccccttagttagtaggtaatgacctactccccttttggttgtattaataccaaagataataccgctcagatcacaaaggttgtggaatcggaagtggctctcttaagattacaatgtgagaattaagttagaaaatcataagagagatccaagggcgtgtgagagagaagagaagagagagtttgagtttcagacttagagctcgagagcttggagactttgaacttagggaattagggttacgctagtgctatttatataggagagcttacatgaagattaacaactaacatcccttaaaaatacaaaaataaagccttattcacataattaaataataaaaactaaatgggataattatccctcaagaatagggaagtttttgatattttccccctatttttgtgggctgttaaagcccaaattgcaacttagcttgctgtccctggatgaaggttgtgcaccaaaggcgaaccaggtgtagtgtaataccctagaattaagaaatggattagcaaaaccctaattagataattatgaataatggaggaattatattattatatagttcaatatatgagaatttatttgattaattatatgttaagaccccgttggtgagccaggggcattttagtaattatgaccc

SEQ ID NO: 390938 - DNA, 513 bp, Cannabis indica
tttttgtaatatacgtacgtgattgtgagtgatcccctaattcatttaatctgaccaatccaatttatttttttagtaaatagttatattaagggtaggttatagctcattgggctgaaaaatattgatagatcatataattgagttagacaaactctaattctatgtaacctaatataatctattttttgagagacgtttgagacaactttcgtatataaaatatattttatattcataaaatatataaaaatttataaaataataaattatattattacgataaccttaaaaagtgaattgactaaaacacatcacgacatgtaatttatagttaccctacgacttttgcaaactagtctaacgtaaaaatcaatcactcttattaacacccaaatgtaacgtccccgcttcaagcctccattgggtccttccacccacggaataatggctcttatacacgagtacgccactctgtctgcttcctggattgatgactgaccctacagacca

SEQ ID NO: 390939 - DNA, 1456 bp, Cannabis indica
taaatcgtatagtatttttttttatgaagatgtagtctattgttttctcaaaataaaattactgtcaaactgaaagaaacacaagtagaaagtcgtgtacgaaagaataacctaaaacatgcactacataaaaattgcatgtggtatacattgattgtagtcccttaattatggagccaaattacctgtcccagttcctgtcccactccctgtcccagccaataatattttgccacctcaattaaaattccacctatacatttaacgatcccctctaaaaacttaactctgttagtctggtttttatttaatattattttaaagtaaaataatatcatcactactccctcactctctcatgaactcttaactcttttataataaattattgagtatctaactgccattgtcatttcttctagcattttgtaaaagaaggaatatattgataaacggaaaatattttctcacacgattaattaatacgactagaactatgaagtgaggtttaaaataatttatctactacgtactcaaagtctaataaaccagaaaaattcaattggaagaataccctacaaattaagggaaaatctaaatttttctaaaaaaaattgaacacaaactaaacccacaaaagacataatttcttatcattaaagggtattatataatataacattccatggggctgcctttccaaagaactggtcatagagaaggtagattatctgaactgaaaaataaccctgttcaattcggtcaaagtcggtccccaaatcattgtaagactaccaccatagtaaaagctttccaagacagccacatcaaaacttttgctccatttctctgttcggtacatcctcaaagaaaataacacagagagattttcatgccttttgcaaaaaattttttaatgttctttgtttttcttcttcttatattttgtttcaattgttggaaaaaaaaagaccgaaatgtatttgatagaagaaaaagatagatagtcatgatattttttacttataaataaaagtcatgataattttttagttaaagaatattattaaatttaaaacaaggaaacagagttagtttttagagagatatgttaaatgtataggtggaattttagttgaggtggcaaaatttcattggctgggacagggagtgggacaggaattggggacaggtaatttggctcccttaattatactcatgtaaagttcatatagaaagtaaacaatagtcaactcacatatatatttatacgatgattaatttagaatttcgccactctaattttgataagtatcaaattatatcacacaaatttttcaaatcactaaaaacttctcttaaattattgagaaggttgaatttaaatactttatgtctaattttatttaattttactaataaaataattatttatgtactaaatcatacccttgaa

SEQ ID NO: 390940 - DNA, 1893 bp, Cannabis indica
tggaatgtttgagagatcaacaagagcaacaaacagttagaggttaagcatctaatgattctaatctctaaattgaaagtaagcttggttggccttcttgagactagagttaaagctcctaagttatgagctttaaacttaaatatgtttaaaggttgatgttttacgataaatagtgcttggcaccctggtggtagaataatagtaagttggaaaccaattttgttccatagaaatattaaattttgctcaagttagcttatttatttagaggtgacatcgggtaagaaggtttttcatgtttcttttgtttatggcatgaatgatgaagaagatcggaaaaggttatgggaagaattaatggacttggcccttggaataaaaaaccgttagatcatgttgggagactttaatgaaatcttgagtgtggatgaaaggataggggaaagagtgaagcctcatcgattaaaacttttttaaagctgagtggatttctgtaagatggaagacattaaatactcaggcaacttttttacttggaataacaaacaagagaaagaagggagaatttatttaaaaattgacaggattatggggaaccagttatggcttcaaaagtttagtttggcataagtgattttcttgccgggagggaattttgatcatagttcgggagttttaatggtgcaccctgagattagaatgggaagaaccccattcaagtactttcgaatgtggagtaaggccccagattttcaagaaaagattaagcttagttggaagacgccaattggggggacattaatatattctcttgtacaaaaattaaaaaggttgaaaagaattcttcaggacataaacaaaatcggtttctaaggcattcaacaacgtgatgctaaagcctttcaagagatgattgagtgtcaaaaacaattgcaagattctcccctacaggatgaattaattgaaaaagaggcaagagctatgaagaattatcaagtcattcataaggcaatgctatcttttcttcatcaaaaagccaaagtaacatggctcaaagatagagatgatagcactgccatttttcattcttcaattcgtgctagaaaaataattgatggaatatattctattatggatatggatggcgaatgaactaagaaaccagaggaggttagtaaatctttcctcaagttttacagggattttttaaattctaaaatggagagaagaagagctgtgaaatctagtattattaagcaggggctgactgttacaagccaacataggcaaattttaatggctgcttttacacacgcagatgtgaagaaaatggtttttcaaattcctagaattaaagctcctggtccgaatggatatagaagctatttcttccaagacaattgggatctagttgggaaggaagtgagcgaggcagtgattgattttctacaaatagggaagcttttaaaagaattgagcacaccagtccttaccttggtgcctaagaccaaatgtccagctaatgtaagtgagtaccgtccaatagcatgttgtaatgttatttataaaattgcaacaaagcttatttattctaaattgagatctgttttaatagatttgatatcacaaaatcagagtggctttgttcaaggacgttacattgcttacaatatactggtttgccaagatcttgtaaggtattatagaagagcaagctctagccctaattgcatgatcaaattagacataaagaaggtgtacgccactgtcaaatggaattttattgaagaagttctccaagtgtttgagtttccacaagaattcatccaacttgttatgatttgcgtcaagactcccaagttcagtctaatgattaatggtgaactccat

SEQ ID NO: 390941 - DNA, 1109 bp, Cannabis indica
tttttttttttttttgacaaaactcctactcacttatttggtgctctagagcaagattactaatcatgcatatttatgtgattattaggtaattgttatattattcataagattaattatgatggttttatatgttgttattttcttagataattaatcatgtatatttcaatattgttattgttgttgcaataattactaaaaagttgaagagatatatatctttgaatttatgcaattatataattttgtgtgtatgtatagtttatggcaatttgatttatggctaaaaaagtttgtttgtgatataatcaattttaaattctagagatagcatgcaatgtttctctttctaatttatatattttgccaaaaagtgtgaaatgagtttttgtatgtgacatctctctaaatctcataatcatagtttattattattatttattttttttcaacaatcatctttactcttactcacttcatgttcttaccaactaattggaatttatatcttatagaattttcagtaagaagatattaaaaaatttaaatttgatacataaaaattaaaatactgcatccaaaattaccattgttaatttgaaatatcgtgctaataaaatttttgttgcaatattctcataaattaataataactaatttttgttatttttgttgcaatattctcataaaattaatataactaattttttgttatatcttttttatcaatttattctgaattttattttctatataaacctaataaaagatacacatatttttcacatactcttttattttcaattttatattattataatccttgaattaattttttattttgtatatatcgaaaagatgtacatgttggaagtgtgttagttggctttttattataattttttaagcatatatacattatattttttataaaaaatatttaattacaaactaataacaaaattaattgttagttattttaaaataaatcttttaatatgattttattatgtatagatattgttaattctattttggcatatttaattgacaaaaatattttattattactttatatatttcggtctggcatttattgtatatgg

SEQ ID NO: 390942 - DNA, 930 bp, Cannabis indica
aaatataataattataatatatagaaaaagctgatttaagatgtaaggtaaaagtttgtaatgtaatgatatagaaaaaataatgtaaaagtttttgataaaataaaaaaaaaaattaatgaaatatttttaaaatagagtacaaagctgatgtaagcaaatgcataatttatttttctacaaacaaaatttataagtttgtaaaaatgatatatatatttctttattataaacttatacagatgttacataattattaggttatttatatctttgccacttttaaaattttgtattttacaatttttctttaatgaaatttatagtactatgtaattttcctatattaataagtttacatacaacaaaacaaatacaagaacaactgtgtggtagggttgatcttaactaaccacatttattatcaaaatgataggatatactttaccatcttaagtgatccagattatctgtaacctactaactacttgttggggaaacctaattactacaaaatcactctcaataaatatatagagatggtatttttatatttagcatattttttttttaaaaaaatattattctaatagtattctaaaaagtggcacatgataaaaaattattaaatttgacctaaaatataatattgtaccaaatttgatctataataaattttatttttttatttacaataatactattaattattatgattcaataataaaattttacatcttttatttactatgtcattataattttgacaataaaaataaaaaatactaattttttgtattttctcaataaaagattaaatgagcatcaataataattgatttttttttacttgttataatcttgcattggaatacaattataaaagggaaatttgattttctttacttagaaaatcttaaatttttttcc

SEQ ID NO: 390943 - DNA, 950 bp, Cannabis indica
ctctgaattgggttctacattttagtgatattcttgtagagattctttcaagactcaatgacaaatctctcaaacggtgcgagtgcgtctctaaagcttggctctctcttctacagactccttattttatcgatcttcacttccaccatcatccacctctacctcgcctagttttcctccaggacaacactgtaagttctccatatttatccatttgtgatcctcacacttttactgaaatttcttcacaaaaattaccatttcttgaagagggtccagcaaatatgtcacttgaccactgatttaaaagtggtacagtgaactttccttgtccagtgctattgttgcagccttgtaggccagatcgtgaacaatagagctgtagaaaagtattgtatttgttgcctcgtcgagaattaggcttcttccctttcttccgttttgaccttgtaccattatccttgattcttgttctaataaatatacaaagtatgttagtgaccggtagaaacgaaagcccagaggaaattagagtgaactggtaaatctgattcatgaaaagttataatttgaacacctagtcatatacatatatcctatacccatatatttatatgctgtaaaataaatggacttcttgctgaataagttaatgtccaataaggtctaattaagtgctaaagtttactgtgatgaaatattatttaaatttaatatgatttatactgtattaataatatttgagataggattatacattagcaatattccaatagcctcctataatcttcatctatatccttatcattttgttcaataggaattacaaaaaagtgagaatgctttgttgttggatttgtgggctgaaaatgaagtgtacggttgatggttgatgtagatgggtatgtgtaaatggaattgattgtgtaatatatattgttggaaattat

SEQ ID NO: 390944 - DNA, 788 bp, Cannabis indica
atattaattatcattttgtaaaactacttgaattttattagtgatacttaaccccacaacccgattttttggttataaaattctttgaacctccttgttagctatttaccccttctgtttaaaaagctctgataaataccaacgtgtactgctaatgcatacacaaatgtacacgtgatagaatttaagtggtctacattattttaaaataatcttaaaaaataaaatatttaaaaaataaaaaaaaaaaatataaaaaaaaaaatccttttcccttaaaataaaaataaaaattttttttcctttcttttttctctttcgttttgctttttcttctggaacctttagaccctcatcccccgttcctcctcctactccttcttccttcatatgtgagaccacttcttctttttcttcttaaacttcttctgcctttgttttcttgtttcctttttcttttttcttttcttctctttctttttccatttccctgtaatctaatccttctaagccccgagaccctaatcttgtctcaccccaatcctccatcttcttcttttgagaatctagttttttattctctcacagcccttcttcactccgtaacctcctccgaagctagggatttcctgctaggctcttcccagacactataaaatcatacgatctggaccacttgtgtaacaccctaactagcataggcatattacgtgatttttaaacgtattgtcgcctagcgactaattacaaaatagcactgctgtcccgaggatcgtacgctccatgcc

SEQ ID NO: 390945 - DNA, 1557 bp, Cannabis indica
gaaagctttggagactgagagggagaaagagagagagagagacagacagactcgtcactgggtagcttatactgattttgcttattcgcagtgtggtttgagctcgagaatccttgctctatttatagctattattttgggccttggttgattgatttggacctacctcgtctatctactccaccacagttcacacaccaagattttatcttatttacctccacaataaaccacgtgaaacataatgtagaaaataaaagagagatggtaactgtaagaacattctggacaaaaaggaaaataaaatatatatcaaaccaaaagtttcctactaactttaatacaattagaaatatggcaaatcaataaatgagaatgcgcttcatgcatattagagttgttagctggctttaacccaactaccacttttgtacatatatcatcctttggttgtgacaaatttccacagaataaaagttttctatggagtatccattttcacatttgtaatttaatcataaaattttacgacaaagcaaaaaaaaaaaataattagctttctgaaggaaatttgatgcatatatacacatcagaaagttttaatttgatcaaaactcatttaaatatttccaaattcaaaatcatttataaattcataaaagcagcatatcttattactaatatcttatgagtggataaacctcctatttgctttactatttactttttttttcttttgcttctagtgacaatactaatacatactctatttacttctaattatgtcctatttacctttctatcgttctttctttgcttctagtgacaatacaaataatatatactctatttgcttctagtatttttcttgctttgtcttttaatcaacgacaatacaaataatagatactctacaatatacatataataattttgattgattttcttttgaaaatttcatctttaatgtttaaaaaaataccctctaacaaaatttaaactcctaattaatttatacaattaaatgttattatttttaatttctacccaaaataccatccctttcattttccttctctctttgtctctttctcttcctctttctcgcaccaccgagacactcaaacccaggcaccgagaccaccaaccaccaccactgaacctctactcctccaccacccaacctcctcatctacccaaaacttaatccaacaacccccaacttacctacccaaatctttctctctccctcctcctcggcttctctcaaccaccatcgccatttgccacagcccacctaaccttcccccaaccagaagtttattgaattcgtatttgtttgagacattagatggtggtggacagtatgattttccggtcaaaatgtgattatcgatgggttatcaatagttttcaacagttttgtctgcgcactgttttttttgtgtgcacacagaaatcatcgataacctatcataaatgtcatcgatatatactatcaataacctatcgataaatgacatcgataaatgtaaaattgacaaaactgtgttacat

SEQ ID NO: 390946 - DNA, 1791 bp, Cannabis indica
tagtaaattttgtagtagtgtgagatggtttcttttaggtcacttgaattctgcattccatatgaggaagcttagatgaattaaacacccgactgttatgatgcaaccagctgctgtttaatagaggggccgactcaagcattgggcagcttgaatcagtgtacaaatcctccttttcttaaggtcaaagttttttttgaagaaaggactttttttttttttttgaggaaattacattatatcctcactttattttatatgttttaatttttacctttattttcatattctttaagatataccactttttatagatgatgtctctattatacttcttaagttaatataatttatgtgctagacttaagtggaatgtgaaggtatattaggcaacccactcacaatagtgggtatatttcaatgaaatataatacaagagtatttttgattaatagatacaaaaaagatgtattcctcaatttatccctatttgtttctattattttattataattgtatctttaagaagaaaaaaaaaaacctagtaatggaattgtacatgattttttttattatttcaaaaaaacacaaaaataacaaaaaaaaataataatacaaaaatatgtttgtacggaattttaaaattttttatggtttttaaaattttatttacataaaatacggtctttcaatgcattttttatattatactcttattagtttttttttttggtaattaagagtgctctattgaaaggaaaacaagaactacatgaaactagtagccacaaagggggctacatcccttaaacatcccgacgaccctatcttagcacatctagaccagccagctaacgcattagccaccacattacccgaacggggtatgtgagcaaaagacaccacctcaaaggttttacatagtttaatacaagcatcaaaagtaggataagacccccacccaaaaggtaaaaaaactcgtaaatagagcatgaaccacagccagggaatccgagaacaccacaatcttctaaagatttcgttcatgagccttgctaagagcaaggcgaatagcaaggagctccccttccagaacgctgctaacaatggagaaatcagtagcactccagcaaagcccaacttcctccttcaaatgttcgaccacagccaaactagcaaagtttttaactacagaggcatccgttttgagataggtaacaccgtctccaaaatcctcagccagactagcagagtgatccaattcgaagtaggtgacaccctctccaccaggatttcgagggaccttctcttcccacctagtcgccatttccaccacacgctacgaaatttccctggagattagttccaagttacaacactttccttcaaacacaattctatttctccattgccagaggacttcccaaaagacaggcaatgtgatgttgttgagtttttgttatttgtatttatttttgatgttgttctccttactttcatgtgattttttttgttattttcttgtatttttattgaacacagataggaggtggtggtgatccgacctatgagacggagatgagagggacattgacgggaaggtggtggtggtccgacgtatgcaacggagagtagagggggaccgacgggaggaggggtgggtggagatcgatggacgagagagacgagaagaaagggagatcgagagagatggaggaagacggcgagagaggatggcgatggtgcgaaggcgtgggtggagttttggagagttaagatttttgttttagg

SEQ ID NO: 390947 - DNA, 1055 bp, Cannabis indica
aaaaaaaaaaaaaaaaccaacagccaaatatccatgatttaacacctaaatctgcaaaaagtcacatcgatcacacattgccaagttcaaaaacagtctcagatcaatcgccacaattttcacaaaaaaacagtcgatcatcacaaaatcgtttctctgatcatcgaagatcacgattgaagctgtaaaataccaaaattcgttgagcacatttgatcagaacaccgaagcttcagaatcaccattagaaagctcaacaacatcttcattgctcaaaatatgtttcctgcaacataaaattgtaaaaagcaagaaaatcaatatcttaaaacactcaatttctccaaaaaaataaaaaactaggaaacctgaggtaatttctctaaaaattaaaattatgctaacatatttttgttaatttttcaacaaaaaaaatacaagttaatagaaataccttatttttctaacaaaataaagtgtatattcaactacacatattctatcttttttctgaaaatcttatcactgtgtatctcaaaaaaaatagatttaatgatattggtgatttactataatggcaaaattgtggataaatacatatacactgattataaagtcacaggaatactactaccaaagagcttctcatataaagacctcaaaacaaaaaatttgtaactgaattggacttgaataacaagacactaatcagtatggaaatacaattttaaatacgacaaagtataccaccaatgaagattaaggatgatagtggctgcagattctatgagcaaataaggaaaaattaatgatgaagctacttacccattactcattaacttttgagtagggttgtacatcggttggtttgggcggtttatcctttttttttttaggtttcaaagtcaaaatcaataaaaattaaaaagataaattaaaaatatcacattccaccaaagtacaacaccatatatatatataactttaaaactaataattaagtatataactttatattattatatattcaatcatttatgttttatataataaaa

SEQ ID NO: 390948 - DNA, 1053 bp, Cannabis indica
taagcctagagtcttctccttccttccttttcttctttcggttctgagcacacagtaggaaaccagcttcaatcactcagttttttgaagttttggcttgaatctaaagtgattcaagtaaaggtatgccctagaaaactcttttcgtttgtttggtggtggtgttgtcaggcttagggtgtgaatttgggaaattatgtttctgtttggtagaaattcgattagggttattatctacaagttattaatgatgttttatatctgattgaactattattgatgggtgattttgggtttgagcaagtttgagttcttggaactcaaatttggctcagctatgtcatgtttagttttggtgcgttttctttgttgttttgtttgaaaattgttctaggctagtattacaggtatcttggagagtatggttgaatttggggttgaattggtgaagtttataaagatttgggtttttttgcaagagaactggctaaccgattccctagacatgccaaaaaacgggttcaccggtttggggattttgctctgccgatttttgcagggccagaaccctagtttccatattttctcgaggtttagtgcagtattagatttttttatctttaagactacccttgattataagtttaagattttcgggaaaggtttactcaagttatttacctgtttatgtaatgtgacataggacattcgttcagctcgtgaattttccattcaagtcggccgacacacttgaatctggaagtgaggtgaaattggcataaattatgtatatgtatgtgaatgcatgttgtttatattgtttacactaccaacactagaataattataatattgagtgtgttggtataatgtgtaatgtttaaggaaatgttacggtgttaccaacacgagtacaagtgagtatggagttcatgtggtaacacccagtagcacccgaaagtataattgggccctaccaactctagtacgggaatggtacttcagtgcatgtggtacaaagatcgtatttccgttaagaacgttcttaaccat

SEQ ID NO: 390949 - DNA, 1103 bp, Cannabis indica
aaattacttttgctcaacaacattggtaaataaacaattgtataaaatgtaggagatgtatgtttctctggaggattgcttggtcctgatggaacaaacaggtacttgggtaagtggtgcaagcgtagccagaataatgaaacaagacaaggtcaaagcactagtaatggtgatttgattgctgttggtgctgatggaagaggcggtagaatcaaagttctaagatctttgaaccaatcatcagcggtaagctttatttgtgattttgtgtgctgtaatggaaatcattaatctttttctatactcaggtttttatctgactagaaaagcagtaactaattgcttaaaaaattgcattataatttggacatatatcttttaactcctttacagcttcgggtttttgcttttgaagttacacactaagcttagttctcatagaacattcacgtttatggtttctcaatgtttgtaaattaatttgacaggattggaaggctaattcagttgggtcaaaaaggtgcaaattaggatccaagacaaatagtcaacagtcccgtggatgcttgcaaattgaacatttcttcagtcgggcgaataattaattgataaattgctttcgatttggaaaataggttaggattaggaattccttgatgtcattttttttgcccaacaagtaagaacaaagattcttttgttaatagtagtctggtcatagttttgaaagaggaacacgtgaaaggaagggaaaaaaaatgaaattggaagtgatgatcatccattgataatgttatttaacagcttcgcacgactgtttattgacgtggctggttcaaaacaaatatgttttcttctaatacaagtttttttttttttctttagctaaaatttatacccgaatttttcttaccttcaaagttactatactagttggtgaatatataaataaatggagattcttctatgccatacgatttagtacttgtataatataagtattgtagggctcgtttggaacgccgtattatgtcgtattgtattgtattgtattatattaaattgtattttatgcaatatttttatgtaaaactatatgtggt

SEQ ID NO: 390950 - DNA, 1115 bp, Cannabis indica
ataaataaatctagtttattagaataataagtccacgattcttggattgccacctagaaacattgtcaaggataggagaaagagttatataatgttgttacgaaaaaatttattttgaatttgtaaaataataattatttatttttgtaataaattatttatttttcaaataaataaataggaaaaagacaaaagttgttgagaaaaaatttgtaaagacattgttaagaaaaaagttgtgaggacaaaagactatgtcttaattaagacacgcctacccatgtcattattggtttatttttttagttaattaaatatttaattaattcaattggataaatattttaatttgaaaagtggttaaagatatttcaagttagttgagatattctttcaattgattgagaaattttctcatctcaaatattagtaattgaattcaagtataaatatttatttaaataattaaatacgatttatttaattaaaaattaactcctataaatataagtgatttatttgagaaattaggtaatgcttccatactatagaattcaaaattaacagagaaaaaaaaaattatttttctctcaaattattttattctagtagcctaccctacttcttgtgtgtggtagatcaatcttaaagactacggtgcgagtttctaatcaactcgaaagatacaacttactaaaaaaaggaatcaaggatatcctaatagactttaagagatatttatttattttatttaatttatattttaaatttaatgtatatacatctgaagatctttgagattatgttacctcatttattactataaaatcaacagttatgtagtctgataaaccataggatgtagaagaactggaacgctgagaataaacctctattaacaaggcaaagtgtactgacaacattttgatttatgtagccaaaatcaaatagctaccaatgactggaaagacatgttaggatactgtaaactctgaatataaccctaattaattcaagagaatcaaacaataagattaaggaatagcggaagcgtaccggagtccatagaatcgacctttgatcttattggtatgatcttccaatttgcatcaaaa

SEQ ID NO: 390951 - DNA, 579 bp, Cannabis indica
taaaactttgacctctttgccggcgcagtttgcgaaatgtaatttttaccagcgcagtaacgaactgtgctgataaaagtgacatttcttgtagtgaatacatatatctatttaaactaattttagactgccatgacactgtcttattcttctgttttatattaaaaaatataaaaaataagagaattaaggagaaaatacataaacttatttaaactaattttagactgttatgttaccgtcttaattttctcctttatatatattgatttgttattttataaataatttcaaccaattatccttacttaagtcttgttattgctacataagtaactgttaaattaatttgagtatatataatctatgtttgtatatatatatatattattattcgttactcatacatatatatatatatatataaatatattatatatagtttaaaaatgagaatttttttaatacacagggagaagagaagggtagatagtgtattatatatggagaagaaaggggcgagacgtggacattccaccatggcagttaacaatcaaaaatggatggaaatggttaatt

SEQ ID NO: 390952 - DNA, 942 bp, Cannabis indica
taattgtttaaaatgtaagttaaatgtggaaaaaaaatatgtgataaacataaaatatggctctatactatatcattggtcaagttatgttgaaagtggactcttttttttttttaaagagaaatgctaaaatttactcatgtttatctttgagatgtgtaataatgttattggtataattcaataaggtactgatcaccgcgtcaaataaataaataaataaataaggtgccatctcatcatcatactaagtattttgaccgaaaattactaaaaggtactactagtgcctaataaccctttcggtgtcatgccactattagtgtaattatataccgagtctcatataattaaagaaaacaacttttgaagaatatcgctagccaatcattggacatcacttagagaaagtattaatacccaataacaatgcttttttgtgccctatggcaatgttcttgtttaatgaagttggaaagaattgatgcattaacatttaacactcatggtcttggttgtcacacttggcagttcacactacatatgtcttctcactttaattactaaagaagaagaagcttcaatggacggctaccaaagtcaacctagtctagaattttgcaactttttatctttcagaataattttgagattatctctaaggtttcgattcatgattgttgtgtatttattactatctaataaaacaacctcatttttttgttaacctataattatcacttcaaagagaaaaagagaacacgcatacgtgtcaaacaaaaaagaaccaatttataattcaaaatcattagctgctggggtgttcatcaaaccgctcagaccgtccgtaccgcaaaaaaaatatggttcaaaattttttgcggtgcgatcgcagtttaaatttttcctaaaccgtgcagtgcagtttgcaattttgaattg

SEQ ID NO: 390953 - DNA, 860 bp, Cannabis indica
aaaaaaaaaaaaaaaagaactgatttgacttaatatgatttgacttaatagatatgacacgtgtcacaaattaataataaaataatgatataattaacactgaaagttacgaccgagctgtgcacggtcaccgagtgcctcaccctccacacgtgccattttcaatttatttgaacccaccaccctacaccactatataatatattaatttaaaaaataatttgtgatataaatacaatttatttttttttttgaaaaaaatacaatttaatttttaattgtaaataaatattttagtttagtttttaacaatattaatacttaagttattttatgaattttcttaaatatttaatcatattaagttaataattacgcggtagttcttgattagtctacattattaattttatagtttaaaaaaattaatttacctacgaaagatcaataaaaaataatacgtacatgcaaaagttacgaaaatataacttacagataaaaattaaacttaagtatttatgctgcaaattactctaattaaaatattaaagcgaagaatataattgtttgagaatttataattgtatggactcacatcctctgtctattaatcctgtctactttcctgtctacccaattaaaaacacctcatttaatgaattaacagcattacatagctcctaacttgccgttagcactatttataactttccgtttattattttaacaattatcttctttcaataattttttttttcattttgaaatacatatattaatttaagatagttcgacttgccatactttattaatttttttaattcttcgtttttctacttataaatatatgtacagactat

SEQ ID NO: 390954 - DNA, 801 bp, Cannabis indica
tatctagtgtaaaaatctcattacttaatcgttaaatgttatgtcaataaccacgtgacagtctccgattaatccagtcactaaattttttattcaaaaattaatttaaatataccaataagatcaaaatgacatttggataataacttgaaatttaaccaatcaattatatatatactgaaatttattattattgtcaaaaattaaacttaaataaattaatgtaattttaaccaaaaaataattttatttacaccttaaattactcttttcctttcattatttgttcttctgcacgaaatgtacaagcgtattttatgaaaagaaagaaaaaaggaaaatgtggcagtaactttaagcattttccaaaacttaaatatactttttttctatgtgcatgcctctggcctcccatgtgtacttataaatttatatttataaaaagactaattaattagtaaaattttcgcacttaattttgacatgtattaaattatattttttgaatttgtggctgttaaaaattttcttgaactgtatattgatattgttagatttaaggattttatccaatttcattcaattttaataatttagtcattgtacttatacaaaatcacactctcaaaatttgatatttatgtaatcatgtccctcaaactttaaaatgtatgaaatcaaacctcctacattttatttatgttagatttttcttacttataaaattagattagggccggtcctgatttttagtgggccatagaaaaaaatttattttggacccttatttagaaaaaaata

SEQ ID NO: 390955 - DNA, 709 bp, Cannabis indica
tatggcattgaacactttaagtgtcaataacaagtatgaaattgtatttaaaaaaaattaaaaaattgctaaccaaatattatctttgtaaattggtatggtattgagcacgttaaagtgccccataacaatagtaattaataactaattattaggtacctataacattaaacacccactaataataagtaccaaatagtatatatatatatataaaaaaaccacaaacaataaagacaaatcctttcactttatttaattcaaacgtccctttatatatatatatatatatattctcatcagtcaagaacggaggcgccatacatatacatactcctaagttaactgagcaaaaatactatatattttcaaagcaatgtctatctgctcttcccaaaatcatatatatcatggattttcctgtctcactctctgtctctctctatatataattttgcgttggtgaaagaaagaatatatatgttttagacaatatgtacttgtaaataatattggtgtcttttgtggtcgatgtttgaatcaactttcaccgccataattgagttcaacatgcacataatatataatatgcgtaccattcccatccatattttattaaatatgtataaatatgtttaaatgaaatgatattaaactcatttatgtaatttttttctcaaatttttttcattcttgtcggcgaaacaga

SEQ ID NO: 390956 - DNA, 1366 bp, Cannabis indica
gggctgttgttaatgtggaaaaatgatgtaaaattgcaagttttggatagttcttcagggcatattcttgctacggtggcagggaatgggttttcgccatggtatttgactggcttttatggtaatcctgaagcttatttgaggagattctcttggaaattattaagaaaactgaaaaaagaaatacaggggccgtggctatgtgtgggggattttaatgaaattgtgagtttagcagagaagattggtggtagggatcgacttccgggagctatggatggatttaaagaagtcattgatgattgtcggtttattgattttagttcttcaaagcatgaattgacttggtgtaatgagcataattcttctcagattatggagaggcttgacagaggtctgtgtaatgaggagtggttgagacaatttgagggtgctgatgttaagttgcttgactggtgggaatctgatcatcaggcgctagtaattgatatcccagtgagaatggatggggataaatgtggtaagtctaaacggaaaagccgctttcattttgaagaaacttggtgtcatgaagaggaatgtactgagataatagataaaatgtggaaggaaaggcaaggacggggtcggccaatgtcttttagatgcaaagttaataagtgtgggaaagcattacaagattggaataagaagaagaaggccaggttgaataatgagatagccaagactaaaaagacgttacatgaattgacaatgattcaacaaccgggagtatgggaggctatacaacacatggaagataagttaaatgggttgcttgaaaaggatgagcagtattggagacaaaggagtagagccttatggttgcaatgggaggatagaaacacgaagtattttcatcacaaagcatcttcacgcaggaagaagaatgaaattaaggggttgcaagaccaaatgggagtttggcaagatgataaactgctagtttgctaaattgtggaagagtattacaaaggtttgtttacggggtcggacattgacgaggatatactgcatgaggttttagaagtggtacagccgaaagtttctttgtccatgaatgaggatttaatgcttgatttttctgtggaagaggttgtgcaagcagttaaggagatgaaccccactaaggcaccgggggcggatggactgcctgcgcttttctatcgaaagttctggtctaaactcaaagatgaagtcattgcggtgtgcttgaatgtccttaataatggggctgatttgagttgtttaaatgatacggtggtctccttgatacctaaagttgacaagcctaaaaaatagaagaatttaggccgattagcttgtg

SEQ ID NO: 390957 - DNA, 1559 bp, Cannabis indica
gaagtttgacaatcgtgagtgggatgaggttctgttgaaagatgttttcttggaaagagatcttaatctcatcatgcaaacacctttcacatattcagtgaagaagaatggttgtattggagtaaagaaatgcaagggtattatttaattaggtttgcctataatattcttcaagagcttaaaaaatgggacacaaattacaatagtatttttggaggaaattgtggaacctgaaaataccaacaaaatgcaaactttggcatccatccactatctctttacctgctagaagtcatctataaatgatataggtgcacttttattcaatttgtcgattatgtcttggcgaacctaaaaccggtttagatatattattttagtgctaatttgtttaagaattttggaataaggatcatgtgaggaaaccaataggaagttgggggtgtttgctgactggtcctttcatatatgtagatgaaatcaaaagaaatgacgaggagaatatgcttgttatgttgggtggtttggcgaatttgaattgaagtggtgtggaacaagattaatcctttggtacataatgtgataacattggcaactaatacacttgatcaatggttaatagcacaaagtaaagacactaatctagttttgaatggacatttgactcatattatggttgtactatagaataaaccagcagaagaaacgattaaggtcaacgttgatgatgttatttttgcaacagagggttagtttagttacgatttccttgcccgtgactctagtagatgattaattgaagctaagtatggtagttaggagggtaaggtttcacctgatatggctgaaataatgtgattgaaagaagcacttagttggattaaaacaagaggtgaaattacgtggttgtggagactgattgtgctaatcagtttcatgctacttatagtgatattactataattttaccttattgtctatttattaaagatatcaaagatatattatcttctttaaataattttattttatatttttgttaaaaaatctacaaataaggttgatcatacttttccaaatatatcttgtgtttcaagtgattgtacttttagagggggctttgtccttgctatttttcatctattttgtatgtatattcttcttttatttttatatcatattgtttgtaataacagttagttacttttaaaatttatttataaacatgttgatatacaaattagttattatgttatacattagtaaccttcacgtttactttaaaatttaataaattatcatgtaatataatgagctaccatattaagcaaatatttcaaattttataatgtatcataaattttttataaggaaattacattttatgtattaacagcaagaactcgtcaacaatgttatagtaagaaataatgagttataattgacttagataagtatgagaaaatgagagtaagtagtagaggctgatttgagattaagtgagagtaagtatgaaaagtattaaatgaatgttgtattcaaatcacagctcttccaca

SEQ ID NO: 390958 - DNA, 577 bp, Cannabis indica
cttggtcttaaccttagaggtctccatcatcccttcttttgtattcacaatggaagaggccttcttcatccccttagttgtcttgatagcaaaacaggtcttccatttcccctaggctattatcatagcaaaagaggtgttcctcatccccttagaacagttgaggaggtcttcttagtgaatgtcaatgatgtgttgtaacatttgcattctactctttagttgccaaggaggcagtcgataccaactattgtcatgaacttgacagacaagaggtagataattgagatggcttaaaggttgctgggtatgaccttccaaggagacttggtatcgatcactataaaggtagtcatagtaatatttgccatagggtaattttgactgtgagtggtaatttaattttaccacaaggagtaatgttggctcacctgcttcagatctcttagggagtgacccattatttttagggtctattttgattacaacagttggtgatgcttgattactaaccatcacctttggtgccatgatgttttaaattttgttgacactgtctgagcttgactgctcttgc

SEQ ID NO: 390959 - DNA, 790 bp, Cannabis indica
agtccacgagtcgatattattacgtatctttagctagaaaagcctttggaaatacaatgagcgtaagttctctatttttcctgagcaagtatcgcaagagaatttcaccatttatccaaaagatttttttgggtatttattgtgttaagagaattatacttagtttctctttttccctctaattaggattttaaattaaattacataatttgggctattctcgtgaagtctaacccatgaaagagtcgatctactgactaggaagattggatacagttaatgctgtcaaaaccgtgtcctataattgtgggcaatcaattatgaattaatttcttggtcttcatttaggtaatttcccctcttagcttgatacgatcttttggcaagatctgaggagcatttacttccttatctggtgcacttgaataaaaagggaaactggattgatcttccaggaacacgctgtctaaccttcttgaatcatggtacttgagctacttttggatatggactgtcattggcggaagcccatctggtcatggagctaaggtgctttcctggaaggtcttatgtgacttgggccggacccaaattatcttctttgggatccattggtgggctcttagtgctgacctggaatccacgtgtcccttcaagaaacacggataacattaacaaggccatttcaccatcaaaaatatctttgtcaggaactttaaaggcaatacctttacttttgtcacttgtgacgttttgcttaccttttttcttgatttgttgattcaactca

SEQ ID NO: 390960 - DNA, 1873 bp, Cannabis indica
ccccaagttgggaaagggaaaagaaacctagtacaagggaacctcaagctgaagttagttctggtgtgccttatgtccataatgttcctcaagtgaactctgtcttggaatttccaagtgaaggtattctctttttgataaagttaatcacaccaagcatagcatttgccccaagtgagggtattcttgattattcatctgctagatttgatgattctatttctttggatgcaatctccggtatttaaggggatgcagaaccaaccaattttgcaaaaactacctactcagaagtggtagaagatgaccctgtagtggaagaagtggtaatcttcttaaccaaattttgatatacaattactgtttggcctgtaatatgcttttagtgtagtcttcagcttacatttattcagggtggcaagaatataataggagaaagttctgcagagccaaatggtcttagaagaagccaaagatcttctgctgctatgcaggaaattgaagaagatttagggcagcttttggaagaagaggataatgatgaggaatatagagtggatgataaatctaaaaagaaaaaggctataagaaagttagaggaacctgcatctggaaaagagaaacctgttagaaagcgcaaaagctcgaagcaagcatcagaggagaaaattagagaacctcccaaaaagttctctcattcgactcatcgtaaaaaaaggattggtaattacgtatttttttttggttaatgctttttgatacctacataatgtgaggcatgatgttgttttactctctcttttctagtggaccaggcattacttgacatgcccgaagatgaaattgatccccagaggttacctatcaaagatcttattcttcttgccgagcacagagagcgaatggcggtatacatgcttttattgtttatctttatgggaggacatgataatctttgtttttcgattcattgcacttctatttcttatatgcatagaagttgtaagtttgatatttgatttttatgtacttttttcccctggtttggaatctatgtgtgccagattaaagatgcagcaaagcttaagacaccacagacaaatcaaaggtccttgacattttttagctgactcttttctttttactgcctacttcaaaccatgcgatacaatacagtataattgaatggctacttttattttgcgaggaaatagaattatgtgctgattttttgttagtgcttatatttgggcatctgtatgatatttatatgtatttgaaactaggattcccaatattttagacatgggtttttcctatttcttccctgcatcagtttttgtttttgttcaattaacattatggaaaacaaaaaacttttgtttgattactattttcagcttgacacaaataaaatataattgatttgctaaaagacatcataaagagtgttggggaccaagtgagatcatgatcaagttctcaaagtactgatatggaatttgaagaaacttgaaacttttacatttgctagataagtttacaatgggactctgataaatggttttcttgcacacacgcacacacacacgcactgatgagtacctgctgcttgaatccttctcagacagtagcaattatcacagcaaacaacaaataacaagagaaagcaaatgtagcagaagagtagagaagaagtgagctgttattgaatcaatgaaaaatagagattgtatctcttacaataggaaagaaatgatgagaattctctcttacaatggtagagagcataagccctctactgatgcaagattttactcagaaattgcataactaactcacaccaacactcacacaataaaaggcagctcac

SEQ ID NO: 390961 - DNA, 1216 bp, Cannabis indica
ctctgtctttctttcttggctctggtttttcttgtaatatgttatttttcttttctaccctttgtgtgtattagcagtagtagtaagtagtcaggagggtctctgccatggatgcgtgcatcatagaaaaaggtaaataaagtagtctcctttatgaaactctctttgcatagagtttgaggaggagaaagaggggagtgcccataatcaaaaaaaaaaaaatatatacaaaattataccctttttcatataataataaattaattaattattattattactattatttagagtaatttatacctaaataaatatttaatttataaaattattaagtaagtaatttgacagctgataatttttaattggtttaaataattaaatttttatttttatttaaaaattaatttaaatataataataagaaaaccacgaaagttttaaaaatataatttaaatattattacaaccttttagtgaatctctacccctaaaatcatatattcagattttttttttcatagtattatttgttatagttacaaattttttaaaaaatttgaaatattttatcgtactaataaaataggatttctgatattttagtttactacgtattcaaaaatttgaaatttatttttggtattataaactattctaaaattttcaaaaatgtaaagagatgatgttaaaactataacgaatatcgcgataaaaagaatttaaaaaaatctaacatgaattttttaatcacaaagtacaataaaaagttagactgtactattttttttttttataaatataaacataaatatttaaaattttaagtttgtaagtaatataaatttcatatttacttttatcagtataaaaataatttattaaaagtaactaatattatataaggatttagaatttcagcccaacttgtgtcatgtacttatgttggtaaaaaaacattaaatttatattatttacaaatttaatactttagatagttataaagtaatttaccttattttttttattagttttattttttcatattacacatactactaatgtgattatttgtgaggttgaagcatttggagtggcttggtgattagaacaaaacgccaaaagtgtagtcatcatccaacttcccaaattgcccattactcactcctttatttacctcccaaaaaaaacagagagagagagagagaaagaaact

SEQ ID NO: 390962 - DNA, 738 bp, Cannabis indica
aagcaaacaagtaacaaataccatgtgaatatgtgcttcgcataaaagaagcagaaatttctcttctgtaggtgtgtgcaatcccatcgaaccaaaatcaaacaaatataaaagtttctttcgcttcaaatggaagaaaattgagaacaaaatctcggaacgtgataaacaaagaaggggaaaaaaatcatatccctgtaataagagctagaatgccaatgtagaatagagagaatggcttaggaaaatcaagcagccagataaagtttcaatcgtttctatgtttcaagaagagaattcaatttggattcaagtcagtatattagcatatttcaaaacttataaactatttttcagaacaaaacacagataaaataaatggcgtacctttgagtgaagtaattgttcatctgcccctgcaatggaattcctcctctccgatgagtaagttacagaggttaggccggcgctgatgagttagtgacagaagaaagaaagaaagagaaacgtagagagatggtgaagttgtttgtcatgactttggttgcccttctcatattgggcttggccttctaatattcactttgggctttcttattataatcaaacatggctaagaattttgggataagttttgaaaatgcttgggactagctcaagtggccataggtgggtgtgtgagtgttggaggtcctgggttcgagtcccaggtaaaacatgttgtaatatataaacgct

SEQ ID NO: 390963 - DNA, 621 bp, Cannabis indica
cgatttatctcgcggtcaaccgaaaaatgtttactgttctttagtatacttagaggaaataagcagttcacctgccgagaggaatgtgaggaagctttctggaagctcaaagaacacttgggaaggccaccactattagcaaaaccagagaaaggagaattgttattcctttacttgggtgtgtgaaaacatgccgtcagtgtggccctaataaaaagggaggggaaatagtagcaaccagtgtactacgtcagtaaaagattggtggacgctgagacccgctattggaaatggagaagttagcttatgcacttgtgatggccttaaggaaactaaagtcgtactttcatgctcactcaatcgttgtgttgaccaaccgtcctttgcgctaagtctttcacaagctagagacctcagggtgcctcttgaaatggacaattgaactcaatcaatttgacatttcctatgtaccgcggatagcaatcaatgagcaagaggtcaccgactgtatagctaaattcacctattaacccgaagagttgagacagcaggaggtagtagaggaggacgtctgagaaaggtagatggaaatttcatgtggatggtgttggaaattatttt

SEQ ID NO: 390964 - DNA, 1157 bp, Cannabis indica
gctaattttgtaggtttcaggaaaacaaaaatcgactttacaacaaatgacaacgatccaggacaacaatcatttagaagtgttcaagatttaaaagcagcaggaatcgatttcaaaccaagtgagacttgttcacttagagacataacatttacatcgttatgtttcgcaggttggctaagattacctcccttaaccgttgatgacacaactggtccaaggtttttaaacctaattgcctacgaaatgtgtcccgataatatcgatacaaattatgaagtgacctcttacatatgtttcttagattcgctcattgattatcccgctgatgttaaagagttaagagcatctcacatattgtacaatcttctaggttgtgacaaagatgtggctcatctctttaatgggatagcaaccgatttggttgctagccctgtttacatgaatgttataaatcaaatacaaaatcattacaaaagcaagtggaggacttggatggcgcaagtctaccatgaccattttagtagcccgtggactattgtcgcctttttggctgccgttttagcattgttgatgtcgggtgttcaaacatggttttcttatgaaggtagtgggggcgacacgaaaagtgctacaggtcctacttcttctcctcctccccctaattaagtagtacatagttttatattcagtgtgaaatttggagaaataagactatttttctccatgagtttgttgatcaatttttacaagtttgtgtgatatcttctttaaaatatttgaagtttcccttttattttttggactttcaataatgaattaattttttttattctatttctttgtttggttaaatattaaagttctaaactattctttttatgattattccttaatttttttaaagaaaatacatattaaattttattgatcaattcaatttttatttatattcttattcttttgtttttattacttctaaccaaacatataaaacaaaaaatattgcatttagtcacaataaaatttgtgactaaaagtaaaaaaatgtgactaattatgaagtatcattcttatgttatgactaaaaggttcgtagctaaagttattgtaaagtccttttttggcaagttagttgacaaaataatttttccatt

SEQ ID NO: 390965 - DNA, 1172 bp, Cannabis indica
aatttttatatttaccataatatattattcatatatttatataatcggaaacaataaatcacacataaatcttaagcaacatttatttataataccattttaaccaataattaataaatttaatcacgtaaatcttgcataaatatatatatatatatataaattttgaaaactatatttaaaaaatatttatttttgtaatagtttggtgcagtgcagtttaaaccgcttttatagaatttaaaaccgcacacctcactacacaacacaatttagaaaaaatataaaccgcagttgcattatgtaaataatttcaaatcacatttttatatggtgtaaacaatttaataaatacatatttagattaatttttagtataatgttctgatgtttaattaatgtttttttatcaaaaataaaaaaaaataataactttatagtaattttattatgtaaaaccaaaatataaatatactaattaaataatataaatgacataaaaataaataaaaaaatagtacatttatagtgacacaacttttgtatcaaataaatgtgttaaatttgatacaagatttgttatgggttaaatatgcataactttttagcacatcattagaggatatttttttaactgagtgagctatactttagttttctatcattggagatgttttataagaataaaattggtatgaaatcttcacaccattttcttctaaggatacactaaattggtgtatcaattttagattttgaatttacacaaaattatagtgcataactttttcttttcattctaacccttcttttattttgtttaaaaatacaatcattaataattttttaacatgtgcataattatatcataaatagttataattggttattaatataaataatataaaatttgagatttttaagcaaaatatttttatttagtgttaaatcattcacattattgcaccaaaataataaattatatttactaaattagtgaaaaatacacacgaaaatggtgcaactgttaaaaataatcttgtgtgatattactataatggcacgtttactaaactgtaattagaatcagaataatcagtggaagaaatgaatcgggttaaaatataaaataatcgaaaacaatattttattttgttgtttactaaactgac

SEQ ID NO: 390966 - DNA, 980 bp, Cannabis indica
aaatttattacaataaataaagtaggtattatttatttattatattcgcttgctttttatctacatgtggtagaaatatatactatatacattactttttattaacatatattcctctttcactacatcatatatatatatatatatataacgtgtatatatatttacattatggtacttgacaatatctaattatatatttacatgtatgtaaatatacatatataaaacaacatgacaataatttataataatattaattaattaataatttagtagtaattgattttatatacatgcatgtacacattaattaattaaaattgctacaaatgattgaacaaagcacatgacttttcttgattgattttttcttacaaagtttttgtgtatttgatatttattttgattaattttgccagctacatattcttgttgcactcatttcatttcatgagttcttgacttttttttaacaatttcttttttttcattttttattttattttattttataatttccatggtgatcagagatggattccttgatttttatagtgacagaatttattagctagctttgggttggaatatattttaaaagggtatttatacattataaaaaaagtacaattattgcttactatatatacatatatatatacatgtatatatatataaataaataaccaaaaatatataaaagagatcgaaacgagtttattataattacttttcctttcccataggaaacgagaattttttttttcaacaaaaaatgtccaatcgaagaataaaaaaaaagtactcattttcagacagatataaaaaatctaaccctaaatcttgtttgtgatatacatacacacgtatacatatatatatatatttatatatttatcatcactttccaagaaaagaaaaatcaagatatggattccttaagatttatagcaagaaaaccatgctcttaataattt

SEQ ID NO: 390967 - DNA, 1045 bp, Cannabis indica
tgaaattgaaagtttctttcactatttggctatacctaatcttatcttattcaacccaattcacatcatcttccatgtatttcattaacaaaaacaacttacaatttcatctttcattctagaccactcactactaattaaggctagataacatatcgagttttttaaaattaggcaaattggaaggcaagactaaagttatagtaagaatttttaacccagaaaaattaaagagaaagataacatacatacattcataagatagtcaagctagaaagtattgtaatcctctttaacatttgaaagtaaaatcaattttatcaaaccaaatcattatcgtatttccaaagtttttgattccaagtaagtgtgaagataataatttatcgggtgtttacaaaataaggttacaacacaacatttccttaatatcaaatctattaagaaaaattattatcattaaagagatccaattttataaactagagcactattcattgattataagtaaaaaaagatcttgtattatttcttctttataaatgatatatgcttgaagagctagaacaataaaaagcatgtaactaaactaagatatcatgcaccatttctctaaagttagtgtaaaacatggattggagatcactattgttatagagtcccatattgacaattgattatgtgtcaaaacttaataccatgtataaaatgttttggttacttcactcatttttaattaactttcgaatctcatatattgtaattttcaagacactactacatgaattattagatttactttcattatgaattaaacctatgggaatcaaaacttttaaaatttgtgcgtccatagtaataaatatcagttgatgatgaagaatggagtatgttttcacaataggatgtatatttagtgtttagagatagatatggaagatgggagaaaaagaagaagaatgagtagtcatagtatatatagattgagtatctataaattaattttataaaataataaaaatgtaatagtacttttgattaaaat

SEQ ID NO: 390968 - DNA, 1255 bp, Cannabis indica
aaaaaaaaaattagtgccattttcatatctagctttgctagacaaagtgttttggggaaagtccaacaatgctagacgtgacccttattattttatttttgaaaaaaaaaagttgaaaaattagagccgatacttttaaacatactctcttctctctactctcttctctcattttataaacctaaagaataaaaccttaatatataatctttcttctcttctcttctcttattcagtcagcacttagaaaaaacatatcagatctctcttctctcttcttattttgtaagtggtggccggagatgacgtgaacgaggatggggttggggttttgccaaccaccactctcgcggttctctctcttttgcattcgacaaggacaaattcgaagcccatggcccagatttggggtctagtcgagatgttcgatgggaagggatctgaagctcatggcctagatctgggatctcgctgggtcgttcgacggggacgagatcccaaagctttagaagtttacctgacggtctcttcgatgtgattctagcgtatcccaaagctctgtctgcctttgttgggttcatgtaattttttaatttttaatttttgttttaatctttcatctttgtatctcttttgttgtatttacctatctacatgttttaaatttatattattaatttaatttatttaggtctatcttttttagtttgaacatgtatagtttgtattatttttttgtgataagtattgttggttctcagggtctcactagggtttggatctcatcggggtgggaattttttggggttggggtcttttcgtggtggggtttaccgggtttggggtctcatagttgatgtttctaataaatattaaatttacaatattaaatttatttattatttatttttaaaataaatggaaattcatagctgggcgtgaaacaagtattcttgtgggttttactatcatgtctagtgtcacgggctcaccttttcaggcagctaaacacccgtgcggcaccttgaattctctaagccaaggtcagccttccaaccatctgagtaataatgggctcatttttttcgcgcgaccgtgtgcctcttgcacacttctgtctctcgaacaactcctgccaagtgtatccatgcatcgaggctctctagctaagatactcgcactgcccataggttcccactacgataaggcattcccaacaccgatgctcacattgtcactcgtgaccaaggtagca

SEQ ID NO: 390969 - DNA, 840 bp, Cannabis indica
tatggtatggaattctttattgggaattcctttacaactataaatctttcatgattgaccctataaaggtcgtttttatacactagaaaaaatattaggcctatgatcaacttgtaacttaactgttagaacttgaagattcagcctttgtgcttgaacaacaataataaatctcaagagactgacatgtctgcctccacatcttctgagccagagagatcattttcttcaatcttgctgtctgaatcgtcgttctgtaatggcgaaggctcggggctcttctggggttctgttccaactcttcttctgtgctctgtagaatttatgagacatgaaatcttattaagattgttgacatgatttctttttctttttcatgtgttgaataaggaaagattacttttgtgagtgatagcatgccgagtcatggctagaaattcttcccatttgaattgactcagctcctttttctccacctctgaaagctcgaaatttggctcccttccacacatgaaagcagccctgaacataagcaggagccattaatttttaagtatgacaacatagctgcaaaagattctcattttgccaaaagagctaagcatgtagaggaattgaattctactgaaacatggaaaatgatgcaacttgcttttcaaaaaggctaattagaatcccaccgcgagactttaacatgtactaaattgtgtcttcttaactttttaggccgttaaaaattttcccgaactatagagattgttggattcaaggtctttcgtccaattctgttcaattttactaataagcacatgacgtgggacgaaagtttgagaaacaaaa

SEQ ID NO: 390970 - DNA, 646 bp, Cannabis indica
gcataaaagagatgtgagataggcaccgcatctctcgagaccttaacaccactcaactccccattagcctccgcccttataattaacttcgatagaacctcactacaaagaatgaataagaatggcgacaaaggatctccttgtcgcaatccgcgcttaggattgaagggagccaaaggagccccattaagaagcaccgaatatgacactgaagttacacaactcatgatgattttacacaccttttcactaaatccattggctttcaagactcgaagaaggaagttccattctaagcgatcatacgctttgctcatatccgttttaacagccatcacaccatgtttacccttctttcttttaaagctatgcaaaacttcttgagccatgattgagcattccgcaatccatctacccggaataaaggcggattggaaaggggagacaagtctatcaataactaccttcaaacgatccgtcaaaatacgggaaataattttgtagcagaagttgcatagactaatcggacgaaaatgatcaaaccgggaagcagatgataccttggggataagacataaaaaagtatgattaagtttagcacaaaccgagccatcttcaaagaatccttgaaccatctcacacactt

SEQ ID NO: 390971 - DNA, 1516 bp, Cannabis indica
tttgttctagttggggctatcttagacatagtgaatctctctaattgtaagaaaattacaaatcttgcattatctattatgaacaatcacatttcatcatcattagaagctcttatttcaaacttaccacttcttgagaatttgactttgacctatgatgataattttaagttggggaccctaagaatctcgagtcaacacttgaaaagtttaaagataagtactaagattaacgacgttggaatgatgaaggttacaattgaatcagctccaaaattagcatacatctcttatgaaggtaataccaattttagcatatcaatggaatcatccaattcattgaatgggaaaattgtaattcgttggattaaagaacaaggagactataaccgaaattggtttaccaatatgagaaattttcttgtgaatctcaattgctcttggaatattgttaccctacatgtaccaacatataaggtatgttcattaattgtattatatgaagtaatttgcggcataaatacttaattttaactcttggttgtaaataaatacttaagtttaataatatctaagttatatttctgaaacttctgtaggtacctaactgttaagtgttaagtaaattaccatgtggtcatccttgattgttttacgctatcaaatttttttttttaaaaaaaatagtttaaatatatcaataaaagaataacacgtaaataatgttcaggtacttatagagtttcagaaatataactatagtattattattatcaaaaattaaacttgagtatttatttacaaccaagagttaaacttaaatgattgtgctacaaattactctacattaaaaaaaaatttatgtgattatatgtcattgatgtttatataaatatttaatgtaaatgtaggctcgcattaggccagaaaacttgaagaagacatgtcattatcctttacttaattggaagcatctcagagttattactgacttaaagcctgagagaatgtacgatttgaaggatgccttattgtggattttaccatctttagaaacattgtctattaatggaaatgacatattttagtttcttcacaatattgagtaaggatgattgtgttctattggttttctttgttaaatggtattgagtccttttttcagattgtctttactcaattagctggaataagtaatagggtttaagaataaaacagtcaggaacatattaaagtgtgagaatctttaatcaatggttgctagtacagttcacagatgtccgttctttaatacaaataatcttgggttgaattacaggatgtagtatgacatcaaagtgaaggtattatatataatagagattatatatgacaaggactgatatgaataaagttgtctttattaatatgttatttatcataaagacctaattcatattataacgatgatcaatagtagatcaacataaatcttgagtaaccatgaattcatgttcatgttattagtttatttgat

SEQ ID NO: 390972 - DNA, 1055 bp, Cannabis indica
aaacaaaactaaattacaactaatatctacataacaattcacatagaaactatcgaaaaaattactgaaacaacccaaaccgtaaatttaaaaaaaaaaaataaaaaataatatataaaataatttcccctcttattattcaacataatctaatgaggctatgatttagagcattgctattaggcaccagtggtgcctagcaccttctcgacatgtcgcgttacgattggttagcgatactctctacaagctattagattaaattatataggacccgatacttagttggaccaatagtgatattgactagtaagagagtgctaggcactactggtgtcttttagcatttctttagaatttattaataggagatgcatgctagcgcagagttaattctcatgcaccaaataagagcttaacagctgtgtgaattgtgaaaggtgctgtccaactgataagatatcatttaattctatttttattattaaatactactatacattttaatgcaaatatattaactgaccaatgcgattcatgtttgaaagagacatctacagttttgaccgacaatttaattaattattttatgtgatgaactatataatgtaattatataagagattttgacgtaaaaatatattgttatcatcaaagactcttattttataaaacacatggttaacgattacgatacgaaaaatataattttatgaaatgtcaattacgctcatcaattatcgtgggacttgttttgacaatgaaactatgcattagcaatgaccaagtttatataaattagatgtgcggtaaaattactaaaatttttactttactaataattcatttctaaaatttattttttttggggggaaaacttctaaaattcgtgttttgataatattttactatttttatctaatctttttaatgttaagtttcgtgttcacgtgtacccagtatattgaattgttcacgtgtatacagtatgcacgcgacacaattttattggcacaggattaaataattaattataaaataaaatataaaaaata

SEQ ID NO: 390973 - DNA, 1373 bp, Cannabis indica
aaaacgggggtagcaacaaactaaaaaaaactcattgaaaattacatgacgagtgacaaaaattcggcccgaggtaggatggaggcataagtaacctttgtgcttactactatagccaagaaaattgcaaggggaggagcaaaactcaactttgtggttgttataaggatgaatgcatggaaagcactgacatccaaagactcaaagtaaagagtaatttgggactttgtgataaagaagttggtagggacttgaataacgaagaacacgagttgataggcgattgatcagataaatggttgtggagaaagcgtatggccaataggagagcagtaaatgagcatgggctaacaaagttaagtcagtttctatgatatgtcaatttttgtgctcaacacgaccattttgctggggagtatgtgggcaaaaaatgtcgtggcggatgctgtggttggtgaaaaaatgagaaagagagcggtattcgccaccccaatcagtgcgaacaaattgaatagtgctgttaaattgtgtggaaactagatttttgaaaataagaaaagtattgaatgctttgcctttagtattaagtaaataaaaccaagaaaaacgagtgaagtcatcaatgaacaaaagaaaatatttgacaccagtaatagaagaaaccaggcaggcccccaaatttcggaatgtattaatttaaaaggcttagaagcccgagatacaaaattggaaaaacttaacttatgagatttgcctaattaacaagaagtacaaaatgttagacaatctcttcttggaaaagaataattacaagtacatgaaacatgagaagtaacatccagtgaagggtgacccaactgagaatgccacagatcaagaaaggtcttggaggagtagaggagataaggacatgcaagggttgatggctcgggttaagtagaaactttataaatgccttgatcaagaagtcctttgagaagaatttgatgactcacctggagtaggatgaaattccacaaatgcattattatccaaacaaagctgagaaacactaagaagatttttagaaagactacgtgaatgataaacacgatagagtttaattgaagaagatggaaaatatgtagagcccacatgagagatagaagcaaacttactattgcccatagtaatttggtcattaccatgatatagtgctgcagacttcaaaagattaagatcgggtgtgaagtggtgtgaagcgcttgagtccatgtaccaagcagggttagtaacaacagtggggaatggtggagtgggtaataacgaagggttatgggaaggacaaggtgttggaatttattttaccaagatcttagatctactcacaagta

SEQ ID NO: 390974 - DNA, 757 bp, Cannabis indica
ttatatatatatatatatatatatatatattaaattatttaattcgttttactcaatttatgaacattccgtatatatacgtagctactaggtgtgatatggtccttctttccctctatcttctacgtgtatataatgattagttttactacagtaaatatataaaaaaaaaaaaaattaattgtgagaaaaatttgggaccatattatattttgtattaaatttgacacaatttttaatattgatcaaatttaatacatttttttagaaactataaaaataatttttttaaagaattactaaaatgtaactgtatactatttttttagcactttaataaaaagtggagagactaataaagctaaatagtcatatcaatatattcaacctaagccaaacagtactcaatccaaatgccaccataacagctagagctacaccataactatatatataatataacatcataactacctaggctaattgattgttgagaaaccaaacaaaaacttgtatatagtttgggcaactttcacgtgatcttatagtgagatgtctttcattttataaaatttaaaatatatttatatataatatattaataataattgtgtgatgcatttaaattacacatactttacactatgtaattaatgttttcaaaatgtgtatatgtaattaattgttttcaattatataattaaaagtaagaccatgtgagaaaatatatcctaaaaataataattaattaattttt

SEQ ID NO: 390975 - DNA, 2834 bp, Cannabis indica
tcctggtccgattctggttctggttccgggtcttggattgggtcaggaacctgggacccgatcccagacacacactcggaccaagacgtggatctggatacgaacctggactcggacccatacctagacctatacccaaattgggatcgaaacttgggacctagattcggaccgcgacccagacccaaacctggacccaaacccaagacttggagtcggacctggacctagacccaaccctggacttggaacaggactcaatcgccgacctaaatccggacccgaacctgaacccaaataagaactcagacacataattgaaatcgaaactaggactaggacgcgaattataacatgaacccatactgggacctaggacctggacctggatgggggacctgggcccgggccttagatcccagacttggatcagaacctcagactcgaacccagaccttaatctggactcaaacctagatctagagccggaccgggatcagaaacccgaactcgaactcggacaaggatttgaaccccgaccgggtcctagactcggacttagacctaggacctagaactagatgagggacctagacctgggacccaggcttcggaattggcaccgtgaccgaagaacgaccccggacccgaaccctgaactaggacccggactaggacgtgggacccgaagtgcaactaaattgggacctgagactgggatccagatttggacccgggctggacctgacccatagtcgatgtttggatctgggacccatacacggactcaaacctagacctagactcggacccagacgtgtaccccgtgacccaaaacttaaagcgaactgggacccgtcaacaaaatcaggggactaggacctggtctcagtcctagaattggaatttgactaggacctagaccaagacccagaccgggatacggactggaatcaaaactcgaatcaagagtgaggacacgagcacgaacccagacacggacatggacccagacctagatgcaggacccggaccgggattggagactaggacctggacccaggtcgcaaacctagattggggacccgaacccaaaattagaactagaatcgggacccaggactgggactgagacccaaaacctgaccccggtcttggtcccagacccagacccgaacacggacacagactaggacccaggatccaaatgggaacgagatcggcacccatgattgtaatctagatcttgacccacgactcgcgggttcgaccaaaccagtagtcagtgtttgatcttggaattgtaccaagacccaaacttggaaccatttcatgaccaagctccaaacccaaacacggacccgagacccgaaattggataacgaaccggaatcaggaccttagaacagtaattggacctggaccaagaactagatctagacacagaactgaacacggaccaagacctagactaggatcgatattcggacccagaaccgaacaagaacctacacttacgccacgatctacgacccaaaacttggaacccaaggtcggtgtcctgggaccttgacaacaaccaagactcgtacgataacccaaaccaagacccacacccagactaagatgggaacccatacccagactgaaactcggacctagacctagaccaaaacccaaacctgtacccgtactcgtaccaaaactcggacttgaacccaagactcaaactcgaactcgggactcgaacctagaccgagattaggagtgggacccaaaaccttagtaggaccgagccctcaacttagactaggcccaagtttgtgtttaggatcaggtcccagatttaggtctgcgtcaggatctcggtttgggacttgggctagatctgagtttggttctaggtctgggtctgggtcatcatcacggtcctagtcttgttctaggatcctagtctggcggttcttgttcaagttccagtttcgagtcctgggtataggtttaggtccagtttgggtcttggtctgggttcgggtcctagtttgagtgccagatccagacaccgactacaggtctgttcaggtgctagttttggttcaggtcctgggttccaagttcaagtttgggtctgggatcaaaattggggtgcggttctaggtcttagccccagttttgtatcccaggtctggttccatatttgggtctgagtttgggtccatgttggggtccttattcgaggtctgggttgggatctaggtctgggtcaaggttcaagtctaggtttaagttggagtctaggtcctggtcagattacaattttgggtctgggtccacgtcaggttacgcttagggttttatttctaagtcttggttcctgtcccgttctcgggtcccggtctactttttgtttcggttccaattttttgtcacagggtacgggttcgggtccaaatttaggcctgcgactaggttcatgctcgggtctaggttcaggtcctggtttgggttcaggtccaggattgggtcccaggtccaaacactgattacgggtttggtcaaagctccaggtctagatccagatcccgatctcgggtgccggtttggttccattttgggtgcttggtaatgagctgggtcctaggtttaagtttggtctggggtcacctactaggtcccaattctggtctgggtttgagtcttggtctaggtttgggtttgagtgcttgtctcagtttaggtttgggtctcggtctgggtttttatcttgctttaggttcgagtttaggtcctggtcctttcctaatcatgtcctagtccggttccaattccagttg

SEQ ID NO: 390976 - DNA, 878 bp, Cannabis indica
aaaaaaaaaaaaaaaacattttgtaaaacccatttttatttgagatgtaaaagttttatttatttgtcaaaaaaaaaatatagtgaaaaatatgtatttatgctggtgtttcgacatatctttatctgtttcgattattttaatctttaaaagagttttttaatataattttttttataattatgtatgttgtaattatttaaaattatctgtaacttttttcaataaattatagtttaaagtgtcaaaaataaaatttaaatagttgtatattatatgtataagaaaaaataattacttgtgcaacaaaaaaaaaaattaaaccttattttttacactattatttaacaaattttaagactttacaaatggtctttttttttgagagagagaaaaaatttgtcatcataaattaaaatcatagacatttacagcaacaaaatatataggtggagaacatgtctttagacaaacacaatcttcatccaactctagtacatactttgccaaaccgtgagcagtcatattagcactacgtttgacatgagtaacaataattctaaaaaaaaaaaagactagatatatctaaaattaaatcattaaaagcagtgagagtaatagttggtgtattacgagcttttgaaccattaaggcatccacttctatgtgatcaattgacaattgcagccgtcagttcaaactatgaaataatagtagatttttatgtgttggagtgtctgtgaggggtcacgtgatcgtaatgtaattcaaatatgtaaggtaaagaagtttcttttttgaaaaaaaaaaacaaaattatgtgtgatttttttttaagaataataggattaatatttttcttgtaatgggaaaacttc

SEQ ID NO: 390977 - DNA, 1898 bp, Cannabis indica
aaaaaaaaaataaataatagaaatgcagcttaatgggattttacacatttatacggttttttattttaattacaaaaaatacagtatacacacatcatcccaaatgtcagtgtgtcattgttgttggaccaagctttttgaaactaaaaatcaataacaacacgatgcataatcctaacaatacttcccaattcaattaggcaaattgaataaaacaaaaaattcataagaaaagatcaatggatcaataacaaattctctggagaaaaatctgcataaaaacaggtatgaaacaccaaaaacacaacactcgaaatgaacagagtaagatctatattgcatatatagtcaaggtactaactggccaaccacttaggcaagctctgatgaagccaaaagcatcaaggcgcctactcaagtaggcagtggaactaggtcactttgagatcacctaccagtcttgaataacaatcaaaaggtaggcattaagcagacttcattgttaaatgtacttgccttgaagaagacgattccatgatttgtgaagaccaggtccacacgcctgataatgcagctcagaatgaccttggaccttcctgaaaactatatgtagatggatcctacaacgagtatggttatagtactggactcatcttagttactccaaagggattttaaactcgcagtgcattgtaatttgagttcaccgcaacaaacaacaaagcggagtatggggcacttctagaaggactgtcattagcactagaaataaaagtcgagtcactcgagatctacaatgatacacagctagttgttaatcagattcttggtgagtatcaagcctgaaggtcattcatgatcccatacttcagcaaagctaaagatctattagcccaactcaagcactactccatctaacaagtgcgacatgaactaaacgcaaacgcaaactcactgactaaactagctaatacaacagattctaatactctcagtgtagctctcgtcaaataccttgccaaatagagcattaatgaagactcagaccctatcttgatgatcgacaatagtccatcatggatgaccccgattgcacaatacttaaaacaaggtattcctctaactcactggaacgaagctaagagattgatgagaaaagtagctcgcttcatcaccatggatggagtaatgtacataataagattttcaatgccacttatgaggtgtgtcactatttaacgtccaaatgtgacttccactagcagtggttgtaatataaattaggcggtcgatcccacaaggaggtgattatgaacaaaagcattagtagaaaaataaacataaaaggttaataaaaagtaacaaataagtaaccaaatgagtttgagtatttttattttcgtaataaatataaaaagaacgcaaataaaatgtgtaatcaatagtaaaagagagaaagacttcaataatcatccatatgcttgtttggttagtttgtacatttgattcacaaagttgacacaaatgatgtaacattcaatctcattatatattgagtatgcaatttcttaaaaataaaaaaaaaataaatcttatgtaaaacatataaatgacattacacatcaaacaataatgtaataaacgattgaacataaaactaaattatattatttttactaattagaaacacataaaaaaaacatgactaatcttatatattataaataaaaatatagtcaagatagagatggtggtggcagtgaaggaagtaaatattaatattacttttattaattttagacacatagggagagcatgactaaatatatatatatatatcatttaacaaaaataaataaacataaacataaagatagaaatgagcaatactaccatta

SEQ ID NO: 390978 - DNA, 1108 bp, Cannabis indica
aaaaaatacacatgaataaaattagattttgcatgggaatctctcaaaatagactaagactgaactctgaacgagtatatttatataattaatttttcatgctacttatatgctcgctattttctttaagtattcgtttttttctgtttaagtatattcgccactctaccaaactactcactgttctttttgtgagtgttcttatttacatgaatatactatcacttattttggtgttaacttaatttctttgacaacaacactcctcgtatatcagaccaaaacagatggccaacagtacaacactagtggcttagttacgtaccctgtatttggtgaattcggccatattatttcactaatatataattcaactaaaataaatatccatacctgtatagtaccaataatatgcctatggcacacggcaaagtaaaagcagcaccacatatgtttcgtctaaagaagtaaacaataataatcagatatatataatgtcttgtatcaagtttcaacaaattagtcgtactacgtatccattactcactactgtaatattaacacaacatttctgcatcaccatatgcaatcaaaacactatatcattgatcgtgcattcttcttagctctctatctgtaatcacattcaaaaggtattactatgatactaataatcaactagtttgtggcgctcaaattctacagaactataacccaaatctttcttaagacccctgtctatcattatctccctcactttctcaacatcactccatcttcccatctgtgcatacaaattagaaagcaaaacgtagtaagtactattgcctggctcaagttcaatcagcttccaagctgcaaactcactgaggtttagatttccatgagctttaccaccagccaatagtgacccccatatcgcttttgtaggctcataaggcattttatttaagcatttgaaagcttcttctagttgtccggcacgagcaaagatgtcaaccatgcatgcataatgtttgacagtaggagaaaattgatatttaccatcaactatagctccaaaaattcgagtaccagtatctactaaccctgcatgactacaagcaag

SEQ ID NO: 390979 - DNA, 831 bp, Cannabis indica
agggttaccacgttttagtttacctttttttaacttttttttttttttttagaattttttctacctaaaataactttattagaaaaagaaagaaaaaaaaattataaattttataaaaaaccataaaaatgtgtaattttcattaatatttctacaaatatcataaaattgagttcggccatgcctatcccttctttcttattatcgtatactcaataataagttcaataagagtttcaaaaaataaataaataataagctcaataagaaagtctattattattattattattatgaaaattttcacaaacttgctaaaaaaatttaagaataaaaataacataaaaaagtcaaaagattatatttttataaataaaatttaaaaatttgtaaaaatatttaaaattttgtacaattttatatttgtattattattattatttttttttgtatatttttaaaataattccttattattattgttatagaataatatatgtccaacacacaataacatgacagatattttcaatatgtattgatattttttacacattattgtatacattattatttctcatttatgatcatactttgacacaatttaagtaatacattaattaattatccaacatgtttggttggaggagtccacatgtctacttggacacgtcaacgtagggtctttaataagcatttgaaagaaaaccaaaacatttatataaagattaagagcccctaagattaatgatagtttacacatatattgatatttatatgaaaaagttagaggtttttctattttttactttgaagtaattattatttttt

SEQ ID NO: 390980 - DNA, 853 bp, Cannabis indica
gtatataatataataagaaaaatataatataagatataagtatataatgataattaggctcatataataatatgttgtttaaaatgtgaaaaacaacgtttattttaattttgaaaaaacaacaaaataatcaaaagcaggccattggtatggggctcgttattatagtgtatacacatatttaattattttactttcattgtcttatttatttatttttattgtttcttaagtacatatattttctaaaattaaaaaatcatatatatgaaacgaccagtcagaacgaaattttatatattgaataaacgaaattatatttatggtaaatatatgttgttgtatacattaaataagtttatatttccaacttgcacaaaatgtaattgactataataaattagagacaccaataattgtgagctcaatatataaatacatatattatatttatattgatatatttcaaaattattgtaaatggaactctctggactattcattcaaaattctatttatccataaaataatatataattggaaaattttacaagcactcattttacctttaaaaaaaaatgcttttatttatttcttgtatctaaaataattttttaattaattattaaaaaaaatgctatttttagtgataactatttaatcacaatatatttttttgtgattaaatatgactaaaaatacatttagtcacaacaaattataatttttgtctctaatacttttatcttcgaaccttttaatcacaccataggaattatgacttataattagtcacaattttttcactagcttttatagtcacaagttttattgtgactaaaaataagatttt

SEQ ID NO: 390981 - DNA, 720 bp, Cannabis indica
gtagacgagagagagagagagagagagagagagagagattatataaaagaacaaaaacgaattaaaacatggattatggagttgtgatagaaatcttgaattaagcatcagtaattcaccttaaggagtacacgatcattgttatttatataaccatgccactcttcatccgaaggataacctcctctaaattcctccgtcacaggcgttctgcagtagaaaaaagaaatcaaatgaaaattttcagaaacagaatacgaaacacttggtattcagagaatgaataggaattgagaattagagacctcatcttgagacaaaaagtggaaggaatgggttcagcatctgggaaagtatcagttatgtgagggagattgaagcgtttctcgaaatcggactggaacttggatttccaatcaggatcactgaaatcgatcggcgggttctggatcttgataccggcggaaacgcggctccgggaggcggcgttggttctagccgttgaattggacctcaaggttagatgtttggaaggggaaagtccatagcggaagatggtgagttttggggcaataatcgaatgcgagattgtgtccatgaatggaagatcacaagcacagccaccggtaatgttgaggctttgatcgaagagaataatagccttggtggtggtgaccgtacaagctgaaagtgctgactttgtgtttcaatatttatata

SEQ ID NO: 390982 - DNA, 1215 bp, Cannabis indica
aaaaaaatacaaacacctacgggtccccattactccccgtccccactttgtttgacattcagggacaaaaaatgatattcctgtatccattccgttccctacttagacggaaaatccccatcgggctccatcccaaaaatgcgcattactaaaaaaaagaagaaattacattctataccatttttatattgtcctcttttatttttaccttattttttaaagtctatcatttttacctcttttttaaaacattgtaccaattttgtccttgtcacttcaagatactctccatgtgactctcttatgtcaaggtattttgggtacactacatataaaaagaggtatgtttcaattaaatataaaattagaggaaaatttgatcaattgattaataaaaatggtattttttaacttaccccttactaaaataaatatttctgcgtgtttgaaataaaatctcagattgttgggcttgatacaggcccagagtcttattcactggcctgcttaggatcaagtgaaggttagtaacaataaattttcaaaaataccaatatattatttgcacatgaaataatattgcatttaaaattgattttaaaagaaccaataatggccttcgtaagctatgatggagtttagagtgtgtttggttgggaataacgaaacaaataaaaatagaatgaattagatttaatatgaataattattcttaatttttcttataataataactcaatgaaaacctcatttgatactagttttgaatacaaacacttaaacaaaacaaaaagtttcaatttccaacaaaatatggattatcatgcatatcctaccacatttagagctggtttggtacatcgtattataatatattgtattatattgaattgtgttatattgtattgtattaatattattcaatacaatataatattaagtattgatttgtattaattgattgtataaagttataatatatttttaatacactcgatcccaacaccaactacgagtccgattctgggtccgggtccaggtcccgggtccgagtcggagattggtgttgaccccaaatcctttgtaaatattataatacaagctaatacggaccatttattgtgtattaaataatacaacatacatatattaaaaaatttgatcctaataattaatacaatatattgttttatccatccatagtgttatttatta

SEQ ID NO: 390983 - DNA, 888 bp, Cannabis indica
atgacatccttggaagtgttgtttacatcaatctgtctaatggtcgtaaatgtagagagcttcctctttttgggaaactaacatctcttcgacaccttaaaatatatgaaatgtacttagtgaagtacattgacaatactggagacctaagaagtagctttggatgtttacaaagtcttgagattgcggatttaccaaatttggaaggattttcaaggcatgaagttggaaatgaaatgttcccatgcttgtcttcattgtatgtggataaatgcccaaaattgaggttacctaaactaggatcagttaagtctctgagggtgtatggtggtagccaacagttagtagaatccatctctaatctctgtggtcttactgagcttgagatgagtcgttgtgatttgacttcccttccccaaaatatgctacataacctcactactctacaaaaacttaagattgatcgttttcaaaagattcaggagttgccgtctgacttcctcaatggccttattgcgctacagtccttacaaatcagtagttgtcctgacctcaagtgcctaccagagggaatgttcgaacattgttcattgcggagagttgacatcgtaaattgtccagcacttgaagaaggctttccaagtagtcctaatcaactcatatctctccaacatctaattataggttctcaaaggttggttgtgctgcccgagggcttgcagcacctctcctcacttgaatatttggaaatatcttatatcttggagcttgcgtcgttgcctgattggcttggaaatcttacaactcttaaagagttaatcatcagacattgtctatgttggttaaaatccacttataaccagtccctttacagtatatatccacatc

SEQ ID NO: 390984 - DNA, 552 bp, Cannabis indica
atacctccatgtgtccaaaagcacgaggcttccaagggaagggtcgaactcctttagagttaagttcatgagagaaactcttaatgtcaggtgctcgcttcttgcgaccgcttgtaacacgcagtattgcctggaaacgaggtgactgaatttctttggaagaagctgcataattacccttcaaaaagcacattgaaaaccatattatcatcaagcttatgagataccaacatcttctctaacaaaccaatcatatttcagaaaaaagggatgtttagttgtaatgatattttcttttttactttttcaaatgctaaatatcaaaatcacttaaattgttaagttggaaaagaaatattcgggccataaattattaatttaatgcttaattatacaagtaaattgttggttgcctaatatcaaattattaagtcttgggagttgagaggaatccattggttctgcctcagcaattctcaaatgattatcattcttagataaatattaatatcaaatgcattatcaaaaggaataaaaaaaaaaaagaagaaa

SEQ ID NO: 390985 - DNA, 1015 bp, Cannabis indica
aactaacttgactgaatttaataggcccctagcttcaagatggagtgtagaaatttttgacacccattttgggtacaaggtcattgaaatatagttaggaaataagggttttgttaggatgttgactaagttaatttttgaatatacatgattcattttgatgctgccattggtaaccttttctctgacaatgtgacagtcgattttcacatgtttggttctttcatggtagacggtgttttctacaatgtgcattgctgttgaattgtcatagaagaggattgatggtagttatatttgtatgttgaagtctttgataatggagtgcagccatgtgagttcacaagttgcatttgccatggccctatactctgcctcaaatgatgatcgagatacattgggttgtttctttgatttccaagacatgagtgactgtcccaggaaggcacaataccctaaaatggatctttgagtgtcaagacaggctccccaatcagcatcagtaaaggcctgaaactgaggagctaaacatgatgcctaaaaaaagagtccttgatcaggggagcctttgagataatgtaggatgcgatttgcagcatgtaagtgaggttgcactagagattggaggaattggctgagtttatttactacaaagctgatgccaggttttcttatggtgaggtagagaagtttccctattaaccttctatatttagttggattttgtaagggttggtcatcatcattgctgagttttgtatttggttccattggtgttgagagtggtttagagccgaggcaacctgattctcttaataattgaagtgtgaagggtctttgagtgactgatatgcctttggagcatttggctatttcgaggccaagaaaaaaagttaaggttgccaaggtcctttagtttgaactttgcatccagggtggagattgtaacgccccgatttctcgagacgtcacactagctagtccatttaaaaccatttaagataaagacaataaa

SEQ ID NO: 390986 - DNA, 1379 bp, Cannabis indica
agtacttttttcatgggacactccttagaaatacagtaatgctctaggttcctcaaactagtaaaataagctaagtacattaatgtttaaaatcataattatattagagtgaaatcgaaacattcacaattattttttatttgattattctcaattttgttttattattttcttttaattttttaataccattcaaaattgattggttagataaaattagatctattattccctataattaattgtttaattacttttaatttgtgtgggatgatatcgatttatttactattattttgtttagataaatcatgcaattttattaatagcaattaactaaaataatatactgcaatctaatcggaacgtcttccttgttggagacacgaccataattaaaattagataaacgagttaaataatcaattgcctaattctcaaattatttgacaaaaaaaaaactaaaataaaattagatgaaaaagattgtagcattacaattagctttaaaaatacatatattcactttcatccactttttagaagacacgccagtagaaaccgcatgtagtatgcgctcattcaacctcgtagcttgagcactcaactattatgcaaggtacgtaactgcactactaacaaccttttttcaattccacacaacttattatccctaaccattaacaacgattttataacgaatcattggagaacaaagaagaaccaacaataaaaataaacaaaacaaaaccatgacacatatacaagataaaaacactcaaaaccaggtcatagagacaatactaaaatactcaaaaccatatcacaaagacagactaatcgcagaagcaaaatacaaccccgagcaaggcgcacttaaacccaaataagaccggcaggcctagccaaagaagaaagacaaccttcgatacctaagatttaagaacaagaatttattttccatatattaatcactattattacttatagatttgtgcaacacacatgattataaagttggtagaaaaataaactaattaaccaacgaataaattatacctatttttaagaattttttatttttaaataattagggattatatattttgcattcattgaggttaatgatgagacttagatttattatgtaaagtaatttgtatagtttattggatcagtttttaagtcatattcaaatccgattaaattatatactgaatgttaaattttaccatctaatccaattcaattatttttattctatccaattgatctaacatttattggatattggattggatcacttctatccattagatgtttttcatgtatattaggtttattcaatatttttaacctaatgtttttttggatcaaat

SEQ ID NO: 390987 - DNA, 1165 bp, Cannabis indica
cttagtacttaccatgttccttcatccaacatgtgcactaaatgaaattatgtatttgcccttacattgcataatagctagcatagaagatgccactaaaaagaagaaaaaaggaactagtatagaatttctttttctttgagaatgttaagtgtataataaccaaggtttttattagagtcttatattgactaactacttaataaggtgagagtaatcttctcgtaacaagctattggatgtggaactaaagtctatattagctaagaatggaaatgattataggtatataaggatagataatatttttattagtatgaggttttttgaaaaagtgcccaataacaaatttgttaggactaggcccaaagcagacaatatcaaaccaatataaagatagatgatgttcgacgatcgttgacaagtgacatcagagtcagattccaacattagtcatacgaataaatcctcttaaggtgatgagcttctgtataatctcgcgattgaaaatttgtatggtgtattgtattgaaagtatactggataagtcaggtgacgtgtccaattggtaattgtggcagtgcaagataggaatcttgtttggtgccttgtgttgaaaatcttcttgacaatgaaggtcacacgtcgtgtttcgtttagtgatagcaacggtgcaaaatggaagatcgtttgaggggaggctatgtgatcctgtgtttgaggggatgattgttgggtttgcaattaaagtctcacattgcctagaaatgagacagatcatggttatataagaatagacaatatctctatgttagagtttgactcaaattatttatttatttctttatttatctatatttgtaaagttacaatttctttttgggtaattattaattatgggaaaaggaaactcttggttgccaagttttgaaaagtcttcttaaggaagctttggaatgtcttggtctccaagttgtcttggtgcccaagttttgtaactttataaatatgtgttttgtgtgtgtgagagagagaggggtgtgtgtggagagagaaaaatagtgagttgtgaaaagagaagtgtgtgagtttgttatgtggtgagagtgaggaagaagcaaagggtgtattggggtttggtagagagattgagatagagagtata

SEQ ID NO: 390988 - DNA, 1529 bp, Cannabis indica
catactcatcaacaacaaggccgcgttgagagaaaacaccgccatgttgttgatattggcctaactcttcttgcccaagctgaaatgcctctcactttttggtgggaagctttttcttctgctgcgtatttaatcaataggctaccaaaccagcttcttcaaaacaaatctccatatgaaactctttttcagcacccacccgattataacatgctaaaagtttttggttgttcttgctttccgttgctaagaccctatgaaactcacaaagtctcatttcggtctgccaaatgccttttcattggctatactatgtcctccaaaggatatcgatgcttacaccccagtggaaggatttatgttgctcgaaatgtgacctttaatgaagaagaatttccatttcagcaactttttcctactacagcttctactcaacataccagtgacaccattattaattctactcaactctttcccctccctcataccacatctcaaaaccaattggcaatgagtggagtagcccatgttcttatatatggctcaatactttcacatttaatccatgtgggacaatattctccaatagtcaattaaatatgccaaaaatagaattaacacaagtagtgtagttaagtataagatttgggtcacgttttaattatataaaattatagtctttgggaaaatatttttaattaataatatgaggaattgggcacgaaaggaacaacaacaccatattatatttaataaatttaattagtgcgcctaatagggctaaaacgtaacgttgaacactttcttatccgtccaacaatttcttttgaaaaaatatttatacaaacactggtgtttttaatgttttattatctattgtttcaaaaaataataattttattaagccgagccaccacccaccatcctttcgtttcctcctacatttatcggacatgaagcaatcgctaagttaccgatatcattttcgatgtgaaaatgacaatttatacgaaattctcacacattattaatatgagattcactaacaacttcgactatattttctaaccaaatctggctaaccaaggtgaggcacgaaagtaacaccattagaacaagctctttttatatcaatggctgtagaattgctagccgtttggactcaagctataatactattttgacttagaacatcttcaataggggttatttattggaatggtcttgttacatatacaatatggtctaattttcaaggttaattttatatgaagtgttgcttaatttaaacaatgacgacatgataatttttttgtttagaatttttttttattataaatggccactcctataataatgtgtggtttttcagaagcttcaactcgaaagatcaatgaaaaatatgttgttgttggcatatccatgatggaaatagtaaaataaggtattgcaatcggtaaaatcaaaggagaaattacatttttttagtgtaaattggctgggactcgatcccatgatcctctttatcc

SEQ ID NO: 390989 - DNA, 3018 bp, Cannabis indica
tcaggaaaattgttcactcctcctaagaatatttaattttttcaaatagtgttatgtaagctaccattttcaacaagtaaaataaaaattaaaaaaaaattgtattcaagctccattggaagaatagagctacctatctcaatgtgtgaaaaccgtttctgagtaagttggtactatgtaattaggagttatgtagaggatacgctaccattaaaaagggctaccattgagatagtgtgatatcgtcttcattggttacatactattagaaaaagtctttttgacaaattggcaatgatctctgcttatagtttcacacacttatgtttggcataattttttgtaaaattttcatatattagaaaatggtcttataaagctgttacatattgcttgattttctcacaatattcttggcgactgagtaaacactattcctacgtaactggtatgacctcattctactagtttattagcttggtaaaataatttctgactattcttatgagtttgattttttttcatcaaggacaaagacaagtagccataatgtattttttgttggcaaaaacatcaaggctattttatttactattttttgttgtcatttttttgttatgttgtttctactatttttcttacttagacactatttttgctctaatatgttgattggtgccttatgtgtttttttgtgttattgcctttttctattttttttttcaaaaaaaatatacaaaaaaggggcttattttgaaaaaaaaaaaaatacaagaaaaagggaaggttttttttttttttttttttaagttttttgtagcagtttttttctttcattttttcatttatggaaacttgtttatattgcattttattgtgtttccttttattatttttggttgtatgattttaggaaacttattttttaaaatattttttttgtttatttcctttttggtggcattttcgaataaggcatagattgtgagttactgtattgtgttttatttttctagattttgtggggttaagttggttttttcctttttcatttttggtaaccattaaccaaatttttttgaaaaaatctttgtgtttctttttttatccacatgtggtgctcaaggtaagaaggtataaaagtttcattttttcttattttgggtatttatttcctagtgctatatatgtctaactacccattctcttcaccacactattccaacgatcatcactaaccttttatctctttcttttctttttaaaaatttaatctttttaagttcgagaataccttttgcttagggtttaaaggaaaaatggataagaccaagaatgctcaaccatccaagaggcttgttcgtgcttcgtcctctgctgagattttgggtcgtcgtctgctccatcaaaaactgtcaggaagtcaaaatcccaagctcaaaaattaacctacaatctcagctctcctccgatcattgcttctccgattgcaaccccaactcctaggcttggtgatcatgatgaattccattcatctgatcacaccttgtcgaagtcatcttcttccaatggtgttcccaatgccgagatagctattattcctttgtcaatggtgagctcttgtacaaggtccagggtatccacaccaaagaaaccagaggtggttgagctcagagaagtcttcaaagagaagaaagtggtgtcttcatattcaaaggcaaaaagtctcaaagagcatccaccttctatttcctcatcaaattctgaaccagaagaagagattgaggatgttgaacaagaatcagaggatgagtctaattctagtgaagaacttgttccaaaagagcaaccctctgctgatgattctagatctgaaagtgaagtgcctgaagatgatcttgttagtgcagaaccagttgttgttcctgttgcagttccaaagaatgacaaaggaaaaagactcatggtttctccaagccctattcttctccaaaaaaagaaaagaccctctggtattactcttgaaaacttcaagcctcattctcattattttgttataatgatcatgctaaagatatgaaattttatgagaataggaattcattgtggagaaaaatttcaatgtcattgctcataagtcatttggggtatataatttattgaaagaaagatagtggatggatacattgattaggtttaatggctatgtggatcaaattgtcaaggagttttatgctaatataactgatgagagtctcgatgatctttatgtttggcaaaatttttgtcaagagacactggtattcctttactgtgaaggatgtggctgaagctcttaatttcctatagggattgagccaactgaagtgcaatttgattgtcaaaaggtgtttgggtttctcactaatgacaatgatgtggaactctctaacacaatgcacatgtctcaacttacctatcatcttgctgctcttatgatgtttgccctatccaactggttatcttactccaatctggtaaatgtaaatgaacttgctttctttttgtataaagtgtctactagtgcaaaaattaatttggctgacataattttggagcaaattatctctcttcaaaagggcaagaaacctaggcttaatcttatttttcctcacttggtttataagattttgtcttaccaaaatgagttgaatcttgagaatgaatctattgaaatgtctgctgttggtcccactttcaaagtcccagagaaacctctttaaggaaaatctgcttagaaaaaggttcggtatgcttccccttgtgctactgatgaacctgatgctgcatctgcctccacttctgctcctacagaaatggttaatttcaacttacgtttgggaagaatagagacaagtgaagccctacttctcagtacttctcagaaggatgaacaacatcatgaaattgttccaatcaaatgatgatgcttaagtggtccatttttttatcttttgctttttatctatgttttttgtt

SEQ ID NO: 390990 - DNA, 1660 bp, Cannabis indica
gaagtcagaaacagcatcacagacgtcatcaccaccgatcccaatagcgtttgaaaaatatacagacattccatcaggtccaggggctttataattattcatggcgaacagagtacttcgaatttcctcaagagtaggggcctaaggagcactcctgatcttcataagatattttctctcgaaaaagataattacagttaatcctctgatcaccaacagactcagagaagatccttttgaagaactcctggccaattaagtcacgggaagttatccaaatattatctttgtccaaaatactctcaatagcgtttctccttcctctaatagcggtcgtaaggaagaggaattcggaacacctatccccatctttgatccaagaaatcctagccctttgcctccaatacgaagctttcctttctaaggacttgttgagggatcttcggatgttactttcagtcttccagtcgcgagcacccgcaggtaaactctgcatcaaattaagtcttttttcaagctatttgataccagtgtccagtttaccgaactgatatctatgccagtgaagaagagcaacctgagtggttccaatctttttgaaacagcgagcaagggcccaagggtgagcaatggacttccaggcatgggccaccactagattactatgctcatccctcgtccaaccttcttcgaacttgaaacatcttttaaacttggcttccagcccaccagaaaagagacacagaggtctatgatcagagttgctcgtctgataagagcaaataatagcttgcaggaataagttggccaagctccgttaaccaatcctttatcaagcgcagacttaacatgattcttgccagatctgtgattgttccacgtcaacatatcgccctgaatattcatgttaatgaggccccaggactcgaccagattagaattgaaaggaataaaatggtccttaccagtggcaccttcacgtttcgactcgcggagcacaaagttagtatcacccaaaatcaaccaagggccgccaaatctatattcaatcttcatgaactcagcccaaaaattcttcttggcatggaaatatggagggccatacacacaagatagaagccacaggtgggatgggagatccgaataaacaatgccagagatatgattacgtgagcaagacacacactcaaaaataaaatcatttttccaagccaaaatgataccaccagcagctctaatacctgtcacaaatatatgaaagtaataatgtaaggattttagaatgcgtatgtaacgcccgcattttaaatttactaaactcaaaagataactttaatatattatatctttataactatatggatcgggatcccgagtatcaaaatacaatttaaaagcattttactaatatgtacatataatatttttttaaactcgctagcatgcaacatcaaaatacagactccaaaatagtaaaagaccgaaaccctccaggttgcactgccgcgatatgtacaatcactgccgagatctatctcactgttcctccaactttgcttttcctttacctaaacaaggtagcaaactgatgagtcaacagactcagtaagatatgcaagatatatatagaaataatgcgatgccggctttatgattaagc

SEQ ID NO: 390991 - DNA, 957 bp, Cannabis indica
ttatattatttattaaatcaaaacacataagatccgatattaaaatacaataataacagtatatcatctatttgttcaagcattgtgctattggtaaaggaaaatgttaaaggacacacagaggcagtgtcatagtatctattaatattaaaataatttactattaggtcctatacattacatcgatgtatagttattttaatttgtcaatccaacaaagttatttacatatttattttttattaacattttaattcacaaatttttccaatttgattttttttatatataaaattacaacgtgaaacactaaacataaaaattccaatttcatatgtatgcatgcttgtttggaaattaaagtatttaattcttaaagtaaaagtaaagtattgaattcaaacaagcttgaattttctttttctttttctttttctttttatatatttgaattgatgctatttctccttacaaattcaattcctccattacataagtactatcaccatcatattttatactctttaaaattctaagagagactttcataatttcccaccttgaattgctctattcacaaatcaggtacgttatttttttttttaatttcatcatcatcatcatcctaataataataataataataataataataataattataataataataataataattgtacttacaaaaatatatatatacacataaaataataataattgttgactatttttaattactttattttaggtaatttctttttatttttactacttctaaaacagtttttattttttatttgtttacgaaatttctatacaaaatttctaattagcaactaacgaagcaacatatatcgcaatagcaacccgcataaaaaccactgtaacaactcaaatcgtaaatttgaaagaaaaaaaatagttaaaaaatagtatataaaataatttttc

SEQ ID NO: 390992 - DNA, 616 bp, Cannabis indica
taaggtttgcctacttttgtttcgcctgattgataacgatccatttgtaattatttccacgtaattttcgctcaatacctttgattaaatttaatgatgtgctctttcttctaagaaaatataagtatagcttttctttttaataagtttaaattgattattcctattgccaaagcttttgattatttattgggcttcagttttcatttttattctctgtttcttttttgtttttaattgctttcaatgccattttttttttccgttaaaacttaaaacctttagggagtgtttggaatgggttaatgctaacaagggaatgagaatgtgaaacattaccttgtttgttttgagtctttagccttgaaatgttattctcttagtattataactacccttgagaagggtaatgttgatactttaaaaaagggtaggattgaatcattaccttctattatattaatttgaatataatttttaaattaataaataaatttaaggctaattagcaatttttcccccacatgtactaaatcgtgccccctgaacatttttggccattagaaattcccctcgaactattgagattgttaagtttaaggacttttgtctaatt

SEQ ID NO: 390993 - DNA, 734 bp, Cannabis indica
gtaaatagaaaaaaaaaagggggggaggggatcgacaatttacaaagaaaaaatcagagaatgaaaggaaaagtcactgctattgttgttcgtcaaattgttcaaagtcttgaagagttcccatgccatgaaatacattcattcatcgctactcattctcttcttctttcctattcatcgatggaatgccctcattccataatgaacataaaatgttctcatatatggaatgccttgctaaatataaatttatggaatgctctcattttattaaatttatggatgccctcatccatggaatgccctcatcccaccaatcaaaggatgttctcattcatagaatgctctcattctgccaaatataaattcatggaatgctctcattctattaatttatggatgctctcatccatgaaatgtcctcattccaccaatcaaaggatgctcttatccatgaaatactctcattccgccaaatataaatttatataatgctctcattctattaaatttatggatgctcttatccatgaatattttcattttgacaaaatataaaaatactcaaagtctctatttattttcttttaaaataaatttgactaaattgttttgattgtccaaagttgataaagaatttttggagatggtctaaaatgagatataatcaatttgaaattttaaaacgaatatctattctatataaaatgtgcctatataacagaattcttggt

SEQ ID NO: 390994 - DNA, 666 bp, Cannabis indica
accccattataagctgacatgcaactcccacttcattcgaggacgtcattctctcatctgacggtcagttcgctctctccagatcgttgggatggtcagcttcgtttatgtgatctcgctgtcggagtctcagctagggttttagggagacaaccatcgaacagattctagagtttcgtttggacttagaagcactccctcagttttaaagattgggttttgcgatttgagccatttggagtattattccaaagcttaaataaggtgtggtggtggtgagaagaagaagaagaaggataagaagaacaaggttaaggaaaaaaaggattatcttgctgtattgatcaatttcagcattttcgaattatagtggattttgattgatttttcaggaaaatgcatagaaaagaaaaggaataagaaagaagaagaataaaagaaaaaggaaataaaaaagtcaaagaaaaaaaattaaatattttttaaaattattattttagattttaatattttttattttttaattatgattttttaaaattattattttagatttcaatattttttttattttttaaaatcaatatttaagattttaatacattttttttttattttttaattattattttttaaaataattatttcaaatttcaatattttttt

SEQ ID NO: 390995 - DNA, 1140 bp, Cannabis indica
aaaaaaaaaaaaaaaaaaaaccctaaaaactttctcttctaatttatctcgcctccctctctctctcctgtagctgccgcagatctcccagccagctccggtgacctcgcccacctatccttcttttctctttcttcctctctggcggcctaaacatatggagcgcctcccctctctctctgcccagatgcgcgacctgcgcatcgcctctctctctgtgcccagatgcgcaacctgaccgatttttatggtactgattcagttggattgcgcataaagaagcagaaatggctagtttcagactgcccagttggattgattttaaatgtccaatatcgatcccctttacaactcgagtatgcttctccaaaggtacaactgatgcaatttgatttaaatgggtttatttgctaatttatgcatagaatctgagtcaccattgatttattatttattacatctaagtttattttatgaatgagcaagtttactcaagtcgatcaacaagtaaaatgtgaaaaggagcagaaatcgcagctgtggtttaatgaatttctactttggtttcacactcctttttctttaagatttaaattgtcctcaacgaaaagtgacagagagggtattcaccttgagatttagtatataaaagaaacatatcttcccatttatattaaaatctaaaatgttgagagttataattttaattgagtagtggtgtgattcacacttgcttttgaatttgtatgtttagatcaattgcttagaattggactctgttttcctaggccttattatgctggttgaaggtatatgtggtccaacatatcaacgtctgacatgttgattagaaattagaactgaaattactcagttgcattacccttttagtcaaaaagaaagaaaaagatgcaatttgatttaaatgggtttatctgctaaagaaaaagatgcaatttgatttaaataggtttattgctaatttctttctgctttgttttgttggatttgattttgtttgaaacaagatgcatggcctttttagttctaatgttctgtccagaaatagaatattgtttgtgttttttttttttggtttacaatttatgtttatacatactgtgattaactcatattttt

SEQ ID NO: 390996 - DNA, 680 bp, Cannabis indica
tatatatatatgtggaattggtgaaaaataaattaaattattacatgtacttagttctaaaaagtaatatatacaatccaaaattgatagtatgcaaacataagtaaatatatgtgtatatctgcaatgaaattttatttcaggaaatagtctaataaaattttgttttatgtttgtcgtaaattggaatcattcaacaaatcaacaaggcttactaatttcattttaagcaaatgcatttttaaggaaaaacaatgtcttgctatttggaaactttggcatattttgttttgtgttttagaacttatcaacacctttactctagttctagttgtaatttttttctatattaattattgagaatggttaaaaagtaatattggtgtatagtacaatagcactgttctcggtctcataccactattagtgtaattaagtattaagtctcatataacttcagaaaataatttttaagaaatattattaactaatcatgatgtatcatctatacaggtactgagtaccactgatgcccaataattatgttcattaattattcacttaatgagttcgctgttaatggactagcaaaagtcatcagaatccctagccagccaaaattgttttatgggaggaaccccttttttgtggttcccatctttttttttccttttttgttt

SEQ ID NO: 390997 - DNA, 600 bp, Cannabis indica
aataaataaataaatataattattgttattatgtgttatatagggtgtaacaccatattaatttgcgaattaacagtttcttatattatatataggggagttaagttatatattattttttatttttttattttaaaatttatggtttgagatttgagttggtctactaatttttatgtggattgctctattaattgttatttgggttacaatgtgaattttcgtaaaaatataaataaaattattttaaaatgtaaaactaaaaaactttctattattaattaaatcaaattatgtaggattccatattgatttacaccaataataatgtcataaattatctcttaaaatttttcataataaaatgaataaataggattttttgcttctaaattatgattctcgttaaattttatctcttgaacttttctatgctacaaaaatttctaccaaattatacaaatcgttgcaaatatctcctctaattatattctactcattttcataataatttagttatgtagttatataggtaaatttatgaatagtgacttttgagctacttaggcctcgtttgggggagctttttaaaaaactaaa

SEQ ID NO: 390998 - DNA, 693 bp, Cannabis indica
aggatggaccgaaacccttttacttttggaaatcccactatgaagtccatgcttattgactaccatggcttctctgggattggcagggcttgtagtaatcctgcttcttgccttctttctgtcttgtcttgttggcacacaagacatgtcttcacgtatacctctttgttctgctccatttttggccaaaaataagacttcgacatcacagccaacatcctagccacacccgagtgaccaacccactgagtatcgtgggtttctttaagcaattcctttattaaaccaccactatttggtacaaataatctaccacacttggcatagaaaagatcatcctcttcccactactgcattggttcaccatttcttgcttcctcttaaagctttttgtattcgggatcgagcagtgactgctccctcacccggtcaatgaaagttgtactcacctgagacaacgcacaaacaaaagcatgtacttcttttgtgcttagtgcatcaacaacttgattttgcttacccgttctatgcacccacacaaaatcaaactctaccaaatactcttaccaatgagcttgctttggggttaacttctactgagatttaaagtaagtgttggccacattgtccgtcaccaccgtaaactttgtccccaaaaaataaatgtctccacacatccaaacaatgcactac

SEQ ID NO: 390999 - DNA, 1368 bp, Cannabis indica
ttttttttagtaattacatcaaattcttacatgagtattggagaattaacactttcaattacctctaattatatgatcattatgtaattatataattagacaaacacgtcaaattaaataattatcttctatcaataatttttcaagacgcatcttatgaagtgtttttggtagattaataaatttatttttactgattaaatatagttatttttgaattatataaatactttgtaattattcaaatatttatttatattttcataaaaccttctaatttttcttcttttttttttctaaagacaaataattttaattatttttataataataataataaataatagaattagatttaagagtacaaaggtacatagataaaataggtgataaattctcaaaaaataattaatttatttattatggggaacacaattttgggatattatgtactaactcacatggccctcatcaccgactgtctagaataataatataatgggaccccaatatcatatcatataatataattattattattattaatatttataataaatatctttttatttttattatatataaatattatatggccaagtattaagttgttggaatttttttcgttggagaataatttttatttttatttttatgtatatgtgatgagtattgttatggtgtattagtggtgtttaattaatataatataaggtgcaataatattgttgttgtattgaaatttaaatattttttatttaataaataatattaaaaattaccaacttagataaaaaaaaaatattacaataattgatagaatgattgattgaaaattttgtgtcacaaatatattaaaatctaaatttaattaaaaataataatttaccataaattcatgtaaaaaaaaatcatatattttatattttactaagtattaggtaggtgaggctttcttgtcactttgacaaattgtgtaaggaaaataaataaaacaaaaaaaaattgttttgtcttgtataaaatattaataattaaattacgcgaccccaaaaaaattatagtaaaatgtaatataatatatattttttttttaaacaaaaaaaaattatagtaaaatataatatatgaataatgatttgtatgtatatcaaacctttggtaataattttaatattaaatatgaaagcaacatgtccataggaacacccacgtgatttaaaactaactttttgtcacctaacccaaaaatattaaatctaaaaaaatattaataatattattagggaaatttgattttctatgcttagaaaatcaaaaaaatttgatttctaaaccaataattaaaaccctaaaaaaactatacct

SEQ ID NO: 391000 - DNA, 1498 bp, Cannabis indica
catcttcaggcacttcactttcaaacccataatcattagcagagggttgttttttcagaacaaattcttcactagaatcagactcaccctctaattcttgatcaacatcctcagtctcttcttttggtttagaatacgatgatgaaacagaaggggatgctcattgagacttttggcctttgaagatgaaaacatcactttcttccctttggagacttctttaggctgaaccacttctagtttctttggtgtggtgtggacaccttgtacctggtacgagagctcaccataggtaaaggaacaatagctctctcgacattgggaacaccattcgaagaagatgacttcgacaatgtgtgatcagatgaatgggattcatcatgatcaccaagcctagtggtcgggattcattctttataataaccatgttcaagggaatattatccccactagcgatattcatcagagcgattcgctttcttcatacctctttcttctctgtttgagggtttgtcctccttcattacccaagtgacccatcggtgggttcccatgaagcatgcagttggtctcaagatcgctcgtactcctcccactatctctcaccttttctttgctgacgaagtcttctctttagtgctttttcacctattgtggcttccgctattacagaattactcaatgaatatagcctggcatctggacaacaagtcaattgtgcaaaatcctccctttacttctctcccaacatggatacgaatataaaaaacgtccatcaccaatattcttaatgttcttatccacgaagcaatagagaaatagctgggtctctctcaatcctttgggtgttccaaaaaagaggccttcaatcacctttacaatcatgtttagactcatttgaacaagtagaattctactttcttttcaaaaggcagtaaagaagtcttactgaaattgatggttcaagattctgtcctatgccatggcttgtttcaaacttcctttccgctttcattctacattagagtctcttatgactaacttctggtggggtggaactgatcaaaataggaaaactcatagggtggcttggaaaactctttgtcgctccaagttccacagtggccttggatttcggtccatgaaagcttttaaccaagaaatgttggcaaagcaagcctagcgcctcattcaatctcctcaatctttggtggcttctctctttaaggcttgttactttctccagtctacgttcctggctactggtaagggtagtcggcctttgttggtctggacaagtatttcatggggtaaggagcttctcttgttaggttttagtaataaattggtgaaggaacatctatctcaatctatgatgatacatgggtttcggggtgcagaaagcttgcctattgaagtaaatgagagaaaatgttttttatttttttatggtcaattttagtatatacaaaaggtatatataatacaatgtgaacac

SEQ ID NO: 391001 - DNA, 588 bp, Cannabis indica
taatattaaaaaaaatcatttaatttttcttgaaagttacaagatatgaacttgttaatatataaaaagataaaaaagaattaagtataataaacaaggcatactattataaaataacatgtaatgtgtctaaagaacaagccatattatttagttatttatcaaaatttaagtggtaactaaagaagaaagaaaatgtaattttttcttttgaaaaatgataaaaatgtgtatttatttattttaatctattaggaaattttgatccataaattatgccaaaattatgtttttttggacctagtgtaatatataggcattaggtacaatatcatattatattgattcataaattatgttctagcttattctagctaatacgataaaattaaaaattactatttgtttttaaattattataatattattcttcatagatttttactagagaagttgaaaactttgtggaaaatatggaacttgttgaatgttaatacttaatagactaatataggaaattagtagcgaagttcgaaaaaaaattccaattatttattttcataaactatagttattgtgatttttttt

SEQ ID NO: 391002 - DNA, 1576 bp, Cannabis indica
cgtcaggaaactttcctaaaaggcaccatctgtcatcaaacaccagttcttctccttcagcctctccctcgattagtatcccttcttcctcttcatcaatatgtatttgttcatattgatttgctagcatatttgcttgttggctacatgaagccataccacggacgcactcaaacaccaacactttaccaataaacctatggcaaaataaactcaacgtacttgtaacaacatgtcaatagacaagacttgatgagaatacatttattaatcatgtaaatgcagaaaaattaatttcctgattcaacatacattgattatagagtgaaatgtatttgaccaaaaaatatgaaaaagatcatacctaaaactgatgaactggtaaagcatcgtagaactcacgagaaaatatgattgttggcatttattttactctcttttctaaatttaaatttatttctacacttaattattagttatgttgttttatgtaattggattctaaatttcagcttttgacttaattttcaagtaactagtttttatttggttaatttttgtcattggtttctttatgtaaaattttgaaactttatgaaaaaaaagctttatattgtttcaagtaattgattatgttcttaatttgtttattttaatgaaactaattttttttattttaaatttttaattagctgtttaatgtaactaatttttttaatttatttttatgtaactgattttcaattaattttaaaagattgttataatttgtatgagttccacaagtttgtttcacagagttcacatgtttgaaacaagtttcacagattttgagggtttctttaatgggactgctccatattatgatgttattgtatttttttgtttctatgatttaattttatatagatttgttaaaatgtcttattattttattgatttttataatattttttttaagtaactagtttttataattgattttttaattatttttaattattgagttttaagtttcaattttttcttttgattattcaaaaaactgattttgctttactaactggttttcctaggttagaattttaactaggtgagtttttgacttcatattatgatctattttttgttttatgtgactgtggagtgtttgtcattaaatttgttgacttgctcatcctaaaaaattgatgagatttcatctgagatagacgatatggtagcaagatattgagatgatgttgttgtgagtttgtttattcatgttaccagaaaacaaggaggtggttacataataaataatgaagtgttgaaaaggaaggaaaagacaaataataagcaaaaggatacggcaaagacaaaggacaaaggcaaatgagaagagataaatgattagatgtttataattagtttctttttgctagatatatgttactgtgttgttagaaaaccaatttcttttagttgtattttgaatttaatagataatgttatatagttaaatgaatattttttgtaaagagaggatgttgaatgaattaacttttattataagtcattacatttatgttgttac

SEQ ID NO: 391003 - DNA, 3210 bp, Cannabis indica
ttcttctcctccagtttcaaagcctttgaacgtccggatctgctcactgactgggtcaaggttccacccatgcaccgcaccgctcccaccgaacttttcctaaaccatgcaaaagtattcgctagttataataaggaagagttgaatgtaggagacttggtcacgaccgtcaactaccggagggcaagctgatctcggagaaccaatcagtggatgacttcaatctgtctaaggttttttgcccccatatccagaatcctgagactgagaaggcgctccgaagggacatcatttcttatgcagaagacaaatacaataagtacaaattcaagaaggaacatgagttggcctatactaatgcgcaagccgcctcgaggaggatccttttggaggaagctcagaaggagtaaaaccccatttgccctaagttacctttcctgattcccaactctggggctcctggtgccagtacttttggaacttgtaattccccattgattattcatcacgtcccttctgttcaagattacgctagcctaaggccagtggaagttgataaacggttgtataggtttcgaatgccccattcatggtgtggtgacaacgccaaaagtttttatttttcaaaccttagtcattttttgggttggtctcggatgggttctggtccccccgcaccgatcctcttagaccattctttatacttgacttcaagttggttccttctctcgaatatctttctaggggatgacgacacctgccttaaatatatacctttgctaaggcagaattagaccatcagggtaggactagtttcactgtgttattcttgcatggatgatttttgataatattctgactcctttgtttatttttgaacatcgaaacctatggatgaaatcctagatgcccttgcacaaacacagtcctgaaactaacttacccgagccacgcaacatggttgtttctccacgaggaccttctgctaaaaccctcgaagatcaagttgtcttgattgataaggaagaagaagaagaagcaggagaaataatacctccccttgaccacaagcgcaaaggtaagatggttgagcgggagccttctaagaagccaaggtgggcggacactcctggtcccagtgttgactcgggaattcctttagaagtggacgagtatcatgcacctccaggtattattttgactcctattcatcccaatgaggaaagggttcagcttcgcatcgccaaacacaactataccttgggggagcttaccaagggggatgctgaggtggaggctctaaagaagtggctcaaggatgcttaagatggaccttttcaaggtgagtatgtcagggatgtctaggatttgaatttaaatcctttgacagactggtttaagcacttcgtggggcctaacttggctccttttgcctcggaaatgatgagccattttgccgccgatctgacccaacttccaaccaagagatatacagcttgcgcttttgccaatcctgtgtaccgaattcaggacatgagtgtagcccttactgcagtaacttctcaccttttaaatttcctatatatctttttataccagactctaactttttcctgttggctgccagattgctgcagaggccggtcgcatttctaagacattgatcgaccatgggtttaccatgtctgagttcggtggaatggaggaggtgatgaagagtctccaggagtcaaaagaacagaagaaggcgatctgggacgaagcccagaggagggaagcccttatggagcaaaaccatcaggaggtgttgacggccagggacgagattatacctgcgtcctagagggatccttgagattccagggaagaggtccaagaactcaccactatattaaggtctgtaggggagcttcactaggctgatttggaaacaacatctaatttaactgttgaagtaaaagagctccatgagttcagggaataggcccgcaaggaggtggctaaggctaaaagggatgctctccaggccgccaacacttgtcaacactacacgaagcattttgacgacagagtgttcatgtgctggaaggccaataatttcgaaccccaccttcctttctatcccaagcctgaggaagttctagcccaatttttggagaaaaatgaaaaaaaaaaacttgaggttgtattggacgaatgcaagggtcctcgtcttcctacccgggttgattaagtgtgacttttatttttcttttatttcatccttccccctacctataagacaattatgttttcttcaaggggagactttttatggcccagccccaggccttctactatttacattttaaacaacttgtatgacttttaagtttattttgccttttactttcttatattcgtcttgttttttgcccgtatgttatgccttaatacccccttaagtgacgtgaaaagagatttttgggtcacttagcttaaaatttgcatgcgatatcgcatatatttctctgataccggttacattacagaatataaactttttcccttaactattgatagtatttgcgaagatggtcagcattccaagccctaggtactgtgcatccatccattctttttagcttataggtcttggagcctatttcatcctcaatttcatatggtccttcccaatttggcccaagtacccccactcctggctcttgggtggttgggaagacccttcatgggactaggtctccaatggtgaattttctatctttaaccttgcattgaagtattttgccacctttctttggtaagctgccatctgtatctgagactcatcccggagcttgtctatttgatctagcacttcttgtaacaaggtttggtttgttgtcggatcgtacgtggctcttctgtgggatgggagtaaggtttctaccggtaccatagcctcatattcgtacaccattgagaatggggagtgtccagttgtggttcttggagtggtccggtaggcccataatacttgtggcagttcttcaagccagttgctcttgcaggccagcagctttttctttagggtgacttttagtattttgttgacggcctctgcctgtccatttatttgtggccttgcaactgcggagaagctttagacaactccgtgttggttgaattcatcacagtcaaactgctttccattgtctgagactatcttgt

SEQ ID NO: 391004 - DNA, 569 bp, Cannabis indica
taagatatttaaactctactaacatgcttattattaacaatatacgctagaacctaccttactaccgatgaatatttaagatattcaaactctaataagcattgataattaattaataataaaagttacatcgaatattaaaattaagtatttaggccaaaaaaggaacatgttcgctacttccctaacatatctgcacccctcaattgatattagaatttcaacatcttcttgcagcattttagaaattagaatgtgggcatgtgaatcatcataaggcactgcgtgaactatgattggaccctcatggttgtacagataagttgcaaccactttgttgtcaatattttcttagcagagaaatattgtttgattagctgccctctgttcagtgaaatagtacatgacaggcggctcatataagggaacaaacttctcatcataattttgtggaacctcatcctcctgagcatgttcttatggaacatacgcctgatgagccacctatcctcaacatttttcttttgtttaagggatttgatttctgcttttaatttctcaatctccct

SEQ ID NO: 391005 - DNA, 974 bp, Cannabis indica
gtttacaagaaagaaaaataaaaaaaaaaaaaaaggaaaaaaaaaagaaagaagaagaaaaaaaaagtataaaaatgttattgatacctaactaactcatttttgacaattaaataaaaaataaggtgtgaagtataaaattctctttttattatatgttggtaatttatagtaatgtaatagtagtctccaccaatttttatgaaattttaaatattttataaattttgaaaaaaaaataaaataattaattacatacactcatatatatataaaataaaaatactttgtataaatgaatatttaaactctattttaataccataaattaaataaatatttggaaaatgatagatacattatttaccatcatatatattattagagttagtcttatattactaatacgtggaaataaattgtgataaataagataaatgagttatttctctcattgtcgattggttttgagatgaaatcatatttattttatcctcaaattttaacatggtatcagagctacttgagatccgttgtgagcccaaataccatcggtctaaaaaaattgtttgtaatctgttcttaaccaaaatgttaccgatctaaaaaaaaatacttctacttctccaaattttaataagtacgtgtacatattaattaaaaagatccatgcgtatatacattttgatcttcatataatcatatatatatattctatataaagtgtgcctatataacacaatttttggtttataagaaatttatgggtgattttttatttatattaaaaataaaataatttattattaaaaaataaaatggtttatgaaaaattcatgggtcactttctatttatatataataaaataaatctcaaatccaaaaaaaaaaaaaaaaataagggttctagattttctttaattactgtatttctaaccctatttaattattggccaattagtaatttttcctcc

SEQ ID NO: 391006 - DNA, 1245 bp, Cannabis indica
gttgctatatagattcgagttacaatttaagttgttccgttgattgctatgtggattttccataaaaatgtaaaaaaaaaaattactttaaaatataacaatgaaaaaaattccaatttattacatgattagtttggagggttttgatgttagttgaataatatagttttaacaatttaaataagttgtagttgattttcttagggcatgcttggtatacctattgcattaaataagtaaaataccatgtttggattgaattttgaattatattaattattacaattataaattttaatacaatatgaaacaaattattaaaaagataataaataatctatattagcttgtattataatatttacaaatacatgttatgctgccgtaaagttagagttggggttgagttcagagtcgaggtcagggtctagatcttaggttatgggttaaaaggtgaggtttgtgtttatgatcgagattggattaggattttgaaatttagttttttaataataaaatattcatatttttgttttatttctaaaactaattagattttaagatttttaaacaaattttccctctattaagatttttgacctcgcttttagccaacgacaatgagtcaattaaaataattagaaataattaataataatatataggcaaatagaacaaaaattattatagaggctcggccccgtaatggtggtaatagcatactcccatttttcttgtattgacttgtgataaaagaaccatttttttttaactttctcgaaagctcttacaatagttttagcagcttacgtgctctataaaatgaatgatttcggatccctgaatagtgaaatcattccacaatttatatggatgattacatcagtatagtttcctaaaacaaataagaaataaattaagaaacttaattactttcttaaatcaaggaaaataaaaaggaaaattaggtaggttttctcttttctcctatcagagtgaatctattccaaaaaattagtgacttgatcgatattttcattacttgaacatttagaggatatccttgaagatattctagctgcatttactctagtcggtacatgcaagctgactacaaaatggatgttggttggacggtgtaacgtaccttgtctagatatcctagcttcttttcaaaccaactatttatgtaataaatcaccctggacggtacaccatgaatcgaactgttgggttttatgccct

SEQ ID NO: 391007 - DNA, 889 bp, Cannabis indica
gagtttgtgattgggaaattagccaaaattacattacagtctgattttatagagataatcaaggcaacccaacaaagtgatccaaggttacaagagtataaagagaagtttgaggctggattagcaaaagacttctctattatcccaaattttgtccacttgacgtgacatgtccacataagccaaagatagagtacaggtggagtacaaccccaccaatagtagaacacggcctccatgcaagatatagcaaaaccataaagtacaaccgaatggagtgaagtgagccctcaaggagttgtaccaacatccgttgctgaccaagagaagcctataggccagccagagtgatcctataggctgaccaggatctatgcacaagctggccagccaagaagtgacttctggaacaagggagcttccattcaacaaatggaacctagcctctacaaggaaacggtgtgcaaagctgttttcaacttgcaaaggctagcctcctcttggtaggcctatagtgacctgccaggtcctgcagaccttgacctgccagatcctgtaggccttgggtagcaaggattaacctggcaggacactatgtgtagcccaaaacgtggttagtaagtcgtgggctgggaatggggcccaaaaagccaacgggaatggctgaataatatttagattcaagagcactttaagcttttgtaattatctaacaacctatgcaaatatttgggatttaaattctaatctagggtttaggcctcaaccctagccaagaaacttaagtcacttagcatccaaattgctctaagtatgaaagccttactctctcttctctctctctcttgctcacgcccaatagggctctctctcctctcttcatctctct

SEQ ID NO: 391008 - DNA, 1119 bp, Cannabis indica
ttagagacaacagattttaattttctcatgttagtacacttaaaaacgacaccgtattaatcaaaacacatagatggtgctgtaaatatgtgttgcggtgtcgcaaatataaatcgtgtcgtactgtgttataaaacaacacaggtcctattgtgctatgccataaaatatacaaactgtattgtatcatgctataaaaaaatacgagctgtgtgcgtcgtgctcaaattactttacttggactaatctattttcttatacgagctcaaagtcatactctactttttaaattttatttttacaattaaatagataattactaaaattatagtttcaataatttaattatttgtatataatataagtaaatttttaaaattattaaaatgtgaatatttactaataaatatttaaactattattattattattaaatataaggtttttagcaaattatgcttttagaatagatttttcgtgcttgcgtgttatttctttcgaatttatttacggtcgaccttaaaattaagtggacttaaaaaaataaaaattattgaaccttcaaattaaaatagggcattttacataaatgtatacattattttaattaattacaaaaaatatgcaaaaaaaattaattttaaagatgtatacatttgaaaacatttttacataaaatcatacaaactcttaatttaattatattagatgtattaatgagtcaaacttaccataattagatttgtgtaactatttttatggctaattttttttataaataatatacaatattcacatccatgattcacataataattgtatggcatatttttcaaaatcaatacatatataatcatgaattttttatttaaaatatgtccaatatgccctatatattatcagaattgaaatgctattatgttgtttagataaaaatatttagtatgtttatttttgtaaaagattattctaaatatttaattaattttatgaaattgtttattttttttaataaacatgtgatttaaataataaagatatatattggtaaaaaaaatatagattaattataaatataaaatatatttataactaagtaaaaatattacgttttttttt

SEQ ID NO: 391009 - DNA, 1597 bp, Cannabis indica
tggatcagtcttgtttatttgacgcccattatatggtcatggtctgttaggtgacaacctccgaaaaccaggttacaccattcgattgggatctcatcgacaataaagcggttgtaccatatacaaacatgaggtaataatacaaggtttttaagaatacatttactgagtaaattaatatattgacaaatatgatcataatttactaaattattatttatttactaatacattgacgattgtagaatgtacgcaatagagcatatcgagcataagattttagactgtgattcaatcgagtaaattatgacaatatgcagctctttagacgcgaatcgacgatatatttattctaccaaaacttatgatgagttatgtattttttgacgagacaaccttgccttttatttggacaatctttccttttaatttatctatttactaaaaagttgattctctgaatacttgctaactatctttttttgttgggggggggattgaggtttgttgggttttcatgtaagtttgatgtaggcctgatgcctatctgatatagactcgatggttatttatgtggcaactagttttttaattttccttttaagcccgatataggtctgatacacatccaatggtactatgtggattctagttctcagggtttcgttttgagtctgatgcctacccgatgcttcctcgatggttgtatttctaagtatgttaaaaaatttgggcaaaatcgagttgtatactggtccaatgttagtccgataaccgataagtctgatggcactatatgggtatgtaaaacagttgtgaatttttaagttttcaattttagcctaatatagttcgatagtactatatgggtatgttatcacttgtgaatttttaagttttcattttaagtctgatacatgtccaatgttagttcgatactggtttgatggtgctctttggattttaaacaatcattgaatactcatcgaaccaacattggacctactacttttcatgaaaaaaattgtgcagtaagtaaagtaaaatgctcatgccacaaatgttagtataatgtttaacaaagttcaacaatattaaccagaaaaatttccctggtaacgtggacataaatatttgacacatggcatgaaggatgacatcacaaagttgagtagacctgagtcatagtagttgacttgggaggggaccctagccctgcacccttggttgacttcgggagcttcagtatggaagtttagcctttaataacttgaatccaactcactatcttttagtattatgtgctatgaagacatggagaaacctatccaagccggctgaaattacatgaacttgcaattcccaactaggatttcagttttgggatcgtcttagtgtaaatgggtcaaaacttgtattgggacatcaaatagacataccaccgacaaatttgtagaattagaatcagaatcaaagcaagttcatttttgagcactcagagccccgagcaccctaacgcccaggttgacaatctattaatctaggtgccttccaagttaccagatcgacggtctgacttttccaacttctttgtatt

SEQ ID NO: 391010 - DNA, 1325 bp, Cannabis indica
attttgtgtgcaaagggactttcaaacttgatcaaccagtatgtgaggataatcttcttcaaggcattcgggtggctagaggtgctccgattgtttcacacatgttcttcgccgatgatagttattgttttgccaagctacacaagaggctgcgacgcatgttcataatctattggctgcctttgaagaggtttcgggtcagaaagtgaatgctagtaagtcttcaatttttttcagtctgaacactaatgcgatatccgtgagcaaatttgtggtactcgtggtatggtagaggcaaccgaggatagcaagtatttggggctgcccaatatcattagtcgtaataaatccgctattttgggattcttaaaggaaaaagttaagaatcgcattaatagttgggatgaaaagttgttgtctcgggcgggtaaggagactctcttaaagactgttgttcaatctcttcctacatatgcaatgagtgttttcctcttacctttaaagacttgtgatgagctccaaaagatgatggcgaagtattggtggaagacttcgactagtaggggccggggcagaatttggatgagctgggaacgcatggctagagacaaaaagtttggtggtatgggttttcgtctcttacatgagtttaatattgcaatgctggccaaacagggatggcgtttgttgatacaaccgaattctcttgtcggccgtatttataaggcaagatacttccctagtggcgattttttatcggctgaattaggggccaattcgagctttatttggcgtagtgtatggaattctcaatctttggttcgtcttggggctcgtcgtattgtgggtactggtttgcaagttgatattctttctcatccttggcttcctcacaatgagaatccttatgtgactacaactcaccctggtcttattatcaaccagtctcctctctttttatggttgatagtaggaattgtgatattgatcttattaaggatatgttcaatcagcgggacattgatttaatcttaagtttgccaatcagttttactgctgttgaggatttctggtcttggcgtggggaaaattctggtgctttttcagacaaaagtgcatacaaaatccttgaagaccaacgagaaaggctgtcaggtgctaaaacctctggtttttgggtaaaattatggcaactaaagataccccagaaagttaaaaacttcttgtggcgagtttgttctgcgtgtctcccaactcgagttcaacttcagataaagcgtgtccctctttctgtggtatgtccgttctgttaggttttatgccct

SEQ ID NO: 391011 - DNA, 1756 bp, Cannabis indica
attaattaaaataaatataattaatatatttttagatttaaatatgataattcattaaagatataacaaatacaaaataagagtttattacacttataatatgaaattttttcatatttcagaaaaatacatatatacaattctgaataaataaataaataaataaagtgacttctttttaaacaataaaatacatatatacgaattgcatcttcacacagccatcctccgtttagcgaagatgagttgcggagcaatgcgcctccgtttatttttatgctcagagccaatttcagggagtggaggagaggaaacacgacttcagggcgcggaggagaggagacacgagtttaggggcggaggagtgggagctcaacgagaccacataaactgtcgtcgccataccagatcgacgagaaggagagggagcgaagagacaagtcgtctgagaacatgagagagagaagtcgaccacgacgctaacggatccaaccctcactgcacgaagagaagtcgtcgtctcctccaccgccctttgaagtcttcgtctcctccatcgcccactccaagcaagagagatctcctccaccgcccactgcaaccaagagatagagagaagctttgagaatagtttgtaatgagagaatgtgataatagggttaggtatgtatgtcgttgagataaaaatatggtaggagttttttaatttttgaatgaaaaaaatattgtttaataaaaataagaaaatatatatggttaaaaatgtgttgtataaaaataaaataataaatcaatattttatagagttttcattctaaatttttttaaaaaatatatcaattctaatataatattatatttttttcacctctcaattaattattttattattaatttatactaaaataaaataaattttgatataaaataattctctaattataaatatataaattttaaatttctcaattttataaattcttaaattataactttaattattaagatttttttctttatttttaattataatttttttagcattttactttattaaatacaaatttattttattaagaaaataaaacttttttaaaaaaaaagaaaaactttgaaaatttatatttagtattatcttttattaaatagaaattttttttattaagcaattttttttggtatactaaaaatatcattatctaaccttttataactattgggaatactagtattctccacagttataaaatattgggtatacttggtattccaaactgttgggtagacttagtattcccaacaattataaactgttggcacttactgtttttgtttacaaaattccatttagtattgccaacggttctccaccgttgatattggctttttccaacgatttctttatttcggttctaaattgttggaaaaatctctccttaccttttcgttttcataattgacccccttataaacttttggaaaaagtcaattttttagtagtgtaaggtcttctagatgtgatggtataggtctcaaagatgagaattatgtgtaaaattctcgagaggtcttcgcccaagagttgaattttcctagggtgattttgaagtaccattgttgagttgtttttgacaaagtggctgggaatatgcgacattgcacattactagtaaccttttggagatcgagtttgatctcgaagtatttgatgtgagctaatgggtcttctcgtctggtatacatcttccataccggc

SEQ ID NO: 391012 - DNA, 1447 bp, Cannabis indica
tagaaattagacaaaagtccttaaatttaacaatctcgatagttcgaggagaattttaaacggtcaaaaaaattcagggggcatgatttagtacatgtcaaagttcaggtagaaaaattactaattagcctaaactaaaatactattttctctttttattttagatactctttttataaaaaaaaaaatagtaatagtagttagaaatatagcttcttcttttttttttttgtaacaaaatgcgaggattatattaataaaactaaaaagacgagttaaatcttccattcgttacacaaaaggttctttgggatggaggaaggatcaaccattttagtaacataaatagtaaaagcttacttagtaatattatgggtcacaaaattataatttcttaaaataaacgaaaaattacaccagattaaaatatggctaataaatcattttttttctttgcacattattcttatatgttatgatatttagtactatccccttttttatacgaacaactaagaataatatcacaagaaatttatgatggtgcatttaattaaagttattctttcatattaaaaaaaatacaactaataaaaaaaaatatgtacaattatatcctattcctattcctataattggagttgcagcacatgtgttataaatgcaattgacaataatgtagctaggaaggataggggatggcctttcccaccccatctatccatttaatattttttattcttttatataaataaaaatgaattttgaaaaatatattatttttcttttttacaaaaatacactactacccttactccaatctttgattctgactatttttcttttttattttggaaagtattttgacttttttttttttctgaaatggaatctgactcagattttcaaaagtgatagatcatagattatcacttttaagaagtgtttccaaaaattcttctaaaaattgtacttcttccgttcaaaattccatgagcatgtttctatagttttaacaattcgggaaccacatactattatagaggccttgtgtctaaatcggtcttaattgagttatcattaagaagtgatatcgttacagcaaactaattatccaaagagctaatatctatagtaaaattcaaactctccgtaaagacttttttatcactacaccacacaaaatgtgatttgtaattataattattgaaaactcaaaaataatactcaataatactaagaggtataacttttttcgtgaggatacttcaatacatataaaaaaaaataaaataattacttgtgtggacttaatggtcaaatcatccataactgaatagttaaaataactatatattttgatcgaattatttaatcttgtttgtttgtcgccgatatgttttgtttcaagattctttatatctaccataatcctatttttattcta

SEQ ID NO: 391013 - DNA, 1275 bp, Cannabis indica
ctagtgtaaaaatctcaaaaaaatatagtaatgggagaggtcagatgtgctggaggaagaaaataaaggagaaaaaaaattgattttaaaatgtatttttttttatttttttaatttaaaattattaggtggaccaattatgttacaacacgtggcaattacaaataagttaacaaattagttaactttaagactaacagacttacaacaataccacaataccattttaaggattattgccactattttcaaaaaatagagactaatctacatcaacacaaattttttgggaatttttttccgcaaattttcctaattattattatttcttatcttgttagcttatttcattgaagatatttttcaactagaaaaagaagatggaaggaactatcaagagttttaactttgtgactgtccataagtatttgtctggatcttctaaaatatgtctctacaataagatttatcatctatcttttttttcttcaaattttagctaaaataattaaagagttaaaatagatagtcatttttattatgtttacttcaatcatactccttactttagttaacatttgattatattaataatattttataatttaaatttattaaatataaattaatttgttaaaataataaaaaagataattgtgttttttattaaaataatattaaaaaaattagcgaaaaaatagggacctctctatatttagagagctaattatcaattctctcttatagagatatttatttatttattattttttttttatggttggatctcatttttttaagactcactccttattttaactaaaacttaagtttagagagcatgattggagatgctctaagcccctctagaatactagcactagataggtgcataaacacccctaaacataactattatggagttttgattttattattagagtattgttatgagaaacttatgatgtctagcacgataaaatatcgctttataattggttagcaattttctataacatttattgaaataaaataagtacgattcaatattgagttacatcaatagtgatattatacgccacaaaagtataaagatattaattaccatgagtatcctttaacgtttctctcttattattattattatttttttctaattggtagatttaagattctttttttattaatttttgtagtaaaaaaaagtctcaaaattgtgttatttagaactttttttttttaaaaaaagttactaacaaattatttaaaaatagg

SEQ ID NO: 391014 - DNA, 874 bp, Cannabis indica
tttgacaagccgtatagtttagagagcaagatcaaatagtaatcaaaaattcaagagaaaaatactaattattcctatatatataatttgaaataccaaccaactcacaacacaatacaatatttgattaattgagaaaaacaaaaaaagatagaattactagattatcaggatttgagccactatgaggtgccatagtggttagtagtaagtagttttttattttaattaataaattaaagcagcgtttggtaatattttattttttttttaattctttaaatatattattagaaaattcattttttgtgttacctaaatacttttaattttcaaatttttttaaataaacctttaatagaagcactaaatttcagtacactacaagaaaaatctattttgccagcgactaaacttgccagaaaaagttaacgtaactcgtcgatatagtttttctggtgacattttatgccggcaaaaaatgccgataatgattcgttggtatattaacttttgctaacgacttaagaagatgcgccaacaaaagtatttacaccggcaaattaagttgttggcataagttcatcatcgacaatatatggttggttgatgtgtccctgatgacgttttgcgggtgatttatagcgacgacaaaactttagctccaaattggcgcctaattttcattttgctgctaaagttttatcggcatattactgcgctggtaaaacatacaatatgaaaaattaatttagttttttcggtgacttcatgtgcaccaataaaagtatttttttaatatttatatttataatgtgaaattaaaattaaaaattaaaataataataaataaatataatctcaaatatattat

SEQ ID NO: 391015 - DNA, 1083 bp, Cannabis indica
gggttagtagtacctttatatttaaaagacttgaacaaacgaaatcccttaggcaatcgtgcttgtcgcacttccgcggtaaaaggagaaatcccatgcagcttgtatatgggctttctctgttgctcgattatcttcagagcttgcaaaagtataccctgatcgatacctcctgttagggcggcattgccctaagtcgtcgcatgtgcagttgctacaacagctatatttgtagggataacgactccaccagtcccaactggtgcgttaggcgggttggtgcggttgtttatgccctgatcgcccaaacggggatcacaaggttcttcattgtttcgaggcgtctaggaacgcaccctaaaaactgcattaaggtcatcacgagatcgcccctgtggacttggtatcttcctccttgcggtgtttccaccgaacctgacctggtgtacctgctaggagtgcgactttgtgaagacgaagagccggacattgcgtaattctcttcgtttcttggttggggtctactacgagggttacgtcgctctagatcttcttccggtggttcctcgcggttgaagttccttgcggattgatctctcgacaatggttgatttaaatcgagcccctcctgacatgtccttcattccctgtgattacggttagttcgtcgtctagaggtagttacctatggattatccgagcgggtagcgggtgctcgaggaggacgccgcatcttgtttcgtctgttaattttggcctgtaaagctcacatttgatcctgtatcgccgtatatttgtcggtggttaattgaacaatgccttcagacaccacggcaggggtgataggtgggaattgtcccactgtgggtgctagcgtggatgtttccccaatgtgagcagcagtcttaaggaacaaattgagcggcgttatgttcgtctgtcctactccgccgttgatggtatcgacgggaggtaccctacttcctggaagtgggacattcattgtccaaacattgattgtgttggaaatttattttaccaggatcttagatctactcataagtatgttgtttaacaccctaa

SEQ ID NO: 391016 - DNA, 907 bp, Cannabis indica
catttacaaaaaaaaaaaaaaaccacgattattgcagatatatttgaataattgtcgatggcattgaatccaaccttggtccagttaaatattagctttgacttttttatatattaaatttgtcttttgttgaattatattacttgaaaaaactaatgttataatattgtatccctattcctactaggcagagataacagtggaatataaacactctccaccccatgcctcttccttccaaattccaattcattaataatctctagaataattataatattacaagcaaataattacatataatattattttttatatatataataattgaacccaaattcacatcatctttgttgtttcaaattatgacaataaatatataaatatggaaattatattttatctcttgtatgaagtcactgaacatgcttcatgttggatccttgtcacccacccactaatatgctcatttacttataagtcaaacataatacatttatacattataattaactatttatttatataatacattaaacaaatgattaatacccacttgaattagcatctattttatgtatttaaccacgcccaacattttatagttatatatggctcataaaatcttaaattaactctagttgacctttatacgatttattattacaatttatatattagcatgattatgctacaaaaagtgatactgttgttgcactcactttatacatataagtatatatttttttttaaaaaaaaaaaataatagttgatacgcatttaaattttacaccgtatataattatttttaattataaaattaaaattacgggaattaccatatttattattttttttaatttttttatttcaaatttacggtttgtgtttctaaagttgttgcagc

SEQ ID NO: 391017 - DNA, 1362 bp, Cannabis indica
aactgttcctaatgtcaaagctatccacagactagcttcaccttcataatttcaacacactttagacttttcatacgaccctgaacagtttgaaatcgtctttgagcttccctttcttcttcttaacaatcctttaccatatccactcaatataggtagggatttcagttgtgacaaagacattaaaagtcatttcctatttttaactcgcaagcttaactttctcttttgtacatcaattagagctcttcccgttgctaagaatggtcttctcgaaattgtgggaatgttttcatcttcctccatgtcatgaattaagaaatcaacgaggagaatgaatttaccaaccttcaccaagacatctttaattatacttcgagggtgagcaattgagcagtctgcaatttttaaagacattcgtgtagggcaagcttctcccaggtttaaccttcataaaatagatagaggcattagattgatgcttgccccaatgtcatatagggtttttgtctcaagtgaacccctatcaatcaaggaacatcgaaactacctgaatccttaagcttgggcggtaagttcttctgtaagattgtattgcagtccttagtaagagccactatctcatattcctccaacttcctcttattggccaaaatatccttgatgaacttaaagtaagttgacattttcttaagtgccactacaaagggaatgtcaatgtgcagtttcttaaatatttcaaggaatttttaaaactacttgtcaaggttgttcttgcggagcctttgaagatacaagattttgatgtggtggtctatgctcactagtggtgccttgtattcctctgacagatcatcagcaaactacttacctctagccttcttcttgtgtgtctatacctattgatcctgatcctctttaactacttgctactcttctcgtgggccctcatatttcttcccactcctcaaggaaattgcttgacattgctcttttgggtttaccttcgtagtgctaggataattacctttggtgcagttggccatttgagcagccaatttccccatttgactctccaaggatatgataaaagccttagttccatccattaattttagtgggagatcaaactgaacattggaactctcaccaaacatttgttgttgttgagtgggctgttaagtttaggggggggttgttgtcactgttgttacatgtatctttgttgataaaacctttgttgctaacgattcccttcaggataatttcaattttgaggatagtttacaatggcttgagcttgctccatgagtaagtcatcgacatcaaaaaattggcattgctcataactacgggggccca

SEQ ID NO: 391018 - DNA, 2003 bp, Cannabis indica
attttttttttcaaactctctttaattatcatggttattcataacatataattcaaacatgaatgttagacaactatttaaatatatcataaactaaggaaaaaatatgtcaaaaattaaattaacttttaagatcatcattagtttttaaagtttttacaataatattcaattttaagtaaaagtttacaattttactgtaacacataattttttacaaaaataatgttattttataaaataacagtaaaactacaaaacagaacaactaaaacaacagtggaacaactaaaaaataaccgtagaacaacagtaaaacattaacacaatacacagtataaaacttacacattatttttgaaaaaaatacagtattttttaagaaaaaaatttgccccactataaaaagaataataaaataaaatatttcagtatatgatgtaaaaattccttaattttttaatatttgatgatttgttataggagccatcttccaatcgggagccatgtgagttgcaatacccttaattttgctggcagtccaaagctaacacaactcaaaacctcccatgcgccttacaaagatgcacaacataaagcaacgttcatgttgtgtttttttagtttagttctttaaatattttaaagtttgtgagtactctaacaataacctatgtacatatcaaagggagtgagagaatccattttcccaaacaaacactaatttgacttggagaacacatagagacataaaataaaattgtactacgattagagaagaaaataagtgtgggaaatgtaccaattcatttcaccagtccattaaccaatcctatttgatgagaagatcacgggtgtggagtaatactttcttttatatatgtaaatataatgggtaaatattattttaggctttccgttttacaaaagttattaattgaattctctattttattaaatgataaaattgattttgtatatttaaaaattatacaaataggactttaaactgattttttgttagaataaaatttaataataatccgatctagagatgttatgataaaactagttatattttctgtatcttttcatgttagaaacttttttaaagtttattgtattacaaaataaaattattgaaaattgagcttagggtcctaattttaccatttagaaaatatagggtctattttatcatttaacaaaacagagagtccaattagtaacttttgcaaaatacagagtctaaaatagtatttatccatatataaattataattataaattttaactaattatgtcaagatccctatatcaaataataatagaaatttaattgcatgaactaattaggatttgtcaagtagctaatgatgtgacacttagcgacgtacttataaaagtttcaaaatacaatttaagtattattatcatcaaaaacaaaatttaagtatttttttctactaaaattaaacttaaatatttatatcacaaattattctattttaataagtgtaattttatttatttttttattgaagctttatacaagactccctatacacatatactctcttgctctctagccatttgagctagcatcaattgtgtaaagttatataattgatttgtacacattaatcttaaaagaaaaagaaaatagtaaagaaatagaggacaagataagaaactgataaagaaaaagctgcaatgcagctttggtcaagaatcaacatggaatgtcgtatatcaaagatatttgttattttgtataattgtatggttcttttttttccgaaatttgtataagaagttaaattgcatattagcaatttagcatagaatatttccactaaaaattccatatagaaacaataggtggctcaagcaaatttatgagctatgttattagcaaaataataaatgaatactaaataggttaattagtaatttttttcctgaactttgacatgtatcaaatcgtgttccctgaacttttt

SEQ ID NO: 391019 - DNA, 961 bp, Cannabis indica
gacttctggaaagatatcaggaaatctcaatgaacaacattgaggagttccttgagcaagtcgatggcttcataaagttggaagaagttgtccagcaagccatgacaagtgggcaggtcaatgataaacacagggcctcatagcaccccaagcactgtctgacatgtcaaccaatgcagacaatttctatcgattctccaataatgagaatggtagaggaaagtgcaacaacgatggctctgaccaacataatggaaaaagagggaaattcaatgattcccttatgccatgaagtcgaagggagaaggaggagaagtgtgcatgcttcactctcctaccaagactcccaaagtaaagcatgcccagacgtcccagcagggcaagtcagcaacaaacagtacaaagtttggcctctatctctgaaggctggcctccatcttcgacggttggcctccatctacaaagcctggcctccatctcttgccaggcgcacaagtaggtgccaacaactctacccaaacctcgaggggcaggacacttagaggtcgtcaatggcggaccccatattacaggcgagaccagtaaaggtagggagcgctatgctcggatactccatcacgagcccaaaagcaacatcctggcaggcaaagaatgagactctaagcaaccaaatcttggagagcccacgatctcttttgccaaaggagatcctacccaaaatcagttttctgtacaacgactccctggtcgtcactgcacaaattgggaatatgactatagcaagatacatggtggacaatggagcctccttcaacattcttttcaagttaacatatgaaaagatgaggctctaactcgctgacttggcaccctacaatcaagtgatgtatgggctctttggccaaggcatcgcacccatcgggtatatcagattacccctcattgttggagaaaatccaac

SEQ ID NO: 391020 - DNA, 2770 bp, Cannabis indica
tataagatatttttaagacaactattggacaatgcgtaaacagcgtattggcaactatgtaggaaccatgtgttttgatattgttaagaaaaaatttaaccaactgttattgaattgatgaggttattttgtgaagaatcaactttaaatcagcctcaactcagccaatgttaaaatataaacgaacttaccatatttgaattgttattatgagagccctatgttagattgtctatatgaaatacttataaataacactaagaattgtgtaggctttttagtgtttaagtattgctacatcaattctttgagcatcaaatgagaagttatatggaaacaatattgcagcacaaatatcaattttttttttgagaaatcaacaagtgttcttcattactccaatagacttttgagtttacaaactaaacagcacccttttcaagggcctgaagtattgatctatacatttataatgtgttaaacattgctaagtcttctaatgatactttgttgggccatacactgtgtattctactcttacaagtatttttcatttgctatacaatgttgttcggagtctcatctattttttgccaaaatttcctattcctggctttccaaatgaagtacaccaaggctgcaatagaagcagccataaccttcttttggaagccagaaatcttccttcgcctgatgcttctcaccaaggtgtccaaccggtttgcagtagccttccatcccagccatttgttgaaggcattccaaggcaaaagggcatttaaaaaataggtggtgacttgattcgacacctatatcacacaataagcattgcatatctgctgctatgttgaaccgaaacagcctctcttttgtcttcaatcttttttaaattgcaagccatgttacaaagctgtgtttgggagtattgagtctaccctaaacttccttactccacttaactcggttctcattgggacatagcagcttgtatccttcggcaattgtatatttgctttgagtgaaagatgaaggagtagttaaagctagaatggtacctttcaatgcgactatcttcctccaataccaactgcgttgttggggagctgagtagttccaccaatcaacttctatgatgtacacactatgagtccatttgacccatagattgtcctccttagttgtaattgcccacacatatttgaacatcgctgccttgctccattcagctactctcttaaatccaataactcctgctcctttagtttgacgaatatttacccaagcgatttggcctggtccctccatcaattactgccctttccaaaagaaagccctaaaaatggtttctacggctttgataatcttttttggaacaagcatgatctgactccagtatgtatgtatggtgaggaggactgagttgattaatacagctcgaccggcaaaagagatatgtctggtactccatgttttgattctgtgagtcaccttgtcaactagcatacaacattcctttgaggagagtctcttagggctaatggggattcccagataagtgaacggaactgcacctctctgaaaacccgatgcatcaattatacgttgtacttcggaatctgccattccattgcagtaaatggttgacttgtttggattaggttgcaatcctgatgttttagagaacagtttaagcccctgtagtagatagtaaatgcttttgtaatcacaattgcagaataggagaacatcatctgcaaaaatgaggtgattcagcttcaggtccttgcatctgctatgaaatctgaagtctggtttgtgtcctactttcttcattactctagtgaggtattccatgccaagaacaaaaattaatggagacactgggtcaccttgtctcagtcctctccttgcatcaaaatagccatgaagagattcattaatcataagtgaaaatttaggcgaggaaatgcataccataatcattttaataaacgcatatggaaagttcaatccatgtagcatttcttcaatgaaatcccattctaccatgtcataagctttctgcaatccaacttgattatgcagctagcttttgtcagtttccttccataatgacaaacaagatcctgacaaaccattatattgtgggcaataaagcgtccttgtacaaatcccccttggttttgtgataccaagttaggcagaagacagttgagccgtgagcataacagtttagtggctactttgtatatgacattgcagcacgctatcggcctgtaatccttcactgtattggggcatttgagcttcggcacaagagttagaacagtgttgttaatctctttcaataagtagcctgtcttaaggaaagagataatggcatcagctacctctacaccaataatatcccaattttttttgaaaaaaatatcttccaaagccgcctggaccaggggctttaactcctgggattgccagcaccatcttttttacatcttctcttgtgaaatctgccataagtagttcggcttgatctcttgtcaatgcgtttccttctttaagaatgctcttctttacattcagcctattggcatacatgtacccagcagactaacataatagttaatgaaggcctctttgacttcgtttggttcctcaaccctctgcctgtcaacattggtgatggacaacacctgattatgcctacttctttcacgaatattggtgtgaaatagatctgagttcttgtcaccatcctttgcccatgtta

SEQ ID NO: 391021 - DNA, 944 bp, Cannabis indica
tatatattttcattgcgtagtaactttgttgattatattcgtcttgaacatcagtaatttaactcttcatatgtaaatttgttctctcgagtcactttcattgggttagataatttttcctttcttcctttttttttttttcttacggaagatggatgcgttagataattttaaccagcgacattttggtgtgtacttgaaattgactcattaatttattagaagccaacccaaaaaatgttttcattgtcctaacgttagctaaaatcaattcatagtgttgaagagaatatatgtatataataatggaacaagttagtgattaaattcattgataaggtgtgacttgaattaagtattatatattattagtttggttttgtgtgtgtgtgtgttgcagacaattgaggagccaaaattagagtttgaacttattataggtagggagattattggaaggtgaaaaggatgagatgagtgaggaccactaattaagggtttctttccatacctttcttattcacatcacatgtttgtctaaatgccacattacactgtccacaccgtccagacaagtgtgacagccgttcaccaccaaaaactaatgtaaatatacatttctcattgttgattatgattttttttatattaatactactaagagaaatgataaagatgattttaaagtcttgaattctataatgtaagtagggatgtttattggatcatagttaatttatttagttattggacattaaattttgtcatccgattcaatataatcaaattgagttatccaatccaatccgatttaatggatgtattgaattagataggttctaattattagatgcattaattagttttttattggattggatccattcatgtccattttaaataccatttaagttgattttattttttgaaaatgaaatattaac

SEQ ID NO: 391022 - DNA, 1232 bp, Cannabis indica
atcactttttcttacctcagtccataaatcaggcgtgcgggtcgacctgagtggaaatagggttggatgatcccggtcctatgttacaataaccaaaactcaatcaattccttaaaccaaaactttgggaacaaaccctaattccgaaaccgaacaaaaccaaacttccaacaacccaaaaataggtcatacaacacataaccaacctaaattagatactaggtactaccttgagccaaaacagaactttaaagaaactcggcaatttcccctacagggcaaccgaccgaccggttctggtgcaccagaaccaaccggtcaatcggttctggcggaccagaaagccttaggtttcttccccaaatttgaaccaaacactcaccaaacttgaccaacagctccagtacagtatattaatcacaaaacaaggtattcaatttatccattaacaacaattcatcaattatcccaaattaacatgttaaaacctaaattggaccttaaaattcataacactaacatagcagccatcaaattcatttaacccaagctcaaacctattctaaaatatgtctaaaaacacaatctcaattcaacttaaacccccaaccacgaagtcacaaaatcctagcctaaaaacttgaaaatcttaagttcacaaagaaaggatcttacctcaaagcttctaggttgaaactaggtacaaaacctgttgaaatcaaggagaaagatgaagaaatcacccctgctatggctcgcttctagcttgcttgagaaggagagaaagagggaaacactttggtactttcttaattctaaagaaataacttaatacccttttaaataatcaacattttctattattaaacaatataattcaaacccattaacaaagtggaattaaccttataaatgaccattctacccttcttaacataattaaagatatttaacacttagggttattttggtaatttctagctaatcttccaaaccgacaacttaaaattctaaactagtccggtataattcccatgcgatccatattttattatcgtgacagttccgaccactctgttgagttcccatagtcgtcgggctcgaaaatgttttattccataaatggtatctacgatactcccataatttaataaaatattcgtaattaataaattatgctttatttaatcatttattaaattcacattaattaacctaagtaagatcataat

SEQ ID NO: 391023 - DNA, 715 bp, Cannabis indica
aaaaaaaaaaaaaaaaaacccgcctattgtgtaatatgtttgttacttgttatatttttcgctttgttttgatttagtaattacgggtccttaagacaagattatttttcacaaaaaaaaatgttctagaaattttttaatatagttgaattaatttggttaaaatgacaagtatagtagatttggtatggttggtattattttttgagcttatttaattttcaattggactacacttgtactagtgcctaataatgtgtataataaatttgaattaaaggtccaaaaacaaatgccaactgttttattaaatagtccaactgttttcatggcacatagaaaaagtatcttttctatcccattcttacttttaatattcaactgttattaattttttatttatttactgccattaatttttgtatgaaaaatatagtgataatataagttaccaagaaaatgaaatgttgcattaatgatatataaaattatattttaattatatgtaacattttgttttcaacttttttttgtcattttacaaagagttccataaatttatgttaaaggtgtcttttgggtccaaccttatgagaagatgggcctttgaaatatggcttaattttgggcctttatttatttagggaaacttacaaaaatactgaaatttgggttaacttttacaaaaatactgtcacacagaaattttttcaaa

SEQ ID NO: 391024 - DNA, 1594 bp, Cannabis indica
attaatggtgaggttcaaatgccttcccaatttggtatgatagtacaagattgtcgtctgatgatctctactttaaataatgtattaatttcttttgttaagcgatctgctaacaaggccgcgcactgcgttgcgagaaagtcttgttttttgtcaggttgtatctttagtgagcttaatgctccttcagatttactatctattgtaatggatgaacgttctgattaaataaaatcctattccattcaaaaaaaaaaatatcaaatatatatataggactgcaatttagacctaaaaatacggaccggtcttgtaaaataagaatgaattaagtatcatgagagtggggctagttaatggttttgtaaaatataagttttaatttttgaaaagtagtatgaatttagatagtttctctgaccgaataaatgagcccaaacatttagtcatttaatattattttttgtagggttatgactataatattaaataaaatgtaaaaaaaagtttactaagagaaatatatgcattacctgatagaatgttgtcaaatataatttttgaaattccaactttttggtttttcttgttataaataaatctatggtttgtcattgattccagtgcactcgacaatgaagtcggctaagacttgactcttgattgagattttgggttggtattggatgttaaattggctaaattgcatagcctatctttaataatcttcatgaggattttggcttttgaagagcttgtcaaagagggtgattgttagtactttgatggcatgagcttgaaagtatagtatcagttttctggaggcaatcatcaagcgataggaaaacttctcaattattgggtatctagactccgcgcctagcaatcttttgcttacataatataccagaatttggagccttccttcttctcgcacaaatgcaacactaatagcgtgatcagacacgagcaggtataagtacaatggctctcccttaactggtttcaacaagatgagagccttagccagatgcttttttaagttctggaaggcttctttgcactgatcaacagtccactcaaatttcttactcccacagaggatgttaatgtggtttataagatatgtttctaaagttttggccgataagttgaaagttgctcttcccagtggtatttctgaaacccaaagtgcttttttacctaaaagacttattattgataatatcctggtttcatttgaaatcatgcattatttaaaaaggaagtaagttggtaaggatggctttatggcacttaagttggacatgagtaaggcatatgatcgggttgagtggggttttctacaagccatgctgaggaaaatgggatttgctgaacactggattaagttgattatgaagtgtgtgagcttggtctcctatagtgttaatgttgggggtcaagagattggtccgattgttccaacaagaggtttaaggcagggagatcctttgtcacccaatctttttatgctgtgtgcagaaggtttttccgcattgataagagagtatgagagaatggggaagattcgtggttgtaaggttgcaagggg

SEQ ID NO: 391025 - DNA, 1395 bp, Cannabis indica
ctctaagcattctcttttgaatggccaaaaatgggataggataccttgtcctcaagttttagcaccttgaaagtatcaaaatgacatctcaaaagctctgaaatgagcacctaacgcccaggttgacaaatggcctggagcgctgggttctgcttattcaattctgattccgcctcgattgttcatttagcttatcacaatacctaagagtcatgaagttagaaaatttaaattcacaacttcacattttcacaattacttagaaatgggtaatttcaagtatcccatttttacagaatattaacatcttcgagaaatgttaaccagcttcatcagaatacataaatggactataaatgatgtcgaaatatcacttaggcatcaaaaatgcattctgatcatgacattttcccactcacccaatgtccaagttgacgtcatatgtcaacttgggcgttggatgtcaatctcgacgttgggaaatgtcaatatgggtgttaggccatgaacaaccttaagtaaaattgtcataattcacttaatattgatctgattgacgcaattcaacttgtattttgaagctattttaatgatctattgagtcatctttcacacttcaattgcaattctaaagtaatcaactccaaatttcacccaaagagagttacgaatttaagctacaacttacccgaagcgagtcctgccattgcgattcgagcttcaaaaaattcgatcaacctcaaaaattaatttttactgttagatcatcatctatggtcaaaaatagctaattttttatttttttttctttcatatttttagattattttatttttatttttaaggacctcattcacctataaaaggattctagcttattttttacattcaaaaaagtacccacaaggtcagagcatctttctttagtttcactctctagaaactagagcgttcacacctagccaatcttctcttgtaatctcgtgagaaataaaaattcgaagtagacgtagtttcattaccatcatgacatggagagtgaactactataaattttgtatctttttaaattatatacttacattcattattcatctcgccaatctagcgatttggtgttaaccacttttcagcgtcaacaattatcatttaaaaaaaatataataatcgaactcactacactaaaatcactattttggctatttggtatcgattaatttgggagaaaaagttagcactggtcgtctttcgactagtgatggacccaacatttaaattaaagggaacgtaatttttcttttttctgtaagtgaggggtgtattttttatacatgatataacatgttaaaaattattgatgcaaatttgtattttatagtattaaatatagtttaa

SEQ ID NO: 391026 - DNA, 658 bp, Cannabis indica
gttatttctctatttagccatcttaaaagatgcgattagtccaactatagtgcgagaagagggcaagcaccaacaacctatctactacgtaagtaaaaggttactaggggcaaaatccagatatccccctctagaaaaactcgcattgtgcctagtccttaacctagacgggtactggtgtgtatgccgtgcaatagttacagatatcgtctgttttgtgcaggccatcatccctctcctaaacgggtactggtgtgtatgtcgtgcaatagttacaacagggacaactattggaatgccaaagttatgagagcttggatggcctacgggaagggtatcagcaacaccaggtcggacaatataagtccagttggatggaagataacgtctccaaccctttctaagctctcaaacaaattggtcgtaaccttcacctatgatctgctcagagtagaagtgatggtgcacttcgggttctgtagtaggagaacgatcactactcacttcccaatcctcgaaactcaagttcgaaagtccgtcactcgaagaggatggactggcgtgaagacgaggttgatcctcgtacagaagctgaagtagatcctcgtcgatacgatgtttgcctccccaaaactcaccagggttcatctacagaaga

SEQ ID NO: 391027 - DNA, 1038 bp, Cannabis indica
gtggtggtgtttacgatggttatagatggtggtagttccggtagtggtgggtggtgggtggtggtgtttatggtggctacggatgatggtggtttcggttgtgttggtggtggtcagtgactttggatggaggtggtggactgatagagagagagagctgagatgaacagataggaaaagaaagaaaaaagaaagaaagaaaaagaaagaaaggaaaaaaaaaattatttataattttttttaatttttttaaataatttttttacgtggaccaataaaattgtgtcacgtgtacactgtgtccagtccaacattgcaattaatacttaaaataatggacggacgtattaaattgctaaagtattagaggtttgaccgcctaaatttaaattttggaattaagtgaaaccaaaataaaaattttaaaaattttaccgtcatttactctaaaattaaatgggcgttgatcagaatattacaattgtagaaaatgagaacgttgtcgtttagtatgtagtgtatatatattaaaagcatatgagtgtgtacacataaattatatgtaaaacttatatatatttcatcttaaaaattgtttttaatgtgaaaaatatttaaaataaaacttattttttatattatttatgacataagtgtttgttatatatgtaattatatcatgcatccttatattcattgtcaacgccattaatatcattgtttacaccctccaacatatattatattatgaaatttttacattaaaaatacaaaatggcttttttattacatatatactcatacacggcagctattacttttgtacactttaagtttttttatttacaattttactacttacacacattatacacataatgtcactctttaaatgcaagtgaggtgactacacacgtcagctgattgacatctatcaatccatactttccctatctttttttccttctttttttcatgatcttttcactttttttttaaaaaaaaaaaaaatctccataactgatatactttcctaac

SEQ ID NO: 391028 - DNA, 1036 bp, Cannabis indica
gagatggactaggagaagtaagtactgtgcaatttgtttagaaagattatttcgacaagggaaccaataacgcgcgaaaaggttgttgagtcgcgccatgcatgcatgtgtttcacttgcattgtattactaagtggactcaaatcaagaaaacatgtctgatttgtcgacttaaaacacatcaattggatgtcatcaattgtggggcctctcaaaaacttgttgatcaaagtgatattgtagagaataaagtttaaatgaatgagtatatattatttttagtccgtgtgttttaatctagatttgtaataaatattcttctatttcagaaatatatttttttggttatgtatttcttttttttttggaattttttttttatcaccatattcatacataaaatttcacatgtaatgatcaatagcctactttaatttacatgttagtttcaataattaagaagtaataatctctttagttaaatgggttattgctaaaataatagtcatcaacaaaatgaagcgaaactagttaaagtagaaatcacattaaaaggtaattacataaaattattagaaaattctctctttgaaatattagatcgtacaaatttaaaaggtaattgcatgaaaatatatagagaaaaaaaataatttccaatactttagtcaatcaatctttaacttagacctcatttgaatctattggtcactgaagacactaaaaaaaatgtgggatcttatttaaaaaaaattatgtgaatttttttaaaaataaaatatttttaggtttttaggttagatggaccctaagtatgggcctagcctgctttaacttaagtacagcctcaaaaagagatccatttcataacaacgaattagtatcagagcctaaaaatagttagagtttttatgaagaaggtttttcacgtttacaatgttgctaacttatattttattgaacaaaatatgggtggtagtgtgtcttatacaagaaaaaatatgagttgagtcgtttaggtgccgtttggtaacac

SEQ ID NO: 391029 - DNA, 1475 bp, Cannabis indica
cttaaaagtcttaagttcaaaccatgaactctcctttttttctcattcttcactcaccactaaactaaccttagtagcttcaaactgcttaaacaatgcggacttccattaattgcagatcatataaaaacaagtttgccatcggttcaaatacagttttgactaaaaaataaataatatttatatttttcttattttaaggaaataaataaaattatcttacaaataatttattaattatttttaatcatccaacaatgtgactcgtggttatatgtttaaaacctccaccatatgtattacatatatttatttagcatgaatttttcagaatatgcacaagacttcctcccttggtcgttgggcttgtaacagtaaaagaaagaaagaaagaaagaaaggatgagtacgtaggttaaaaagataattagcagtagatgacactctgtgaagctcggatctcaaactgtgacaagaccatctttagatttagttagaccaaaaggaaaagtcttaggaggaggggccatatacttcacacactcgtgcttctcatgtatcttaataaaatatatatatttaataaagtatgggaatatagtcttttaataagattacaacaaaaactgacatgagtcatatgggggtggatggagggacgaagtgtttaatatttggttcgcaagcacaaaaatttctaagagaatgaaactgcaaaaagaggaataataagagagaataaaaatataaatttaataatatataactaaataaaaaaaaaaagatgaccggaaaagagagcacacttcaaaaaagagaaaaccaaagatgaaaaagggttagaaatttgtgtttcttaaagtctcttttggaaatttatttttaagtatgtcttaatgaatccaagaaaaacaagcatcctaagtaaaactagtaattaaataaattgtttctttggttctttggtttttgtctccctccattaattcaaagtgcaaagatcttctcttttcttaccgttgagttttctagtcactggtcttaataataatgatatacaaagtaataacccatggtcataaattgaatgaacaagttaaataattcatctgattattattcttaaagtttaatcatgttgctaaaggaaattaaattatatacctattttaatttactaattttattaatttttactttcattttgatattttttaagagatacatacatacataatgttcttctcataccccttactttattgtaaattatatgatagatttaagtagaaagtaaaaatatattggacaatttattagatacatacatatattataaatatacttttgattaatatatatataaagagatgtaatttttaatttatctcctaaaacaatttaagccggctagggccacccaatttagagacctaacatttaaaaattattttaaaaatatacatattttttta

SEQ ID NO: 391030 - DNA, 975 bp, Cannabis indica
atatacaataattaattaaaatacctatataattcttttacttatttttaatatgcgagtatgaactacactataccacaaggctataagccgtcgagagcccaggctaaggagcaaagcgcacttgaacaaatgtgagagcagcgaaaggttatactcttcctcatgtttcattattcatattttatgtcgtaggacataatattctagatatctattatgaatcgttatcgtcttcttacttctctcttaactccaatcaaattcgaaaaatgagaaatcaattaaaagttagcggacctaaattaatgaataaaaaaaaacaactcacctcacaattaccctatttttatttcataattatttcttttgctacttctctatagacatagcgatttagtttaggaaatctctcctagaactaaacataagagtttgctcgtgagatacgagtctagggcagccatctcctcttatctccatgtgagtctaccacatatgatatatgttcattggatcacatttaatggatttggacccaactaatccaatccaattatttattgggtattggattttgtcatccgatctaatccaatcgaattgagtcatccgatccgattcgatccaatgaatttattggaatggatcggttccaactattagatgctttaactgtttcctattggattggattggatccatccactccattttagctaccatttaagttgatttcactaaaaagaaaatatatatataaatcataatttaaaacataataatccaacatacataataaacattaatttagtccaacttaattctcatgatcccataataaaaccgccaaaaattaaaatttattcaatacgcgttgacaattttattaatgttagaaagataaaaattaatattttagatctaaggtttttttttctttaatttcatgtgttaaatatatattaaattaat

SEQ ID NO: 391031 - DNA, 918 bp, Cannabis indica
tgaatgcttgcttgtatttcagcattttttcttatctgtcctgttcaattaatttctccaaatatatatgtccagttcagcaaatgttttcatagtaagttattccctaaatttgttggaagacctctaaaatgtggcttattgctcacgaaataattgtttctttaataatttttcttttataattattaatttgttagaacaatgtatagtgtattcttcttcaatatgaatagtttttttttttttctttcttttgacatttagtttaattttctttttgttagaataaaaaagaactaaatattctaaaattttggtcatttctgtttgatttttagtttcaattctgattgtttgtttgttttttattttttaattaaaaaaatattaattttcttttttcaatatttgtagttggtttattttttaaatttgatttcaaattatattagaatattttatgagaatttaagagttattagtaacaaaatatagttataaaactattctttataatggacaaaatgatagcataccacttattatttcacttatttttttaaacctccatttaacgctcttctcgttctttatatgaagctaatttttgatttgaataattttacaatcttattttatatgagtaaataatacatcaccttaatatttaatactcatttttgttttgtataattttacaatcttatttcataagataagagtatgcaataaatcaccttaaatctataactactataaaagtgagaatattgttttgggcttccacatattaaattactaaaaagtcctcacttctcacctttaatttattatgttgaggttaatcatatataaaatatgtggtgattaattgcttttttttatttttttattaataactactatgacaatttt

SEQ ID NO: 391032 - DNA, 1391 bp, Cannabis indica
tttaacgaaatagagaatccaattaataatttttacaaaacacaaaatttaaatggttattttttcttgtagaattcacataccattatataatagagtaattagtgatataaatacataagttcaactccccgttttaaataaatatataaatttatttttttatgataataatacttaagttatatttaaaacttttgtaggtacttgtctattaagtatcaagtaaattgccagcaatcttaaattgatttatgttattaaatttttattttttattataatgacttaatatttaatagtgtaaattaatctatatatataagatatattttttatttttttaaaaaaaaaaacataaaatcttgaatatatcaatttctaattaattaaaaaaaaaaaagtggataagataataaatgagatgagagagagagagagatccaatgaagtgtttggagagtgttttttttatgttaatagaagcatgcgcatgcaaatgcaatgcaatacccaaagcccaaagagctggcgtggcttagtggtgggtcctacacacttacaccacactgacacgtggtgggcagcattcgtgggtggaccccacttcactctactttgccacttggattgaatgcatttattcatgtatcttagaatatgggaattgttaaaatctaccacattcttcggtgttatactactacaacgtaattaagttacggattttatttaatttaaaaaaataatttttaaagaatgttatgaaacgtcacttgtaaaagatgttagacactactaataaccaataacaatacttattgggatacacatcaaaaatatatataatttttgttattttaaattgtttaatggtgttacccacaatcccaatcacacaatagcaaagttggtttttatgggtactaaagtggggataccatatctaattattattattttttgttttttttttttaaaaaaaaaaagaaataataaaatgtttgggcgtggggtgagtccactgagtgaccactactcaagattttgtggaaagcccactttttattatgtgtcttctttctcatcctttctatgctcataattaacatttcttaatttttttttattatttgtttattattactatggttttggttcatggtattttggtacctctcaatagtgaaagataaactcatttgtctttttactacccctaaaaaatatgaaattttatttaatctttacattatcataataataatggtgacagaattgttaaaaaatactattagtttagtactctcatcagtgtcacactgttattggtataattaattattgaatcttatataacttaaaaaaataatttttagagaatatcgtta

SEQ ID NO: 391033 - DNA, 2582 bp, Cannabis indica
attttgcttaaatatttgtgccacttttaaattcttgacctgaaaatataatgttgacattattattttttgcttgaattgctagaaactagcaataagctagttgggggttgtgattaaggcttaaatttgtacatttcaatcctttaattatgcatataaaattaagagaaattaaatattccataatttaaatggtagtttttttttattggaaatactaaatttacttcaattttatgttatttttcaggaaaagtggtaaaaagaaaatagagaaacctaatttcaataggtccataaagacaatgcaatctcatcttttaatcatcaacatcaccaacatggcctaagacccataatatggttcacgtggcccaagtctccaaagtccaaacatatatatatgttagtattatcagctccacacattggcgagtggacttcttctgcagacgcaagtaccacgtcaaacccaatgtctccccactctgcctgacgccaatgggacattttgtccccctttttccttagctttttgtggcacttatcccactaaatggtacacaaaaataccatattggaggagcaaattagcaatataaataggacccaaatccaatgtaaaaggcatcaaattttagagtagtgaaatatactttttcattttgttctctcttattactattttattttacgtattttagtgacaaaaatgagcgaattattttagaaataatggtgaggttagagtgtagctttgtaattcttatttttattattgatattgattcttttgtgcttcatcttcacatctcatttattaaattgttcttcatcttctattttttcttccagagttaatagtatcttttatataagttcagtcatgtttttcttatgtaagttagactattaatattttggtatatttattatattgtatgtcgtttactgcattttgccaatagtgatatttgtcgatttatgatatataatatgatatgttgttaagttagaggtgagattcaatttatgcaagattaattaatttgtatttttaacatatatatatcttccggttgaaattaatattctagaattgcaactgcgttcgaattaatatcggtattaggataggatttgcataactacctttctaccttaccaagctctttatctgatcaccctctctctcactcagtattttattatttttagttcattccaatttctatgattttctccctactaaactaatctttaatggtaatttgcctccctgtggatacgacatagccagtttaccaccgtgaccgcagtgtaactaattgggcgacatcacgcatatatactataaataataccatccttgcgtaatagaaattaaaatcgagcccttaaatgaagaacgtcattaatgttcggactaagctttaaaaagttccaaaatcgatttctaactcaaaatcacctcaaattcaacaagtaaatatatatactagtcccacagttacccaagaacaattctacaaaatcagaatctccataacctttttacataaagtccttatataaaaccaatcgtttttagcttaaaacgtaattaaaccataccttaagcttttcctcttcaaatatatgctatcccactactaccagagcttagatcactaggtttcgagttaaaattgaagaaaataaaaataatgttatcccaatttttgtactctgacgtggcatcacacgatggtgacacgtggaatcaacttcacatatctattcacaagagatatgccgaacagacaccacatatattcctaggggtgaagccttcttaactgggcagtgagcagtccgaacagcacgccaacacttagcagcttcaacactcgcatcgtgaatcattgaagaaatccctataatttttggatcatataactgagatattgcaagctgtccaaatcccttgatcagtgtatgatgtatttaatgtgtaatcttgccaattatatctattttaatcagaagggaaactcgtcactccaagcttaaaaccctattctcactaggcaaagagtgaaaaaacttatctaaaaattcatattcagagatattattataagaactctaagaaaaggaatcagtatattctttgttcttaagtcaatacaaactaaagggagtacgctattaccgaactgctcggggccgaacctctataaaactcttgtatctttattcatttcattatattgcatatatattatactgcttgtcgcttacaatcaagactcactgtcattggcaaaaagtgaggtcaatattttggtgctttcattgagagcgtgaatcataggatcactctttatttcaaatctaatcataagcacgatggtggtacagactcgttgaggcgtggttgatctagcaaatagaggtgttcctaaaatagctaatccaatccattctgcacgatccaatccaatccaatccgcaaagtgcggacatccgcacttgtgcagattggattggattagaaaattcaaaatccgcactagtgcggattggatgttgattga

SEQ ID NO: 391034 - DNA, 1734 bp, Cannabis indica
gaggtgtaaaattctaggttaagttctctatgaatttgagagattaagaattgttttgggggagttatttatggttgatttgtgttgtttttgttagtttataacatttgttgtgtgagctaagaaagtttgagtttaagaactcaaagcttgcttaacagtgttattttttattctaaagttttgatgatgcaatttttggttgaattatgttcattatgttctatatatgtgtgttttaaaaaatttgatgtaatttggggtagatttgagttagaaaaatcgagttttcgtattttttgctacgaaacagtctactgtttttctagaaactgtgaaccgtttccctaggcaaaatcccaggaaacggtgaactgtttggggaaccggttacccagatggggtatttttgggtaccttaatttttcgtattttctcaatatttagggtatttccattctatttataaataaaaaaaacttcttgtttaagtttaagaacccaaaagtcaattagcgagtcccttacctattttgcatgattgtgacttaagacctcagaattgttgagcagtatcttcactcagatttattagcacacctaattatgaaagtgaggtaagattagtataaatgatacacatatatacatgtttgtcatgcatgttttgggtagtacgaactaattttaccaacactagtactttcaggatactgagtgcatgtggtataatggttggttgtgctatcagcaattatgaacgaatccaaccaacactagcacttttagggtactgagcatgtatggcgatggctcgtgctattaatcctaccaacactagtacttttggggtattgagtgcatatggtatagcgattagtcaggttactaatcctaccaacactagtacttttgggataatgagtgcatatggtatagagatttgttgtgctacctatcctaccaacactagtactttcggggtacttagtgcatatggtatagcaattggtcgagcaaccaacactatcaacactagtacttttggagtactaagtgcatatggtgtaactgttagttgtgctttgtcaagaactttgagactcgtactcataggatgtgggttgggcttgtgattaggtgtgtgggcgctaaaattataagtcaggttacatgttcatgatttatatgtttttcttactgattttgtcgattcacagttatgtgcttcatgtgtagttaaaggcaagacgaaagctaagtagcggtgagtctagagctcaatgaagattgcacatatctagatggttagacttggagtgtttagatcttttaaacatcatgggcttagttttgtaagtcgttcagcaacactcttgatacattatattttgtttgtatttgaaaaatagaacgggatctcggagtttgtaaactttatattttgtatagttagtaaagtttatatttatgataaaagtgtttgttaatcacgtttctcattaaatcttttgattagcaaaagttaacactaatttaaaaattactgtagcacacctaagctagtagagcattacggttaagttattacataaataattcacagcaataaaattcattacttaggtacttttatgtcactaattatttttcttacataaattgaaaaatcgtgtttttgtaaatgtcaattatatacgaaaatataaaactgtatgcatctgcagaagcaga

SEQ ID NO: 391035 - DNA, 955 bp, Cannabis indica
ttttttttgtaataaaagattgaaaactttagttagtttgtgtttttttagagcctaggtatagtaggtaacaactgaacattcatttttcactttcacgtgggaagatattaatgtaagtattgattaatgaacattcatgatgggaacattctgtagctgaactggattgacaactctacctaccttaatcattatcacttagcaaacaccaatgatgggatttttcaccaaatttatcattttccaatgcctctaaatattccctattttactcattcacttatcaacattctatgtcatatattactttttttgtgtttaccatttttctaaaacaaactttaaatcctatagctttttaccttttaatataagcattaaggtatttaagcaaattaaacccataatattattggagtattcggtaatcggtactattgaaaaaaaaaatcttaagacaactcttgaattatgaaatttgaattcttttaagcctagattgtacttttctttaaaagtgaaaggctaaaactagtaggattaatttctcacttgcaagttctgtaataataataaaaataatgtaaagaaagcctagaagggatggttttccaactctgttctacaattcccattccatcatcaataataatattaataataataatttctttcttccttttaactcatcatattaaacactaaacctagtttaaataatacaatgcccacccatttggatctttcctctccttgaatatatattgtagaagtagaacattatatgtcagatccattccatcctctctctctcttctttctctcacattgtcaaaactcatatcatcatgaaattttttccttcaacttcttcaaaaccacaattaccatatatataaatggcagagagagagaaagagaagtagctgactctgaaaatggcctggaaaaa

SEQ ID NO: 391036 - DNA, 1695 bp, Cannabis indica
tatataaatataatttgaattatattataaattaaaatttatattataattacaaaaataaataaaactgtctaaaattaaataaagtattgatagtttattaaaattagtaatatttacactgaaaattttaaactaaaaaaaaactacaagttaacaacattgttatcgtcatcgtcgtcctgagtgggagaggtagcctgtgaagaagacctaataccaggaggctgaaatggttgaatcaaagccattaggggcaaattgaagacgggaacgacgccgaccagatgcctaaactactcttgaaaggtgttcaagaattgatgcttggtctaaactatttgttgctgccactcgttccatgcttcttgttcttccacgcttcacttcagggcctcatattcctcctgggtgacaataggttggtcggagggacctgttctaggagttgccctcttggcccccgccctaaatctcagtaactggagcttagtcccctcaagtggcccgtgactgctcaccgaggacctgtgtcataacatgcatgagtggggtcgatattgtactgcagggggacattggtcggcggtggttgagtttcacgaatctcaaccattttggcctaccaaaaatttgaacaaactattagagatgaattgaaattaaatacataagaagtttcttaaatatataaaattacttatatgcagttgttatgtgtgttcatcgcgccatttattgttcttgtagtggaacttttgaaaagtgtccacagcactggaaagttcacccgtcttggaataaggctattttcacagataaaaaaaatagaaatatataattttcaaaaaaaatattaatttttaggcaataataattataacatcatacaccgctgacatgtggctgactatggtctttgactcccatcaaccttgaatcttgatttgggctcaattttttgtattttatttggctcttgcctgtaatttaaagtaaatttattgttagcaaaataagcaaaaaatataagttaatggagattcaattttacaatactatttttaactacctgttgttttttgtctttttggtatgcaataacctctgctcacaccttcgctgtgaccacatcggtacgtgatctcctagtcgcttcttcctctccatatttctcaatattctccttctaggcctttttcgtatttgatatcctgtcacgtagcctttttgactttgatttaagactgtagtccacgaacataggattgtcaattgggaactcaaacttgtctgaaaaaaaataaacattaaagtaatatataattttttgtggaatagtacttttgtttgatctagtacaataaaaatttaaaaattaccactttgtgatctatcccagataatccgatttatctctctctccctccctatttctctttgatatggaactgctaagtacgatttatacactatacttctagtgtgtgtgcttttgattcgtatcacatatatagatagacatgtagtaaaagtgttgtgcataatttgattatgcatgactgggccgatatgtaataaacatcgtttattaacgtatcgtttaccatgaaagagttctttatatcacaagagaaatttgattttttatgcttacatttagttaaaaaaaatttcctaaacacataataacta

SEQ ID NO: 391037 - DNA, 891 bp, Cannabis indica
tggggtgtaaataaaacttctctatttttaaatatgtatacatttttgtaagagtaacattatattagtttttgtttttttaaaaaaagtaacgtatatgttacaaaatataatttttgtggtaatttttacgataatattaaataaaagaatattatcatatatctaaattctctctcaaacgttaataataggggaaaaaaattaaagttttttcttattaaatttatagctatcggagaattttccttttttttttgttaagacagcctcgctggccttctgttgggcttaattatgcgtgacttggtcggggctatattttcctacgtactgttattagtcttgtctttgtgataagattttgaggtttagtcttgtctgtgtgacatggttttgttttgttttattttgttgttggttcttctttgttcttcaattactcgccactaaattgttgttattggttaggaataaaaatttccgtgtgactgaaggtattattagtagcgcagttacgtactttacgcaatagttgagtgctcaaactacgaggttgaatgaacctactgtaacactttctactgttatgtctttcgagaggtggatgaagcaaaatatatatgtttttaaagttaattgtggtgctacaatcttttctattaccattaattaataaaattctattatttattaaaacatttatacatttttgttttgggaagagaagagggacaacattcatttgtttgtttgtttttaaaataagaaaaaagcgtttaatgtatttttattttaaaatcatatatattgacaccaaatctttatatattaaaagtgtctatctaacggcaattctggtttaaagattcttgtttaacgattcttttt

SEQ ID NO: 391038 - DNA, 754 bp, Cannabis indica
ccagggttgttattacgaacaatagcaccaccaagaaaattacgaccttgttgttccaactccaagagtacttcgccatattggtgacagataaggagtactaatattattgaactctattatatatttgtgtcttcgctggttttatcatatatataaccctcgacgtattcttataaggaaaactgttttaagagggttggtaatttaggccatttatttatttattttttgaacaaaccaatttaggcatttttatttgcatacaatgcttatcccaacacttatatataataataataataataatacaatgcttatcccaacccaaacaaatttagctaaaagaatatcaatatatcagtcaaatttgagaatttaattggaataatgaatgtatattttggggtttccttgttatattacttaccaaaaacaattactttgtatttatttgtgttgcaatgatttttttttttttttttttttgttaacaaccattagtacttagtgtactaccacaaaaatgagatagttgaagaattattagcgatactttattaaaattattagagtaatttgcggcataaatacttaagttttgtgccgagtagcagataaatacctaagtcctatttttagcggtaaaaataccttccgtcactactctggaatttccataggtacctccccgttatgtgccaggttagtgtccacatgtcactcgttcattggtccatttcattaatttttt

SEQ ID NO: 391039 - DNA, 2576 bp, Cannabis indica
ggttaacgatttttttatattatttatttaatcaaaaatagtttgtgatccaataataaattatatcaatagtcagggagcggagccaggattatatagttgggagccaatatcagtaggttcatacgtaaagaataaatttcaattgagaaaatattatagtattttattttataaatattttaaaaattttgaatcaagtaattaaactgaaaataaaatgtgagttttaaggtacgttaggaaggccaacaaaaaattacaattggtaattgaaggtaattataaagttttgtgtgtttgactaaccacacaattacactcctacgaaaattgagtgtaattatactatgtaatttctaaaactttttattttaaatattaagtactaaaattattattttttctgtaattactagttattttgtcaaaaaaaatattaaaatttattaaataattattaacttatatccagatatgaatagtgtagttttttaattttattaatattaattaaagaaatttattaatataaataagtataataagtttaatatacaattataatattttggaaactatacttagtacatagagtaaaataatatatgatattatatatggtatataatataatctatctatatatctatataatttttttttaggtttgatgagatggcggtttctataagatttttatataattttcttgctctttcaatttttttagacttttgttaatttcttttaatttaataccaatcaatttatatctattaaaataaaaaagtgattactttaagtataattagaatgtacacaattatatataattaaattataatatgattaatttggcaaaaagagaagtgggattgataataaagaaataaataaaaacaaaaaaggttatgctcttcttgtgttcccatcaaagtattatgtttatttaatttaatttaattttgtcgttttaaatgagttgcgtagtttaagaagtattgtctctataatgagttttgagagtgtggatgtgggacctacgcaccgccgtttcatcatgctttcaccacttgctcattttcattgcctcttattattgagaaatgtattattataggatactcattggtatccaacactttttatagttgggacttcacgattagttaacgatattcttaacgagacttgatacttaattacactaatagcagtatgacaccgaagatgatgctaagtatcagtggtgcttttttagtaattctctattgagaaatgctaggaggtaccattagtacttaattaagtgtcgaatcttatataacttaaaaacatagtttttagagaatatcgttaaccaatcatagagtgccacctataattgacactaatattagtatctaatagcaatgctccttataatttgctccatgattgacaattgcatagagaagacgagtactaattataacctcttagttaatttttgcgttcaaaattacatgtggaaatacttttttcaatttttttttattataacagtgtttgttatagttataatatcattagtgtaaattttcaaaagattctgaatagtttacgaaattaataacagagttccttatatttcagtttaccatgcgtgttcgaaaaacttcaaatctatttttgacacagtacactatttgaaaattttaaaaaatttacaggggtgatgttgtaactataacaaatgaagaaaaaaaaaattctgacatatattttcgagcacgaagattgactaagaggttgacggtagtattcatctaaagagaaatgctatcatcctctctcgacaatctaatatcactattgaattaagtattgagttctatatattctaatttaataagctattgtagaatatcgatcatcatttgtaaaacaccaccccataatatatagtattaagcactactagttctttataacaatgttttaaaataaaacataaaaatacaaattaaaattgaatttctatccttattcttttacaagtatatcaatgatcattgttattaagtactaatagtgacatcttaagaatgattaggataattattacattaaattatgtaggatttactatttaattataccaaattaatatgataaattagataatactagacatcactgtaccttttagcatttctttatatcgaaaatagatttgatctcaaaaaaataattaaaaaaaaaaactcatttgcacaaccagataaaaacaaaaatgacttatcgaactacatttgagagtattcaacttccattagacctgaggcatataaatggtatattttcataatttgtgaaagtgtatagttgacgatgtagaataagttgtgtatgtgatcaaatgtataagattttatttcaaaactgtaacgaccgccttaataaattggattaaaaaaggcaattagcactaatttttattattttattattatttatgaatttatttattttggaccccaatattttaaaaataaatattagagttgtaatttctcaatttcggagatttt

SEQ ID NO: 391040 - DNA, 779 bp, Cannabis indica
agatatatatatatatatatatataaatgcatgatcatgtggtcatgatgcatatatgacttataattaaattcgaaataaactagaataattaaatcatattattgatattggaatgcacccctctttatgatctctaaatatttaaatattaattatatgataaaaggaacgtgtatttcactataatatttaatgtattgtatatatatatgatccataggatacatgtcacggtgttgtacgtaatctaataatatatatcattttacagttagatatactatttaatattcacgatacaaattaattaaaatatttttaaggatcaatacaccatatatatgtatatagataatatatattgtactattacacttttaattaatattgatcaaaacattcctatacatatcaacaaacactatatatgcatattaatatatgtcattgatatagagatatcaattaattataaataattcgtatatatgtatagaaaagttaactctatatatgagacaccacccttcagttgttcttcgaattaatctacataataattataattttttagggttaattaacactataattttcatttttgatacattaatacttatttatatgtaacgtccccgcttcaagcctccattggatccttacacccacggaatgaatggctcttatacacgagtacgtcactctggctgcttcatggactgatgactgaccctacagaccaacacgagtgttttcagcgtgctttgtcctcactc

SEQ ID NO: 391041 - DNA, 1640 bp, Cannabis indica
aaaaaaaaaaaacaaaaacgaatgattatggtattggtatgtatgttcaacaataatgtcttcgctttagctttatatataattatactaacttatatattctgcatgataacttgtctggaatttttgttgggtgccagccttaagataaggttcgtgaaagctttcatgatttgaatatgaatacatcatatataaatataataaatagtccttaacattgatacattacattaacatttataatatatattttttactaggataataattctctaaaacatatgaattcagttagaagtactttgatttttgtcaaaaagtaggatattaggatttctagtgactatttttgttgcaataaaagtatttcgcttttccttttgcctttgaattagcagattttctacccttattagctatgttaacagctttaagaggttttttgttgttgttccacttctttttcttgttgggttttaaagtagaggcaatatttgtctcaggtttcaccataccaatcgtagcattactagaacttggagctttattatctcccttctgtggacctccaatcaaactctcaaaagtctgaaggttgttgatttactcataaaagtcaaaagtcaacttgttcatgacgtagttgaagtaaagggcagaaaagctggagctaaactatttaagatcaaactcacttgagtctcttaatcaatgatagttccatacatctcaacttcttagaaataactagccatcaggagtaggtcttcacatacattctgatgaggtttcatccatgcattgatgaagtttttggtcgcatcaaaacgagcttgattcgatgccttccaaaattgttcagtatactggttcatgatctcagcatctatgagagtgttggcaaaccttgttttcaaggtctcaaccatgctagacagcataaagaaacgggctttgttgttagcattctaccaacgctcaaacttgtctcttactgtcttagttgcattctcatctgcttgctcaggagcttcctcagttaacacaaacagtgaattctcacctatgagagcaatattaatgttctctttccatttaacaaagttagctccagagagcttgttgtcaatcaacagagacacaattgagttgttcatagtcatgttggaaactacaattatcaattaatagaaatcaattataagtttatagaaattcatacacatatttaaaaattagtaaatatttaactagtaatcaagacatgtgaaaatacaaaataaacacatcttgaataatttctaaggttttaaactagatgatataaatgtcccatttaggcaagagtcaaatatatcattagttaaatagagttgtcagctcatctaaaatagacactattttagcaaccttttattcgatcaaaataagaatctgacgttgtctcgtttaggtgagagttaagatcattcttatttcatgagcttttaccattgtttctgttgggctttgtgccctaaatcaaattctattttaatgtaaccttttctattcaattatcaataaagaaagatttaattttattacttgtttaatgtgttatttggttcatgtgatcatctatttacttatttgat

SEQ ID NO: 391042 - DNA, 3256 bp, Cannabis indica
ggtctggtctcgagtttctagataagagaaatcttactataacagtagtgcaacaccaccattactctgagtagatcgttggagaggggtacgaccgctttatttaggaagtgtaaaaaggttggaggcattatcttacgtccaactggacatacattgtccgaccaggtgttgctgatacccttcctgttggccgtccaagtttgggtaacttcggcatcccaattgttgtccctgctgtaacggttgcacgacatacacatcagtatccgtccaggaggaggatgatgactcgcacaaagcagacgatgcggaaggtctgatcctcatgtggcccagctcatcacattgccaagtgccgaacaagatctacccgccatggaggagggagatcatgagggggacattgaggtccaggagattgaggagtaggacgacgtctgtcctggcagccctttcgaggtcgaggaggaaggagtggctgagcctccaaactttggagggtataatgaggctggggctagtgtctgcggacgatgaagtcttggtcgaaggggaggactacgttaccgaggagtctactgaagcagttgctcataagaggcaaggtgccttaggtaccagatgggtgagccctctgtccgaaataagtgaggcacacatgaaggctttagacaaggctgggtatttgggtggactggagtgttacattccttctccgaatcaccgggcaacgaacctgtagaaagggatgtgtgcctggtcgggtgctcacactaagcaaggggcgatggtgcctttgcacccgtacttcaagagggtggcggactattttcacctttttccgacccaattcactcccaagggcattaagtacttgtctgccctgttcgtcttctacgccattcaaggatggggtatgccatccccaaacgaggttaattagtctttgacttaaagtctacccccaagcaaagcaggtcggggtacttctacttttctcagccagactttaagtggttaacgggcaccgtggacagggatgtcagaaagattgggggttttgttgacgagtattacttcgtggaaggcatggattctacctatactcggttttaacagatctcgatatattaccgtccacccttcacattggtacttagagacaaggctcagaggattgtccatttgtcggatgctgcttgaaatatcactttgtttacctcggaggacaactttgtggagtacaagctttatccggcagacttaatacccagcctgtgaaggggagaaagaagaattgcagtgctggccgggctgagggagctgagcacgagaaggagctcattcaacttaagtgtgaggctaagttgaagggtgatgcaggagccaagtagtctgctcaggaatattctgagcaggagaaggaagcttaggaatattcagagcaggaaaggccgcttaagaagaagaaaaccctcccgactgggcagaggcccattgaacatactattcggatcagagagcctgatttacggccatccacccccatagaaggaaaggggaaagccatcctagatgagcaaagattcctcggatgatgatgccccgtttgtgcttgttcgggcaaatgctcctgccagcatgcagagtacttcatcttgcatttaactttcttgattttcatgccttcatatatcttatgctttttactgactatgttatttttacatcgtgcagaaatgttttatgattgaggagctcgggcttgtccccttcggccaagaaatccaaaggcggtaagaccccgtttaaagagaaggcaccagctgaagtggtcattgacctttctgaagaacaaactgttgtggaccctcctgcctcaaaattactaagtccaagagttctcgaggaggaagttcgaatggatccaaacaggcgaaaggtggatccaaactgatcagaagcaggtctgaataggttaaggcccctgccccacctctagtattgcaccaggagactaaaagaggcagagatatgctcacccactatgtgagtcactctgtccctgaggtgaacgagcagttggctggggcgaacaatgacttgtctttggagctggttatgggaggagttttgaaagacctttcatgggtaagtcttttctaacatttccctttcacttctctttaactagtgtggattgtaatgtcttcttttcgcagactggtctgaagatggcctatgcctaatcccaagctaagtcgactgctgctaagacccttgccatttccaacacaatgctaacggaagtgaacttggccaagaaggacgtcgaggaagctcaggttcaacttggggttgtgcggataaagctgggagaagtcaataagaggcttcttactgttgagaccaaagttgccgaactgaccaaagatctgcaggacatgccgttcaccaagcagctcgaggctgacattgcttctttatctcggacgttgccagtcttcaagaggaaagagagggactccggactcttcttcgcaggttagaggatgagaaaaaggctaaggaggaggaacataaagcaaagttatgaggctcggggaaaaggtaaatgccttagagacaactggtctcaaaattttttatgatttttggaaggccaatcccgaggcaaactttgattatctaggtgcttccaaagacatgttcctcaactactgcgttgcttaggcgacctacgggaatcccgaggcgaccacttccacctcccctaccgattagattagagtgttgaggctcctgttgcctagaatgacgatccttcggccctttcaaatctagctgacccatacaaggagcctgagactgctgctgttgaagtgccttctttttatcatctttttttttttctattcggccaataggctttttttagacaaagtgaccggtcaagctgtctttaaacttggaatatatttttcatttttgaacaactagctgaccgggcagcctttaatcccggacttgactactttagttattcaatgaatttcgttccttgtttataatcatcgtgcaattatgttttgtttttttaccaaatgctttgtactggtataggtgccccccaagtcatcgagcagacttatgactcttggtcactttttttttacaagtatgctttttttttggggttttgggtacgaccaaaccttttgtatgcactggatggtaaattaataacatgcta

SEQ ID NO: 391043 - DNA, 1080 bp, Cannabis indica
tccaataattcataacaaatatcacactaaatatatcccaccaaataaatatattttacttaaaaaaatctcgtattttatatattatttacattaataattaatttataatataattatatcatgactactagtaagaatttaaaatcttaaaatgataaataaaataaaatatttattaaatcaattaaacattacacattaaaaaaaaacttattgaatgatttaaattctatagttaattctaatatatgcgagcagaaataaagaattgtgcaaaaaggagatcaccaacaatgtaagtctttttttacaatttagatgtcaaaatattatttaatttgttgtgcatatttaatgtgaattaaatcgtattttcttgtgttaatttcgttttcatggttgtcttttttcttttaggaaagtttttgtataagagaaaaattccctttatgaaaagtttgcttaatattgatttatttatggaaaatttgattttctttaatggtagttgctctttttgatttttctatgaatatagcagatcgtataatatttatattgcataaattaaagtctaaatcgtgatcttgaattttagaaattttttcgattctgcctattctgtagtgtgatttagtcgctgcaaattagggaaagttttatacagctgtgaaaacgtattgtggctgtcactagagtttctataaattataaataaaacctagtgagcaaccaaacgttatcatctcttctaatcttataattttatactttcatctttgtgagaagagagcttgtttagtgaaatcttagagtgttctactaggttttagtctctattttattgttcttctactattcttagaatagggtgaagagcttcgttgagtaggagaagagtcttcgagagaagactgacttgttcaagacttactttgggaggaagtaagcacatgagtcatcaaaatttgaagggagttcgctatttggtagggttcagaatttggattggcaaagtgaattacaaagggttgcgaaaaaattattagagagagtctaaatttgtttaagtcaatt

SEQ ID NO: 391044 - DNA, 1515 bp, Cannabis indica
gacgtcagtgattgggtgatgtgccttttttagggcaatttcaaaaaaaaggagaaagagaagagaacgtgtgatgtctcagtcattagtgggccacgtcacttgtgttcccccaaagctaaaatccaaatctatcgacatttatttattttattttttattaataatttcatacaaatatatttaaaatttaaacaaaaattaattagtgtagtatagtatgaatcactcctcctccaccagctttctaatttccatatataatatttgtttaaaaaacataaacaaaacaattatctttacataaagtgtattttacacttaaattcattacaaaaattattacttaaattcgttaatttggaaaaataaaatatcataaattatttgtaaacaacttaaaatgtctatattaattaattttactatttgagccttactcaaatatatctaatttatttattaatgaatattaattttacgaataaaagatctcataaaactttaaaaaagggtataacaaaataaaactagaatctaacatattttaagtttttttcctttctctttttacaataacataagttaaatgtatttagctttaattgaccaatatatttagctatattattgataaatacactcttatagttaaagttcacaacaatctcaatttaattttatttatcaacattaaataacaccattaagttctacaagaatttaattaattttaaaattaatttactacatacttctctttaatgttgtcttttaaactctttcacactcaagatgtgaggtgcacattaggattattttgtaaagaataaaaaatatgaaaatacagtgatattagaataaatatcaattttcacccattcctattattttaatctatttttagttacaaatttacaatggatagttaagaggtgtcattgtaatcaattttctaaaattttatttgtaccctacaattaaatacacccaatttatatttttattttgtttaatatattttttatatcaactttttttttatcttttttatcctattgtaaaaaaaaattacatatataaatagaatatattttaaagcaaaagaaatcttagtagtaaaaatatagataattatttattatttaatatataatatataatatatataaacaaaattgagaaacttaaattgacatcaacaactagaaataaattattgaaattaagaataaatattaaaagtaaattttaattactttctttaatattgagatgcataattttgtgaaaaatttagaggttttgacagctaaaccctttttactgtgtttcacttgcatttaactatctaaactaaaattttgacagtaaaactccctaaattactaagctggcagcaaatttaaggtgtcatgtcatccggttaagtatcactatggagtgcttatgtatacactcttgtacatatgacacaagtatattggtacatctaatattattatttaaaactta

SEQ ID NO: 391045 - DNA, 1366 bp, Cannabis indica
acagagaacaactcaaaatcttgacaagatcaagattctggacacaatggctttagcacgttttgaggtagacaagttttcaggcactaatgattatgggctatggacgattaaaatgaaagcactactagctagttcatcaaggcattcattaggccatagacaaagaagaattgaaagaattgggtgaagacaaaaagaagatcaatgagatcaagattaaatcacacagtgccatacttctgtgcttgggagatgaagtgcttagagaagttttagatgaagagacaacaatagggttatggagaaacttgtttcaatctatttgaagaagtctttggcaaataaactctactttaagaagaagatgtgtaccttgaagatggatgatacaaagaaccttagaaaccatcttgatgaattcaacaaaatcattcttgatctcaccaacttaggtgtcaagatcgaggatgaggatcaagggattctgttattgagctcgctgcaaaaatgttatgaacattttgtggataccatagtatatgggaaagaaaccttgacaatgtcagaggttaaagcttccctgaattcaaaggaaattcagaagaaagattggacatcaatggtgtaagattgtttgcaagaagcaaatcagagtccagggataccaagaatggtaatcacaagtcaaataataagggtaaccattccaagggaagtagcaatggtcaaagaccaaaatcaatgtgagagttcgggtactagtggagaagaaacctgtagatcgtccaaggtagagcaatgtgagaagaagataaagcttcatgcaattcttgagtttgagcattattttagtattttcattgtttttcttagtattatagtcttatgaactgatttttaaattgtttgtattagttcttaactatttggacctactctaacgacatttagcgatgtgtgtggacaacgctatagatatgattgagatagaatgccaatctcttacaattttgttgcctagccctataaatgacatttctcgacatgatgacgactttgttgtcgacattggattgttttattgccaggatatgaattcatgacatttggcgacatttaacgactatgttatcgataaaccacataaaacaagtttaagtagtgcgagaccacctcatcatagttatccaacaaattaccatcactacaacaataatggtttataccaacgccactattaccaacgccaaaaagtcctcattaaaaatggtactatcaataacgacacttacttgtcgttgggacaactattattattttttttaaaaaaaaaaattatcatcaataacgacattgtcgttgg

SEQ ID NO: 391046 - DNA, 1107 bp, Cannabis indica
aaatttcactttacatgcttaaatgagtaccttctatcacaacaatccccctataatatgttagtttttagggttcatatcaagtcgcagtggaagtagaaattgaatcaaggttttattaagaaattattggatttgatatgaaccttaaagtctaaatctcaacacaatattacataatctaaatctaactagttggaaaatgaaattacatcttgttgtgttggtcttgcgatacttgttgacttagaatttttccaaccgatagcggagtcgtatttatgatcgatattacgacgtgtgaaaaaagagaacaagtaaataaaaaggacacaacaattatatacaggtttggcgcccttagttcgtgggtaacgacctacttttcttttagttgtattgatatgagagataataccactcaaatcaaaagtcttgtgagttctagagtggctctcttaagattacaatagtgagaatgtgaggcagtacttgttgagaatattttaccaggatctagatttactaacaagtatgttcattaacatcataaaatgaattctactaaaataatgaactaaatacatatgggtttaagaaaaccttacattgattgtagcggaatataatgactcttttcgttcaagatctgtagcccttcattcctttctatcgcagagcattatcaagatctgaacctggatctctttctctcctttgggtttggttaccaccgtcttactcacaatgattgagtatttaactagctatgtgtgggtatggcactcattcactcaaggttcgaatggtgaagaacaataaggagactaaaatcactaaggaaggaactctctcatctactagttgtttgacatagaaaactgggtttgatttggtcaaagacatcaagtggatgagtgagagtccttttatagtgtttcaaaaaggaattagggctgaattattatatggattaaaaaagaataaaatattgggaaaaattcaacttaaggccgtacacattaaaggaccagtttctaatagaattttgcaactttatttcaaccacttattctattttcaataataccatattttcaaattcaa

SEQ ID NO: 391047 - DNA, 1856 bp, Cannabis indica
agccattacttacagcaatcttggctttgcccttggagtttgctgtagtggtgagatttttagcatcatatttgtcatgtgatgagttgctccgctatctaagtaccaagctgctgagagattagaagtagagttagtctcaaatactaaagcttgagaattatcaacaccaggagaggatgaggttgatctaggtgtggccccagtgaagattatgtcacatttgtgctaacgtttcactattaatttgtgtggccaactctgtcacatagttggcacattggtctagtgccccgaccacctctatttgtgttgtttgatctacctcctctgttatcacctctgtaatctcaattggagtatgaacctcttgtgctattgagatttgcattggccaaattagcttgcacattttggagagaatttgcagtgtgttgttgaatgtacatctcttgactctgcaacatgaattggactcgttgaagtgtgagacgttcggttcttgatgtgaggttgacaatcacagcctcatactcaacccacaagaatgtagagcactagatcatcatcgttgattggttggccagcagctacaaggtgatcaacatattgcttcatttttgagcatatattcctcgattgagaaagaatctttcatgatggtttgaatgagatttcaaagttacagaagccttgcatgggatctggtggcaaaaagctaagcaaaggtggaccaaatttcagagaaaatttgacaatgaaatgacatgtcccaacatatgttcagcaacataattggtcaaatcgcatccattgttggaaagcaaagtttgaaacattacctgcaagagatgttagaggctaaggaagggttccacagatatagccatcaagatcataagcacacactgcagcaagaataagtgatcgccaaacagtgtagttgtgcaatccaatttgagattcagggggaggataagatagttggggagtggagtttgagcttcaagagtgggaattgaatttgcagctcgagcttgtagttgtttgactatttctccaaatggtggatcaagtcaaattctaggactactaccgttgtctccataattcaacatggctctctaataccatgtaagaactctgaatttcaaagttagactttgagcaagaaagaaagaatgtgaagagaggacgagagtgaaagagtgggaagaatgctcaaccttcgatggcttgcactatatctaaactaaaagtagttacaaattacaattgaataagttagagaaaatattactaattaactcaaacaatttctaataattctaactaacttgcctctaagagcataactaactttttttttattatttttttaaaaaaaacatagctaacttttagttatatatttgtgttgtttattattaatttgaatttgttagcgtagttatgtaaatatttattataattttgaaatagacaaaatgctaacgtaccttctttgtccaaaataaaaactagtatacctttagttactttaaggctagttgaaagacaaccaacattagtggtgaacaaagaaaatgtaaaaatggtacttttaggaagaataaattacaaagagaagcatttgagaatttttttgtggtaggttaagataaaatttcagggtagttcataaaacatctagaagctagaatagttaaagaaactaaaactaagataggttaggtttgatattttataaagttgcaagcttttgcaatatcttttagtagtagtagtagcagtggcagggccggccctgaaaatatatgggtctaagacgaaataaattttagggccctcaaaaa

SEQ ID NO: 391048 - DNA, 348 bp, Cannabis indica
agagagagagagagtaaaaatgaaaatgaaatgagagatcagggggtagttcagggtttaattcatttgttgaagaatttttattgaagacaaagtcgtcagtgataattttagaaggaaaaagcctgccttttcaacgacaagtttttttaaagaaaacattttactgatgactttctcatcattaatatatttatcaatgacaacattatcatcatgattaatagggactgttgttattgatttattattttgtaaaaaaataaagaaatacatttttatcactgacgatacatgaatgttgttggtgatactcttacttctagacgttattgttggaaattattt

SEQ ID NO: 391049 - DNA, 1412 bp, Cannabis indica
gatctgactcacacacacaagcacacatctagatcagattaaacaacaagagcacaaagaagttacgtggttcagtcgattactcaacctaatccactgaaggcagaagtaacaagtcttcattgtgttaaagagtctcttagtacaagtggtatctcaatataagtcccttacaaatgattaggtagtgaccttataaaatggtcaaatatgcctaaggaaactaatagaaaaatggtcggtattgaccaaagaaacactaaatactctaaactaacttcttaaatgtatgaacagctataattggcatctacacctttgtaatgaaaataagtatctagaaagagattatccttgatgaccaaaagaaatattacttagaaattgttatacttgcattgatgttacatgtcatgataaacatataaatcagtcaaattaattgcattgtaattatctagagtcatacttcccaacttctatttgttcatattgaaaacatgtgatagacagtactttgtgaatttgtgttacagatgtcaattgttaccaatataattctccttgtaactgaaaatattactcgctttcttgtgcttgcaagggaaccaattattccaaaacttgataaggcatacaaagtaagaaattttatttactcatgctggttgttttactttaaacaattttaacatattatttttccctattccagacaagcattgtgtttactttacatgaaggccctggaattttgtttaaagcattggctgtatttgctctaagggagattaatttgataaaggtaacaaaagtctgatctttcaagatgctttactgaagtagaacttgatcatgaagttaatttcggtgcaattttagattgaaagtcgacctcaaataaagcagccagtaagagtggttgatgactccaacatggggaaagctaagtgagtatcatttttcaagctactttaagaaataggccacaaatatatgtcacccatttaaatgcattatcaactgtaatttttgatattctaaagtaggcaataatgcgaataattaacaagccacttactgtacctaggaaccactactatctttgaccttgatatcatgtgatccaggaaccaaaattatttaaactagcggtgtaatctatatgtctaggaagggtgtcagtggaattttaacatatctctggggtgaccctttctgcctctacggagaggtttctatgcttaagaatctcagtggtgactatctatcatatccatgatttaagtcttctgtgatatctttaaaatagtctattctgtccctgcactatgttcgttgtatatggtggtaaatctcaaatttggtgtaggtttattcttcagataaagtcagaagaagaactaaaagaa

SEQ ID NO: 391050 - DNA, 546 bp, Cannabis indica
gttaatgaccttcgaggcaattttatagaggacattacacaaagagattggtctcatatcactcatttgagacgggttcttcttttttggaattaaaacaatgtgtgtattgttaattgaattcgggaacttacttgtgaaagaactctggaacaaaatgaaccacatcctgaccgacaatactccagtgcttttgataaaacgctggggtcatgccatcaggtcccggggacttatcagggtgcatttggaataaagcacttcgcacttcctcctccgaaataggcaataaaagttcatcattttgctcacgggatacagaagggcggactccatcaagcaccgtgcctatatcaacattggaagattggaaaaaatcttggaaatacccagtgatgacatgcttcaaccccgaatcccaagttggcttatgctattgtttcttttcctggagcttgcaacgaaatggaagtatttactattcttgtcacccaaatttagccaaaattgctttgatctttgcttccaaaagatttcacgttgagc

SEQ ID NO: 391051 - DNA, 2438 bp, Cannabis indica
ttgaataacttatattaaatatcggaaaactcctaattcagatacgcggttgtggcttgtagttgtactgagatctaagaccacttagctatgaaaaaaacagtcagcaacatattaaagtttgggaatctttaatcaatggctgcttgtagggttcactgatgcctattcttcggtgaaagtaatctcaattcagattacagatgtagtatgacatcaaagtgaaggtgctatatataatagagattatatatcacaaggaccgatatgaatgaagttgactttattaacatgccatttatcataaagacaaaattcatatcataacgatgattaatcatgaactcctattcatgttattagttttttattcaatttaaagtttcttagagaagataaatcttacgacttctgtttttgggaatctaataatgtggatggctgggaacatgatttataattattgtatcttgactttcttaacaaatcgaatgctggtttcctttaaatgttaattctagagctagaaggttgtgcacaaatttagatgagatctaaattataattctgctagtgaattaatggtactaaaggataaagaagtaattaaagggtaaaattataatttaactaaaagtaattacgaacttacacatggagggctaatcactagaattagttatatcaatggacactgcagtaaaacttagtaaatataattctataattactaagagtttaattccatatttatagtggagtaatcatggattagtaaaataaaaattatttatttgatgagactcaataaataatctagtttagagcttagagttataggcccatggtccccaaatcacaacccttgaaacactgtcaagggtaggaataaagagtactataatgatgttcgaaaaaatctattttgaattggtaaaatagtaaataaataatttttcaaattaattaaataggaaaaaggtaaaaattaataagataaaatttatcgagacaagatttgttaagacaaaagttgtcaagacaaaaaccatcatcctttcctaaacagacaaggttaggcacctgcatagtagttgtcctcgtggaatttgtttttttgagttaattaattagttaattaattcaattatgtaaatatctaatttaaaaagtggttatagatatttcaaatttttgagatgttcactaacgtggttgagagattccctcataaatattagtaactgaatttggttataggtatttattgattgaaatatttaaataaaatttaattaagggatttaactactataaatagaagcttgacttgagaaattagaacatcacttttatactgtaatttttgaaattaagagagaaaatgaaaatagttttttctctcaaagtgttcttgcttatgtgttgtgaaattagcaagaacatataatacactttatcctagtatctcacactattccttgtatgtggtggaataatttggatggcactagtgtgagttaaaaattgcattatatagattaaggtacaatatacgagaagtttcaagaatatcgtgatagtcatcaagatataattattctaatcatacttttatatttaatgtacacacatctggatatccaatgagatatggtacaatgataattagataatataaaactcttttgttgcgtatattatttagtaccataaaatcaataattcgtatcaagagcagttccatgaatgatgtattggttttatgcattatatatatgtgtgtgatacgtatgtgaatggatggtaattttattatgaatgtatgagaggtgctaaatcggtcaattatatggtatgatttggtgtaggttctattgttattaatttttaaaaaagaatgtaagccaatttgggacatatgaaatttatatgtaattttaactttgtaaaaattaatttatatgtaaaattataaacttttataatgctcaaaagcatgtgagcctagttacgatattgaaaccaagccatgcaccgtggagaacccgaccatcgcatggagcttaggtctccatgacaccagccatgcttcatcaacgacaacaaccccttgggcctcaggttttgtacccctccacccagtccacgtcgtctagccttagagacgatcgtaccaagggacattgtccctatgattgacgtggtttgatgacgtacaagcgatttgagcgctggtgcttcatcatttctactctgcaggaccgagaccaaggtgttctaaccacctatagacgaatgtggacttttagggtccatagttagtcgattgggatgatgcatgcatggaaatttttacgttttcctagtgtgtgcgacccatgcgtttcttgttgggaattattttatcaggatctagatttagtaccatgtatgtt

SEQ ID NO: 391052 - DNA, 931 bp, Cannabis indica
tttaatgaaataattaattttttaatgttgaggaaatgggtttttaaaattggtatcgtttttacattatatttttttgcattgtattttttttttaattatgatgttaatgaaattagttttttttgtctcttttaatgaaatatttagtttatttaaatgttgatactagttttaaaagtttgtattatttttaagttatatgtttttgcacaattgtattttttcattatgttgttgatgaaactgattttattttttgttcaatttttattagttaagagcctagaaacttgttttatttttaaaaattttttaatttagtttgttattatagttgctatattatttttgattttattttatttctgtatttattttttaacagataaaagcagtctgtgattctaatcaattggagcttgagaagatagttgatactactaagaaaattaagatacaaaagaaaagagcatgtcgaaggaaagtatgtactatgttattattgaaactaatttgtaatgctttattttctattcactttttggaaatggtttctcatgaatctgttgttttgaaactggattctggatgcatatttatctttaatatgttctaatgttcaattgtaatttattagttgattacaatgtatattgttttagagtaataatactgagaagggtaaaaaagaatctacttgtaaagaatattttagttatttaaataattagtttacgtgaattaatttttaatttagattacaattaaaaacaaagaagaaatcacttcctaaaacactgaaatataaattaaaaataaaactagtttcataataaaatacttcataacacataatacctcataaaaccggttataatttttttttttaaaaaagtagagatcagatgtctcagatataataaaaata

SEQ ID NO: 391053 - DNA, 869 bp, Cannabis indica
aaaaatatataaaatttcgtatactcaagtctcaagccaagtggagtttactgtatgcttagtgggtaggtgggtggggagagtcataaagttagcaatttgcattgactttttgtgttcctcaacttgaagatgggacacccaaaatataaatcaccaccactaatatattatatgttagatatattttttttttttttgaaaacgatatgttagtgcatatattcaagagtgctagatagtggtctattgttatgtttagcactttctataaaagacttttaatggtgtactgtaaattgtaccaattttggcatatgttaaaaattgggcattgtccaaattttataataaggtttcaatacattaggataaaattaacatgtttttcattaaaaaaaccttattaaatacataaaaaacatgtaaaaagttattaattatggtggcatttggtaacactttttcaatcagttttctatttttaaaattgaaaaagtgaaaatatttttcaaaaatatgttctataaaaatgttttcactttttaatttttgaattgagaatcaaaattttaaaaacagaaaaagattactttcaatatttttttaaatagttttttttcttaattaatattttagactccgaccagactcagacccaaatccccccacgaccttagcgctgaacccgaacccaaatccgacctcagacctagaaccgacttaaataaaatcaaaaaataaaaataaaaaacaaaaatagatacagaacgcatttttatttttcaaaaataagattttactttcattttgtgattaaaaaattaaaaaataaaactattaccaaacgatacctttattaactaaca

SEQ ID NO: 391054 - DNA, 915 bp, Cannabis indica
ggaaatagctcacgggaattgaacttgtttatcactcaactcaacaaagtattctctctcaaagaccttgggccacttaattactttctcggcattgaagtctttcgagacaacacagggatacatctttcacaaggcaaatacattgcagaactgttacaaaaatggaactagcaaatgtgaagcctagtcctacacccatggtggctggaaaacctttatccttgacagatggggagcctctcaattcaccaactgcctacagaagcacgattggagccctgcaatatctgagtcacaccagaccagatattcttttgctgtgaataaattgagccaattcctcaaggctccaaccactgcccactggaatgcaacaaagagagttctcagatatttgaaaggcaccatgtaccatggagttcacatttcaccaggaactaatcttaatttggttggtttttcggatgccgattgggcatgctgtccagatgacagaaaatccattgcaggctattgtgtttacatgggagattctctgatttcgtggtcttcaaagaaacaatccgtggtagcccgatcaagtacggagtccgaatacagatcactcgctcaactagcatctgaactgtcatggctgcaggaactattcaaggaaatgaagctatacacttcaacacctccagtaatttggtgtgataatatgagtgcaagtgcactagcctctaatcccgtttaccatgctaggactaaacacattgagctggatgtgcacttcgtgagagacaaggttctacaaaggaaattggagattcggtacgttccatcgcatgatcaagttgcagactgcctcacaaaaggattatcaccagccaggtttcatttcctgatagacaaactccatgtgaaagaatc

SEQ ID NO: 391055 - DNA, 1355 bp, Cannabis indica
agagagagagagagaaaccagaatgagttttattttcaattaacacttagccagaaaatgaaagactaaattccatttctttgtaaaataggttaattgaccattttgccctcaatgcatcaaatcctcataaataacatttaagggcaatttagacattttattccatatacacattcatatattctcaattaaattgtgctataacacaatcacacaataaaataattttggaccctgaactcggttaggacccaaaatacctagttgtgactaaaccgtgccaatttatcaagaatcacttacagtaagacaataaaaacatactgtataataatatagtctattagcacaataaatatcaaaattatgattttacccttcacgggtcaaaatttcaaaatacccctgactaataaatgaggtcttaaatgcaataatttcatataactaattatctaatactataattactcaattatagctaatttattttaattttgattgctaatccattttactaatcccgagatattatagagatgagcatataggtaatgtttggaataaataaattgaaggcgttaattttagcacataataatttttagggtattataaaaaagacactaaaacattgaacaattacattttgaaatcattcatgggttagaaataaagcactgaatattcatttatgtattttattaaaaattactacaatggcgtgaggtgacaatttcctctcccaatgacgaagaagaaatccaaccataagctagttctattacaacgttctgatcagatatttgacttgctaggaatagaaggcaataaaaattcaacatgtgtatttgacgatgaatggatgatagtcttcctttacaacatgaggagattgagagcagggagtttgagaaagatcttccagattcgtctaacttctcagacctaatttcaggaaggaaggaaggaagatgtgaatctacgagaacatgcctcacagcactgggagaagttaaagccaaacatgaagtatgtaggagccagacttcactatacacaaccattgacaaaaggaggaaaggtaattgctaaacttaatcttgatgaaatttagattgagtctaaatattggagtacgtcattactatgttttgttttgggtgctaatcccccaattaaggtttttgagggctttgcaagaagggtttaggatgatctagttgtggaacaaattgttagaatgaacaatggggttactctaatcaaattcagtgatgaggcaacttgtgattatgtactagaggttggggtggttcattttgacaataagcttgttatcatgaaacctt

SEQ ID NO: 391056 - DNA, 1324 bp, Cannabis indica
agactagtaggcatgtctaaaatgaaatagtgatatatattgattacatgcaacaaggaagaaaattttcagcttttctttctttctttcttttttcttttttttttttttttttttttttttgtaggaaacataaatttcaattgcagacaatgagagagatcacatgataatgcaactttttttcttttttattttattttttaaataatagaaaaactaaaagttgtgcttaaatatgaattgtatatggcatgtcgttgaaaatggtgaggtcaggtgacctactcgtggattgcttgaattacatgctatatatatatggacttgggtaacatcgatctaacatgatgggctaccacaaaattacctatactttgttatcttacctttgtaatcgtcaaaagtttttgatgaaaattcaaagttcccatttctattttaattactttcatattataattaattatgtttactcaacagggattgagatagttcttatattttaacgttttggtagcaaatctggtcagaattattgtagactcagaatgaacatataattaaatcaaacattgataaaaattattcccaatattatatatgtaataaaaaaaaggttttacaatcaattacaattattaaatttagacccattaatcgttttgaaaagataagtgtgtagcttattataactgtatgtaatatttgatgtatattttggatacatatataccattactaaaataaatacactactacaaaaacctccttttagaggtgatttttaagtcctttcagcatcggttttggcaaaattcgctaccgacgctaatcagggcgacgctaaaaggttttcaaaaaccgacgcaatatatactcctatggcgtcggctattatctagggaccgacgccataggggtatatatggcgtcggttcctagctaatcaccagtgccataggtggcgtaggaaccgatgccatacataagcgtttttcagttttttttaattttatataatttatttaaattatatatttattaatttacatattattttatttaatttaaattacatatttattttttaaggcaaattaaatattatttaaattaattttaaaattggctaaaatacataatttcatttcataaaagtaattaaatattacacaaacattaatgtaaaattagtccaaaatattaataagttaataaatctaactacaagttaatctaaaaaaattacataatgaagaaaaattcttgggcctttcaacctcagtcgtcatcgtgaatcagcgccatcaatcgttctatc

SEQ ID NO: 391057 - DNA, 795 bp, Cannabis indica
ggtagttacagcacaatctaaatttgtttactcatcatttctttatataatgttaaaagcggtgtatttttgggatagtttttgtaaaagtaaaaattaggtctggccctcttagccgcattgatattctccttcctcttttcttttttgtaaagtccctcaaaatatttaggagtactaacaatgtggatgtaataatcttcgaacacctccttccagttgataaatgttttatcatgacgaggacgaacatcgcatgtgcagcatggcatttttgtctgccaaaaatcgttttctttcttatcatcacacaaaatcctaaattctttacaagtgcaccctaatctgcccacatcattacctggaagaaactccaaaatcttcatcttaagatctggatgaagttctatcaagcacggaagactcgaaaacccggcctcttcgcgaagctttaccttgagaggaaacgcaagctcatctcttacactggtccagaattgttcaaacccatcacggtgttgtactgataatggaaatctaagtattgattccagtttatgattgtaaaaaaataattgaaaaactattgatccttcttcttgttttgacttgacagagacagataaacattgttcaaaactttcgaaatccaactctactgtttgtggtaatttactttcattcttcttcaaaatatcagatagagtgtagcaaaacgacaccgttgaggaaaaaggtagttgatgaaacttatgattaatttgatttcctgaaatttgatcatatccaacgaaa

SEQ ID NO: 391058 - DNA, 1817 bp, Cannabis indica
cagaaaaaagattactttgcttcctttatctatggagccaataccatagaaggaagaagtgatctttggtctgctctttcaatgataaatgtaactaaggcatggattattcttggtgattttaatgcggtgttcaatcatgatgacagacaaggggggaatgcggttagtgcttcggagctagtggattctaataactggattgtcaactcttctgttgggccaatgaaacgtacgggattgaatttcacatggactaataaacagaatagtaggatctttcccgcatagaccatgttttccataatgaggaatgggttgacgatttcccgaatacttcagctcacttctcttgggagatttgctcggatcattgcctttgtgaggttcattctaatgctattgagtttattggtagcaagccatttcgattctttaacttctggaccaaacacccatattataaaaggactgttatggatagttgggggaagtctttgagatgtagtggtttgaaggggatttatctcaaaactatgcgcctcaagcacaaactgaaagtcttgaacataaatgggatagggaacattggagaggtgtatgagaaggccgaagattcttacattgaggctcagtttcactgccaagctaatcctaatgaaaattatttccttggtttggagcttgaggtggctaaccagtttcacattcaggtaaaaatgtatcagagcttcctgtatcaaagaagcaaagtcaactggattcaaaaaggggatagcaatactgcttattttcatgctttattgaaaaaaaggaaggaagaaaataggattgtttcgtttgtgactgagcaaggggacttaaatgatcattttcctgatgttgtgcaacactttcttagccactttcagagcattatggggaaagcaaagcctactagtatggagattcaacctgattgcatagctttggggcctaagcttaaccttgatcaataggtttatcttctaaaaccattctctctcaaagaagtcagagctgtgatgtttagtatccctattactaaatctcctggccctgatggttttggttcggaattctttcagtctgtttggcctgaggtggggaaagatattcacgctgcaatagctcacttttttgcaaccaaccaattcccggcagagctacataacacaactctctctcttattcctaagtctgagagtccttctaaagcaattgactaccggcctattgcttgctgcacaactttatacaaatgtgtgtctaagttgatctgtactcggcttgctaatgttctgcctaacttagtgagccagaaccagggagcgtttgttaagggccgatccatagcttacaatattcttatccttcaggatatcttgaagaactatagaaggaagaattgctccccaagatgcactataaaaattgacataagtaaagcttatgatacggtcaattgggattttcttgagaatcttctggtggcctattgctttcctgaaaagtttgtaaagtggatcatgaactgtgtgagaaatacgtcgtattctttactcatgaatggaaaagttcaggggtctttcaaaggcgaacaagggcttagacaaggggacccaatctctcccctcctttttatcctagtcatggaatatctgtctcgaagcatccaaaaagcggccagagataaggattttaagtatcatcccttatgcaaaaaaatgaaacttacaaatctttgttttgcggatgatttagtaatcttttgtaaagggaatgagggttctctcaat

SEQ ID NO: 391059 - DNA, 1239 bp, Cannabis indica
tgctgcaatgtgctctacaaagcagctacaaaattgatctgtcaaagactgaagattgtgctacctgacctagtatcacaaaaccaaagtggttttgttcaaggaagatttattggccataatatcatgatatgtcaggatctcataaggcattatgggaggaaagctagcaaggctaactgcatgattaagatggatttgcaaaaagcctatgatactatggaatgggattttatggaagaaatattgtatgcatttaagtttccagaaagtttcatcaagcttattatgatatgtgtaagaacaccaaaattctcattgatgtttaatgaatccatgcatggattctttaaggccaagaggggattgagacaaggggatcccatgtcacccttactctttgtcctgggtatggagtatctatccaagattatgaagaaaatagggtcaaagaaggatttcaaataccatgagaggtgtggggagctgaggctaaatcatcttagttttactgatgatgttctacttttctgcaatggggattacaaaagcatttattttattctacaaggattcaagctattttcctatacatcaggtttattccctaatccttctcagacttctgtctactacaataatatgtgtgatactaatattcaaagaatcctagatgcttctggtttcaaaaaacatgaagtgccttttagatatctgggtgttctaatctaccgcaagaatttttttttgaaaagagtgctcaatacttgtggagaaaatggttgccaggatttgaacttggaattctagacattttgtcttttgcaggcagagtggtccttattaacccagttttgctggttgttgtgaaaattcgtaaacgcaagtgcacgcaatcgtaacaagtaataaagtgataaatcgagtatcgtctccacatggattgaaaattggaaattaatttataaaactaattactcacaaattggcttcaacaaaaataaaataaagagttgagaatatataaaatttaacaaacacaaactataaagaaaacaagcaagaactattaaattggcctaaaaatgtaaagttgataaaatggtgcaaatgagtattattgtaaattgataatgtcaacgaggaatttaaaatgtcataatcctttttccaaagtgtttatggttttgattctccaattaattaacatattcctatgcccaattaattttaagaata

SEQ ID NO: 391060 - DNA, 531 bp, Cannabis indica
gaaaatgtcactgccatacaaacgagcatgctaccagcatgtacaccaacatgcgccaccacttgactattacttggccaacttgtgggtatcactaagcttgtaatgtgccatcttgacacgcacgttacacgtgacgtggaacacccttttgtcgcttctccattggtcggtttgaaaaattttcttgtgagcaatctgatggtgtggttggtgaacagagttgggatgaaaaaatcatcactgatctcttcaatggcagggattgagagcttatcttaacatttagatttcacaatctgaaatgttagattattggtactggtctcatcatattttaatttggattttacactgctaaagatgcttatagatttcttcattgagtttacttgtcaatggtgagtgatgatggaactttcatttggaagaataatatgtataacattgctaactattaccaaggtgttatctcatacgttgtattgggcgcaactaataatgtatgtgtagcaatgctcaaatatatca

SEQ ID NO: 391061 - DNA, 800 bp, Cannabis indica
gccttaatcaacacctcctttccacccatggagaacatactactcttccaacctcgcaacttgttccaaactctattcttaatgacatcaaacaattgactcttgttccttcccacaaaagatggtaacccaaggtacttcccatgattatccactattctaacacccaaaaactcagccaactcacttgacacctctgctggaattaacttgccaaaacacacctccgacttattaaaattgaccacctgatccgaggctaccgaatatctatcaagcaatccagtaaatctttggcactcctccatagtatcatcaaaaaacaccatgctatcatccgcaaagaacaaatgagacaccgcaagacccctccttccaaactgaatcccctgaagtccccccgctaactcctcatgttgtatcaaacttgaaaatgcttcagcacaaaagagaaacaagaaaggggataaaggatccccttgtcttatacccctttgtagatttactttcccttttatctctccattaacaagaaacgaaaaggagaccgaggtcacacaacccataatcttgtcaacccactccgtgtgatatcccaaccgtagcatcatcttctgaataaagctccactcaaccctatcataagctttcgccatatccaactttaaagctaacttcttcccattctgaaattgattcttcctcatacagtggagactctcataacctataattgcattgtcatgaataagacgccctttcacaaaaacgcactttgcgtctccgaaatgacttcatct

SEQ ID NO: 391062 - DNA, 738 bp, Cannabis indica
aggttatgattttgaaagagcctccaacagtcataacaaaattagttagtttattctctttgagtcttaagtgagttgtgggagtaaattaaaaatgtctcaattgtagaccaatttctaacaatcatccaccttcattacaaatcgagactcagtcaggtaggaggaaactgttctggacatggcaagtgacacacttttatcttgttcgaaccacgttatgtgttcttctcaatttactttatttttctgtctttgattttcagtttattagttcatgtttagaacttctgattatgatcattaactcatcattgttgctcttgttttgttgatattgctctttgagacgctattgttacaacaagtggaaccaaagcttgagttcgatgtgcaagaacatatacaagaaaagttcaagaatggtttttggtcgattcgaggttgacagaaacatatcatgtggttcgaactgttagagattttattacaatggaagataaatcaagatacattacaattctattgtaaaataatataaaggttagaataagatattacaatacatatatatacactatatatattacatatatatataaaaagtagaagaaaagatagattacacaatattatatcacacacatatatataatatgaagaaatatatatatatatatactcacttacaaccttgagtgtagattagtgggcatcaccatgacttgaacaaggtat

SEQ ID NO: 391063 - DNA, 1082 bp, Cannabis indica
ccttctccagccccggtgacttcgccaattagttctccggtaacgataatctgcaaatcaatgaatacataattctttagctagaaaacttaaatcagaattaatagtgatcatacacaacaacaaaattcgacaacaaatatcgaaaaatcaacaaaccaggtaaatacactcaacaatcaaaattatttataataattatgatttagaaacttacaaaatctaaaaatatatatcatctgaactaaaaaccagattaacaaaatgatacaacaacaaaaaccaattctaccaatagaataaaaataataactaaaaaccagatgaaaacttaaaaagaacagcaatacagaaagtttaaaagaaatcggtttcaattataaacttataattagattccaatattacttttcctttaaaaatgcaagaatggaacaaatcaggtgtgtgatcaaaatatgaaggccattaatggatagaaaatatataagttatgttgactacaaaatgacaggattctaattccaactaattcttcactagcaaacttgatggagctgataaaattgaaataaaatgcaacgaaaatgacatagacatatcacactagatttcaccgggaacaacaccaatgaagctatgagtgacaatgtcatgaggttctacattgagctcaaaaagacattgactgtaacttattctccactatgcatcacaactatagaagagatagttatacaaatagtaaaaaatctatctttcgaacaaccaatacaagagcaaagcaagacaatggaagaactggttctacaaatacacaatgaaccattctaccatcaattgataatgaaggatgttatctcaatttttacactctggcgtagcattgcacgatggtgacacatggaatcaattttgtatacctgctcgcaagagatatactgaataaagcaccatgtatatttgctcggacgaagccttcttaaccgggcagtgagccatccgaacagcacaccaacatttagcagtttcaactttcgcatcgtgagactgaagaaatccctataattttgggatcagat

SEQ ID NO: 391064 - DNA, 3883 bp, Cannabis indica
cattggtggtagcagaatattatttcgttaagatcgttaactcttgttcctttctgtcgtagagtattaacaagatctgaacctggatcttctctgttgatggaattcttcataatctttcacactatgattaagtactaactatatatgaatgggcaaggtactcttcactacagaaacttcgaaaatagaagggagaagagagagaaagaattcgaaaatatgggaggctctttattttcatttgtttgacagaattgtctgaggagcttgtgaaaattagagtctatcattatgtatttataggattccttctagggttagagtttaaattatatggaattaaaaaagataaaataatagctaaaaatcacttaagtgcccgaccatacaagtagaccccacaaattttaattttgccatttatttaagaacttatctttttctttcacaaatgtccttttttaatttaaaacatttaattgtcaaatatatttatttaaaaattataattaattgtcaaattaaagtgtcatttaacttatttattacatagactttacaaagtctcttaattaataaatataccctaaaatcacttttcttctcaattaaacccttacttagtaaaaattcatatataagatatagtctaatttagaattctaattcgttaattaaaaccgattaactaagtctacaagctaatattatctcaactagtgcggggaccatgggcctacataatcaagcttctgataagtagttctagaatttaccgagtaaattctctatcttattaatttctcctgactccactatagatttgaaattacacttttaattatatagaatgttctatatgttctaaatatatgatattaattatccattgttataatctaaataatcaaagagcctctatagatgatttacatcgagtaggaaaaaatttaccgttctacccttcagtgtattttatccttacaacacttagcttcctataaatgatatcttagtaaactaatataattactgaaataagagctcttccatttatctctattatgtcaaactcaaaggaaatcatcatttcacttctatgtcaatataaaagttatagatttcgtatctatgattagcgctcccactcaattgtactaccatgttcctaagatgtaagtgttgggccaatctatttggttagctttaacgaacaagtcaaagaacataaataatacagttaagctcgaacctaaccatcccaggattaagatctattgacctaagatcaactaagtgatcatattgacttagaaagatataacggtaaatttatgatatcttatccaagttcaatatcggtccagtctaatgtatactcaatacatcttggaaaagatataccacttatccaatgtgtaagtaaattttattgtagattatcacgtcaatctaaatccagtaaactaataaatcatgggagtatactttgaagtatataatcacaattatttttcactgtgatgacatcattgtaattgtgaacaacattatatgtgctggatttatcagaaatagtatattaaaccataaacataaaaataacatgttaattaacttaaatgtcatattattctgctgtcaccaatgtaatattttttaactttatatgtgtttaatacttgttagtaaatctagatcctggtaaaatatttccaataattataactatccataaattttgtctcgctaattctaagatactaaaccgtatctaggtgacactgttggccaaaacgttgattttactattactgggcataaaacataaaaatgccaaaattaaaaaatgacttgcatggcccacctagaatctaataaaatctccataattaaaaaattatttctctaatgtctaattttgacaatagattttatttcttttactaatgcacatataattataaataattattaaattactaagactctactaattttcatgcctaattatgcattcattacaaaaaaaaaaaaaaaaaaaataataattatcttgtgaatttataggcttcttcaatcccaacttaaatttcctgttcaaaatacctcaatcatgaatggataattaagaaacaaagaattcaaaaatgattcccacatattttaaagagtccctcatatgaataatgtatgaaaatttaataccatatatataatgcatatataaattgtttcttttatttttaatgcatctagcaactgtttatcctttaaggacatacaaaaattgggatagaatgtaacgatgaccgtgcctgcattgagtgttgcttccaaagtgcctatggaggcatgttggaactttctcattcttgtgtcaagcaatgttattcttgcacagactagtaagccttttctttcgtgatgggttagggcaagtctgactgccccgaaatggatatgagttagacctcggtccatttgtgtgtaatagatatgagtgaaatgcaggagaaagagatataacgctaatccatatagtcggaatcaaactcaagctttccggccctaacgctggcttttcctcttagcctttgtaggttatgctttttagatttacacctactatatagaatttgcttttatatatctttgtgaaatgcaggagaaagagatataacgctaatccatatagtcagaatcaaactcaagctttccctaacgctggcttttcctcttagcctttgtaggatatgcttttgagattgacacctactatatagactttacttttatatatcttctgggtggtattggagctactgataatattcttatgatctatcctagtagagaaatagcccagagaggagatttagaaagacatatttggaaagatagttaagattttttctattcaaaaggttgatacccttaacagaaatgagaggccatatatatgggccatcaacaaacagaaaacattacaaaccttaattattaagtcttaaattacatctttccctagctagagaatctctggcattccagactcttttttatatacaactacaaacagacgaaattttcagatgaccagagaaatctctattgtctgaatgatttcttgtcgctagttgtcattttgttatgagagggaatctcttttggtcttgtgaatagtcactggtcaaggcatataaaataatggactgaccttttcaggagtcatatgttcactttattattgacataggacaagcatgtcacaaacacaggtgggtatctttgcagtggtttaggagttttaccaatttttgttaatgaggtcatgtgagggactgagattcatgtagtcttctttgtcactatcgtcctcttgccacgctgatgaaggactcgctcttttgttgccacttgttgataaatgggtttgttgttgacaggtggagaaatagatagtcccctacatatttctttatcaaggtcattaagtgagaatgagcagttacaagcagtatctaggtattgtgaatcttgaaagattagatcattatagtcaacctcgttttcctcagcgtagtttttatttataatgattcatatctaagaaaaagtaaaacatgaaattatagacactgaaagcaatgcccacaaaaataatagactgaaagcaatgttccatgcatatggagaaggcatatatacataagactgaaagcaacgttccatgcatacctatacataaaagtcatataattttaattatatatatacataataatgtcccatgaatatagatcatattaccatccactaaattgtatttaatatgacaaattagaataataaaaaaaaagttaccttgtatttggtt

SEQ ID NO: 391065 - DNA, 1087 bp, Cannabis indica
tctctctctctctctcaatttctaactctaacttctctctttattgtattgtgtctttcttgttattctctcttattctcttatgagatgagtagtcctctttatataggccaaagaacccaatatacttgttgtctgtcatatttgacagttaagttagttaatgaaaaattaactaactaactgaatcttgattgggagtttaaagaataataccacatatttaaacaaactccttaagggaggctgaaaacaacaattccttaattgttggcatcactcaaaagcaagttttgaatacaagaaggataatctaactaccaaactatgctaactataaagtgtgggcaaccatattaccataacgagaataagaaaaaatagaaaatagagtacaatcaaaagtaatatcatgtaaggcaagccccaaagatgagtccagaatagaattattgttcaacttgagaacaattagggttggacattcgagcaggttattgagtttcgagcatattcaagttcgggttttgggttttaggttttaggtgtgggaaattcaataccgaacttggccatttgcagacaaattttgactgggtttgagttcgaatttggctgagttggtgagactaagatttaggcagattccgagtgagaatcgtgaatatcactttaaacaaaaaaattaaaccaccaaatctccaattgtattagggtagtataaaatgaaaatgaataaaccctaaccctcattctattcccaaccaacccgaatcaaagtgactaagagagagaaaagaagaacaaaagaaaagagagagagagagagagagagagagagatcgaagttgttgacgccgctagagcactcttccgtttgtacctaaggcagagaagaacaacaaaaattataaagagagtcggaaagagaagaaaaggataataaaagagaagaagaagatagagcatacctgagggtggacaatcaccggtaggagtgttcgcggtgcaggtggtgcggtttttgactatttttttaaaccaacctgcacatacggtttttttaatttcccaaatcgcacccgca

SEQ ID NO: 391066 - DNA, 865 bp, Cannabis indica
acaaaacaaaacaaaaagacaagaaaactaattaattataatataacttccacattattcatttcgaataagtaatttagtagttggtatccatttcattcttcaattcgcagctgcattcatcaaaataaaaacacattagcctaaaaaggaaacaaatgaaaatgtattattatacaaaacaaattaaaatatatacatatagcataccacaagggacagcaggaatgttgcaaagggatggaagctgggaagcaatgcgcatggtgttgcaaatgcagtcatgattgagggctcccaacaccgcgcaacattcagaggttgggtgcggcacagatgccccgggcaccacgaatggcgcgcacacatttaggttgcccaattgagtggagcacacctgagcttgagcagtgtggtccatcatgatcacaactactactgccatcacaaacactacaatagtagagtacttaaggccaaccatgatgatgatgatacgagatgttactaactattttgactcacactcaagttgaaggtagaagtggtaaattatctagtgatataaacccctttttatagggtagcttggtatggttaatgtggggtgtttttgcatgagtcacctataatgagagatttgtgtgctcatcacatttgtgttggctagctatgtggcgaatcaagataagggaggtaaactacatgtcacataatatttttgtgttgatgaatatagcatttatatcaaggtaaatactattttagacctagtattttgtaaaagttactaattgcattttcaaaataacaaaatagaccatgtattttctaaagttgtacaaataggaccctgaattgattt

SEQ ID NO: 391067 - DNA, 958 bp, Cannabis indica
aaaaccctaatccaagaaaccctaaccttcaactaaaggttccgccatagacaattgaaacctaagtaacaaggaattacccaaccatggctctaaaatggacacgaatcgacgaaatggattgtttgggaaacctgtcccagatccgtttaactggttttacaagacttggcaaactggttaaccggttcacaccagctttctccaaacaatccaaaacctgctcaaaccatgtccaaacctcactaaagcttccaaaacacctatattgacctcccacaacatattcaaagccatagaatttaaaaattcacacagaattaaaacatgccatggatgaactaagcttgagttttcaaactcaaacttgtgcatccatcacaccaaactcaaaaaccagttgcaagaacccatttctaacttaaattgaatataaaaatcggactttaactcattcaaactctaacagcccctatactttaaaattacatgccaaaaccaagtagaacttaaggagttcattaattaagagtttctagggcttaacttccactaattactccttaaatccttgttaaaattccaaaaagaggtgaattcaagtttctcatgctagttgtgtggtggtcgagcacaagagagagaggaagggtgatgagttcttgatttcttttgattttctctattttctctaaaaggataaaactcaataattcatttacttggctaaattaaaacattgtggccagctgccactctcccaagcagccacctaatccccatcgccaaatgaccaaaatgcccttaaagcttaaacgtaagctaatgcaagcctcggggtaaaatggtcaaaatccataaccccactcaaacatgttattctatctatctcagatatttatcacactaaaaaaaaattctagacttacccatgtgactcaaatggccatccatcgca

SEQ ID NO: 391068 - DNA, 812 bp, Cannabis indica
ttctattctatgcttaatgggaccaattccaagaatcggaaaagaaatttacttatagttctgagatatacggatttagaccatgcactaaaggatgaacaacatgcacctctcactaagaaaagtattcgttatgataaaacagaatttgagaggaaaatttaattaattatgcttatatgtgcttaaaatttttcccttaaactcataataaccaatatttgtagcatatatgcctacatttgtattatgcccaaaataccatctccatttacatcacccctccctcttcttctctctttccctctctttacttctctctttccttcttactgcctgagctgctctaccaccacaaatcaactcaattttctcttatcttcactcattcttttcacttcactatactagaagctactacactacaagctacaccacatattttctctcatttttggacgagcatcatacacgaagctcatgggtaattattttttttgtgcaatcttgttggttgttgttatatttagtttagaatattgttttaatgcttgcactactacaaaaatggattttcctgacgtttttaaacaatcgtttaaagtattctcatcagtttctataaccgtcgcctatacgaccgtcgtaaaacgggtagaataggtgacggttcaaaaccgtcgctaatgtaggtttcccgaagatttaaaattgttgcctataactgggtataaaccgtcgcctataatataaagcacggtttaaaaccgtcgcctataccctgtcataggcgacggttttaaaccgtcaag

SEQ ID NO: 391069 - DNA, 524 bp, Cannabis indica
cttgtttcatattgtaaaatactagtctaaggtatggtcatctatcattctctcgtatcctctcttcttttcttttcttcctgagtcagttccttcttgtttttacccttcccctgtgtgttttttaaccagttttcttcttacttcggttcggtttggtgtctcactggtcctctcttttgtttagctctttatgtgcctttggttggggattaaacctctgtgtagtgtgatttgtggggtctgaggtagggtctttcttgtgtttggtgggtagtggttggtggcatttagtgttgttttttcttttgtcttttgctgtcaatcatggcattagttaatgcctccaacagtgaatctcttggtaatggtaaatgtttttcttgtttggaaacatctataaaactagctccgtgtgccacttctcaacaagccctctccactctttgtcttgttggaagagttattgcccccatgacagttaatgaagctactattttagactttgtggacaaaacttggaa

SEQ ID NO: 391070 - DNA, 967 bp, Cannabis indica
aaaaaaaaaaaaacagtggaatgatgtaaatttcccattattttgtgcgccaaaccaaaaacatgacttaaaaggtacattttttttttgatggaaaaacaaaatcaatttataagtcaagatatatatatgcatggtcctgtacgcactcatataccacattaatactattaaatgcttaacttaattaaggtcaagcttttctcagtcaatatccagcaacttgttctttcgaaaatatatctatatctaatataattttatatggaaaaattatatatataataaatagattctacaccaacttgtgtagctagtaaatgttcctttaaaaattatattggatttataatatagtcttccacatccacaaaccacttttaattaggtgatccaagaagatttgggcatttgcctttctagtttattggattagtgattgataatggagattttatgacattactcttcacgtttatttatatacttttttttaagaattgaaaatatataatatgaattttattaattttttagattggatgtgatgatccactaccgttatatctcaagaaattaatagtagtagtagtagtaaattaggacagttaggtgtgtagttaactacacatggtttaatgtacaaaaacatgtgttacacaaataattttatggatttgataaaaaaaaaaaaaattgtgtatcacactcttaaacgttttcaatcgagggaaatagaaattaattgtatagaattggtttctatttagttatttattaaactagtggaaactcgtaaattaaggagaaatgaaatgaaaaaaattccctaagaatatcattttttttcttaactttatttttattaattaaaaataaaaagactaatatgtcattcaaaaatcgatacaatatttttaacaataacaatttaattaaattaaagtattttaattattttttttct

SEQ ID NO: 391071 - DNA, 1804 bp, Cannabis indica
caactccgcttcaagcggctttctaattcctttcccagaattcgaagccggtaccgttccattcgtattgtcaggggaagcggagacgccgttcgaagatttgcgtgtctcggccatctgagtctgggcctttaggaagtcgactgagctttggccattagtggtggcgccgataaaggacccgggcttaagaagtggatcaggagggaagccggggagttgcgtcccgatgggttgatctttccgatcctggtccgagtggggttgggtcgggttcgggtacggacccgatgtcccggaggctgacatggcttgttgtttgttcctggtgtgtagtttccgagcgcacgagctgcggagaccagcttgagtcgtcaagttgggatctctactctagtacagtgacaatagaaagtagaaacgcgtgttctctgttttagatgaggaccgtccgatcttatatccatatttatgatcatttgtatctctgattgttagttaataatgtatttttaattcttttcggcttatcctgttggcttacattgaatgattaggtttcttaacttaatttttttaacgtgcttaatatatttttagatagagaaaacgttaaacgacatgatacatgaatcaagacaataaaacgacaaccaatgttgaacataaatagcacattttaaaattttgaaaagtaaagtagttattcggcatcataattaaaaaaaaaaaagtttttgttttaaaaaacagaacattattctttgggaagaagtaggtgtgtttgacattatttttagagaatagtttttttgggttatttacaaaagagaaaaaatggaaagtttatataaatataaatatgtcattaatttaatattttttaactaaataaactaaatatataaatagaaaatatcataaaaattattaaaaataaaataatattaaattaaatttagtttgattaagaaaatattacactttattaatattattatttattaatattttattattttttttaatgtcattttctctattttttattttttattttaaatttaccacaaagtaatttctcaattaaaaacaaataattcaacataaaaataattcaaataaagatatatggtattaattttaattttttttttttggtcaatcagcaagcgtattataaccaaacaacaatttatacaacataagagcaccctcatgaggagagcctccaattctaaatctataatctttacaatggacttacaataaattaaaccaacactcttcactactagttacatctttgggccatatacaaactattctatttttaatgacaactttaactttgtatacaattctatcacaattttctatctccccattccaaaaaccattatttcggttgctccaaatcaaataaatcaacactgcaatggcagaaacaaagactttctttttgaagttgttgcattttgcctttgttaaccacttgctgatgtttttcaaagttgctgtcgaagtcctccaatgcaactattgcttgatttgtatcaagcaatccttcaaaaactaacaaccaaagaagagatgttcgatagtctcgctgccattattacacagcaggcagccatcctcttcaattgccccaaatctcttcaatctttccttcgttttcattttcccaagcatcgttaaccatacaataaagctatgctttggaatattaaaacagttccatacaaacttgctccaatccacttttgtaacaccctaactaacataggcgtattacgtgatt

SEQ ID NO: 391072 - DNA, 1606 bp, Cannabis indica
attttttaccaaatcttttggggccccgaaaaatgtacatctatttttttttttttaaattgtagcatatatggtaataaaatgtgatacttattaaagcatctctaaattgatactttataaattataaaaaaagaaaatagtgagttaatactgttgattttttttattcaagataaggtgtctatgttaagttcgcataaacaccttagttttcacattagtaatcaccatattatacattccaacacaattgtccaaaccatggcttttatggctatttcaataaatatacatgaaaaatcattgatttttaattcaggctgccttagagtttactgatattcttctttgtgaggctttccatggacttggccttctctctaagaacaaacttttgcacctttccagtagaagtctttggcaaatcttgaaaaacgacagtccgtggagccatgtaatgaggcaaaccgcttctacaaaagctaataatctcatcaccactgacattagcatcactcttcacattaatgaacgcacaaggtgtctctccctagtggtcgtcgggccttcccacaactgcagcctcaagaaccgctagatggctataaagtacaaaaaaacttcaattgtgctaatattttctcccccagaaatgatgatatccttggatcgatccttttagttcgacataaccatctggatgtttcactcctaagtccccaattcgaaaccaaccaccatcaaaagcttcttgtgttgctttgacatttttcaagtatccattcatgactgtgtttcctctaaacataacctcacctattatctttgcatcagccggtacactcttcagtgtcacaagatctttcacatctagttcctcaatgccaagatattgaacaccctgccgcgactttagtttcgcctgtgcatctctaggtaaagaatcccattcaggtttccaagtacaaacagttccagggtcatatgtttcagtcaaaccataagaatgagtcacattgaaccccatttcttccatcttgaaaagtagtgatgggatcgatgggcaacacctgtcataatcgataccttagatggaagtggtttccgctctgtggctgatgcattaatgatcatgttcaaaacagtaggtgctccttccatgtgggttaccttgtgctgagctatcgagtcaaaaatttcctttgcagtgacattcctcaggtagacgtttgtaccaccttgagtagcgattccccagggaagacaccaaccattgcagtgaaacatgggaacacaccacaaatagacagccattgagtgcatttcatttagaagaacccctgccaatgaattgagatatgcacctctgtggctgtaaatgacacctttggggctagatgttgtgcctgaagtatagttgagtgagattggatcccattcatcttttggtattatgacttcaaaattatgattcactgttgatagcagtcgcttgtattctaaattcacaggagcggaaatggtgttgctgtcaggggcggagccaggacgaaatgtttaggggggcaaaccatattaaaatttaagtgataaatatttcaaa

SEQ ID NO: 391073 - DNA, 930 bp, Cannabis indica
gaacctggacccagacccgagactcgcaacccggacccgggagtcatcggacccggacccagacccaaacctgtagttggtgttgggttctattgaaaatatattataaattacacaatctattaatacaactcaataccaaacatagtattgtattaaataatagtaatacaatacaatataacacaaatacaatacaatacgacataccaaacgaaccctaaatcatctaatcaaggtgtgaaccaatattgaaaaaaatgctcttcaaatacacaacaaaatttagcctataatctagctaattgagctttctctcaaaacttaatactaaaaaatatattatttacaatgacgtctaattttattatttttataaaatacttatttaaataaaataaataaaggatgaatttattaaagtattcattctcaaatcagaaaagatattcaaaacgtttataaataattagaaaaacgaagattttttttcttgataaattaaatgaaaatatagttcaacttattcatttcaagagtatttaaaattaaaatttaaacatcacacaataattttaaagcaatgattagtagtctttaaaattcccatcaactaatttataaatatgtgttatattaaaaactaaaaaagaaaacttagatgtcattagattagtgaattgtaatatctttataaaagtttcaaacataaactaaacaatagaattataatagtattagtgattgagttacaattatgtcaaactaaatatagtgttaattgaatgaattggattattttgggctggttggcttcaattttcaatttgcttaatataataattgagcttgttaaaaaaaaggaaaatttacatggtatactaacttttgccatttttttacaaaatactgccaggcggtattttttta

SEQ ID NO: 391074 - DNA, 1849 bp, Cannabis indica
tgatctaaattttagaatttagagaataaacttatacttgtttaacataacaatagaatgattaatgaaatgtgttgcatcaaaatataatgcaaaataataaatatgattggttcaaagaaaattgtcataacactacaattaatattttgtgtctatacaacaccaactttgtttttgctgatgatctctagggtttttctccagaagtttttagtcgctgtttgatttttttgcctgaccatggcttgtgagccgtttctcgaccttatggcacgactcagatcgggtcttattgattctcagatttttttcgattttgctggggttatcgctatcattctgcccgagcgttctttttttctccatcttctttcttcaaaggtgtcttggagacttgagttattcattgactatggattgaatcttcattggtgtaaattatcttagagtattatttatttgtcttgtgttttgtttttttatatctatatttattttgaataatagtgttgatacacaccttactattgttatggtagtatgactttatttatatatgacaattttagtctcatttctactttttagaatattaggagaatctcaacgagctcaaaacatatttatgttagtatcatgacttttcctatctctatttagatcacagagattcttaaatttttattagttccataatttatggtacaactgtttgttacgattgttatcgctacgattggtcatttagttattttattttattctatattgaatattcgagctgttattacccattttttattagaagatctttgactgatagtgattgataaatgtgttttgtcacatgttcatttagattaaagatctaacattctttcagtttgcacttctttgatgcttcaacgttggcgacttttcattcctatttttgtaaaccgcatggtttatctattttattgattctgctcattgagtaatatatcatcatgtaatagattattgtcaaattttcctattaataatgaaaatttccaatttactttcaaaaaaatatattttgtgtttatttttggtgcattattattactcaatataatcagaattcaattttttctagaatacagtaattcattagttttgacttcttttttcttttatattttttaacaatttttttgtaagagtttttttgaacaaaattgattgttaagataaggtattggcgcaagctggtaatcataaaagataaggtagcaagcaattttgatgtatcacaagtacaaaatgataagtacaaagtggcaaagggatataaggctattcggcctattgctaacaaagttgattgtgattcatttgtttggagcaggttaaatattcccaagcatagtttcattctatggctatctatgctcaatagaatcaaaacaaaagacaggttgcagtatatggagcttgaaaactctaaatgcttactttgcaacattgaagatgagattgtgcctcacttattttttgagtgttccttctcttcgaaatgtttggaaaatgtgaaatcttggctaagttggggaatggcagctactaccttggaaagaatcataaggtggctaagaaagggcaaagataagcaaggtaaagaagtcaattttagttgttgtcatagcagctcttgtttacgaaatatggcgtacaagaaacaatattttttgacagaactccaatacaaatgtagagattgtaattgtaaaagtgaaaaacatagtgaaaaaaagaattacatgtatatgcctaaaaaaaagcaaccaaaagtgagaaatatggtttgataccttgtaaagtt

SEQ ID NO: 391075 - DNA, 978 bp, Cannabis indica
aaaagtgtggaacacttatattaaggcaattcttgattattggatgtaggacttcaattgataccacaaggtacaatatattattatagcttaatcaaagcatctagtcaaaattaataacgaaccaaaagaacattagttagaaatagcaccatcatatataagagaaatacatcaaatggaaaaagtataataaataaatttattattaagatcctatggtagtccacttatttgtaattagatttaaatttggaatcaagtaatagagcatagacatgtacctattgttagacgcttcttctggccaccagaaatacctcttctcatatgatcaccaaccagagtgtcagcacacatatccaaaccaagaatctgccaggcccatccattgtaagaataaatatatatataaacattataataacataaccaaccatatatataaaataacatagtataaatattaatttcatttcatttattccattacatgtattcattaatttatttccattctaattactagtatgttatttgaaattttataaaaatataacaggaaattcgttgtgactacaataaaatttggagtcataatttatggaggcgtatgtaaaaatgtacaaacactactacaatatgggcctttagcttctgataactctaagatttagagttattatcatatctttaagcttgaatttaatgtgaattgtggatcaattaatgtttatattgtgtaattgtgtctagtttgttgtgtctttgtaataaatgaaagtgtgtgtgttagtaagtgttaaatagacttatgttattgtttttatgtgttttaagcagaaaaaatacaagaataggtatttgaaaatttttgggacaaggggaaaaaggagcaggaaaatgattattgctgactggcattgctgtagcactcatcgcgtagcaatctgtcagcccagtaagtttattttggca

SEQ ID NO: 391076 - DNA, 790 bp, Cannabis indica
tttacaaattttacatatataatatctttagtaattataacttacacgaccataaaaaaatataaaattaatttttttcttctaaatatcgaaacaataaaaaaaatacattaatgaaccctctttgaggggtgcaaaatacccttattatagactgagttatttgcagcgtaaataccgaagtttaactcttggttgttgataaatatctaagtttaatttttgacagtaataatacctaagttatatttttggaactttcgtaggtacttggtcgttaagtgtcaagtcattatctacgtgtcattttcttattggtatatttaaattaatttttaaataaaaaaataaaaatttaatgacctggatcaatcaggagttaccacatgacaatttacttaacacttaatggtcaggtacttacagaagttctagaattataacccaaacccggactcgatctgagatccgagacccaaacattgaaccctggacccagacgcagactttggacccaatcccagccctgaccccgaacttgaacctcgaaaacttgacctggacccgaactcgaaaccgaagctcgaccctagcctaggacctagactcggacccgactctagaacccagacccgaacttagccctagaccatggactcagactcgaccctaggccccagatccaaacccagccttggaccatggactcggaccaacactagatctcagacccgaaaccttgaaccttgaacccttaattttggactcgggtatgtgagagaaaatataa

SEQ ID NO: 391077 - DNA, 1456 bp, Cannabis indica
tatgccgctatttacccaaaaaattattatgctgtccaatttctcataaatatttttttatgtttctctttgattctctagacttagagatgtttatatacttcgcaatctgttgttccgaaccttaatcggaccaaatgaatctagtgtcaatggtttggtcaatttgggctgtttataattctttagttcgatcacggtttttaaattcccatctgtagtttaaactaaaccaaacctcctaattcttaatatatactgaacattgatatttagctacagttataggcctgatattgataattatcttaacattgtgttaagaatatcttttttattgttatttacgtattataagctttaaaaataactgagtaaaattattaaaacaattacaaattacaaaccgcggttttaaaccaaaccaatcagttcttaagtagattggtttggtttggtttggtttgagcatttaattaatctgattcagttttaaatttttttaaagaaaaaaccaacattattggtttggttcgaaaaaataaaaatctagaccaaatcaaaccataaacactcctacttaaactttaaaaaataagttaatatgggtacataattaaaaagaaaaataaaaatcttaaataaaaaaaatatattgccaaagcaactttaagcactcaactcttcatttccttccttcctttttcctattagggggcgtttggaataaagtgttcaaaataatttgattatagagaatattataaaatagaatatgattgtagagaaatgtgtaaactgtgtttggttgtgtatggtaatacataatcatattcccattaattgaattacactgtttggttgagtacaagaatctcatatattattttaaaattttaaataaaaatatttttttattatatttgtttaatattaattatacataaaaataaaataattatgcattaaagaaatatatttatttttttgaaagcaaagaaatatatttattgattaataaatattaaattttattgtatttttattaattaaaatgaacttttctatatactttatcactatgttatttattttgttctctatgtcatttatgtataccttccacataaaatttatgtatatgcatatatattgttattgctaataatagaaataactcagttaaaaataaaaaatcgatctcaccgactaaatttatatcgcaatattttttttataataatcaaaatattgatggcatttaaatttatttattaattaaaaaataatattcaaattaatataatagaagggaataatttaatctcacattttttaagttgtcaatatacccggggtagttatattactaagaaaataacattataagattaaaccctcaaaacaaacaagataatgtttcacattaccatctaattccaaacagccccttaca

SEQ ID NO: 391078 - DNA, 2099 bp, Cannabis indica
ataattttaatataatatttaaaattaaaaagataataatatcatttaatttaaaatataaccagtattaaaatatctaatcttataattaaataatctgtaagttttaaaaaattaataaaatttttaaatctaacaataatttaaatataaaataaccaattttaatttcaaaattcaaaatattaaaaattaataataaactattaaaataattaaatattattaatttcaaaatttgatatttaagttcaaatattaaaaataatattttatattgatatttatggttttaaaaaataattcaaaatttggtgaaaaaatcacaaaaaatgaaatctttgggtgcaaagcccttgctgcacgcacagggtgcgtgcaacctcatccgcgggcagaggaggttgttggcagcctcgtccgtgtgctcaggaggatgtattgcagccttcgtgtgcgtgcaataggtgctcgagtaggcttcagacatgggcgatggggcttcagacacgggcgaactagaccatcttgtctgaatttctgcgcatggtgctcgagtgacgacactcaatgcacaaaattttcaaaacaccatatctcactcgtttttcatcaaaatcgagttccgtaaaaaacaaaattgctaaatttttcacaaggagtctaaataaatcatttttaaaactaaaataaaattattttttatggaaaaattgtaatttacaaacatttatcaattaagcacataaactaacatgaacacatctaaattaaaaagatattattttgaatccttatttcatgaaagtaaatcattaacatggctctgaggccagttgttggaaattattttacctgatctagatttactaacatgtatgttgattataattctataatctaacaccgataatagaaatttcctaatacaatgaaataaacacataagagattaaaaaattcttacattgatcgcagcaaaatataatgactcattccattcagatcactaacccttgatttctttcagtagtagagcattatcaagatctgaacctggatcttctctccttcaatttggttaaccatagtcttctacactatgattcagtacttgacttactatgagtagacatggtactctatcactaaaggcttagaatttaatgaagaacaatagaagaggattcaaaataactaagacagaggctctcaatttctagttgtctcaaaaaatggaaactaaattatttgagttggatgagaacgagagcatctttttcttttatagtatttcaactaaggttaaggatttaattttatggattaaaaatataaaataataggaaaaaatcactaagtggccagcccacacaaggtggattctactagttataatttttccactttatttcataattaatcttttctttcactaatgtcatattttttaatttcaatcttataaatgtcaaaactatttatttaataattataattaattatcaaataaaattgtcatttaacttatttattaattagaccatataaagtctcttaattaataaataaaccccaaaatctcttttcttcacaatcaagcctttgtttattgaaaattcataaataagacacagtctaattttaaaattatatttgattaattaaaaccaattaactgagtctacaaacagtattatctcaactagtgtggagaccatggacctatgtattcaaacttacaataagtagttctgaaatttaccatgtaaattttctaacttattcattcctcttgaatccactgtagattttaaattgaactcttaattacatagagcatactttactaaaaatagacacgatttgaattacctattgtttcaatccaaatagtcaaagatcctcaaaagttatctatattaacccaagctcaatggaaattatcatttacttctatgatttatagaagctatagattccatattctatgattagcgtactcccactcaattatactactatgttcccaagatgtaagtattgggccactctaattggtcagctttaacgaacaactctaaagaacataaataaca

SEQ ID NO: 391079 - DNA, 613 bp, Cannabis indica
ttttttttttttctaaacttacctatatatctatacaaaaaatttttgagttattatattttcttacaaattcaacagaatgcttaatggtggggacctcttgatgccaaaggcttctattcctaaccttccatattgcatatacacacataaagtcgactaggatatagacctcccttctgatccggcgaatccaattcatgaagacccattaaaattggtattgataagtcccaataccaatccagccaagtagttcttgcatacataatctgctatatatacaactaaaaaataaatgttcatgtgtctcttcttcttactactcataaatcaaacagttttctcctatagagctgccttgcttccccaatctattaattggtagttttcaatcttttccaagcagccatgccattcacactatgtgtaaagtctttttttggtaagttagatgccaaaatattttttatttatggtgaaatttctttgtgatatcaatccgatgttatcacctttattattcggttttattgctcttttctatcttaggaaagattgatttttcagttggattttttcttgtatggaaactgatgtgatcaatgcatga

SEQ ID NO: 391080 - DNA, 1552 bp, Cannabis indica
tggcaaagctttgaacaatcccatcagaagagtttttattagacaatcttctattgtatggcttagagatatttttatagatttcttcaaagctagtgcagtgtttgtctcctttagttaatttgaatatagcgtgttaacagattatagttatctttctgtcgtgttttcgatacaatctacttaagtttgttctagaatatgtttgaaattttttacatagttgtacagcttgcaggactttagtttgatgcagctagagatttccttatataatgacttaagttttatgatttatgatagtcaatttaagtttagaacttatgttataggtcttggccggtactagtttttaatagtttacaggcgaggcaaaaccaattaacttacacatttcgcgaaccattctcgcataagattgctcgggtggctcgcttttctagtactagtactagctagaagtattttttgctttagaatcgacgaaatgcatactgtttgactatatatgtttggtggtagataacatcttgtggatatgacataccaaatggccttgtgggagttttaaatctcattattggtcacactacatttgcttttttaatagcttttcactcttaactctcttttttctcgagtgaaaattgaaaagtgtcaattttgatatagtaatgaaattctatgttgcctatggttggctgtgttaaccacatttgtgatgtgttcttaatatagtttttaccatatgattagtcattgttggtttagagtgtactttttaatgttcattattagcaaatagtcatttttgaatcaatttgtgtcttgagataaagattgttatggaaaatctctgtaattgttttgtatattacatttgtaaattatcttgtgaataacttctccattaagagtaagtaaccaagtctatgtttaactaaatatgtagtacattactaaacagattgattttataatatattttatttattgcatgtgaaatagattgttgagtagctttttatattgtaaattattttgaattttttaaaattttgcaacatgtcttaaataattataaaaaaattaatattattaaaaatatttttagatgtagaacgagataagactagatttttttcacttaataattttttttactcaaactttttttttgaatagaatagaaactttattaatcaatgagtttttccattacaattgataaaattcagcaggagcattactctcattaaattgaagaacgggtaaaagtaaaagttacgagcaacataatgagcattcttattagcagaatatgtatcgaactaagaatgacatagatagcctcacaagacaattcgattcaacaataacatgttgtcactactttgcttgtattcaactcaaagctttattgatggcttggttttaatttttttaattataactcttttacaatcttctattataattttttagttaatttttacgtttgaaattatagtctgaattttttttttaaataattttttatagcgatattcgt

SEQ ID NO: 391081 - DNA, 665 bp, Cannabis indica
gcaacctaaattgtaacaaaaactcatatagaaatcttattacaactagagctgtaaccactttcaaaactcaaaccgtaaatttaaaaaaagaaaaagttcaaaaaaaaaattatataaagtaattctccaaatataatctaatccaactaaattagtaattagattgaatcaatttttttaattatatttaaatactacacttaatttttaatattacataaaaaatattaaaaaaatacacacgctgaaaaactaaactataaacaaaatatatgagtttcttagaatatatatatattttttttttgtatttctttattgagttgtaaaaagtctattaaaatttaataaataaataaaaaagaaatttaaatagggttttattataggtaaatacaaataatatttattaatatatattatatgtaattggattagggccagtttggcacaattgtgttgtggaaaaaacagttgtagttgtgctgtcgggaaaaacaattgtagcacaaatgtagaaaaaagttgaattgagtgtttggtaaattataaattttaaagtgttgcgagttgttaagattctattataataatgataatattttaatctagtttattataatcacaaatatatatataaaaaaatatgttatataaaaatt

SEQ ID NO: 391082 - DNA, 1521 bp, Cannabis indica
agacttttaagggcataaaccctgacaaaatggtacaatagttgcctatgtttctcaaaaattgaaactacatgagaaaaattaccctatgttatctgtatggtacaaattttgagctatacttggatcataaaagcttgaagtatcttttactcaaagagacttgaatttgaggcaaagaagatggattgattatattgaggattataatttcacttttcaatatcatcttgtaaaagttaatgtagtatttgatgcactaagtagaaagcctcgtgtttggctcttgaagatttgaaaaggacaatcacaatgggtgattataacttgcaataatattaaggagaaaaggtagcttgtatctctaacatagtggctacaccagtgctacttcaacaagttaagcaaagttagtggcaagattaaaagctaaggcttatctagaatagaatccatgacagtgaacagttagatgggtgggcagttaatgaagaagggtacataaaaccataagggaagactagttgttgcagatatccgtaattttagggagtctattttgattgaggctcatagattcaagtttgatgtacatcttagaagtacaaagatgtaccaagacttgaagacacatattggtgagaaggtatgaagagagatgtggctagttttgtagttaagtgtatagtttgttagcaagttatggctgagcatcaaagacctttaggtttacttcaacctttttatatacccgaatgaaagtgggacgagattacaatggattttgttactggatttccattggcacccttgaagcacgatgttgtttgagtgatttttgatcgtttgactaagtctactcatttcattccaatagaaaagaatataagcttaccaggctagctcaaatttatgtggacaatatagtttgactgggtggaatgatttcaagcattgtttctaataaagatcctcgatttatataaaggttttggaaggccctgtaataagccttaggaactaaacttcacttaagtaccgcccatcatccactgatagatagacagtgtgagaggaccatatagactttggaagacatgttttgctcttgtattttggattatggaggtagctaaggagaacacttatcattggtggaattgatcatgtacaataataactacaaagccagtataggcatggatccttatgaggccttatatgggggacggtgcaaattgccacagtgttgggtcgaaccaaatgagcatgtcattattggacttcatattatcactagtaccactgagaagaataaggaaatccaagagagactaaaggttgttcagagtcgttagaaaagctatgtcaatctccatcgacgagatattgagtttgatgttggtgattttgtcttcttaaaagtttcttttttgatgaatcagaatgttcattgcacaaaacacttttatacaacctataagcaccaaacaaggccttaaaataatctatacaactttg

SEQ ID NO: 391083 - DNA, 640 bp, Cannabis indica
aaaactataaaacaactaaaaactggtttattgtttttacttaagaaatattttataaataaaaaaatttaaaaagtaaaaataaattttttcgtattaaaatacttttgtatttttttttaaaaaaaattaatttattttgtaaatttttctaaaaaaaatctggtttgttcccggtgctacctaatagcaacgctcaaccatacggcagaaacggctactgtcgactcaattagggtttaactcatctaaaaccttaaaccctaaaaacacctctcactctgcctctaccactttcggacctccattttcgattccaatggcggcctttgatcttgtaaacaacatgaatgacgttgctctaagacctcgcttactccgcacgcttatcagagaccatatccccgatgacaaacacccgttcgggagtccatcgcagctaaccaaggtcatctccatgctcaaaacccacaatcttctatctgaatcttatggtgaactggaggaccaaaagctcatcggaaattggaaatccgccgtcgattcatgggtcgaccgcttgttactcctcctttccaatgatatggtgcgtgtatacgtcgattttttttttttatacatgtgcttgcttcattttctc

SEQ ID NO: 391084 - DNA, 1147 bp, Cannabis indica
ccaactcaaaaattccttcatacccgctgttaaaaaatatctggtttcacgacacccaagtttgcaagcttggtaagcttcaaataagattaccatcacgatccctcacaacaaattcaaagcctaaaaaagtttcctgagaaatagagccccatctctacaataacattgggcatagatataacaggcttagtccacttctgatttgtctcacttgaacatgcggtgttgtttgataattcatacaacaaaaaaaaatggattataacagttttaacaaacaattgttagtgaattcgaatgctacaatttgttcgataaaatttatctgaaatgttgtagcattctgttatgttagttagtgcattattaatggtatgaaagtgaaagaaaatatatgtacattattctgttggagagagacatagaaagagagaaaaacagagtgaagagagttaggaaactagactaagacattagagttgaaactcgagctgagttttaaggtattcatctgttattgttctctagggtgtactcaacaactcaaactcgtaattcattattttaatggagaagataactcaggggaataataggaagtaagccctttggtttggccgatcttgtataaaaatttggtgttctttacattagttttctgcaattttttctttctgctttagttttttggtttgatttttcattgtcaattcagttttgatttgtttgattgttcttggttcgagtctgtgttgttagaatttacaacatgcgatgttgccagaaaagatcattgcggcttctccataaagcccaacaaagcaatgtgacatgtttttcttatcattctaccacttttttcatttgctttcaaaccaggttacaaaattactctccacactgattcgaccaacacgaaaaaaattccaccagcactatagagcaaagcaacagtcaatgaacaaatgcagagttgtttgggtttgctgctgcaaaaatgacaggtaatgacaatatcaaggtgcttattcttcatttgaactctagttggtaaaaaaatttgagcatgtccacaagatcattctctcctttttagaggtattttaagttgccaaatgttatgttggagagagagagagagaga

SEQ ID NO: 391085 - DNA, 1865 bp, Cannabis indica
tttaaaatcacgcagtggctacctctgcgtagcttagagaagtagaggccaccgttgaagaacagtgggagaccacgccaagaaggtcgtgggtactagcacttttacgggttcatgcacgatgaaacgttagaggaacttaattgacaagttggccagtgagagtacttattgagatattccctatttcagtgtttggatagacgttctgacttcatgttctcgtcgtactacccagacttgtgtgcacctttactgttatcttgtaacatggtgcacaccttttctgtttggtccgaacatgcttgctacagggggtttgctatcaaggaatattcttcagtgagtaattctcttgtgaggagtttcttttctcgatctgcttgttgacggacctggtaactccttgtgcacagccatgctactttaagttggcttggtctcttcttctttcccttttgtcaagtgatcctgctagcaagatgttgtgtacctcttggtcactatagactataagtatgaaggcagactggaggtggatcgagctggctagggcaagaccaagtggctagccatattaagggagcactacctgggcgattggataagtccatggcaagccagcatgtggaggtggtggttggcctgaatgtggattctatggctggccagcttgttgaggacatggtcggctaggcctataaaggcccaattggtgttgtggttggatctcctctgcattcaattggctgtgcccctagcataattgacatagagcctttgtccagttctgtcattagctatacaagttctttcttggaaacgctttttactggtgttggagtaccacttctgtgtgttttgttgtgcaagattagacaccttgtagtcgtcctcccagtccatgccctctcgcaaggtctttgtttggaggtaagctgcgataggtgtcatcggttggaaatattttaccaggatctagatttactaacaagtatgtttcgttaacatcctattacgaatttctaaaacaatgaaataaacacataagggtttaagaaaaccttacattgggtgcagtgaaatataatgactccttccgttcggatatctagcccttgattcctttctgtagcagagcattatcaagatctgaacctggatctctttctctccttcttgagtccgattctccttcttgttgattggattcttcacaatcttccacacgatgattgagataccacttgatgtgtgtgagcactcactctatcgctcaaggtttgaaattatgaagaagaaaagagagggaatggtggttcagcctaaggaatagaataagaggctcaattttctgaagacaagaaatttcatcaatttgttaagtgtgagccatcactatctatttacaggtaaccacctaggtttaggttagatttatttgacattaaaataatagaaaaataaatggtaaaattcacactaagtggccgaccatgtattggattggaccccactttgcaattttgccattttgtcattttaccgtcttattttctcaaaaacgccaattttccaatttaaccacttaaatgccaattctaattatttaataactaaaaattaattagtaaataatattttcatttaatatatttattaattagactaataaagtctcttaattaataaataaaacctagaatctcttttcttcacaattttgcccttgcttgtaaaaattcataaactagactactataaactagacatagtgtagttttagaattataattgattaattaaaatcaattttgtgagtcttacaagcagtatggtctcaactattatggggaccatgggcc

SEQ ID NO: 391086 - DNA, 508 bp, Cannabis indica
tcataatacaatagttattagagtagaagggaaatcctcaaaccaagtacaatcgatgtccatcgagtaagcttgcttagctaacaaacaagtagcattattaacaggtcgatctgtagacatgagaaatttgaactttaggaaaattgaacactaaaagagaaataacagacaataaaaatcagaaacattaatttgattagattgtaattctttcaccaccataaaagaatccgttttaatatagtgaataagtaattaaagatctttaagtcattgcaaactatacatcaaagttattgcctgtaatttgtgtagtaataatacttaaaaaaaaaaagataaatttattgacagcaagacaaaattattctgtaaagtgatttgatcgaattaacttgtaattatttacaataaaaacattttgtaggtagttatattttcctttccataaatgtaaataatttactaatatatatatatcttgatatagacaagttaataaaat

SEQ ID NO: 391087 - DNA, 1144 bp, Cannabis indica
ttgaggggttccaattacactcgctaattctcatgcccccatgagaattgaatgtaattacactgtgtaattactaaaaaactttccatattagacattagctactaaaaaatattgttttcctatgtaattactaactattttaccaaataagatattaggaattcatatgtaattaccaacttatatccaaacacaccttgcattttaaaatatagtgtaattactagactctgtaattactaccctagtaattatagtaattacataattacttctaaaaacacccttattagtaatttttcgttcaaacttttataattgacaaattggtcactaaatatattaattttgataagttagcccctaaattttaatttttgacaaatcaatccgcgaacttttagatattttggaacatttttttagtccatacttttaaataataaagtagttttgttggcttttaattattaattacttctacattttttaatttatagtagattttcaaaggagcttggccaaagaaattccccccagccactgcttaacattctatagaactctccaagaccaagagtaaagaacaatttaaaaaaaatgttcggggattctaaatttcattaacaatggacaataaatattgtcaggaaataatacttggtttttgacaagattatctcttgtaaaaggattagtgtgaaccacttgtcacataataagttgatcctttggtgttgagagcctacaccaaattgcttgcatacatttatatttggtcccatccgaaatgagatgatcacaaacttgcccaaccaataatccaccatccaactttgataatatcatctcgagagaaagtctcttcgtctcaaaagttttctacaataccaactaacgtcagccttaaactcaagaaactaaaaagatgtttggtattatttttgtttttgttttcaaaaaattatttttagaaatgagaacaaaaaataatatttgaagtttttaaaaacaagtcattagttagtattttttaaaaacaatattaactaaaagtgaattgggttttaaaacagaaaacaacattttattgtttttaaaattcttatttttttgtaactttgttttctgaaaactgttt

SEQ ID NO: 391088 - DNA, 1249 bp, Cannabis indica
tgtcaccttctaaaagtagcagcaaggaagaaatttttcgaacatgtatccccctcttcaatccacgagattcgggcccattatttccaataaagagttttcctctccagggccctattcaacgccaactagatctcgtattccgcttcctagtctctagtccccatagggagatttcgcaacttttctagattagcttcaagatctttaatattggtatcaatatttccatactggagcttattccactggatgagggcaacccgggtggctcctattttcttaaacaatcaagtcggggcccaaggaaagacaaccgagtcccacgtatgagcaaccaccaggttacttctttcatcccgagtccaagcctcttcaaattttaaactcttcttgaatttagcttcaatccctccaaaataaaggcagataggtctatgatccgagttactagtatgaaaaaactgaaggacaactttggggaagagtgagttccatccatcattaacaaggcccctatcaagggcagatttaacacaggcaataccagagcgatgattatctcaagttaatttatccccttggattgacaaaaaaataaaaaccccccaaaaattaaccaacttcaaaataatatggataaaaaagtctttccctttagagccctcctctcagattcattgtgcacaaaatttgtatcctccaagattatccaaggattgccaaatttatctcccgtaagcatgatctctttccaaaatttctttttttcatgaaaatacggaggactataaacacacaagagaagccacaggtaagtagggggtctaaatataccaaacctgagatttgattattataccagttgatacatttaaaatcaaaaccccctttccaggctaaaatgatacctcttgcacaaccaatagtgggaatagtgatattaaaataaaaatgaaggcctttgagaatatgtaccaaatgagtagcatcagtttttagttcagtcaggaagataaaatttggagagcacgaccgaataagggacttcaactcgagaactatagaggtctgtcccaaccctctaaagtttcatgccaaggctctcatgactcatgtggaggagaggggacatcctcctccatgttacgaattttatgtttattacgcaagtgtacgcaatcaagtagtatctcacgcaagtgaggtcgaaccacaaggaattggattaagtactactaaactatac

SEQ ID NO: 391089 - DNA, 1325 bp, Cannabis indica
gttgcttgctctttaacgtagctcttcgtgttaggatcatcaaggagagctgcatcagattggaataagcctcttcttttagctacaatggtgtagtaatcgttatcgaatgatttgaagctaccggggtccatttctactcgtgtggtaaaatcagtaggaccgcatttttgtctcaaggttgcagcatagtttggatccaatgaggggtctgcatctcctttgccagtgaaattatacaatcggttgttgaaggcagcacatgcagatcttccaatggtgtgtcctcctgaaatccaaaaggagatgcttaaagttggaaaaaaaaaggtaataatacaaaatatagaaatgtttaaacaaaaaagttacctgacaaaacaaccaggtctttaacatctaaaccctttgtagcaaacatggatttgagtattgttatgttagcaaagggaggaggtaaattggttaaagcctccaaagatgttgatacttttccatctcttctgccggttggaacatcccaagagggtccataaatctaaaaacagagataaaagttcaaatttgtaacctttgtcacttagtgcatgcctacttaatttcatctttcctattttttaatacaatatgcttttaattggtgaaattgaagtttattgttggttaattaccatggatacagcatctctagcaaccaaactcaagatatcagcacatgaaacaacaccagggcatatcttttctactgcggatttcgcaacatcaatgacatcaaatcctgttaggctgagattgggaatggctgctttctctgcttggtttttacttgttgagttcaatagaacagaaccatcacatccctgcatgtatacaactcattagatttttattcatccattgactaagttgtgataataatattaaacaaacatacaaagtagtaaagaaatttaaaaaagttaagaaaaataagaccaagtagattttagttgcaaagaagataccctgacaaaacaatcatgaaaatgcagcctcaagagaggtgcagcaagagttggaactcgagagatgtactgagatgttgtccttttaatgacagtttctgctgatggacaagagcgctggtagaagccgagtttcaagccttgtgcggtagccctttcaaagacagaaagaacaagcagaagttgatgaaagacaagcaaggatagcttaagacttgccattggctatagtaaagaagtgttatgttttgttaattgaagggtgagatggtaagagactaatgtgccttgtttttatagctaagagtatggctgttgact

SEQ ID NO: 391090 - DNA, 1750 bp, Cannabis indica
attctgtcaaaggcgcttcctgtcagagatgagattggtagaaggtttcagatcgaggatttgagatgtcctttatgtggattaatggaggaatctatggaacacttgtttctgtcgtgtgatgtggcgctacgcttgtggcgctcttcaccttggggcatttaccctgtctgtgacaatggaatccgtgtttgggactgggtgaaatttatgtggaatcttaaaaataggggtctccgtactgaggatatattcctttatgcgtcgattgtagttgacaacatctggaggatgggcaatgaagttgttcacaataataccgcccctgatgttatgaaatgtattgacagtatttccacttattttgcaaagttacgtacttctcttatccctagtccgactccaatcttgcgggagagatgggagccgccacctctggattggattaaattgaactgtgatgttagagtgggtatggagagtatgtgcatagcggctgtagcaaggaatcatctgggtacggtggttcgtatccacacggctcggttggatttcgttgatgcggtttgtggagaagttgtggcctgttgtttggctttaactacggcggtggatttaggtgctagatttgttattgtagagagtgactcaagacaagtgatcaatgctctcaatgggaaggagtctcattgggctattgaaaactatgtctctttttgtgttaagtcctctccttcttttatttgttgtacctttatgaatgttagtagaacttgtaactatgtagcccataatgtggctaagtgggtgttcacccaccggatgtatggctcttttccggtctcctcttttccggggaaccttttttataatgaccgggaggtctaactattttatcttattaatcgaatgatgacgctagttttcaaaaaaaaaaaagatcatggaggcagaaagtaactgtgagaaaaccaaagtgtagattaaaaacaaaatttaaagagggcgcgcattaaataaactgttagaacaattaaaaaaattcaataaaaagtatttggagacccatacatagctcaactgtcacatgtgatcagcatctctaaccttaacaataaatttggtgtcaaactctttttacactaaccacaattaatacacaaaaaattacattaaaaagaatatcatttaataaatttttggcatgctaaatttttataaattttttaaaattttacatgatgtcttatataaatacctataacatacacgaccataaaaaaattgaattaaaaaattttctcaaataattaatgcattgtaaaattttctataaatatatgtaacattattatatatataaaaaagaagaaactaggatgcagtaactgcagtgaaactgcatatatgcagtgcattgtagccaacactataagagaggtataatgttacgttggagatgtttatttcctgcaacgtcaaatatatcaagttggagataacctcaattataaggtcatgttagagatggccttacatataaaaccaaataattgtgaagccatcacagtaaaaagtaattgtaattatatgcttcaaataatttagtcccacaatttatcagtgcactaaatttacactggcgtgataatcatcgataaggtttgtttacacttagataagtggaatgtctttttgtaatatcaacattaaaatagtatttaattttttttttgggatattaatagtg

SEQ ID NO: 391091 - DNA, 1235 bp, Cannabis indica
tctctctccctgtcataaaaagactacacaaaaaaggttttttttggacagaatttcggtggtggttagtgttttagtagtctttgtggtggttggccaaccttagtgatggaaaatagaggagaaataaaattgacattttttgtgagtagaaaattgagtacatattttaggattagacattatattacatattttaggattagattttggaaataaataaggttttattggttaaatgtggctggattctcattaacgaggattaatctctgtgttgtaaggtcttaagtgacaagtacctaaggggtagacctttcttgaattgttctttttaaaacttagatttgtggttctggaagaatgtcgtgaaatctaaagaaattcttaaataaagggcctgcaaacttatttcggatgagcaaggaacgaatatttggaatgatctgtgggttatatatgaccagacatttatcctcaacctgaaggtttggagaaagttacgaatttacttttaaacaatgggaattgggacatctccaaactacatgctctttttgatctagaagcaactaagaatatcatcaaaagtggtagaccctgtggacaagaaagggataagtgggtatggcttaaacagtcaaatggtctattttcgactaaatgtgcttaacttattcaagctttgcagcgtgccccaccatgcaatgttgctcccgctatgtggaataaactttagaattctaaaattttggagtgtcacaagatcctctggtggagcatcctctcaaatactttgcctatttgctctgtaacgccctaaataattaggcacgctacccaaaatgtttatgaaaccctaatcccctaatcgggattactaatcaaaatagcgcagaatttaaacttttatattaaacagaatgaaaataaacttgcaatacatttaaacttttaaacagttgggatcccaaaaaaatctttacaaactctattacaagtcttttcttactagctgacctaaatggcaaaatagaattcaaaagttcatcactggtagacccttaacccgcttggtctgatatggctcgaacatgtacattcttcgcccagctcctgaaaatcaatatctcgacgctttggatcagcgtaactcttctgcctactctgagtcgcgaacattcacgctctaatcttgtcaactgcctcacttgttttctgaacagcttcgggac

SEQ ID NO: 391092 - DNA, 1039 bp, Cannabis indica
ttatttttatttttttggttttatattaatgataataatcagcatattttaaaggaaagttctactatttccactaaaatcaaagtcaaccttaggcaaattttaattttgctcttacttcgaggtttaagtaagtttaaagcgttaggggtaaattggttaaataccacaatctcgcctaaactcgatattccagttatcaaatatatgtttctctctaaataaaaggttcgaaaccaaatgatgtgactttaatggccaaatcgtcgcatttctatcattgacgagcaaaaaatataaaagtataacatctatcatatataatacaactatatataatttaataaaatttttaaaattaagaattataaccctaatataaaaaataggacctacattataaaataatcacatataattatataatatagttaattaattggtatatgtactgcttgcccatgtataggtttttgtcaaaaaattgatataaagattgaatatgttgatcattttagcagaaaaactaataaaaactaaggtacgtaatttataaatacagagagagagggagagagagtatatagtagccatatgcatacataattttatatgaatttgagccgaatgaattatgcccaaatatagtttcattttttttttgctctccatgcttaatcggctcaaaacaaaggatagagtacaagtatataaacaggttgaagatacaaagtgctttttctgccatgccgaagaagagactttgtagcacttgttctttgattgccgcttctcgtcaaactgcttaaggaaaataaaagattggctttcttggttgatgacttccaattctttgcatagaataatagggtggatacgaaaagcgaaggttagcaaggttaaaaagatgcactacaaaaaatcttacttttagtcacaacaaaaattgtgactaaaagtaaaaaaattgtgactaattataaattatcattcttatgttgtgactaaaaaatacatggctaaaggtatcagtcacaaa

SEQ ID NO: 391093 - DNA, 837 bp, Cannabis indica
ggagaaccatcagtcaacaaagtgtaaatcaaagctccaagcattacacatcctaaagcactgaaaaatactcttgcagtaacaacagagtgtttcgccttcgtttctacatcgttcctatatgattgagaattcgaagacttattcatggcattaacaacaacaacaacaacaaaaattgattcaacataaattattgaagtaagaaacaaagcttcttacttgttagaatggcgcaacaagacatgataaataggatctgtattagcttcttgaggtgagagcttgaatagttgaataagaatataggtacttaaaacagggctgaaataataacaacatcaatttttagaaacaaacaattacataacagggtatgaacttagaagaacaattcaaaataaagcttttgaccaaaaatggcaaccaagatagattgatttttcttgaataaaaaaaaactagttttatccaaaggaactgagtgaataaatttaaggagtttttacactatatactactgaaattttcaatttttttttttgtggggcagaatttttttcaaaaataatatgcaatgtgttaaatttttactattgtttcacgattgttttttagttgttcattttaattgttctgttttattgttttacggttgttttataaagggtaaatatcatttcaaaccctgtgttttacaaaagttatcaatcgaatcttctgttttgttagatgataaaatgcaccttgtatttttcaaaatattataaataagactctgactttaatttttgacaactttttttaatataatcaacttaaaaatacaaacagata

SEQ ID NO: 391094 - DNA, 1072 bp, Cannabis indica
caaacaggtaattaactacttattacttattactgcttaaaatattagagcattgctattaggtaccagtggtgtctaacactttcttcacgtgtcgcattgcaattggctagcgatactctctaaaagttattatattattatattatatggaactcaatacttaattacaccaatagcgatattgacacataagatatgactttagcatttttcaaaattatgaccagatgatattttgtaattgttattattgcattttgatattatgttgttgttaatttgtttgttcagcttttaatgcatggggaacatagagattttggagttttgagcttcggttcttggcaccattgtccatttttattatctataagtttagagcaatgttatacatgttcagatatcatgaattagtatcttaaataatgtggcaatgtttatattttgaaatatctacccaaaagattgaaatataaattaataaaataatagttgtaaaatgacatatacaatatcatgatagattttcatgatatagattattttttatatatttatagggtaaatctattgtaaggcctcttgttactacctcatggggaaggtaattagactaataagaataaagtaaattaattgtccaacaactgatataggtgtataaaatgattttttttaaaattaaaaaaaaaaaaaaaaaaaatgcaactgcttcattacttgttgtgggtcctacgtgtatggccttcagaagtgttataaacgaggacgaatcatttgggactcgattgtgtcctctagttcaccaagttaaaacattaattctccattattaattatttaaacgcacttaattaaggatcaaactctactgttttggttgggcaaagattaagccgaacagaatgaatgagagtgagtgcagttggccaagggaaagaaagagagatcaataagaagagagatatagatataggcttaatattttagactaattaatattaatattattttattttatttttaaaatatatattaaattaattttttttataataatatataaatc

SEQ ID NO: 391095 - DNA, 774 bp, Cannabis indica
ttatgttgtgactaaaaagtcgtcactaaaactagcagtcttttgtattaaaacacccactaaagacattgaaacacacatgtgtgtaattagtgatctaaataggtgtcatgccaaaataaaaatatggaccgtgtcgtgacataccataaaaaaatagattgtgtcctatcgtgtcaatatttttgaaggtaagcccgatacgatttgtaggcccaatatttttaggattcatgtcatgctttactcaagttgaccttttttcttatatggactcaaaatctatgttctattttttaatatattatttttataattagtgagataattactaaattatatgtaatttttatagctttaattatttttatataattcttcaataataatttacaaattattgttagtactattatcaaattataagatttttaacgtgttgttttttcgaagtagattatgcatgcttatatgctgtgtttttcaaactttttgtgtcgtatcgtgttataataattatattttttgtactgtgttgtactaatttataatattgtgcttgctatggatggggatatagccttccttaatagcaggagtgaacattttgaccgagtttgacctagacccaaccaacctgttcggacctgacccgctcaacccaaaaattttaaaaaatctgttatattcagtcgggtcgggttcaacccggtacaccatcgaacgagttcgagggttgtttttttatggtcaccgggttttgggttgaacccg

SEQ ID NO: 391096 - DNA, 855 bp, Cannabis indica
gaactttcatttatgttagtactttttactaaaattagaaaaaaagtccttaaattcaataatgtcaatagttcaaggggtatttttaacgaccttaaaagttaggggcatgatttgatacatatcaaagttcaaaggggcaaaaattaagttaggggtatttttttcttttaggattttatctttatacataatggatataaattaaattaagttaggttttttaaaaaaaatatttttgatatactaataagtacgtgatgaaattaaaaaaaataattaatattaaattaagaactcatttatttggtattttgtataggttatataatggtattttattttttatatttagggtaatgatgatacatgtacacacaaatttgatacacttttatgggacaaataattttaaattattttttgttaagatgagtctttttttattaaaaataacatcaaaataacaacaaaaaataatatacagataacaaaaaattaacatgagtacaacataaaaataccgtattttctataaataaaatcaaaaaaatcataaaaatatttaaaattctataaaattatatttttataatttttttgttgtttttgtgtatttatgaaatagtccctacccaaaacttattaacaataaagtgtaataaggccaactaattctactaacgaactaaaaaagaaaatttacataatacacctaaaaatagaaatttacataatacacctaaaaataaatggatatatatatttttacatttttacaatttttttatttacaaaatatttttttttaaaagcctttaactatttttcttttaaaaaaaattgttttccata

SEQ ID NO: 391097 - DNA, 3212 bp, Cannabis indica
ctcaatgtctatctaaatcgctcttttatttttaaaataccatactacaataaagtgacgctatagggcatacattgcattttctactattacctggcataaaatatgaaatacataaaatttcacatataacataattagcatacctagaattcaaatatatcaccataaatacgtaaataataattaaaagtataattctaaattaaactcttattatttgctaattcttattttaaagttaagcgatcatttgaagtttccaattctgaaacagttgttgtaatcaccatctcataagaataaaaactcaaagtagatgtagtgtcattagtattgcaacatagggggtggactactataaattgctatgtctctcattaattactttacaactttttatatttttgctaatctagcgagcggatgtggcttagaagtctagtccagatttctgagtcaacacatatatttagtaattataaaaagttaattttcatttacaaagcttcatttattgttaatgaaaatctaagttaaaaccttctaataattatatcttgattccttatgtacaattaattcaatgtaaacagattatctataatctaattatatatttggacctaactgttaccactcccagaattaacactataagggaactaatattcgatcatttcaaaatgcttggattctattattgtataacatgtttccagccactcatgttattaagctaccaaaacaaaaaaagttgtaaaaattatcttctctaagaaattcttacgagtgaatcaaagaacgcaatgaacttaagtaggagttcatgtttactcaagattcatactaatctactaatgatcatcattgtgatatgaataactctttcatggtaaacgacatgttaatgaaagatgttattacatatcggtccagccatgtataaaattatacacaacacctttactacatctctatccacatatgttatctgaatcaaaatcacacacactagagtatagtgtatagtatactgtacttagtagttctatttaaaaaatctcttactttaatatattacagacttgctttattcatattgtgtagtcttaattctcttgtacgaccttacaacattataccatctccatataaagaagaatttttttaaatatttattaattatacttctataattaatgtattcatttattttataattgtatttcatataatctataatatattatccattaatactatttttagtagcataaatcctaacagttattcatttcttatcttaagtaaaagttacaagtgatggggggttaatgctcatgttttacatattaaatatttggagaagtataaataactatttatatttaaaatacaaagaagtggtatttgacttggtcataccatgttgtttatgagcagatgcatagacgagtgtataatatgaggaggtgcatagttgagcatgtattacaaggagatgcatagctgggcatgtattacgagaatatacattgttgaacatgtattacgaggagatacattactgactgtgtattacgaggttatacattactgagcatgtattacaaggagacacaatgttgactgtgttttacgaggtgatacattgttgagcatttattacgagatacattactgagcatgtattacaaggagatacattactgagtgtgtaatacaaggagatgcattgttgactgtgtaatatgaggagatgcaaaatccctgtgttatgaccaactgcaaggtccttagattatgaccagctacaaggtcctgtattcaaccaactacaaggtccttatactacgaccaactacaagatccttgtggcgagatgttacattatttactgaaataacatcccaacaatcctgaaataccccctcataaaccttgtgattcttatatagatgagatcgtctcacatgttgagtcttgagtttattcgagtggtcccacaatgtatttgttacaagatttatgtatgccatgtggcacacaattcgacttgtttattaaatagtccaaaaaacgggtataacacaaaggttgccattaaatgttgtttacaggatcgaggcttactaatgatgacattcgcctcagaattctcgctgacatgatcagccctcattttgcaatctgagatttctagtgcttccacaagtcacatgatgttcatggatctaatagattagcaacatgtgtactccactcacggaaattgagaggttcggaagcatccatgacctattgccttggaatttcaaaaggcatgaactatttatggtcccacgtaagaagacagatttggaggacaggtgcaagcctccgcgactcttaagcctcaaaggcttgagggtgaatattatctttgttttctgataggtgacatgtgtacttttaaggtcccaaaatcaacaaagacgggtacattcataggcccaattaagccaatgggtcagtccatggcgaagtccaaccacggctccgaatttaacttaatattgaacctttttggtcccggaagggcaactcgcccaaagagggcaagacttaacaaaacatatccggatgccctcatggggtaatcttcatcaggcagttaaagagttgtccatgtgttgtcctacgtggcaccgttttgacaccgaatcccaaaaaatcaggggttcgtcccctaagttagatttgggaaatctgcacaacaccaaaaggaacatacattttgtccgacactcactactctgataattactgtacaccttcgaaggtgtatgcttacctgtcaccatcaaaaggtactattccgtacagacgacagttatctcttaaattgagcctcacttgctcgacccaatatcaatttaataatatattttactctatcagtgggcttagtttactcatccaaaccataacgggtccatgtttatccaataacctgattcaagcctataaataagacttcatctcttcatgcaaagtgttacgatttcaagctaggctaaggatcacaaatttgagcaagaacactcttgtgtaaaatattccatagccaaagagcttcaataatattgactttaaaaatatttttcaagctacgctaagtctcattatgtaaagcccgcttagttaatttggaaattagcagttgttta

SEQ ID NO: 391098 - DNA, 1012 bp, Cannabis indica
ccatagttcatttttcacagtcagaaaactatgtcagagcttctctctctagaaattagaactttgacatttagccttttctgtaataccatctcgtgagaaataaaaactcaaagtagacgtagctccattactgtcatgatacaaggagtgaactactataaattattgtgtctctctttacttttacttaataaatacttcattctcgccaatctagtaagcatgtgtggcttaaaaatcttattctaaatttatgagtcaacaattattatttaaacttattcatagttgataaatttatatcttcttattattaataataataaattatcatatgttttaatatgtcgtgtcatgctttttgggcttgtcacgtgtcgtatttttcgggcttgtcgcgtgtcatacttttcgggctagtttattcgtgcttacgtatcaagtctttcgtattccttgtgtcgtgtcgtgcttaaggacatacttttcttaccgtgtcattttaatttgtaccatcatgttgtgtcgtgcccaaactcgtaatttttcgtgcctagttgtgcttgtgcattcttagctcgtgccggttttgtgccacgtcaaaaagcccacccatatttacagcaaaatcgatatgaaatacagaataatataaatatatcgagtgtatatgtcaacaatgaaagagatcataatgtctctagtcattgatctttaagcttcaatcccaatgtagcttcagattgggaatccagcttccaagctctctcaactctctttacatggaatttgtagttttcacagaatgagagactgagacccctatatttataccattagcgagcaatcagtaaaataaaataaaatcgatttgaatgattttagggtaaatactattttggagcatgtgttttataaaagttaccaattggactatttattttgtgaaatgacaaaatgaaccctatattttccaaaaggataaaaataagaccctgagctcaatttt

SEQ ID NO: 391099 - DNA, 984 bp, Cannabis indica
gttgctgatactaggccggccaagcccagtttcattactattgatactaggtcggccaagcccggttctattactggtactaggccgaccaaactcaattctattattgctactaggtcggctaggcccagttccattattgctactaggccgactaggcccagttccgtttttgatactaggccgactaggcccagttccattattgctactatgctgtcttgtagaatccattggtggccaagtgagcctactacttggtgaaggtaatctactagagtgtccactcataggagttgatgatgtcttttttgcatgactaacattatttcccaatgcttgtttagttttcattgacatttgatcatcatcatcatcatcattcattaaaaaggaatagtctcttgaatcttttagtttctgaactttagttttaacatcatcatcatcatcagtcacaactttgggagatgataataatgaagttattgacttactcatctcctgaattactcttgaagcaataatattattattaactggtttagatgatggtgatgggccaaaaaatgatccataattatcatattgaagctttttcctagaattattaatgttattgggaggaacagtagttgatttgttcatccttttctttctgatttcttctttcaaacgttctctgtacccatgaaataactccaacctctcttcttccttatatttattatcttccatttttggataaacgaaacaatctcagatctctctgcaaaacgaatgacgacgaaaatgatcgagacatatatataggagggaaagcgaaggtcccagaagaagtatgtacacgttattatacgataacctaattctactatgactataactacaactaaatactactgtgtatagatatttataggaaatcataaatatatcttttctccattattgtttattttacctaaaatatatatataggac

SEQ ID NO: 391100 - DNA, 2264 bp, Cannabis indica
agttctaataaaagaacaaagaaaataaaaataaaaaaaaaaaaaaagttgtcaaactaagctataaataataaactgcacaataataaattaacgttaatgttattattaataataaattacaaaaacgtttatatatgtaaattatccaataaattactattagaatagattgtatttttaacatatgaactaagtacaaaaatatagatacaaaatcttataatttctcattagattactatttatacatatatttattcttattattatttataaaagtacacacaaaacaacacaagggaatcaacgatttgtctagcaagtacatattttttcttttgcttcttttgtttccaaatgtattacaagccatatattttcttaagtaacaaaacaaagtcataaattttgttggggtgaggaagagacttggccacactatctttctccatgcatcttttggcccactctacaatcttgggacactcggactgagtgctgtaattagcacaaatctcaaaggagtaaaaccaacttgtgatgggaactaaagccaaatccaccaatccaaacttatcaccaccaaagtaaagcttgtcaccaagctctccttctaaggtctttaagttctcaataaattccttctttacagcctcttgttcatcccctttagatttccacaccctcttaccaagtgaatatatctgcattattcatcaccccaaacttcatattagttggatattcaaaaaataaaatattgatagtatttatgtaatatgggccaaagcccaaacaaaccttcttgtcaatgtagtcggcccaaaatctggcctgggattgttgataagggtcagagggaagcagaggagatttatgagaccaaacttgatcgatgtagtaaacgatgtttagtgactcacaaatgggttttccattgtgaatgagaactgggatcatgctatgaactgggttcatttcaagaagaagagagctcttgttggataagttttcttctttgacctcgtattgaatatctttctcagctaaggcgatttttactctcattgcataagagcttggccagaaatccaataacaccactttgtcttccattatggctgaacttgtaattggtcttttgataatattgctgtgtactagtagttattatataacacacttggatacatatatagattattaagtgacttggtcattgcttatgttagagtctcatttttatatttattggtttcttctcctctactctttgttctttcttgttgtatggcctcttttaatttaattaatatatctcagcagagtaaacgcatgcatatacgtcataattattatgatttttaaaagcatggttgtacgcagccactattgaataatattgatccatgtttggatattgccaactaaaaaagagaaagtcatgtacagagatagttagagttataaatagtaatacggttcggcattttttgacgctatgacctaatactaaaaaaatattggcttaggccaactctaacgagacttcataacattaaatatagtgtgattttatacaaggctattcctaatgttaaaacttaaatttagtgttaaaataataccaaaaaactactattttaacacaataataatttttctttttaattccaataacaacactaaaaattacactaaattttatattatttattattctattattttattaatataataagaatattttaatacaatgtatacaatcaatcaaaactcatcaattcatacaaaataatcaaaacaccatagatgagtttgatgaattgatgagttttgattagggatgacaattatacccgcaggtacccgctcctaatgggacaggtacgggggttgattttcgggagcgggggcgggtatgggtttaaagattcatacctgagtcggaaacggggcgggggcaggggaatagatacccaccccgaacccgccccgatatgatatatgtatacgtttaagttttaaaatcataattactacaattaaaataatttcatgctttaagctttttattgattacactcttttttttttactatacatactattagtttattgttttactaaatttttatgattattattttttataattctctttgagacattattttttttcaaaaatatatatgtaatgggtacccgatgggaatccttcccccgtcgggtaatcctcgccccgcccccgatttaat

SEQ ID NO: 391101 - DNA, 2031 bp, Cannabis indica
cgggatgagtacttagtggatgtggtatagacatcgtacctttgttaagaatgttcttaatcatctattaagccttgtagataggtgtatgagcgcctatgtacaagtcggtagtatgttatgtgttatatgcttttcttacttagtttgtcgattcacaattattatttacatgtgtaggtgaaggagaggctaagactgagcaccagtgagtgtagagcttggggatgattgtacaggccaagatggttagacttgaagaattcggtctcaggacgacttgggccatatttttgtagtcattgtgcgatgtgtttataaacgtgcattttagacatgaatataaattttaaagacgggatctcaactttttatacagataaatatatttatatgactataaggtttaaagtttaaataaattttaaaattgacacaatttttcagaaactcttgattagcaaaagaataatgtagctcacctaggcaacaggctgttacaattttgttattagagctgccagattgcttactgaagatcgtcaaaataggtataatcaacgtaaaaaataagctcaactcatggttcagtaagcctctacttatttagtaagttatgtgactagaaaagtatgataggaagcatgttaggaatatgctagttgtttaaattcgttgcctaaaatccatgtacgtgctatttggattatatgtaatcgttgtcttaccgatctaacttatgaatttgcaggccaagtccggtaatatggacatctagcaaaatacaaggagtcaaggtaatatggttatgaccgtaggcggttgtggagggcaaaatcctaaaatctccatggacgtggcagaggctgtgggagatttcaaggaggtggtcatgaaaatctaccacaagctcctcagaattgggagcaaaggtttgcagaaatgcaagcccgaattaatccacaagatgaggagatttagaggctgagacagcagtgtcctcctacaatgcctcctcaacaagtgccagccgctctagttcaagtggtgccagcagaatagcatgttgctagcaaccgtatggagtctttgtatgaacactttcgtaaacaagaacctcaagcttttttgggaggtccaaatttcatgaaggttgagcagtgcttgacagtaattgagagaattttgaactttatgggcatcaccgataatgactaggtaacctgtgccacgtttttgttctaggaggacacccttgtgtggtgggaaatggtgtccctcactcgggacgtcactacaatgacctgggaagagtttcaggatctattttgttgatctcacttttggtcaacgactctagatccttaaagcaacaatcaatcaacaagatttaagagagatgtaaaacgaggaaaactaaaacaacaatatattatagaggtttagccatattattctagtaatggcctacatataggtcacttttagagatttctttttgattgtctccctatattcccttgttggattacatctttgatggctcccacttaacagtaggagtctagttaaatgcatacctcttactattggtactaagggacattttattgtgatatttatttttatttggaaacaataaattccttctagactaagttatcaacatagcattctactattaacattaatgtaaaatacttacttaagattaagtaatcattagagataccataaaatatttcataaggactaggaattgtgcttgagtcattcaaatagacatggtaagatttcctatcttatcctcataattttgataattataactatccatgcaaatggttagattaactttccttagttttattttaaaatttctttcttgaacatatcattttaagtcatcattagtgtcataataataggctggatttattaaaatcctcccacaaagataaggtattgtgattctatgtctagggactttagtggtatctattactattttaggagatattggaacatata

SEQ ID NO: 391102 - DNA, 1555 bp, Cannabis indica
tattaacaataattttattgtggttattgattggattactaatcctcactcaaattatatttttcattctattctgttaaacattaattttttattaattggtagtggtggtagttcttgtagtattattctacgatttgcgaatgatattgctcgcatattggtaatttcttttactagagtgtttatagataaatacttgttcataaattttaaattcttctatagtaaatttatcttaataaattatattttttattaaaataatgaaatagcatgatcttatcacaatcacacaaaatgaaaaagttttaattggtccaaaaaaaaactttgttaagacttgtcaaactatgattttgttgttaaaaaaaaaaccaagttttcaacaatatatatatttatgacacgttaataataacttgacacttaccggttagatacctacaaaaattttaaaaatataacttagatattattatcgcaaaaaattaaatttagatatttttttgcaatcgaaaatttaacttatgtatttacgacacaaattttaattaaaatgaatggagatggtcaaataatttgcgttgagaatttgatatcatatatctttttcaaaaataaaaaattgatattgtgcatatatgtatatgttaatgcaatttttcgttaactaataaatgagccttaattgacaattaaataatactgaaatgttaaaataaatccccacatgccctctacattgttcaaataaacaacaaacagtacaaagcaaaaaaaaaaaaaaagcctaggtggccttcggcctctatcatcctacagacagattttaagttagttacaaagtttgttaaaactctgcaactaacttttagctctctctggttttatctaacatataaataccatcacaaaatcagaacaaagtagagaaataacacacagaacagattagggaggggaggagacttatagtggggtaagtcttggagccctaggattagggctcggagatccaacatcaaaacaagagaaaggaagatcatacacagggaagaagaaagaagaatatcagttctgatttagagagaactaaacactgtaaactattaaggattaccaaaaatcttacctgttgggatttggaatctgactttgtactcttgatctttgaagatccaatagaggaaacgaggcgagctcaaagaggacgtatccagcataattttggggaacctctataaaatcaggtgcattctttctttgtttttccttttctgcatttttaacattgtgtttgctctgtgtgtgtgtgtagtttttttgggtattaaatcgatctgggaagggatttgatttctgggttattgttgctgccttcgtgctctttagagaagaaccacgaagaaggctctactaggtttttttatttgggggttgtttatgtgtatgagtgaataaagagaagagtgaatgtgtgacagtcagtagtcccgtgatccgtaaggggaaatatcgggtaagctgtgcaatcccacatcgcctggggaag

SEQ ID NO: 391103 - DNA, 1243 bp, Cannabis indica
attccctagaatccctgtggtcgtggccaaggctatggtagagttcaaggtggtcaacatatggacccaccacaagctccaccttattgggagtagaggttcgtagaattgcaagatcgtatgatccaacaagatgaagaaattttaagactaaggcagcaaggtcctcctgcagtgaaaccaccgcaagcacaagctgttgtagttcttgctgtgccagcagaacaacctattgctggcaaccgtgtggagccgttatacgagaggttttgtaagaaagcacctccagtttttttgggcggtccaaatatgatgatggctgagcagtcattggcaatgatcgggtgacctacgccacttttcaattttaggaagacgccccagtgtggtggaaattggtgtacctcactcgggacgtcactattatgacttgggtggagttccgagatctattcaacgccaagtattacaatgaggcggtccacaatgctaagcggaaagaattcactgagttggtgcaaactgatggtatgttagttactcagtacacaaccaagtttgaccatctggccaagctagcctcgggtattgtgaagatggttactgagaaatatttggcccgtttgaatttaaaaattagacatgatctacttattaccacaaatgaagcaacatcatatgtggaaatggttgaaaggctcagtgagccgagtgtacagtaaagtttctttaagagccccgagtgactctgaatgttggtgggaccaccactcttcctactcctatttattgaacggaaggtggtgattccaccattgatcagaaaataatagttatcccgacatctggttgcttgggacagagcaagaagtttcgtggaaaccaattcagaggtggacgcgagggttactcttaccctgaatggaacgttgtaagaaatatcatcccggagagtgcaactggaagacatgctttcagtgtggcatggtggggtatttcaagaaagatttccctcaggtaaagaaagaagagcagaagccataggcaaaactcttacctgcttgggtgtttgccatcactcaagttgatgctgcagccagtccttttgtggtgacaggttagtttcctgtcaacaactccttttattctgtgttatttgacacgggggctacacactcttatgtggtaacatgggtaattgatcttttgggtaggccgtatgattttatcgaaagagggtttg

SEQ ID NO: 391104 - DNA, 1131 bp, Cannabis indica
aaaataaaaaattacttgttgggttcttgattaactacccttttctttttgataccatgtaaaattatttagtacaaaatattgttcattaggttaatatttagtgcccttacgttcagggccggccctgaaatgtagtgggctatagggtaaaaattattttttgggcccttatttagaaaaaaaatggtatttttcaaaatcagcaaaaaaattgtgtaattttaaaagggcaaaatttttttttgggcccctggactaggtgggccctaggcacaggcctagcccgcctatgcccagggccggccctgcttacgttttgacttgtgatttaagagaaaaaaaatgttttttttttttgaaagggataagaagacaatatgttagttccaaccacattttctatttttgtaccaaaaaaaggatttattttattttttgatagagaatttggattattcttgtttgttgaagactttgtgatatgtattcatgaatgaaaaatgtcaaagaaaaaagataaaataaaataaaagaaatccataaattacttagatgtagttgtttataatataatagtataatccatcaaaatcaccatgaaaaatcttaatttattttatatattttgcaagaagaatttttctaagtttgttaatactttattaagtcattttaaataagtaggagaaaattgcaccaacttttatatttggatgttttaaaatgtgaatacgaaaaataagatatccaaaaggacaaagaaatagatagcaataaaaactctgactcctggttctggaaaagtgttgtgaaggcaaactcgattttaaagaaaggtgcttgtaaacaggtggctaacggtgagaatacagctatctgggaggacccttggattcctcattacaaaggcttttgtccaaaaccgataagggaaggagcactaaatctcaaccgagtgtctgacctgctactctctaatggctactgggacgtaaataagctgaaggaaaactttgatcatgaaactgtgaaagccattttaaaagggggccacccctctgggaatggaactgatagatggatatggactcaaacaagtaatggtatgttctcttgtaagtcggctta

SEQ ID NO: 391105 - DNA, 629 bp, Cannabis indica
cgtaaaggtgttctatacactactatagaagaaaactcacacagaataataataagaaaaagaaatgaacatagttgagagtagtagttttttttttttttgataattagtactttttttttgtgtgtggtaaatggaataatttcaatgaattagtaaagactttaatttgcattgcatcttgaagcagcttagataaaactctgtttactagaaatgtggagttcttttttttttctaagcaaatgaaaaagtttaggattaaaaaaaagtaattatatgtatatgtatttttttaagaaaataaaacatactatttatcatttgaatatgctataagtacatgcatgttgctaggggcagaggtaagtgatagtctaaggtggccttggcccccagcccaaaatacatcgtgttctcattaattttactatgtagttttatttctataaaatgttatactacgtgtccactcttaattaactatcataatgaatgtaaagtgttttcaaagaaatttgaaatattgtttaatagtatatctataggctatatattatataatatatagtaaaagtaaatagtatctttttaaaaaaaaataaataaaagtgagttttttttttttt

SEQ ID NO: 391106 - DNA, 1136 bp, Cannabis indica
tatttctcaaaagaaaaaagaaatagaaagtcaatttagccgagcaagttgtttgtccatttgagagctgcactacattggttgtttaatgtacataaattagggacacttttgaaaatgtacacaacaaactttttacatcctctacgtaaatgctaaggagttagaatctacatgttacacgtgcaataaattttgaagaaaaaatcatatccaatgttacaaaaatttttgcttattctgttggaattaatgaaaagttctatctaattttattcaattttactattttaatgattgtttatgtataaaatcatgttccacagactttgatatttaccaaatcatgtctctcgaactttgacatgtattaaatcatgtcccttgaatttttcatctatgttagattgttttactaaaattagaaaaaagtccttaaatctaacaatcttaatagttcaggggcatctttaacatccttaaaaatttagggggcaaaaatcctaattagccttaaataaatatagctatacttcttttcttattattatttattaaaaaaaacattatactctaacttgaaacctctttttgtgagatgagtctttttttaaaaaaaaactaatgtttttgctaaatcatctaaaagataaggttgtaccttaataggaacatcatctctgttgagcacttgatctagaaaagaacaagatgttctaagcaaccatattagcagattgtttaataaaaaaaaaaaaaaagatgtaagaagtttatgacaatcttctataataaccctaaaagaagaaagcataaataatgaatttcaaatagcttggactgctaccaagcaatttgagtccagctccactttctgccatagttaattgtgagatgagtcttaatatcatgagcctatgtttataaccactaaatttaagttatgtttcagattatcgaataaaaaaataatataaaataagaaattttttaaaattttctttactaactttacccaaactaatttcttcaaaataaatttgtatactaatctatctttagtttattttagtcatattcattctacccactttcaattaaaaaataatactctctttagtatatgaagagaaccg

SEQ ID NO: 391107 - DNA, 2246 bp, Cannabis indica
cgcagaaaagtacataaagcactgcctcggatagtactggtacgtggaagcgtacgtgcttaacacgcgcgtagagaaataaaataaagtactaatattttttaacataagataccatattaatatttattttattataaaaatatatattagtagtaatagtttgttggaaaaaaagggaaagaaaaagcgcaaataatagtccatgtcattcagcattaggtagtgtacgagtattggaattgaattgaatccgtcccttggattgatgagatccccaccgtccgattatactccaatagttaatatcaactactcttacaaaccgttgactgacacataaacaaccccaaaatccccgaatgcaatcaaaaagctattaattgagtaattaaaataaataaaacaataatggcttcacacaaacatattttaacacgtgtcaatagaatcttgaaaacttcaaaaattatatcaaaaagaagaattagcccattctcatatccaaaatatatattaccacactcacactcgatgctagctcaagtaacttataagtgggattgtgtattggaggtccttcattcgagtattagataaaatatagttgtaatatatgaacgcttaaaaaaaaaaaatatatccaaaatatatacacaaaaattatataatatgaatataattaaatcaaattgatgattaccttcaaaaattataagaaaatgttgtattattacacatttaatttttttttagttctttgtaattgtgagtgtcttttatgagttcatatcatatgctcatattttttcttaatttactttctttcttttctggtggcttaagaaaacaatttattatataattgtattttatagtttgtcatatttttcaaattgtcttttattttatttttctttcaaatcgccactataataaaatttgtcttatctctaatgcatgcaggtactaatttgatcgagtactggatttaacaaagctggagagtactcagttaacaagtactacaaaatatataaaataagattaaaaattgcatttttattaataattattaggtaaataatattttagacaaaagttatcaattagattctcttaagataaaataaattttttattttttaaaactgtataaatataaccctaaaataattttttatcaaaataaaacttaataattttttatatgttcctgttaagaactattttcaaattagttataagaccttatttttatcattttaaaaaaaaaatatataaaactcattttttcttttaacaaaataaataaattttataaaatacagactctaaaatagtattatctataatctaatgaattattcatttgagagtgatattttattcaaaccatctctaaccttcactaaaattggtgttgcactaacaccaaatgatgttatatatttatttttattctaactacaatttcaaaaattataaaaaatatatatatatttttattattatattaatttacaaaatttattacaattattacttatatctaattaattatatatgaacttaatttataaatataaatatatataattataataataaaaatattaaatttcatgctacagtgtacgacatatatactatgtagcataaacgacaaaatcgtgattagtatagtgttatgttggagtattattggacaccaaatccaacttttgatgacatgttggaattggtcctagagcatatgtgcactattttattaaattggtatgaaatcttcacacattccatacactaaattttcacattattaggccatctccaatcttaaacatcaaatttggtattacactaacactaaatatagtgttatagtttctttcattccaacaagagtaccaaaagttacaaaaaatattctttattattatataattttttaaatattctttttattattacatttcacatgcatataaattaaattaggcacacgtgtaagaaactgtttgaacattattttcagcatgttaaatttttcggaatttttcaaaatttggtaggatgtcttaagggcatctccaatagcagaacaaaaatagtcaccccattagtctcacttcatataattagccaatcataattttttttattttttaattagaaatattaagggacactggtacctatttaaaaatcttttaatcatttctctcttctctccagtatgccac

SEQ ID NO: 391108 - DNA, 699 bp, Cannabis indica
atgtgatatatatatatatatatatatatatgaatcactgctaaaaaaaaagatgtccattattattcatctctaataaatttgatttatgagtggagataaataataattatgatacaaattgccgttgtgttgagaatccaatccatagcccatgatgtgttatatgcggtgagaattttaatatgtagctgtgattggttgagtacaccatcgatgaatgaacttggttaattttcttactcttttattattttcatgctctgtttttttttaaaaaaaaaaattgatcaaattcacgctagtccaacacggtaatatttattttattaattacggtacaaattgatttcatatttatttatgttagaaaaagtttattgtgctaattaattcataagaatcaaataatagaatcaaagattagcataaacgtactgaaatccattaaatcaattgtaaaatgtatgatcttccaaacttgcaatgaaatctttctctggaacctttgtttcttgatgatgaggtttcaagaaaatgaaaaaatatgacactgcaaattagagaccattgcctgttatattgccaactgtcaaaatagttaggggtgaactaccagttgtatttttttccttatttttatgggtttccttcacttataaaaagaaagctcccttagctcatttttcacattcagaa

SEQ ID NO: 391109 - DNA, 893 bp, Cannabis indica
aatttttatctattcgtaacctgctattacagataaaaaaaattgtaaccacgatggttacaataaaaatataactattgaatagtcacccatattgaatatatatatatatactaccacaatacaaaattcagtcgtgacacttaaaatttcttatatactaatattattttttcttaaatgtgataaaaataatttcaaaatactaaaagtataaaaattcatatcttagaagaaaaaaataataaaataacaacataaaaaaatgtatattttatataatataatttttatatatttataattataataaattaaactacaatataattatcgttataactaaaatctcaataatttacaacattttaatatttataatttaataaacatttgacacaatttttcttttattcagacaactattttaaattggcccaaaatcaatttaattattatttaaatataaaattaattattttgatagaaatatatatttgtgaatgagcaacaacacaatgtgagatgccataatagcaatttctaacattatttattaaattataataggtagaatcctcatattagaacgaattctacttgcctaattggaagctaagaagctccttcgcatttctagtgagatataaaatgtgtttgaaagtaattgtgtaattattaggtatagtgtaattattaaagttgtaattacacaattttgtaattccactatattttaaaatacaaggtgtgtttagatataaggtggtaattatatataaatttttaatattttgtttgacaaaataatcagtaattatacagtactacaaaattgggctttagaagcggtttttaagggctttcagtgttggtattggcgaaattcgcta

SEQ ID NO: 391110 - DNA, 2157 bp, Cannabis indica
ataaacctaagatcaaccagtgattttgacttagaaagatataacagtcagtttatgatatcttatccgaaattaatattagtccaatccaatgtatactccatacatatgatactggtaaactttgccaattccctataaaggacataacacttatccaaggtgtaagtatactttattgctggttatcatgtcagtctagatctagtgaactaacaaatcatgagaattaaacttttgcacatataatcattattatattctactgtgctgacgatactataattatgaacaaatatatatatttatatatattttgaacttaatagaatttatacattaagtataatcatgaaataaatcatgtgaaccatgcaacataaaataatttttgatcttttattaattagtaaatctgattatattgaaatggattttatttagggcagacaacccaacactacatgcctcgtgcctatatctagaggcaaaggcaaggctatcgttgaggactctgatagttcctcttctgatgatgatggtatttgatagttgatataacatcatgcttttgttttgtattaaatgtttatgattactttttgactttgctactttcttttttgtagatatgtcttccaagttgagaggtcttattgggagaccttcgaatgagcccacaagacaggtgagggccaaagtggccaagacttcccgtggtgaggatgttgttgggtcatcactgccagggcctgcactagtcagacagcttgtgatacggcttgccaaccaaggtacttggaggctcggctgaggagcgggctcagttgctggatagagggctgctgaggcaaataaccggcacatagagagggcctttcctttttctggatgaggatctaaaggagcttggtgacggtggacctgacaggctttattctaccagtcttcaggatctttctctggtaaattatacttttagctttgttcatcttcttggcactatattggctagccatccatgtggcttcttgcatgtggctgaccggccttagaagcttttgtggggggctggttggccataacagtccaaaaggggggactggccgactagtgttgtggttattgatgttattttgctttattttcaggccctgataaagttgagtttagctcgtgatggctctcagggatcttcagatgctttttaggagcgtgtgaagaccttggaggcttcccttgtggcaaaggaaaaagccataactaagctggagaccctcctagcagagagatagagcattatttttagcttagagatcatgcttgccgccaggaatgcagacaacatggccaagctgccctgatcttcgagctgtgaactgaccttgatgatcatgagtagaagttacaagaggctcttgatggccagcacgccattagggaggagtatgccgacttgtcctctgaacttacctatgagttccagttgcagaacccttaagctaaattgtcgtacatgggtagtaaggcttttgtggagagaacattggcccgtggaaaggcattttttgagagttagatggaggcagaccacgttgctgcctatcaagaggggtcatcatcggggacacatgacaaggagttggccgaaaccacctatggaggaggtggccgaccaagacattgaccaccgggccgactagcatgttaatggtaggctggcgtggactctatggatctcgatctcgcaactcctaatttagcttcttctgcccctgcacacatttggacagtattttcattagtagcattgaacattatacttttatcacatagacaatgatttcatgttctgcatagcctgtggctttttatggtcgatggcctttcaactttagaacattacttacttttgtgttccatgtggcatgtggcctttttggaactttactttcatgtcctatgtggcatgtggcctttttagagcattacattattttcagccacagggccttcatgttcatatctttggccataacccctctgtttatgaacactactagtatttggccctgttgcttttttatctatgaattgtgtgaccgtactaggtagtccttaatcctggctatcttcttatggccttgacagtaagtg

SEQ ID NO: 391111 - DNA, 987 bp, Cannabis indica
cttttaacgtcagttttattaaaatttgttactgatgctttttagacgacactgtaggattatacacaaccaacgccataaagagaccttatatatagcgccagttattgtataataaccgatgtcatagtgatcttatgccgttagttattatacaacaaccgatgccatagggtcctatggaattggtcattattaaataactgacaccctatgatatgtaattttcatagaaaatcaatttatttttttagttttaaacttcatataattttacaaatttaatttatttacattgaacattaattaatttaaattaaatattatttaaattaatttcatacaattaaaacttcatcaaaataataagctttctctctcttcgaccttgcagctctccctgagctggtgccatggctaagacaagatctaagcagcaaggtaagctaataaatcaactgcaaaagtgaccgtgaagaagaagaaacgaggcccttcctcctctgatgtgaagataacaaaatccatggaagaggtactgggagtggagccttttgaactttttgatgaagaagaggatcgtcgagttttggaacctttgggaactacacagaacgactgctttcaggagcctttaactcccagatcttcattgaatgcgatactgcaacaagaggtggtacaacaagattttaattttttcctaacagctaatcttgagtgttcaaaagatgcagcaaaaggtattcatgctaccgcaccagtgctaaggtctgaaagtgtagtaagaaacctatccaattcttttgagaactcaaaaaagcaaagtcaggttaaaattactcttgatgacatcgaagaggagatctccttttggaattcatctctgtctgctatatacttggagaaaaccctcctctgaatgtgctggatggttttgtgaggagattatggaaggacaagattgataaggtaggattactatcc

SEQ ID NO: 391112 - DNA, 1890 bp, Cannabis indica
tgcaagcccatgggctgttgtgcaagcccatgttgtgcgagctgttgtgtgagaccatgagatgttgggtgagccgggggcatttgtgtgagtcgcggagcatttatgtgagtcgcggagcatttgtgtaagtcgtggaggatttatgcaagtggtagagcatccgtatggcccgtcatggagcatccatgcgagccatggtaacattcatgcgatgcaatgaagcaatgtggcagtgagccaaggtatcgcatacacacatgagggtgcacaattgtaggggtgtgagatggggactcgcatgcgagctgtgatggtgtaaggagtgcatgtgtgtgcgagtggggggctcacatgcaagccgtgtgtgtgtgcattatgttgtgtgcgtgtattgggtgttaggtgttgggggctcacaagcgagctgtgtgtgtgtgtgtgtgtgcattgtgttgtgtgtgtgttgggtgttaggtgttgggggctcacatgcgagcccatggggaaccttgcatgcgaatcattgtgtgtgctgcgtgaatgtgcttcaggggtcgtgagtgtaaggtgagaggtgaatgcatatcaacaagaatgacattggcgaagtaaaagaaatttgagataagaaaaatagttaccctaaagatatcaataaaacatctttggaaaataacatgcataggttttgagctaaccaacttctgcaatgggatgttctcagccttggaaccaatcaaggcatcaccattggcaagaagccaagagtcctgcgcacgcagttgcttcactaggtctgaactcagatttagaacaccattctcagtctcatttggaggaatatcaatgggagatccctcatcagcttcatcagctttaacttttccttgatagagtcttgggcagggagatcaacttcaacaagtctactcctcttcctgagcttcttcttcgtaggagcagaagaagcagcatggataccttgaacaacctccctgactagaggttctgtcacttttggcgttggtatcttcctctttgaacaggatgccatagcagcaaagaaactcatgttgtttgcaaagaagaaagataagtggttagtacaataaaagaaatgcaagagaacaaggtacaactacaaagcatggtgcattaacaacctactgattccctgtcattttttagaacagtttgagtagaagtaacttcttcatcatcccgctttataaacacagatattctccctgaatattcttagtcctttcaaactaagctctcatcttctgacaatatcttagacatgatggcagttgcactctgaccatcctcttcttatttgacgacatcgtcaaagaatcaaaagagaagcaagtatcaacataaacttactgacgagacattatcgtgtcaaatttgcagaggttctcagtagtgaacaaagtcctcctatctctttctcatgcatcaattttaatgggcatgacatctgctctcattttcatgtcaatcaacagagcaggtcttttgaaagggccaaccttttggaatgtaatatgtctttatggaaggactggggcatagaagtattcctgatggtaaaggtcgtaattaattttggttatcttttctatatattgactgaattggtggaagtgatagaatccctcctcttttctagttggacttcttttcaagtcacaaaggaagttaatttcatggggagttgggataggccgatttctcaagcggtagaagatgaagaaggtagacaggattctataaccatttggatttatttggtagggaaaaactctaaagaaatctacttttgatataaaccatgggtgtaaaggcaagtaagcacctgcgttcatatgaaacctc

SEQ ID NO: 391113 - DNA, 1082 bp, Cannabis indica
aaaaaaaaaaaaaaacttcttaagaagataaaattaaaatcaaaaacccaaccaatcttcaaaatggtaagaggaatattgtatgaagtaagcaatatcaacaacaacaacaaatttgagtaatatgaactattatattattatatgcaatattttagtgaatattaataaactaatgaaagagtaatctcattattaattataagttaaataattaccaccaaggagttcttgtgttcaagcatccaaaatttatttgaggtgtgaatgtgggaacttttttggtcttaaagaacttaaatgactttagaggacatccattactagcaatattttcttcttcaccaactccaattatttccatctgtttttcaaaaatctcttgtaaattttaatttaattaattgattaaataggtcaatatacaaaattaaataaaataatgttaattaatttatcttaattacctggttagtatcttccaaatgatcaacccaatcatgaatcataaattgtatccaagaacaagctatcatgttgaattgttttccattatctttaaatttcttcctttccaaaagctttgaagccactaatgaaggatgaggatccaacacctttgataatataaataaatttataacatcatgagagaacataacatataaaacattaccattacaaccaatattgtgagccatgaaaaaatatacatatttagacttttattttttaaaaaaaaagatatgatatttttcaaaatcagtaagaaaatgtgtaattttaaaaaaaaaatggggctcatgggctaagtgggtcctaggcacaagcttagtccgtctatgatcagggcccgacctggtttctagctattttttttctcttcatgtaatttttcggttagctcaaaaaactaatgagatgtcactattagtataatttagtatcgaatctcaatatttaaattgaaaaaataatattccatataagatagttctaatgttgcctcttataagtggaaaaatcaattgatacaaattattatttcactattattataattaaatatcagtttctctata

SEQ ID NO: 391114 - DNA, 971 bp, Cannabis indica
ttgtataataactgacgacataagtttcttatgacatcggttattttataatatccaacgctatagggtccctatgtcatcggttgttttttacaccttacagtattgctagaatagcgtcggtaacaaattttgtcaaaattaatgctaaaagcctttaaaaactacctctaaagcctaattttatagtagtaagaacaaatatcgtaatcttaccaataaatctattttaagttaatatcacttagtttatcataaatcaattagatctgaatcttgacatgattaaactttaagctaattctattcttcgagttttggaactctttgttaccagctaattaccctatggactatcccataaaattaagaggattcaattgaaccaattgcatctctttgtttttttttctttctctctcacaaacacttatcttttctctctattgtgtgagatactctctctctactcttacgtggcatttagttggaggtaatgaaatgaaaaggaatggaaagaaaaaaaaaaattcattaattccatgttgcattttgaagtattagaatgtcattctaatagaatgacacttttctatcattttggtgaaatgacgattctattttgaaataaaagaaatgaccattccaatacagtatgacaaaatatttaataattttttcattaattatttatacattttaaatttgattttattctatttctattatcattctcattctcaaatgtatttatatgttttcatttctccttcttctagctcataattgtccattccctcttgtaaggcctggagctcctcatgctcataattgtccattccctcttgtaaggcccggagctcctcatataggctacagacctaagctggtgagttaacagtaagtgccatagttgacattttatgtcatgtagaccaagtgttagtacatgtttgacatcataattaaaa

SEQ ID NO: 391115 - DNA, 2048 bp, Cannabis indica
cgccagagaaaattaagtacctttggaggcactttgagattccactagtgttgcgagtcttcttcttcttcttcgattttagttgtaaaaatcaagattacttctgtatgtaagtttagacagagaaagtcttagtgttgaggctatcgggatatgggttgttgggcacaagcaggtggtgaggcctaacattttatgggaaaatggcaaaaggagaaactttctaagaaattcaacgaaccaaatacaaagatcataagaattccaaggtgatgaagataatcactcaattctgatgcaccaataccagtcaatattgttggaatttggaataaacttaatggggtttcctctcaaaactagttagcaatggaaggagtagcccgttcatcttatatatggtgatttatttctacacattagtaatgtgagactaactctaatagtaggaaatttgtgggtgtacatgtcgagaattttgtggattttgaaacaagtcaaagacccaacacggttaaaggggaaacaacggaagttttttagtttggctcgtctttttggaccagcggcactttggactcacaacgaatcacaagcagctttgataccatgagaatttagaataaggtgaatgatattctatctcaaaacttattggcaatgagaggaatagctcattcatcttttatatggtaatttattttcacacattagcaatgtgggactaatttcaataaatatttctacgaaattgaaaaataaaattagtaaaatataaagatcaaatatttcactaatgattataaacagaactatatagatgctaaatggcaagacatactaaacaaagatacataaaaaaaatagagttatttgtggtaaatcccctaatcttcacattctataacaactaacccctcaaacttatttttttggtggctaaacctgccaaattataattttgttaacaaattttgtttggctattaaattttcttgctatgtgccatgttggactgttcatgtaaaactcatatacacgtaacacatttacattggtccatataatttatttattttaaaatagataaaattatttaaaattaaaaatataaaattaagagataaatcattttaaaaataaaattattattaaactataaatttaatttcattcccttttttatttagttctgttcgccccccccccccccccctttttttttttcgaagcttcttcatcaacactcaaccccaaatcattataaaatcattaccatacataaaaattcaaatagttcaaatctttctcttttatctcaactcaaattccattaacacacaaaaattctcctaacttctcatcaaatcaacatatgtatttatatgtacatattgaaccattggaatacctatttttccaaacactaaaattacattcacttaataactcttaaatatataaatagaaaagcttaaccaaaaaccaaatctaaacatcaacaaaaaaatcagatctaaacataatcacaaatacaaaacaaaccagatctggtttttgagttgagaagcccgtgtcgctagtctagggattcaaaaaacccaagttgctggtctgtcgagtcaaggagcccacattgttggtcagatggttcgctggcaagagagagaaagaatgcgagggaaagggagagattgagttcgagaaatggagtttaagggttttggtatttgagggctaacaagtttggcggcaaggtttatttggatcattgacggcttgtcgtagttgagttggcaaaataggctttatgaaaacttttattaggaaaatgacttttcaaatattttaattagcaaaatagacttcttttaaaattgatattataattaatataataaatacaattaatattaatttttctttatcattaaaaaaaatagatttggttggactcccatgacctctcttcatcttcatcttcatcttcaattgagttcttcattaccatatgagtttttatcttcatcttcatagcactactcaag

SEQ ID NO: 391116 - DNA, 728 bp, Cannabis indica
cacaaagggaagacctcacaaaacacaatcacatagtgcccaaggttggaaacacctacttgattgtggaaccttatgaaaatgctccacgagcagcacaccaagacactggagagctccacgaccaggccagtgccttagctaaacaaagggaaagaggaagaccctagccctaaagagataaggaattaataaaatgtacgcacggtttatgttactccacatatatattttcctaagaaatgttgaacaagatcaatattttttatgtaaggttgaacaagatcgatttgattagtatagtaaagaatgaattttttaatttttaactcgacggtcagtgttccacattcataacaaaattttggtacgaaacgaatacaatacaaaaaatttaagtttgtacacgataaaataggagactaagcacgaagaagaagagtacaccatataaactcctaatttaaatttttaaaatttcaacaaatctattccgaacatttcaataatgaatctataaatgattttaattatcatttcagcattttattaattggtcgaaaaatttgtagttatatttagagagctaattgtactcgatttgtttttttttctaggatctctttgttataattatcataaaaaaaaaagaaatatttatttattaatttaaagaaattttacattaaagtactaaaaaattgtcatttttttttttactatttttt

SEQ ID NO: 391117 - DNA, 924 bp, Cannabis indica
atggataatactttcgactctacaacttcaaatgtttggtccatgtcacttatgaactcctccgatgaagagccggctcttctcttggcttcgagcaatcccaagaagcgagctggtcggaagatgtttaaggagacacgtcatcctgtgtaccgtggcgtaaggaggaggaataattcaggtaagtgggtgtccgagattagggagcctaacaagaagactaggatttggctaggcacatttcccaatgctgacatggcggcgcgtgcacatgacgtagcagccattgctttgaggggtcgctctgcttgtcttaactttgctgactcggcttggaagctgccgtctcccgcttctttggaccccaaggatattcagaaggcggccgccaaggcagccgaggctttcggtccacagaagagcacggaggaggcgaaggccgagacggtatcggagaatgtgttctgtatagaagatgaggtgtttgggatgccggggttgctgacaagtatggcggaggcgatgctattgcctccaccgcaatgcatggatcaatggtattatagtagcgatgacgtggacgtttgtgctgacgtgtcactgtggagctattcaacttagtcagtgtagtgttttttttgtgttatgatgtataaagaaagatatgtgttgactctgatttgatagttgtattagagctgtgctagtcagtcggaatgtgttgcgttagtcacctgttacaaaattggactaggaaggaaattttttcaccgtactagtattttttttttgttgatagcatgaatgggtctatatagcctccctataattatttgtttttgaatgaatgataattattagggaaatttacttgctatattaacttttgccatttttttataaaaatactgccaagcggtattt

SEQ ID NO: 391118 - DNA, 575 bp, Cannabis indica
aattaatcataaatttagtatagaataacataaggtaaacaatatttatcaattggtttaattcaaccattattaagtgtttaatcccaaaaaaaaacacaattatataattgctgtcatttgacatttagtagtactgtaaatatggatcagattttttgatattgcacaaaactggcacgagcacgacaaagtatgaaacaatgtgtgctatgctacaaattggcacgatacaatataaaaaaatatgtgcttaagcacaacaagacacgagaagcacgagagtcatatcactaaacacaaataaactaactcgaaagacacaccaaacaacaattctgaaaaacaaaatttattaatattaataataatagatatgtatttatcaattataataagttaaaataataataaaatttaaatataatattgaatattataattttataatttaaactattaaaacatgtaaaaactaaggtgccgtttggtaatacttttgttttttaatttaaaaattatttttaaaaaaattatttttgaaaaacaaaaatgcgttctgtaaccacttttgt

SEQ ID NO: 391119 - DNA, 1017 bp, Cannabis indica
  modified_base (149)..(149): a, c, t, g, unknown or other
ggcatataaagcattaatttcatggtgatatttttttcattctaattatttaaccaaaaaaatataaatattccaaactaataagctatacacatctaaataatttcatatatatttaaaaaaattaattcaaataattttattaatanattttttgtcactgattttgataatattattcgctcaatctttgatacggccataataacaattttgaatgtagtgataattacaaataaaatacgaagatgataacaaatttgaatatagtggcaatcataaatgaaatacgatgacgatattggctttgattgtggtggcgactacaagtgaatacagtaatgacaacgactttgaatatagtggtgactacaagtgagatacggtagtgacaaaaatttaaatttgtttcatcacatgacatgacttttgtggtttgtagtgttcaacacatttctattaaaccacaacaaaaaattatcaatttaattttatagtcagaatttcttttaatttaaatatttaaaaggacttttatttttatcgaatcgattgatcaattaaataaattgtttgttttaatatatttgatgtgtttgtattcacaaacctaaagaaagaaaaatatatagatatttattaatatatatttttgattataatatattctatttaatatcaatttatattttttatgtaataattctaatatataattgaataattttgtacatatcattttaataaattagatattttaaaatttaaaatattatgttttcattttattattttaaatatttacaatattttatttattcataaatatctaaatttttttaaaaaaaatattcaaactcaccgcacaaagggcggctacattacctagttattaataagtagtttcaaccttcaagtaatatacataatacatctatggaatatgcatggtcaaactaatagaaatcaggttattatacttttcttttctttctttctttgatagaaggttttaaa

SEQ ID NO: 391120 - DNA, 1055 bp, Cannabis indica
aaaataaaaaaataaagaagaaaatatcaaaagagattccattaaataaataaaccacgattaataacactatactgaaatttctcagcaattaagatatttatttatgttgtatttaattataaccacatacatataattgaagaaatttacaaagaaataaatcgattctattgaaataattataaaaagtgaaaataaattggctcccttaaaataatatgatatttacgtgcgtgatagtatgtagtaaattaaacctaaattaaactaattaacttcacatataacactacctttcttggctcttcctacaaagagtaaactccttttcttggctgaaaaagagtgttctttgtaccgttcttttgtcggaaatattctgcatctttttcgagattgtgaatttgcaaaggtattatggatttctggccctaatctaattttagttgataagatttcgagagttgatttgattcaattcttagaaaacatgctttctaacctatcgagcggcttgaggtctaagtttcttatctttgtaggttgcatttttaacgagatttggtctcaaagaaatagtgtttgctttaatgggagtcctccaaatattgttgctgttgttgcgaaggtcggatctgccttcaaagagttttctgaaatgcgtaacgtagagaatattgagaagcgatttggttctagggagttcttaactcttaagaagctgtcaactgaggagaagtactcaatgccagaaatagcaaaggtaatctgcactgatgcatcttggtctaatggctctactgggattgcagtagtaatgataaacaatcaagatgactcttgagcctttaattccaatcaggaggtagtcagttttcttgtggaagtagagttaggagaaattcatatggctctttcttgggaaatcgagcaaggatggaaggaaatgcatgtgctttcaaattctcaaaattgtgtacttgaaccaatttgcataagtcccaaaaaaaccctagaagagttgataaaacttcatcttcacaactgagcta

SEQ ID NO: 391121 - DNA, 1243 bp, Cannabis indica
ataactacataataaacaataaattgttaattttaaaaagaaaagacttttaaatccaaactaaacagtaaatttaaaataagaatagaggtgattaaaattcttttaaattgattagtgaaaaccctaatgcgaaacaagaatgaattcaatcaaaataggcattccattttcaactactgacttaaaacttgaagtaaaaggcactattggttattggtgtttagtacatttctcggtatcattgtaattaagtatcgaattttacgtaacttaagaaaataatttttaaaaaatatcgctaactaatcatgaagtggcatccataaaaagtattgtgtaccattggtgttaaatatcttaacatttactcttaacatgttttcttagtttttcttttactcttttctattaattttaataattttttatttattttcaaataatatatatttaattttttttcctttactctaataagtttataatttttttttgtcttaatagtcaacatatattatatgtatttttcggaatgtgaaaaagaagacaaaaaataattagtataaattaaaaatatattatgcaaaataaatatattgtaaatgaggtattttatatatattaagttaatgttacgtgcgatacacgtatatttagttatatttctagtttttatgttaattatgtgtatttttaattttatagataattttttttatatggtagatgttatccaataaacaatcttatttttattaaaaaaaaatatctaatcgaaattttatctataaaaagaaaacataatagttaatttttttttttaaaaaaatgaaaatattatcaagatgcataaaaaagcgataatattaatactttttaaattaaagcaaactacttgtaaacttcttttaatttttttttaaacaatgtttaaagttttgaaaatttaaggaaaactatctaaagtttaaaaatatgtaacaagcaacatattcttttataaacaccataaatacttcctcttttataaaaaatacaaaaaaaaaaaaatatttgtttggtatctccaattggtaaaggagtcacaacagtgggtaatatcataaatatcttctctattttattgtttttttgagtaatttgcggcaaaactccatcaactgtcaatttacttgcaaaaaaccatccaacctcatattttggtgggaaaaccctccaaagtactgtttcgtttacattt

SEQ ID NO: 391122 - DNA, 1781 bp, Cannabis indica
aactaaaaattaagaaagtaaacaaattcgatgaaatatcctatccaattacgtaaacaatcaaaacaataatactttcatcactatcattggacatatatataaatatataaatatatttatataaaagaaccatctttttatctcataaaccatcattacaagttactaaaggtggaactataaatttcccttttcatgtagttggagggtcatttttgggcatggcatgagaagttagtatctttatgcaccctcgcaagtgtgtttggcttagtcatcaagtcactcatcatgtttatcccaataaaattcggtaaataggaaaaactcatcataagcatcgaattcacctatttacactatagttaaatatgaaagcaactttctaaaacattgcactaatgaatatatacatatcaagtaccttctttttcttcgtgtcaacttcttatagagaaatatatggctcgttttcgcaatcttatttgtggagtcttttttttttttaacttacagaataagtttgcttcctttaccaacctataagtttataagaactttgtctgctagcgtctattgctttcttatctaaaccctccatctgtactatatgtctcaaagtgtcttagcaagtcttttttttttttctattaattatttgaatatattcggaggttcccattacatttaaaaacccagacagataagatgttcaaaaactacatcaggtcatgtcaagcagggaccagggggtgaattaatgtgtgtgatgagtatcttgttattaatctttatacgtggaaagtactgattagagttatgagctagctctcattaaaacaatctaagactgttggaattatggggatctatatgattcccatacattttccttttgaccatatatatataatgattaagatggttaaaaaaaaagaaacagtaaacatgctgatcatttcagaactcagatcagatatcaatcgattttgcttttctttctccgtgcttagttagttgtacaatgaggagatatgctgtactgaaaaatatgtatgtgttatatgttggaaaatgtttttaaagagaaaataagaggattacaattaaaatacttaaaatataaataaaaatattatgtcacgacccgagttctaggccgtggcaagtatgtaatattcataatttgagtggtcaaaagtcacactttaacccttgtagggagataaaacttataaatgatcctttaatttatatcacaaaatattaatttaaaagtaataaattaactcctatattaataagaaaatatcagtaacaaaatcaggatcactcatcaatataaaagaacaataatatccccacagttatataatcatcgaatacatagatttaataagtcaataaaataccaaaataatacccagcatctatcattccttatttctaactactacataactaatttaagtcatcgagactatccatttcagcttaaatacaaaatcaatttcattagaagattaaagagtagaataagactaagctaataacgactttcttcctcaacggtaccatcctcatccactagcatcaaactgacttcctggaatggggaaaaaatcaagggtgagcttataaaacctagtaggaaaacaactaacatcaaaggacctgttggtttaataaaattcctgcatggttagctttgtaaaaataaaatatctcatcactagtatcaaaatataaaatcaacatagagagaccacaaagaatca

SEQ ID NO: 391123 - DNA, 586 bp, Cannabis indica
aaattattatgtatagggtcgtctgaatatatccttgtaaagcaaatcagaagtagaaggagaaaaggaagaagtaggactatcagtagttgaagctgaagctaaattagtagcactattgatcatattatttggttgatgataattttgtaaactacttgatgatgaagaagtagcactaatattattattgtaagaagagggagtagacatactactgatcatgttggtgttataactattgtaggaattagggaaagtatcattatattgcaaattattagtacttgaatgagaagaagaagaagaataagaagataaagaaggctgatcatgatactgttgaaaactacttgatgaaacagaagcattagaagaaaaactactaatatcattaatgttgtaaatagggaaataattatcattaggagaagaagaataagaagtactgctaatattgttgtaattattattattattaagaaatttttacatgaaaaatccattttacacaatttattataaaaatactcctacacgcctatataaacttttttaattacacaaataccacttagtcatcatt

SEQ ID NO: 391124 - DNA, 1707 bp, Cannabis indica
cctcattactgccagcactcttcacaaccggagctgatacaacaatcgaatctcgtgcaccagtagcctcggcattactcttttctgcattagctttggattgcacctcttcatcacgttcacgagcctccagaacagaggtaggggccaactcttctagtggtggacttgagtaacgaatacggtttctctcaacagcagaaacaatcctcgaggcctctcccatagtcataatgggcctattattaggataatcatctcgttttttattagaacgaaaacgatcccggggtggcaaacccggagcacacatccacgaacaaaatctcccacgatcaaaattgggattatccccagcaaagtccctcaatggacaatccaacgccttatgcccaatgatgcaacaatcaaaacaaaaatcaggtaagtgctcatattgaaaaatgagtgaaacctcagtaccttgctcatcaactaccactcgtagtccccgtttaaggggttcagtaatgttaatttgcaccctcaccttcattgtgccattgacaatcttgatatctcctagcttaccaatatgttccccccattctcttgcaaatagctctgtcatacaagctaatgggacattgttgatggagatccaaaatgatgtaaaatcaaaattcatttttgaaatttcacctaaacccattggtttcacaaagcaaattaactatttatcaattgtccaagggccaccaccataaaccctctgcctatcctcacgactgccaaagaaaaatgggaaaatatttttcgaactcaattcttccacctaaaaccgatggttaattttccatatccctttcatagctttctcaataccatccttattggctggtctaaggccaatgaccttgccaacaagacacaaatccattctcttcttcccttcctcaataccagctttattgagtggaagaacaggaccgtcaccttcgtctagaatcaacacttcagcaagacgactaaccaattacaaaaccattgaataaacacgaataatccacacagaaaccagaaaaatcacaatcggaatgataaactcaacccttcccatgaagggattgcttctttccaagtagttttagagctccgaaactaacgggagactttcaccggtttatacatcatacttttaacattccattacatatgctctaaacataatctttccattttctattcatcttagtcttctcttcattttcatcttcatctcttctctcttttatagtttattatctcaacgttaactagcaccaacatcaacacggcctctataaacatctcctatcacatttctgtcaaaaaaaatatattaaattgtttacatgtatcaatggaatataaataaaaaagttacaattctattaaaataaaaaaatatcaaagacatcacattaaataaatatatgttacaatatttttatactaaatatatatttatatgcatgtagtgttaatgagtatagcccataagttattattagaaaaatttgaatttttatatttaattttgctatttaattaaaataaatccttcatttttatattaaatgattagtgctgttttatctggccaagggaaagatatgagatttttacagaaatattagattttgggtcaaagtttataattttgctgccacacagaattttttataa

SEQ ID NO: 391125 - DNA, 954 bp, Cannabis indica
tacatgtcaaagttcaaggggtgaaaattctaattagccttttgtaaaaaattgtaaggtgaagtctgattaagtttttacttttatttatatatgttcacaatgaaaactcgttaataaagttagtatcgaaaaatgcaaagttatcaaaaaacatgataaagataaatgtgagaagatctttgaatattgctttctctttattgaattcaatatctgagttacactaaatgatatttcaatcccttctcacatctaagataggatatttatagactctaatggcctggtgtacaaagtggtctcgtggagacaaaatgtcgctttcctactccatgttgtaggtgttggggcgcagtctggcccctcgtacccttgtcttgtgtcaggtggttcccggttgcaggagagtggtccccgactataggttgcaggagggtggtcgcagtgtgtggtccccgggtacacgcgtgtggtccctagttgcatgcagggtggtccccgggtacagattgtgggagaatggttgcagtgtgtggtccccgggtacaggttgcagaagagtggttgtagcgtacccttggtcaggttttcaggcctcgcaggtccattgtcttagttattcacatgtccttgctctcaaagcttccagaatagcatggttgcatgctttcccctcgcacgccttatcctttgattcctcttccaatgccattctcatcaacacgcattcacctctcaccttacaatcatgacccttaacccatactcacacaacacaacacacactcacacccccatacggctcgcatgtgagcccctcatgggcttgcatgcgagcgccctacttgctctgtcacacacccacactacatactcacacctcaccacacatactgttggaaatattttaccaagatttagatttactaacaagtatgtttcattaacatc

SEQ ID NO: 391126 - DNA, 1148 bp, Cannabis indica
gggtcatgagttcgaacctaggaccttgaaactattaagctattaacagattgtaaaataccattacgctacactcaaaaaaaaaaaaaagaaacaatatgagttgtcttggaagggatttctcaaaagtagaaggaatagtcttggaagggtttttcaaaagtagaaggactagagagaaggggataggttttgagagctcgatttaattatcatgtcatagggaattatctagttactttgtcttggtatagtggcctctttgagcaatatatgaacccaaatccctacccggttcagattttaaaaaaaaaacctaaattcctaaaacaaatccctaattcctcttcttctccccattatctttatcgttctcccgtacccagactcctcactctcgtcatcgccgactaccatcaccaatctaaaagtctcaggtcacatcttttttgctttgctttgtttaataatcaattgattttttgttttcgttatgtatggatttgatcttagtgttctgtggcaaatgatttgatttgatttgattttgcgttaatgatcggagaatttagtgttcaattcttttaattcaatttcagaatcttgtataggtgttttatgatttactttgctgcaagttcttttcttttggtattgaggttttgaaactttgtactcgatggttattttataattcgttatttgggtatttttgggttgagatgaaggtgtttaattgaaagaagaaaaagagaaatttgtaatctctattttgtcatattgattcaacattttccacgggcagccatttgtgaaattttgaacttttattctgagaaaattgagaatgattgaatctagagaaattcttgtgagaacaaacaattataaaatgtgattttgctgatttgtgttttgtggtatggatcctaaattacaaatcatgaatatatcaatcaagtaaaacattttgctgattttgctaatgcgtattttttatctcatcttttttatttatttatttagaaaaggcaaaaaaatcaaaattcatgttttttgtttttaaaattgacaaacaaaaatggtttcaaaacacatttttattttttgtttttgaaattgaaaaacaaaagtggttacagaacaca

SEQ ID NO: 391127 - DNA, 975 bp, Cannabis indica
cagaatgctattatcatcatcaattacaacattagttccattataattatatatatacacatatattaagttacaagaaatgagacaaaagacccaacctgttagcagcatagcctgagaaaaagtgttccaaaaagaaaaatccaaagtaaaagaaagaaatcagcaaaatgagatgtgaatatagaacgaaaaaaggcacccacaagaaagaaaaacctaccaaagaactcgctgacgatcgccgcagagcctcgaagggtaattatgtctttagttgtggtctttgcagccattttccgggaaagaaatctcttcttttttcagagagaaaaacaaatggggatttgttgaagaaatgaaaatgggaaatgggttgggttggattttgagtatgattgagaaaaagaaattgaattttgagtgaagcgaaattggagggtgaagaaataaagatcagatttttagcaaaagaagacgagtggaagaacaacggctagtttattttggtgtcttttcgaggccaacggtaatattttaaaatggaccatttgggataggaacaactgggtcccactcagaatttaatatttgttttataagggattagtggaacatcatcattgacggtcctaatttgatgccacgtaggaaattgaattacgtggctgttttgttttttgtttaaaaattaattatggatgatatatgttgtaatttattaataatgatgattcttgtgttggccatttcatcataaataatcaattaaagagcttgaaatcgaaaaagaaaagttagctttagtgtcaattggaacttgtagaaatattaatgtacctacaaattaatgcaataaatttaaaaaaccatatactattttttaaggctaattagtaattttttctcttgaactttgacatgtactaaatcgtgttcctaaattttttttgtcgttaaaaattctcccgaact

SEQ ID NO: 391128 - DNA, 610 bp, Cannabis indica
ttcttaccataattgacatactgactattttctgctcaatttcattatcatattttgcaatcaaagtattgttctttgtccacgctctcatctagagttgatatttctcaacattgtcagcaccaagttcttttttctaatataagaactagattaaattttgttggcgtgtttataacttaacattgtaaaagtagtgatacaaactacttactaaatcttgttcgacgttgggcatgtctctacgagatgaatgatgatgtgatagattcatccttgctctggcaacttgcgcttcactcaaagcctacaaaatataattaaaattaagtttcaaacaatttgatagaataaacttagacaaagattactaagtggaattttaccagaaattcaggggtaagacgacttagaacaaactcattccagtctttattataatgttctggatacttctttgaagtagtacagagttcttttatcctacctgtaatgaccacatgttagatcatgtattagtaaaggcaaatagcgttaattattaatattttataattatgcatgattatatattgttgtgggccccattttagaaatgagcattagagtt

SEQ ID NO: 391129 - DNA, 971 bp, Cannabis indica
tttaaagttattatcacgactgcatcaattgtaatcatcactatatttaaagctattatcattagtactgtatcttatttataatcgtcactacatttaaattcgttgttattgctgtatcacttgtaattacactcttttttaaaatacattaatgtatttgatgtggagtacaattacatatgacttcttctttttacgtttaacaaatgagttaataatagtttaataacattaattagctaaaaaatataatatcttatagttacaccttctaaatgtgtcgacttgcaattggctagcgatactctataaaaattattatattaaactatatgagacccgatacttaattgcaccaatagcgatattgacacgtaagagggtgctaggcaccagtggtgccctttagcatttctcttatacatatccaataatcctccgtaagactatgagaatttgagaatataattaagactcctcaattactttccattatatatataattgccgtgcaattacttaaacaaatatgtatcatcttataattacttcaaattacttcaaattacactcaattctaattacacattaattttctggtcacactcttaatgttttttaatataattaaaattcatggattcacttttcttatttaattaatataatatttttgtgtgccaaccaaattcacttacttcacatttccctataattacaaacaatattgttaaattgaattattaagctaaatgatatgccaacttttcatttgtcaaacaattaaacaattaaggagcactataaaaaaatttacttttaataataataataaaattttatgattagaagtaaaaaattgatagctacttataaattatcatttttatattttgattaaaaaattcgtggttaaaaatattagttataaaaaaaatataggtgccgcttggtaacatttttatttt

SEQ ID NO: 391130 - DNA, 869 bp, Cannabis indica
aaggccatgatgagaggccaaataataccttcctttataatctttatacaaattgcaaatatttcccaagtatattctaaaccaataatcttgtctattccattattttttttaaaataaaaaaataataatgagagccttccaaaaagaacccccaaaaaatgtactttagggtttttttggagttaaaagtatttcttacatggatttcagtgcattcaaagctttgattagagataatataatattaaacaaattgtctagggcatgcagaatgcaagtacattccctctggtcaacctaagtttgttgacctccttttgatgaatttcatgcatacatatatatatatatattactattataattaaatattgaatagtattaagtctactttaaaagtgtattggtttagtgcttttgtattttgatagttgtaatcctagttataatacatgaatgtacacattgtatagttttgtagtaattattaatttacaacactaattaattaaaattaaaatctaaacaatttattttacacatgtataaatttaacatctaattatatacatcggtaaaattacatataaattaataagatgaagtagtcgttccatctaaaattatgattgattctaagctatttggagctgaagtctaaataaatattttgggtctttatataaattcttttttaatcaaataatattaagtaagcttgtttgatgtaatggtaaaaatattttcaaaatttaaaaaggttacaagttcaaccctctacactttttttttaaatattgttattaaaatttgaaccaattaaaaacttattttaaagttgaaaatgtaatgtcactgtataaaaa

SEQ ID NO: 391131 - DNA, 939 bp, Cannabis indica
atttttttttttcataattttcacaacattaaatcaaattttcataaaagaaaaataaaattattaaccttattttatataattttctacaaaaatattattcatacatttacataatcagatttcattccaatataacacaaaaaaattacacaaaaataaaaatataaaaattaccgttatattccttaaacatactataatctctgcattaaaaaacacacacaaatcagatttttcaaaaacataaaaaaaaaaattagatatttaaagaaaaaatacatgaatacacaaataattactgtgaagaaaattcggccggtccaactgtgaaggaaaaaaaaaaaataaagaagaaaacaacggaggtgggggtctggcgaggtgggtccgagcggtcagtggggtcgagaggtcggtgcgggaggcggagggtcgggcttttacttcagagaagctttttttttttttgtgtttaaaaaaagagaaaagaaaaaagaaatgaagaagagaagggggtcaaggggttttgttttaatgaaaactggtaagacttttaaggattatgggcgagaaaaaccccgcctttttctaacgtatagatttcaatatttttaggggcgataaatgtcgcccctaatatactactgttgcccttattttctcccattatacgtggacctggataaggctgacacgtggatctgtgagaatcaacacataaaaaatcgtctaagtcctaggcgaaagggaagaatctcagggaggtgtctcccggaggagagcacaagaagtatttctactctgtgggaggccggaggtatgctaaagcagttctgggaggtgcagagatctcttgaacggtcaccttgtatttaatgccacatgggggaagacgtattaaaatctccataaacgacatgacagatggcgtaaccc

SEQ ID NO: 391132 - DNA, 1580 bp, Cannabis indica
gtaataatactagtagtagtaagtaagaaggtaaaccactcgaggctagctcaagtagctataagtgggtgtgtgagtgttggaaatcctgagttcgaatcccaagtaaaatatgattgtaatatataaacacttaaatcaaataagcgtttataatcaaataagaaggtcaaaattaagaaggcaaaaaaaaaaaaccattattgaaacaagttattactctaggcgaaaagaaatgagaaaaaaataaaatatcatagctacatattgaaaacaatgaaaaaaaaaccacattaattggataaatagaattttatttatgtaaatacctgagagatagagatgatttattggattgctctatacctgaaaaaatatatatatagtaaaataaaattaattaatattaatgatacattaataataataataataataataattgagtacttcttgctatcaaccaagaatgttctgtggtattattatattatggtatatttgtcttatatgtctatattatggttaggaatgtcaatcgggtcagccccgccacaaatccggtccggcccgacatcagttcggcccggcccaactccttcttttggcctagcaggtaagccccgacccaagataatcggaggaaaagggaagtagtgcagtcaatattagtataattgttattgatattctaattattattaccggataccatacataattattagaagagcagaaagaggaactatactcatgtcaaccttagtacgtaatcttcatcaccttattgttaattcaaaaagatatactttacaacgactagttgctctttgaaactgtttatacaaacaaaataatacaagaatcgaatagcgcccttgtttattattataactataatactctttttaacaatataattataaaaacagaacgtaaaatccatataaaaatccaatacatacgcatacgtataagttacaggcacatactcatatacagatattatttatacatacataaagatttacaaacacacataacacaaacaaaactcagaggtaaacgagaaagagagttacaggaacggaggtaggttgagttcgactctcggccgagacaatagactaagggtgggtgccgtccctgtgcggtggccggcgccgctggaagaagcttgacgatcaagagaggggacgatcggacttttagtgattaaaggatttagtcgatacagtaaagaaattgggaatgatgtattttagggatttaggattttttaacatttgaaatccggccgggccgggcccgaaataatatgtatcgggccgggctgggctgggctgggctgtgaacccgataaaaacccaaatcaattgggccggcaaaaaatagtctaatatgtgtgccagttttattatgaaaactagttacttgaaaaaaccagttatgaaaataataaaataatatgtgtgttagaaactgattatttaaaataaaacaaaaattattgttcaaataacatataataataaaactggttttatacaaactaaaaaatatacaataatattataaaa

SEQ ID NO: 391133 - DNA, 1770 bp, Cannabis indica
atccaacccattaatataatcggttctcaggtgaaatttgtggtaccaaatcattggcaaacttatacaagcgatcaaactctagtgtatattcagccactaacttatcaccttaaactagtttcacaaaatcctccatctgtactgaggtctcgagactgacctactaaatcccaccaggtacgggcatgctcttgaaacataaaagcagcacaatttactcactcagttcctactacccccatattatccaggagacgagtaataatactcatccattgttccgcctttataatatcaatacaacccaagaatgttgaagcttacaacttaacaaaccgctcaaacactgaatcttggtgtggttgtagggccaatctagggttggctaccacgggagcaagaactagaggaatcccttgctctaccggagcttcctgaattagcttcctaattcagcacattcttcttaacaaagtataatacttcgtattttagtaaacatttgctgctagtcgacaggaagattagcatcattcacccctcagtattcttagaattatacagaggagccggcggtgatggtggattggttgggttatcaccctactctacaaactcaccctgtgatctagttggtttttcaaggttcattctttcaaataatcccaaaatcaacaatctaagtgagtcaagcactaattccacacttacacacttcatgccaaaactctaactaacactcacaattctctttcccaaacataacaattattatcgacatttaactatcatgattttcattataaatgtcttctagatgctcgtatgctgcctattatttaaaacaataaatattgtatcagataagcagttaaatatttactctcaacacttactgcaccacgagtcgagcttgcgtttgacgatgattgtacatgttcagctgatcttcaagaaatttaaaaaccttggtactttgatactaaatcgtaatgacctactcacatgaacaccacgtgtcatgattataatctactaatcccgttaatcggggtccataaatctagtaatttaaaataaatgtaaagcttggttaaataaatatcttataataaacatcaatattatactataaaccaaaataacttaaaatttcatatccgggatcccgtaaaaatttattttcaaaatattacaagttatttcgtacaaaccgacctgagcagcaaaataaaatttctatacaatttttgtttgaccgaaccctcatggtctagcttggccgaaatatgtacaagtcatcttcaaagtccttgatctcatggttgaccaaacactgctttacctttgcctacacaatagagcacccgtgagccaaggcccagcaagacagaaaatgatacaatatgataattataataataattacacttcaaatagtacgccattgcgtatatataaattgtgccactgcacttcattacattattcaatataataatgtcactactataattgtttatgtagcatagacttacgtcttacgctcacacgtctttttacatttaaggccttactagggtttttctcagttaaaattactgagtctaacctggttatgccttacccgcataacactacacagatattcatttaacaaattattgcataattataacaatacgtacttagggtaataatcctaggtcacaatctaataacaatcgaatatcgtataactgcgctaccacgctatactctatgtgc

SEQ ID NO: 391134 - DNA, 1006 bp, Cannabis indica
ttatcgtggagcagaatttttttaaatttactgtatttttttcaaaaatattctataaattttatattttgtattgtgttaagttttcactattatacgattattttttagttattctactattattttcaattgttttatttgtttctttattgttattttagattgttttataaaaagataatatttttataaaaaaatattgtgtagaagtaaaattataaatttttagagtatttttttttaaaatcccaaaagaaaagtggaatcaccgaacaatcaatttttgtaaatatgataatttagttgttgcttttcaaaaataccaaaataatagcccaagcactttcttcccctaaaatattagtctaaaaaaagaaaaatctaaatacatttttggttgggacttggaagtaaaaaaattgaaatacaaatagaaattagggtgttttgtactattttggattatttatatctattaatatttttgtgtttcaattcaagttatttattgtcatttttataaattaataatgttttgaaggttattcattcatgttttcgtgcttgccttctaatctattttcttttagtcactggttgttgaaattaccaaaggcagttcgctcaaattttttttttattatttttacgaaattttactataaaaatactttatttgcaactagcgctgcaacttaaattagcaacaaaaaatacgtatagaaacccctaaactgcaattagtgctgcaaccactttagaaacccaaactagtaaatttaaaaaaaaaaaaaaaaaaaaaagttaaaaatagtatatggggtaattccccataaataggggctttttcacaaaacttaaggtggcgtttggttggaggtaatgaaatggaatggaatggaaaggaaataactttcatttcattcctttgtttggttgcattttaaagtattggaatgacattccaatggaatgctctttccaccattttggtggaatggct

SEQ ID NO: 391135 - DNA, 1048 bp, Cannabis indica
tttgatatttgaggtgaaaaacagatctcatatatatatatatttttatatatgtaaatgtattaatttgtttttaataaaaatgaatgtgacaaagcttccatccgcatgctgcagcatttgatagtagcgcggccatagtttgcacagatcaaactcaataaaatgaaaagtatattttgtctttttattagcttttcattctgtaagtaggtttttttcaagttatttcataccaaaacctcttcagatgtacacaagcatacatctcaaacttactttttttattattattaagtttttcatttgaatggggcgatggtgttattttatttattgagatttttattagttcaaaaaagttgactgggttttgaaagtttagatgtcacatcagacaacgacatcgggtgcatgtgctttatagaaagagttaagaaaatatgaaaaagtggttctttccatctatagtaaatactgagtgggtccggtggtcgggtcgggtcgggctagtaggaataccttgcccttaatgtttagtaatgggaaatttacatggtatactaacttttttatttttttacaaaaatactgtcagcggtaattttttttacttttttactgtatttttttataagttttatactgcagtatactgtgttaaacttttattgttattttttagttattctactgttgttttgagttgttatgttttgtgttctactggtgttttataaaaacacagtacctttggaaattttttcgtgtgacagtattaagttaactcaaattccagtattttctaaatatctgttcgaaaaaagtacattaaaatggtatttatttaaaaggtaattaatttagactctgtattttgtaaaaattatcaagtggactttctattttgttaaataataaaatagattttatattgtttaaaattgtacaaataagattttgaattaattttttatcaaaataaaacttaataataatttgatctaaagatgttacgataaaattggttatattttctgtatatgtt

SEQ ID NO: 391136 - DNA, 834 bp, Cannabis indica
aggttggcttttctcatgccatttctattttctgagggtgaactcacgggcatggtccttgctccatgtttgttaatgtcaccccttcaccaaagaaaaaaaaggaaaaaaaaataatatgtatgtttgttgatgttttagtatactcagatttagtaaaattaacaaatagagctcgcttagtgaaaactttgtgtgcttgaggaagtttacaacattgaattataaactgtgttggttgaaatattattttcaggacgaatttttcctttgggaagttgtttttgttttggtaaatcataaacaaattacagttgaaattttgcaagatcactatatctttcattatttttcttagattttttttaggcaatcatctcattcaatagcaacggaacttaggcactgaatttgtgctcagtggatttaggaccctgctttttggttcctgtatccattgaccatagtctgttggaggagtatctattatcaagcttggcgttttagatttttcaactaattgaaaaatggacacagcttgttagtaatggtatatgtatttacttaatgtgcagactcacccactgttgctgacacgaagttaaattttctcaagtcttacaaacgaccaatcccaagtgtctataacagtgtgttgcaggagctgcttgttcagcaacacttgataaaatacaagaagtcatacagttatgatcctatctttgctcttggttttgtgactgtatatgatcaacttatggatggatacccaagcgatgaagaccgagaagccatcttccaagcatacataaaagcgttaaatgaggacccaga

SEQ ID NO: 391137 - DNA, 1992 bp, Cannabis indica
agggcattttagtcatttttattttgtgggtttaggtgtctagtttattagtgggtagctggccacaaagttttgttcagcctaaacttgttattcattaattagattaatcaaattaaaagaaaaagaagatagaaaaccatttttgcttcttttccctaaccattttcgaacccagcagaaccagcagcaaactaggaatttattgagtcattttagggagttctagctgaattcaagttatgtaatccaaaggtaagaaccctagaacctatttccttaagttttgttgatttttctttagttttaagcatgcaagtgtagaatttattgttgttagaattagggtttattcttgattgctttctactgtttagtcaagttgttttaagttggattcttataattttgattggttaatcttgtgttggacaagtttgagttcaagaactcaaatttggtccattaatggttgattgtatttttgtgttatacttagttttaccacttggaaatggttcattatgttgttattaggtattctagagcatagattcaagtttgggttggttgtaggccgaattggaggttctttgtttttcgttgcacttaaaaatggcagaccatttggtctaccatttttactaggaaaaacctagaaaaacaacttgccgttttttaggcaatttctccattttgttgattttcttgtgttttctttgatatttagagctttgccatgctaattattaacaaggaaacttttagttttgagtttagatccctaagaaggttttagaaagtggtttacccattttacgtgattgtgacataaggtctctgttcagtacgtgatttttgattcaggtcgaccgacacaccttgaatttagaaacgaggtaagactagaatagaatatacatatatgtgtgtgtatgtatgttatatgcatgctgttatatgattcatatgctaccaacactagtacggtagcaaaactgagtcaatgtggtacaacctatgatgtttaagagtacaatccggtattaccaacactagtacagttgggtacgtagttcatgtggtacaatacttagcaatacttggggtatagttaaatcctacaacactagtatagtagcggtacatagtacatgtagtacagaggtcgtacctttgttaagaacgttcttattcatctgttaagccttgtggataggtgtatgggtgcctaaatacaagttggtaatatattgtatgttatatgcttttctcactgagtttgtcaactcacagatattgcttgcatgtgtaggtaaaggaatggccaaggctaaatagcaacgagtttgagacttaaggatgattatacatgtcaggatggtgtgacctagagagttcgatcttgggacgacttgggtttgttttgtagtcgttgtgcgacatagttataaagtttagtttgaacatgtaaacaagtttaaaagaaggatcccaacttttttgtataattatagaattataatttgatgttattcaaatatttatatttatcacaatttttgataaaactctttgattagcaaaggtttacaatgtaattaaaatgtcactgtagtgtgtctactcattagggcattataagaacccatcacataggctgacctggtgctaggtcccaatgcccatgttgatattttttcaacctcggtgagtccaaatatttttccttagaagtctcgggcattttttcctttttcagaaattacgaagatacaagtgttctcaggaaacaaacgagaccatttgagggccaaaacaaggacctagcacccatgttgacatgggtgctgggccctgcgcccaggttgacattcaacctagttcgcatgtttttactcctcgaatgcaaattcaactctaggcattcttcttatcttagtccaaaacaggtgttaggctatttttagcctatgttttggatccaattta

SEQ ID NO: 391138 - DNA, 647 bp, Cannabis indica
taccgggctagaaaaagggtttggactaggttgacaaatactggcatccaacatctctccgaccaactgctcaatttcatctttcactgacgggggataccggtacgggcgaacactaatcgaagaggtcctatacggagaattatggcatgatcatggctacagtttggagggaggcccgttggtggttcaaaaacaggagcataagtttgcaataactttgagataggagctagtaatccttggtgcaactctgttacaactgtactgcccaactccacccaaaacccctacttctcttgttggatgattttcatcatagtcttgagagatactcgagttctatctagtgtaggatcaccacgaagtgtaaaggtttttcttccaaggtaagcttcatgatgtgatccttccaatggtgataagtgcctcccaatgtttctaaccattgcatcctgagtataacatcggtactgcctaacgataacggtaaaaaatcctcaattatctccaattcttgtagcactaaaggcacagcctgagaaattccttcccctttaattgcttggcctgaccccatctgcaatgtttaaaaagatgcttttgaggtgcgcctcaagttgaggcgtttaaagattgcaccaagg

SEQ ID NO: 391139 - DNA, 1006 bp, Cannabis indica
agctgtgctcatcaactcggcctcacagcaatccagtctagtggtgccagattctgaagctaccaaagaggtaattcatgagattgaagctatatgtagggcaatcaagatcagagtggtcaggcattaaaaatattgaatggaattcaacagcacttttcaaatatgtatcggctctagcaaataaagaggacaacctttgggtcaagtggatacacaatgtgtatctcaaagaggaagattggtgggaataccaagcacatagccatgaaagttggtattgaaagcaaattgtggcagccaagaatcaagtcaaaagactaactgatgcacatcaattttcccaaaccaggtatcgaatctcagctggctataaactgatttgtctcattcaaagcagggtgtattggtgcaatgaagtttgggaaagattcaacattcccaaacacagttttatactttggttagcaattcaaaattggcttaagaccaaggaaagattacagaagtttcagcttgttaatgatgctgtctgcagcctttgtttgcagcaggttgagtcaaatgagcatctttttttcagatgcccttattcatagttctgtgtgcagaagataaaaaaatggctctcatggagagctcggaccactgacttgtctcaactgctcaagtggatccacaaagccaaaattagcaggtttaaaagagagtgatggaagctgttgttgcccatctagtgtactcggtttggtttgtaaaaaatgaccaaatctgaaataaacatacagaaaatagagatgtaactgtacaaaggattaaaaatagtgtcaagcatagagtagaattgttttggccaaaaaagataggtcaacaagatagagattggtttcaaaaattgtaaaaagttgtgcttgaggtcttttgacaaaaaaatgctcttttaatgtaatagattgtaaatgtttgtggattaataataaacttgctgatttatcaaaaaataaat

SEQ ID NO: 391140 - DNA, 1185 bp, Cannabis indica
gagagagagagagagagtttgtaaggaaagcctaaaaaatgaatgttgagaattagcttttatttatagatttattgtacaagaatacaaacagaattagttacaattaacaaaaacaaaaatcgagtaagatcaacctaataccaactaagttttaattaactatttgtcgattattattctccctcaaatgagaaaaagtgtgagcaagtttaagtttgtccttgaaatactgcaatatgtctttaagtagaggcttggtgagaacatctgcaatttgatcaacacttggctcatatctaacaaaaatctcattttttagaatttgatcataaacaaagtcaatctctatgtgtttacattgggcatgaaagattgggttagctactagggtagctgctccttaattaacccatataatgggagtgtcctgaagtggaacttgtagttcagcgagtaaggagagaagtcactttacttctgttgctgcattagctaaagcacaaaatttttaattttgtggatgatctagaatttattactcttgtaatgaattgtgtcagaactcccgttctctctttttttcaatggaaccctccatggtttctttgaatcatagagaggattacgataaggtgacctcttatcacctcttctctttgtcattggcatggagtatttgactcgaattatgaaaaaagtgagatgcaaagatgattttgcatttcatgagagatgtgatgcattaaaactcaatcaccttagtttcacagatgatgttttgctcttttgtagaggtgacaataaaagcataattcttttgctccaagatttgaagcttttctcagccacctcaggtttacaacctaacaaaaccaaatctgcaatctactgcagcaacatggcagaacaagaagttgttagagtgctagaagcatccggtttcacaaggcaacaagctcctttgagatatcttggtgttcccatctgcactaagaaaatctcaaagcaggaatgcaatgttttgatagaaaaaatgacaacaagaattcaatcttggaacaccagaaatatttcttttgctaaaagagctgtgctcatcaactcggtcctcacagcaatccagtcttagtggtgccagattctgaagctaccaaagaaggtaattcatgagattgaagctat

SEQ ID NO: 391141 - DNA, 2171 bp, Cannabis indica
ggcaccaaagtaaccctagtctgagagccaaagcctctgccattgtagaattcgtccttgctgccataggtatcgaaagaccagcaaccatgatccccttctaaccttaattaccgtcccaagcccaagttttccactgtttgagttgatagcagcatcagtgaacaactgataaaacccctcatttacctacttatcttgctccaaaccttgggaattaatcttttgattacaatccaccctcttggattgagcatccctatattccacaatataatcattgatccagttcactacatcaacagaagacatgtgagactttctaaagattttttttttttatttctattttcccaaatagcccacaatatacacaacaacaacatgaagtcatctttatttgaagtagaaaagccagacaaaataaaattatgaatatctttatgcttatgctgaagataaaagtgattaagggaagaagttttccaaacctgtctcgctttggaacaatctaggagagcatgagttactgtttcggttaggcaatacatgagggagtaagaaggatttttttagaaaaaggttagatgcagtcggaagaatgtgataaaatgctctccaaccaaagatcttaagcttatgagggagacataaattccaaaacttcttccaccagtaattagtagaactgatatcagaggtggaaggagggaaaaagactgtggtggctaggtggtaagcagattttacagtaacatacctgagggatccccgttccaaatcaaaatatcacttttgccaaaacccccaataggaacctggataatacaagaaacaatatcactatcaaaatattgtgtgagcctactcaagtcctattggccattttaactaataaagaagttgactctttcagaaggaggtatatggtcacctttatatttaagatatttgacattaggaatccaataatcctctaatgtacgaatggaactaccgtcacaaactttccatataagcacatccttaagaagatctcttccccaaagtaaactggtccaagtaaaggagggagaatgatcttttttggcttctatgaaggaattatatttgaaatatttagctttaagaatcttagataaaagagaattgggatttgagaaaattctctatgcttgcttagccagcaaggcttgattatcgtgtaccaaagatcagaaacctagtcctctaaaaaatttaaagttacagaggtaggaccaggctttctaatggatttttgtagccttcctcaaagaaccccactaaaattgagccatgagcttttcaattttatgaaaaatgggcacatgaagtttaaaacaagacattacataagagggaatagcttggattacaactttcaaaagtacttccttaccagctttagagaaaagcctattgttccacacattcaaatgtaacctaaccctctcaaggataaagttaaaactgttcttctttgatcgaccaaaacactgagggacactgagggacacccagatatttacacgtaaaaggtttattatctagacctagagtgatgtaaatatactctgaaataagagagggtgtataggggcagaataagatagaggacttcccaaagttaacttgctgcccagtaactaagttataaagttggagagcattcttgagagcatcacatgaggcatgagaagcatcagtaaataaaagagtaacatcagcaaaaagtaaatgagaaaaagtagggacagaacgaacaatgaaaatgcctttgagattaccaagcctttcttggatcctaagggctgaaaaagatcccttcagaacaaaggaggaataagtaaggagacaagggattccactaccttatacttctagaggggaagatttcattagaaacatgactaattaatactaaatctaattgagaccgaggacaaatagttacttataaggttaatgattctgtcaagaaaaataagcttattaagaatagccaaaatgaaattccactcaacactaaggggtgagcaacgatcggtttggtcggttttttacacaaaaaaatccaaaattcagttttcggttttcatggttataatccgaaaaccgaccgaccgttatacaaatgtaaaaaaaccgac

SEQ ID NO: 391142 - DNA, 484 bp, Cannabis indica
tttttttttttttgagatattaatttttttaatttattgcttacaatttaaatggtattatcgagactttttgaataacaaaataatattatttgttatctgtttttatttatataattatgctttcttttcaaactaaaaaaaaataatcttttcaatggaaatggtaatgaaaagggcccttaggtttaagggttttgatgtttacttctgtggtctgtgtgtaaatgtgattcatgtgaattgctttctttattattattattattattattattattattattattattattattattgttattattattattattattttttaattaaaaatgaaaaaaagggtcccctgctgaatagtgaattataggattcacaaactctaaaaattgtgacacaaaaaaggaaaagaagaaaagaaaagaatgaagtcatatatatatataatatactaggtgattgttacgtgccaagccacgta

SEQ ID NO: 391143 - DNA, 1106 bp, Cannabis indica
aaaaaaaaatacaattttctatcatttttctcttgcattaatttttaaattttgacaaatttatatagtaacaataattaaactaacgcaagtgtcaataacttaatcgaaaaatatacaagttagttatatgaattgagatatacaagttagctatatgaaaaatatacaagtaattagttaatgtaaagtataaacataaattgagatacacattgatcatcataatagctcttgtcgttgcacctccgctttcacgtaatcaatccactgctcacgtagaagatttttctcgttatttgagtacgaggtgatggatctatgctgtaaaaccaaattatatattaatatagtaaaaagacctattatgataacaaaagaaagaataatatttacattatttattaattatttaagcatttctgtcaatcgacatattggatcttgttcgttcatgaaattttcaatgaattttatgacgtagtattcacattgttttccatctggttgttgtcgacaaattggagttattcaatcgatgagaccaacattgcactagtttataaatgtatcatacatgttgagaaacctacacaaaaaataaagttagcatataaaatatcaaacacacttatatattatgatgtggtttatagaacttatgtggtaatgatgaatttcaaatcttctggtacttcatcattgctggaatccaagtaccccaccgtctgcgtacttggttggataagtacaagaatctaatgaaatatttttctacacaaacaaacatgggtaaaattgttaatacgtaataatctatattatgtggggttaaaatttatgaaattattaattttaaacttatttatcgattgttgtacggggcaacaacccaattatctaggtcggtctgggccatactgttacgaaaattatgatcagtacgcaagtatacataatcaagtagtaaactcacgcgagtgaggtcgaaccacagggaattagattaactaccactaaattatacttatgattctatttggcaaatcgaaaatgttcaagattttaacagaataaaagaaattcaagaaacttaaagaaacaag

SEQ ID NO: 391144 - DNA, 942 bp, Cannabis indica
aacttataactcctagcttaattagtactcaatttgaacttactttaataaattgggagaagaagatatatgttatatatttttatggaatatatatgtctgtatgaaaagtatgtgtgtgaaaataggtaaaataaggaaatagactgactgagagtctaccatcaattccgtaactctgtggtacgttaattactgtatttgaaaagaaataaagagttgactcagagtcttccacctccctatgctgtattctacccatcaataattctttgactttacaataataatcagtcaaataataataagtgacaggcaaaatcatatatgctaattattttagtcctcacaaaatgaggggataaggttgcacagaattatggtccttaatatattaattgaaaaattctacataataatattatatatagaaaaaaatagtaaaataagatatagtttaaaaaagaaaaagctaaagataaactggtttaaattgtaataaatatcatacaattaacatgagttgttttctataatttcaaaacaacaacacttgttttatattatttatatatatatataaatatatatatacaaaaagaactaattaaacctgtataattaattttaaattttcatggtatagtaagaaattagaaatattatttgcaataaatctctattgaaaactcaacaagaatctccatatgctagagcactcacaagagaggaagtaaacacctcttaccaatcaaaaaatgaaaaaaaaaaattagctgaagtgtaaaaatgggactctccaataaatgatgtataatttagctataatagctaagctcttgattcaaaaaaaaaaaaaaaaaaaacaaaaattagtagagtgagtattattttgaatattgagtagagaattgatagaatgcatgctatgtaagcttacat

SEQ ID NO: 391145 - DNA, 2647 bp, Cannabis indica
agattgcatctgtccagaatgcaaattgctggtttgcatatgatcagtatgcaactgaccatgatgtaatgaattaccatgcaacaagtcagttgaatattgatcattatgtaatgagtgagaaccagaatcagtagggacagtaaaaaaattctcataagtagcagaaagatcacctgttttgacaaaaggaaaaatctgctaataaaaacaaacatcccttgagacaaaaacctggtttgtgtttaaatcaagaagcttatatgccttcataccaatagggtatccaagaaaaatacatggagctgatctaggagtaaatttagacctagattgactcaaagtagaggcataagctaaacaaccaaaggcttttaaatgctcataagcaggtggtttggaatgaagtatgtggaaaggtgatttgttctttagattgggtgttggtgtcctatttataaggtatgcagcagttgacacacattccccccaataaactaaaggaacatgagattgaaaaagaagagctctagccacattgagtaaatgttgatgttttctttcaacaattgaattttgttgaggtctttgaacacaagaatgataatgcataatcccaagctcaccaaacaaggttttgaactgtagttcttttgcattatcaaatcttacccctttaatggtcttattaaactgattttaaaccaacctaatgaattgagggataacaacttgagcttcggatttttttttgatgagatgtatccaagtatatcttgaacaatcatcaacaatagtaatgaaatatttaaaaccctcagttgtcaaagtattaaaaggtccccatatatcaatatgaatgcgatcaaaacaattctcagcaatatatttccccttctctgccatctaactctgcctcttcacctattcctatttctattcaaagtaaattaggtagaaatgttagaaggccttcatatttgaatgattaccactgttttcttgctactaatcctactgctcttgctgctcatggttctttaattacctcttatgattggatacaaaggcaaccttttttgtttggcatagtggcaaatagagcaatgaaaggaataattagatttagaatggaaattcaagactttattcaaaggatgtatttttacacatgatggatggcctaacctgtagtgccatacagtctcattagaaatggtagaatcagatacaaaacctgactgctcattattaaacagattacaactcaagaaataaagatcaccacactttttacccatatcccaatcaccttgctcttcatagtgtcctgaattatacattttccatgagaaaaaaggaatgtgcaataagtagtggctgttaaagcattaacagataataaattgcatctgaaagtgggaacataaagaacatttttaaggactaagtcaggccctaaaataactgttcctatgctgtccactttagcatgcacaccagtaggtaaaaggacagttttcagattagaattggtatgaacattctgaaaaaaagaaagattgaaacatacatgatgtgtagctccagtatctataatccaattagaagaaggagtaatagatttcaaaccagaaaagtgagaaacaattggttgatctgatgaaggttctggtgtagcagcattgccagcaaccttttgagccagcattgccatcaatttctgacactgtgaactagacaaaccagcaaccaaatccttttctccattagaaccttctggtttctgctcatctcctcctgagaaatttgctgaagccgatttcataggaggtactttagaattcctattaggaaattttccatgtaatttgtggtctggtggataaccaataatccgaaagcatctttctatggtatgaccacacataccacaattagtgcaagaaaactttggtcgaaatggctgaacatttccagcaacatttccagcaaattgacctattcagcattcggattacttttatctgcctcagtattggaaataacatcattagttaagcctctttgcctttcttcttgaacaacaatggcataggctttattaacactcagtaaggggtcttgcataaggatttgtgacctagccaagctgtaagaatcattcagaccaacaagaaactctaatagtctgtcttcatcttgatactcctgaataatcttcatagcaccacaactacaaacaggttgtggtctgtattcccttatttgatcccacagtgacttgagcctagtaaaataggttgtcactgagcttgaaccctgagttaatctttgcatcgttttctttgcctcaaaaatccttggtgcattcttctcattgaatctttcatgcaattcttcccaaatctcagctgcattatcatggtacattatgctatctgcaatctcccctgaaatagcatgaagaatccatgaaattactgtactgttgcacctgctctggttgaggaagcttgccattaacgaatttcaatttatttagagccacaagagttatgagcatagatctcctccaagtgctataattctcacttcctgtgagaattttaggcactaaaactgctcctggattatctccattaga

SEQ ID NO: 391146 - DNA, 1319 bp, Cannabis indica
aaaagcattttgcacggctgtctctgttggttctgttgttaatgaagtctttctatcagtcttttttcagttgcttacaacttttgtaaagccttcaccatctacctgctgctcttacctcctattgtctttctttataacccactgttgtacaacagtagttttcttcttgtagtctatagaaagatgcccaacaccttgacaatgcgagcataataccggtttctattcatacctaatcccaactgaagtattccaaccaaattcattctcaaactctaccatattaggcaagggttgatccatcaaaacctcgatgagtactctagcatagctcaacctttctctttcctttgtaacattatcgaacataaattggcttcctaatctgcccaaatatcttgaacaatgatcgttggccccaatacttcaatttcaaatcttctaattgaatccaaataggcacactcttcacatcctctttcttgaagttcacattaggatcccattgtttcattatcaccggcctcctattaaagaatataaagcccccattcaaaagctaatctctatcttcaattgagtgaaaccgaatgatgaagactccataagagagctatttcactcggtccaccttacccttccaaatcctatgcacaaagccatcaagaacatggagtggagggttcacccctagaacataacatacaatagagagagactagaaagagatctcatcttctatgtaatatacagtgatcttgaccttaccagtagcaccagattgcttaaaagaattatctaagttccgaacaactgaagtagatcgtagtacagggggaattgagttcttaccctgagcaatggcactgttacattgatcattggcatggagaaattggacaaagtcagagcatacttcttcttgcctttgaatcctagctagggatgatttaggagagagaggtggctggaaaacatccttcagggcaggatcattctccaccaggtcttcctcctccgagacctccaaagcttcaattttagaaatttactccatcgaaatggagttatttgcatccttctttcctttcgatcccctcttcgtcgcgagtttggttgcagttttgagtttcccctggaccttcgatcgagttttcgccatagccccagctgatcgcagctgcaagaacgcaaatacagagaaaacccttccctttagtaccacggtattggaatggggaatatttaagaaaatactaccaataaagtaccaggtcggacgaccatcctaagtactgaaagaacatttactttta

SEQ ID NO: 391147 - DNA, 967 bp, Cannabis indica
cataaaaaaaattggtagcagatttggtccgatggtagtccgatgggtggtccgatgggtccgatgagtggcccgataggtagtccgatggtggcccgatggtgtaaatggggtgatgtaaatgggggtattttaggaatatcataaaagttgtcatatcttacaaatattagttattatttgtttagaatttttttttttaaccaaatgtaagcataaaaaatcaaatttcccttacaaatttgccctttgtatttataaacaaaaataatttgaaagagaatgttagggcttacaaatttgtacatatttatattattagccacagaaaaaaatattgtgcacgtaactctatcattggtttacaaattaaaaagtttaattatagagtggtatggtcttttttttttttttttgcttttttcaatttttaatacaaagattgccatgattatttgcagttttaggtgtagcttgtaaattgattatttggatgaccatataagtaaacaccgtgctttaaattaagtaaatataaattttatactttgaaaaaaataaataaaactgctattatataataaagtaaatgatacgttttactaggtaaataatgtattttgaattaagtaaataaccatgctttataaagtaaataatgtgtattaaataagataaatagaacctacaacccttcttaaataaagtaaacaaaaactacatatatctatcttttcttcaaattggaaaacaaaaagattagtgatatatcttttgttggatgtcccaaaaaaaaattaataccacatatataatgtaggaaaattctataatgcacccccttaaaatgggtatattgatacacccctatctattttagcattcgaaataattttttagtcaaattttttctcatagtcatgtacgttatagttatttaagatatcgtgcaaaattttaagaaatt

SEQ ID NO: 391148 - DNA, 701 bp, Cannabis indica
atcgtcagcactaattcttcacaataataaggagacgtgtgggtgataagtcaaaaaatattgcaaattatatttaaaataaataaataaagattggccattgccatgcatgtactgaagacttttgtaaaaatgaaagccacatatatatatacaggattaggagcaagcacgtcagctaaggtaagaccttcaccggtaagtactattactattattattactattacgatacaaaaatgagatactccttacttttaaaataattaaaataaaataaaataaattcatgatctttattctttagttatctatatttggtcttatttatatattaatttctttttaataataaaattttacgtcatctctaaattagcccactcaagctactttgtgtgcccagccgttgacaaaaatgtgattaaacaagtaaagccaagccaaaaataagcaaaattcatatggagtacgtaaaaacataaaatctctaataaacataaaatgcatccacctatatataccacttaatacatgtgtgtatatatatgcataaacatatatttccacgaactttaacaaaactataatttatataacgaattgatgataataatatatgaaaatccataaagtaatatagtcacaaaagctttaagcacgtgtcttttaaattcatttaggcgtttggttgggaggaa

SEQ ID NO: 391149 - DNA, 761 bp, Cannabis indica
tttattgaaagtatataaaaaccatactaaatatataaaaatatatatatataagttattaattatattaatgagtggctaaaaaataaataaaaaagtaatatttattgtgatgtaaaatttggtagagaaaaatttagtccatgttatattttgtgtcaaatttgacacaatttttaacatgtgtcaaatttaaaccacattatacactatcattcgagttaaattttatgaatatgaactaaaaaatacatatacactacattactccaatgaaaatgctctgatgtaacaattgagaaaatacattattttctaatcaaattacaacgtatgccctacctttgcattaattattttcttttattgagtaggaaacctaggattccacaaaaattaaaagaaatgcattgaatcttagtggttcattcaataaaagctcttctactaccttacaaataaatgatgaacccaataataagagaaccatgaaggtgatgataataatctaaattatgacatctattagtttactttttgaaaaatctagagcgtacacccatatacacccatattgttggtgatcattaataataatacagttatggtcaacacaaaaatttcaatacaacaatactccacaataatattttataataataataataataaataaagagcctagttcattggaaagaaattatgctactattgttatattattttataatataataagtgtagattaaaatgtagtaata

SEQ ID NO: 391150 - DNA, 673 bp, Cannabis indica
cgctttcgaggaacttgcattataccttcatggtatatttgctatattaatccatattattatttctttatttttttctccatgttttttatatttatttgctcgtaaattctccagaattctttcctctctttttcctctcatcgacaaatcctggagcgactcaaatacttggaggatgaggtccaaaagtcactagcccaacgcgaggtcgtgattaaataatggaacgacgctcagcaggaaatcactcgtctcaaacaggaagtcgagaggtcgaagaaaagccttgaagaagctgagaaggccataaagaccaagactgatgaattcaatgaacttaataaggtgctcgtagagaaagaggccgaactcaaagggaaagaggccgagcttgaaaggaaagcggctgaaaccacagaacgatgtaacaaggtcggccttcgtaccgtttatcaagctttgatggcgaatcccaacatggacacaagcttcttggagtaggatgaagaggaaattttggcttactgtgaaaaggccaggatggaggaggaagaggctgaggtcgcagaagaagaagatctatccaagtctcccacaatgtaggcttgctttttatttatctttttctttttttttttttgtaaggaaatggccttagagccgagacaat

SEQ ID NO: 391151 - DNA, 1050 bp, Cannabis indica
gagagcttcagagccacagccatggacgaaaactacctattgaaatcaggacactttgagtgaaagcgaccaatgttgcttgagctcgaagaagaagaatacatcgccatggttttcgttaaatattttatttttttccggttgaaggttccaaatacagagctgaaacttagagagagagagagagtgctagtaacgaggaaagaaactgtatataaaggaagaagagtacgcaacttcagtgatggaatataggccgttggattacagcttaagatgaaggaagagaattaaaaagttggggggaaattttgggtctccgtgtaggtaagaaatgacacgtgagcaattttcttccacgtaccactagtgacaagtggagtgtaacttttttaacacatgaagttcaagaaatgagattttgataataatgacatttaaagaaaaaaattgctaaaatccaaaaatgacctatctaaattgaacaatgacaaacttcttaattagccgagacttagcttcaaagttagccaacttttaatcctatatggtaatgtaatgatgatttatattttacatatttttattcaatatcagatgtgccattatcgatggtgaatctatgatggtttcccaactagtgaataacttaatagttacagtgtttagtaatggttcaatttcaaaggctgcactaactggttgtgcataatgaaagtgattaattggatgggtctaataatagttactttttcacaaagtcacaattttcgggagcctctcatacaaagaaaagtctagctacattatgtgcctacaaacgcaaaaagtccatggacataaagctacaaataacttggtttactttcataaagaattgcatttatgataagaacctaagagccttctatttcttttttgttttgttttgatttgtttttctcattcattgtaacttataaagccgtagagtcggtagtaaaagcttgttgtccttttctagagtaagacttggggtagataagaaaattgctaaaatatattattagt

SEQ ID NO: 391152 - DNA, 1376 bp, Cannabis indica
atgactatgtacacagatgacacagattccagtgatcacctgtctagattcaacagagtcatgacagtcatgaaggtcagcaatgacgctaaattcttgtattttccactgacattaagaggatctagagaagagtggttcaaaaagttagaaccaggatctatgtattgttagaataaattgtagactaatttcagaaggatatttgctgtaaccagaaatataaacctcaaagttagtactttaactaacatcaaacaactaccaacgaaaaccttgaagaacttcatcaagaggttcaaagaggaggtttccaaaaccaagaagtagatgacggacaaaagttggctttattacaagccagaatccggacgagaactccctttgagaatgagttgtaacaagaaagtgtagctagccttcaagatttcaaaagagagcccaaaagtatattaacttggaaaaaacccaaataaccactttcagagggtattatcctaatgggggccctgggtatacttttggggtacaattcccaggtatcacactacctgccgctccccaaacgagtggcatgcctagtgtgaaatttcaagcaacacctaggtactcactaaactttgtcatagaactagcccattatgattatggactatcagtaactggtcccactcccaaagcatgcacgcaatatcttgctcaatctgcttcacttgcagcgagtgcaacttcagctcccgaaacttctcagagtaaatggtcatccaaaggaagcacccaaagtgatagtaagaagccaaaaagatacgagtataatcccaagtatagtcagtatattgatttggtggatactcaagagcgtgtatatttgactgcaaggcaaaatgttcactaccaaaggccacctcctttataccgagacagatcacggagggaccccaataaaagatgtgagtaccacaataacattgggcatacaaccaataaatgcaagaatctaaaagatgagattgagaacttgatacggttagaccacttgtatgagtggataaggaatcgcttaccgcatatgagggaaggacaagtcatatctcaactaccacgtggaagcatggtacaagcaccaaatataaaggccctttagggaaaacttccccagaaccaaggggccttaccagggcagccacccataccaaataagggagcagatatgatctcgagaggcatagggagttcaacccgtacgtaatgagttaaaatggtatgttagggccctaaaccactctacaaaaatctgctatttttagtgataactttttattcacaacataatttttttgtgactaaatgtgacttttagtcacaataaaatgtta

SEQ ID NO: 391153 - DNA, 1239 bp, Cannabis indica
ctacaaaatgctgcatgatatgcagcctctttggatcaaatatatacaccataccattactttgcattctccttggagctgtccttaggttgttagtttgtactatctttcttattagttatttttcaaatacttttaagttttgtgagataatttttgtttttgtgtgaagaacttgagttgagttgagaaaattcttcactggttattgtaatgtattttgtgtattgtttttcttatcataattgttcatgttgaatacactttcacactgttcatcatgttttgagagaaatcttgctcatgaatcatttctttgggaaaaagaatgcaagggttatgatttgagggagttcaagatcttaatattgtacttcaaaagtttggtaaaacttttatacttttgtgttcaaatatttctttatacttttacggtgttctataaaataatactaaaataataagaatatcacatgaaaataataagaaataacatccaaataatgtaaaaaaaaaaaaaactaaacaacaaaataaacaacgagacacaatataaaaattttaaaagtctgtattttctgtaaagaaaatcttaaaaagtataaaaatatttaaaatttcgcacaactaaatattttaattttttttttattatttttgtgtatttttaaaataattcctaattaatttttgttttgggtctagacttaactatcaatattaaagtgataacttacaaataaggacaagctttacttataaaaatttatataaattttgttctttcttatacaacccaaaattgaaaaatgaatatagaagaacaaaattaggaaaagaaacaagtctaatgtaacctttgttgggcatgtactaatagatgagatttttctccactcctttggcaaaaacaaatcttgctacacttcttgcctattacttctagccttattgggtgtgaaatagaaatgtgccacaaataagagaaaattatattgtatatctattttattttatttattttaattattactttcatttttatgctctttaagatatactcactttctcattagaagcttaagttaatgtaaattatatgttaaatttaactagaaaattaaagtatattgggcaacttaatcataaaagtaatatgttttaataaaatataatatgagtattttttattaatgaattaaaaaaaagagcaatttgcggcgaaacccccttatgttt

SEQ ID NO: 391154 - DNA, 543 bp, Cannabis indica
caaacgacgtcgaatttggtggctggagtggtatatccggccgggtcacgaatcgggtcacgccgatccgagttgtagacccgcggacccactgggagaatttttgggtgacaggggtggtagaaacgacatgtcgttttgccactgttgggcaaacgagatgtcatttcgtacatcagagagctcccctttttgtagaaaacgacaagtcgtttgatatctgctgcatgtcgttttccaccaaacgacatgtcgttttcaaaaacgacatgtcgtacggcactattaaaaaaatggggaaaggtggaagcacgtgggggcacgtgcacagcttattttggggcctttttctcttttttgttccatttttaattttcaatcatttatttgtatgcacaatactaattcatgaattttattcatatttgattattaattttttagtattgtggcataaatttcatttatttttctaacaattagtgcttatttttcttgcatatcgtaagattaagcatgaaaaattgtttggtaatgaggaac

SEQ ID NO: 391155 - DNA, 795 bp, Cannabis indica
actcgaacccagaccctgaacccggggctaggtttgaggtcttgtgctggattcagagtctgggtccgaggtcttgtgttgagtctggggtccgggttcgagtctaggtctggggtaacatgggttcatgatatggtatggtgtagaatatttagtttttcttagtaaaatgaaaacctaaaaatagtttttaaaaacctaagtcaaatactattaaatttttaaaatgacaaaaaattattttctactctcacttttaaaaacacaattttaaaactaaaaactgaaaatacatccaaacaatctcttattttctttcttaattgaattctttgtccttttttttttctacttaaaaatatggtaagtttgatcaaagttttttataaaaattctttttataatcctcattttatgagcaccaaacaatgtttgcttgattttggtgctttactctattattctttgttaaaatttatgctatgaaatatgtttttttttcaatattaatgcaattcatcacttggcaagtagtgcaagtcatctcaataatttgaaacactttgcgtggaaaatagcaaaaacatagattgcatcgataattttaggataataaaagctggtgttactaagatttatatatatatatatatgggtaatacccattaagaagtgttccatatatatatatcaaagcctatatcaaacgccaataagcccttcaattatgtcaaagaaaaatgatgatgagcccattcttttcatttggtctcttttcctttttttttttttttt

SEQ ID NO: 391156 - DNA, 2206 bp, Cannabis indica
tttgcctattgctctttatcagaactggtatagattctataacctgttcattttttcactaatatttttatttacatggtacctttttttcgaaattaaaacaacattaatataacactacaaagcaatgacattaaaaattatttttggtgttcttttttatatttggatgatccccttaattagcaatgaatttatgtttataagccaaaaactaactttagaacaacctttgatttttgtaatgtatattattaatcgtttctcaggatgatctatgtgaattatttttttttctttttaaaatggcatgtatgattaaataattttagattatgctatttttttttaatttttaaatctaaatctgggtgtttttttattattttaaaattaaaatactatgggtttaggtgtgtttacctcttttgttttctttgaatctgctttaaatgttgttgttgggtcttgattagtcgtggatttactaattttttctcttcaccagattttatgggtatttttctagtgtttctatgtttcgatgttgctctgtccgtccccaacgaggaaggaggcgtcgtttgtcccttgttactgttcacaatataaaagaaaaaaaatggacctggacagtatgaaagaaaaataaaagggcctagacagtaaaaagaaatttctgctgtgcggcaatattttgtaaagataagagaaaaaattagtatttttgtaaatttcattttttataattcatgaaagttgtccatttagtaatattaaactatcaaattaggtgttttcattttactaggattttaatgatatagcttcgcactaggaaaatataattaatatatatacctattttagctatattatcataaattattattcttttccctccactttgcctcttttcgtcaaaagtaacctatcccttgcatttgaaattcaaatatttttcagcaatgcaagatatgtcccaccactcaaagttgaaacgagtgatgcgaatttaccaactttaatatattaattacataatttaaatttaattaattaattaacctttaaaaaacatattaattaattattcttactttagttagattaatataattgtatgattagagaaacttatttagggatcaaatagaagagattattatttgtcccatggtcaagaagatgtttatatatcttaacctaaaagcaataaaagagacaagacattccatccaaataattgctaggccccatctttgattactccttcttaacctttttgataaagccttaacaccctctaaattaagttataatccccctttctttttaccaaattccaaacttacccctcatcgctctttattctccacttgctatgtaaccatgtcacactcaaccaaagcttaatcatttttattttcattttatatggtgtggaacacacatgacacttatcttactatggaaataaacaaggatgtttcttgttcaaatgtgagattttaaccttcattcgctatcaaactatccatttaaatttataaaactatattaattaagtgaatatttggtataaatttgcacctctcttctatagtttaatcaaaatattttatattttaatatatatctaacatatttttatctttttgtgacttgtttttgtccttggtttgattttttttttctttcctctttctttatctctcctttgtatatatctctctatatattattaggtagacaaataagtttagaagagatacccctaagaataaagtaagagaaaaaaaaaaaaaactggaaaaatgaaagagacattatactggttttaatatattctgtacagattcatatgtccaagtgattgactaagttagtaaccagaattgtgtacatttgattcattaattggaaattatatacataaaaataatattacataatataattatataaaatgaaattataattgaaaaatatttaacttaattttgttttcatcaatttcatcattttgagtaaacaaatatataactttttagagaatatcatttttaatttgatgattgtcacaattttttcgtcatttgtgcacttggtgtgtgtggacacctgtacgtcagcgcaccacaccatgcagaagatttttttttgacaaaatttggttttgctttgttttgttttcttatttttt

SEQ ID NO: 391157 - DNA, 1137 bp, Cannabis indica
aaaaagggtaaacatttaatttttaattttaatatatacatatttattttaagtataacaacataaaatctaataactcatctaaactaaatgaaaatactaattagttcaattagatattggatgtattgaatttttagacactccattcaacatttgatccgatctaattggatatttaaaaataatatctaatctgatacgatcacaattggatatttaatgtatggtgatcagttgtgattgtatcgatcgattgtaattggattagatcgatttatgcacaccctattcgtaaactatatttaatagtttatcctattaaattaaatatcctaaatgtataactgactaattctaattgttttattccgaaacaaagatatccacggaacagttcgttctatttataaattcacaaccaagaatctctttcggatagacctgattggagaaaaggaagcttgaatgccaagccaaccctaacaaaccagtccactttattgcacaacttaataaatattggcacacaaagacaaccaaccatggggcacaaaataatatggctcttctcaacaaaattatcccaatcaaaatgacttcttttcatatgaaaccaacccatgaattccaccttttacttgggcagccgtccgtacctaaaaacaacaataaaaacataattcacactgatattaaaatcaacttaatcctgacttaagagcggtatcaaaattaatcaaatctaaatgagactagacatttaaggtataatatcactattgatgcaattaagtatcaagtcttatataatttaatgtaatatgtacaattgcaaggcgccactagttcttaagagcaatatgcacaatcaacagatcccaaaagtgtgtgtacctctagcgtgtggattctcttgagtaccctccaaatcagaggaagaaatgtcaatgatatcggtcgcaaaaaacatctctctttaggtcgcttccaaatgggacccgagacggaattgtctaaagaaacgcgctgccttgacacacccaacctaagaggtaaaatcaaggtattgagctcactagacattagacacgagggtgtatgccccgacgagggtgcatgtaacgtccccgcttc

SEQ ID NO: 391158 - DNA, 1138 bp, Cannabis indica
catattgcccaacatagcatagctaactgtgaagcgatctcctcatcaagatttctaagtattttctcaaaccaactaccaaaagatagttgttggttcgggtcataggtgatacctagcatacgccaacatgacatagcaaaaggacagttgaggagagcatggacaatagactcggcttgggctttacaaactggacatattgcatagattctcacgtgtttagtcaccagttgaagacaagtcggaagacaattggaaatagcacgccaaagtaggttcttgaccttgggtgggatcttcaattgctgcagtctacaccaaaaaccaaaattattggaaccgaatggctggagtttttctttctgaagaagagtacatgcagttttaaccgaaaagagcccagttcgatcttctgaccaagactagaagtcaacttcagcattggaggacaaggggagaccgagaattaaaagtgcatcccagttgttgaacaagtccttgacgaattcagtatcccagctacgagtctccatagagaagagagaactcacattattatacgaaagagttggatgtgttgaggttacaaacttgttatcagtatcaggcagccacggggttccaaaaattttggtagtttcaccatttcaaatagtgcgcacagcccctaaacggactagattttgggtagtccaaatactacgccagacaaaactgggattatttcccaattcggttgaaaggtagtcactagtaaagaagtattttactctaaacatttgtcctaccaaagagtcgggtttgcataagagtctccaccctgtatttagcaagcattgcgatattaaagtcatgaagatgtcaaaaacccatgctgccttcaagtttgggagtcaccattctttcccaggacatctatataataccacgacccttacttgaagtagttttccactaggtatggcaaaaagatccatttattcgggtcgggtcagtgatccgatccgacggatcattactgatccgaaatattcggatagttattggatcttggatcaaatccgacccgacccgttaaatttttaacggatcggatttgacccgatccgtttgaaatatatatatttttaaaaaa

SEQ ID NO: 391159 - DNA, 525 bp, Cannabis indica
aaaaaaaaaaaaaaaccctttacttcacaagtaaccttcaaaactaaatatattccactaatttcaaaattaactaaaatattctgataccacaaacatgtatatatataaaatactgctatgatttttttaaccaaccaattgagtttctattgttatcgaacttgaaaatattttattttacatataacattcattttacatatatatttcaataaaattttcgtaattaataaattacacttaaatttatcatttctaataataactctattttctcaaatttaacttaattaataagattataatattacttattattttgttgtacacatatttcataaaatatgttttaaatattcataattaataaaaacctaactttcaacactcaatccaatttattgaatatttaattttttgtaattagattagatcaggggcggacccacattgtagcgagggggggcagtcgccccccctgaaaaaaaaaatcgagaaaaaaatgtatatgtattttaatta

SEQ ID NO: 391160 - DNA, 1654 bp, Cannabis indica
aacagataatgagataaagaacttttggaattcatgtttgaagaagaagctagtgaagcaaggaattgacccaactacacacaaaccattaagtaatgaaaacaacaacaacaacaacactatggaattagccaaagataagaaaaatggtactactactactactacaagagaccaaaaagagtccttaatgatcataccccaatttcatgatcatcatcatcaatcaaacacattggcttctaatcatcatggccctacatttctcatgtcagatgaaactacaactacttactatgatcattcctctaccaataataatggagttgtactaatcacagacacttcttcaaaagaccaaaccaatttgatcaacatcaataataagtcgaatttcgattcccccttgttgtatttcgaccaattcactacgagtagcagtactacaatggagccagtttctggcggtggcggtggctacagctccgatcaactaattccttctcagtttcacaatggtattaatagaccattatctgcaatgaatcaccaaaactatgggagctgtttcgcttcaatgccgagcttggcgagttcaggagcagagttttcagacaataattctggttcgagggtcagttcctttttcatgaacgaggttaaggaaacttcaagtaacagctccaacgtaagtaactatgctggttatcatcatcatcatcatcacatgaacaatcataatcataataataataataatggagctttttcaacaacttgggatgttgaaaacaaattagagtcgttgatttaccaacagtttcaagggattaatgggatagtaaagtcagaagaacagcaactcgtcatgactcggccgagttcgtggaatgaatcggctgagcaacaacaacaacaacaacaacaatttcatcatcatcacagctctgtagatttcggtacctatccattaacgtcactgtcagaagatttaacaggtgctaattttgatgtcttccaccaaatttaaaattcccaagtattgttataaatgtaaattcattctttttttttatttaatttttttttatggggtttcttttttctatacaaatacacaaagatatgttgatagtaacaaggaaaaaggtttgagaatctgaagattttttttttggggtgttttttttttattattatataaatatatacaactaggcaatgattaaaatactacatagctagcttagctaggggcgattttattttaattttattttttcgaatttgtttttgtaattgtttaaaagagttgaaataaaaaagtaattaattgagtgtggtaactaattctcttctcttgtgttaaatcataataatgatctttctattccatgttcccctaactaattattacatatcattgctaaatgcagttaattaagctgctcttttcatattgtcttttcataacttacccattatacatagcctttttttcgttttcttattcttcttttgaatttttatgggaaacccttaaaacagtagtaatgtaataatatttagttcgtactgccattgcaaaatttcggttttaaatttctttgtaaatatatttgacttagtagcccatcccagttggaggttcatc

SEQ ID NO: 391161 - DNA, 1393 bp, Cannabis indica
cactagttgacgttcagttatggcaaccataacgcgccagtacatactcaggtcgcaaatcttttaatagttagcttttaccagagtaactgccttttgtactcttgcgacactttccctctcgagataaccaaattgtcccttcgtccgggaaaaagggttacaatcttcagtcgctcgagttattgggcagatcgaactgatcataggcatcttcctgcccctttatatatcgatgaaggtgtccttgtgatatgagactttctatctcatctttcaattgatgacactcttctgtggtatgaccaatatcaacatggtattcacaccgcttatttggatccctcttgcgcctcgcatgtttcataggtcttggctcaccaaaaatggcttcttgtacgtgtgcgaggtagatcttttcccgagtttcattgagctcggtgtattcggtataaagagggatatacttgttgggtttcttgacattaggcagccttttggaatcatctttttttcattgatcctgaggctttcgaatcaagttttccaacagtatcatgccccagttgtctcctcgattcgtgatgtgatgtgctctggacttattctccaacccactcattcgcaaatggagtgaatccttttgtctcaaatcgagtcattgacaaaggtcaggcttttctaggttcagatacttctgtagatcactctcgccatgattgtggccgggccttgcccttcctccaatttcctcaggtttcattccctgagagctctgagcatacccctgggttatctcttgcctcttgacttgtgagccacaaggttttcctcgtaaatctcttttctgaaggtcaggttgtttttggatacaatctcccaacgttgcctttacggcagctatttcacgctccaactcagcattacgctggtttacttcctccaatcaacgcccaagatggcaattttctaattccatgatcgatatgtatctggttgggtcgtaagcgccatcctcatcaacctgattagggagtgatcgattgttgctcgtccaaggtccatcgagccaagggccccaatacgaggtcattttggggcttgcatcctgttcatgcgatgattcagcagatccttgaggacttaatggttctttttcgggacgatgagatattccttcctaaggactattactggtggtgtcgtccattacttttatgtcaggaggcttttttcagagctttttcacaaaggctctaacagaaagcaccaaactgttaacacaaattttctttaaccaaatttgggcctcacgaatatgattcaacacagaaaaactatacaaaaagaaagaacactggatttttacgtgattttacagttaaaattctgc

SEQ ID NO: 391162 - DNA, 800 bp, Cannabis indica
cgacacgtcttacaatttatcaaacaaaatattgatgtttttgttgttttatattttacccacctgtcttactctacaacttgacacgtgtcaaacatgtagaagaatattccatactaataatacgtacgttagtctaataaaaaatgtaaaaatttgtaacatatttaattttagtaatttctattaattttgtataattataattcagggaaagagattctaccttatgtgggcccacgtcccccggtagggatccatcggtatattctagttctgttccgacagaaagggccactggggctggtggaccagcccccgtgtcgtgccaatttcaacacgcgcttctttgctgcacatctcgatctcggtttgccagtggcgaccgtgtacttcaactcccagaaggagccggccactaagcgccgttaggctaaccgagccgagttgagctgagctgaattgagctgaaatgatgagctttatcatgtggttgaataatgtgtacatgcatggcctaagagggagaaaatgagcatattattattatataatataaatattatattatatagttggatatatgaataataatgcaatatgtaatatattgtaagctttttatttttattttattatgttttattaagatgtagtaaactgtcatgtgtttgttaattaatatttttctcttcttttttttagttttcaactttttatttgggtttgtgattaaatttatcaatttattttagatatctttatatattaaaagtgtctatctaacggcatttcttggt

SEQ ID NO: 391163 - DNA, 851 bp, Cannabis indica
gatcactcaaattcccatcaatattgcaacggttccagaccgtttaagtctggttttggtgaaattttactggttttatacactgttaaaaagtggatataaaacgtctccaagagctgaaaggtttggtgaattttgatgaatctcaagtaaatagtttttggaaaaaattctggaacctaaaaatgcctccaaaaatgaaaaatttagtgtggagggcatgaacaaactgtctccccactatggtgcaacttcgaatcaaacacgcagtccctcattctctttgccctgtgtgttctgttgaagaagaatcgatctcccatgctttagtgacctgtcgaattgctaaggactgctgggatagtgtcggtattcattcggtcctgcagcaacatcacagttttttcgactggtgcatcagcaactttcagatgttagacaaggagaaccgtgaactgcttgtggcaattgcttgggcaatctggaacgcaagaaacgatcggctgtggcaaaataaatccaagactgtggattttattgtttcgtcagcaaaaggttacctttcacaatggaaaaatgctcattcctttagtttagagatgttgtccactggtttgatcaatggggacggagccgagcattgggtacctccaacagagaatactattaaggtaaacgttgatgcagcaatttttgaaacaacccgacagtttggaattggttgggctgccagggtgtaacgccctgtccaacagggacgccacgtgtgtgcactttatttaaaataccaataattatataagatgtaattatactaaaagtgtgggtaattaaaattttgatagttaaaa

SEQ ID NO: 391164 - DNA, 689 bp, Cannabis indica
atttttaaaacctaattaacaaaactaaagtatttatatataaacttaattctaaacctagttatattttaccattcactcttccatttttttctctctatctctattattttgttaccgttttcaatatatatttttgtatgggaaaatttagtttttacttccatattagttttattatcaatgcactttagttagaattaattaatttcgtttttttgtttacatgcacgacatcatattaacaaataacaattgatgatgttttacattgtattggttggtgttgataatgtattaacttgtatttacatataactttttatatgctaatgtttttttttctctgggcccatccataggggtaatctctttaatttaatgcaacaagtctactccccaaagatatagataagaattctacctttatttattttgagcaaccagatttacttttcttaatgttatctctctaatttctacaaataaagaagcaataatttcaatttaaatggattactttcttagcaagaagaggtagtttctattttaaatattttaattttcttcatgacaaataatattatttaaattttgatatttatgttgtatattgttaacactacaagaaaaccagcttttgccggcgcattgttgcgccggtaaaagtaccctgactgcgccggcaa

SEQ ID NO: 391165 - DNA, 2119 bp, Cannabis indica
ataagtgtaaaaattattttttagaattatttgtgagtgttgaaaatcgacagaaataatttggaatgtcgattggtaaacgacgcaaatacagacatttttttgcatttacagtatacacatcagttggggaaactgatgacaaaacttttaatgtcagttaaaaactgacaagaaatgtactttttgaagtagtgacattttcatgtatgcttgaatgttaaattattaatatttaatattgaataatttatatataaatatcaaaaaattccttattcatacatgaagttgtgacttgtattgtactaataattaagatcacttagccatgaataaaatagtcggcaacacattaaagttatagaatttttaatcaacagttactagtacagttcactgattctcattattcggtgaaagcaatctcgattcagattgctgatgtagtatgacatggacctatatgtaattaagttgtctttatcaaacatgacatttactataaagatctaatttatataatacagataatcaatattagattgtcctgaatcttgggtaatcatgaactcatggtcatgttattagttttttttattcattcattaaagtttctcagtgattctcacaacttttattttggaaatctaataatatggatagcttagaatatgatctacaattatggaatcctaattttccttacggatcgaatgttgcttcctttaagtgttcattctagagctaaaaagttgtgcacaaatttaaattagatctaaattatacttttactagtgaattaacagtactaaatgataaaaaaaagtaattagaagggtaaaatagtaatatgaccaaaattaattacgaatcgatacaaggaggcctaatcactggaattgattatatcaatagacactacagtaaaactctattaatataattctataattactaagagtttaattctatattcatcattatggagtaatcatggaattaataaacaagattatttagtttatgagattcaataaataatctagtttattgcagcttagaaatataggtccatagttctcagatcaccaccttgaaacattatcaaggaaagggatagaagttgtatattgatgttcagaaaatatattttgatttgtcaaaataataattatttatattgtaataaataatttatttttaaatttattaattaaataaatcaggaaaaaaataaaaattgtgtgaacaaaagacaccaccattgtctggttaagacaaaggtggctccacctatactgtggtaagacacagtgataggcgcccctaatgtagggatatccccactggatttagttttgggttaattaatttaaaattaaatatttatttatatttaaatttaaaaagtatttatagatttttataatggttgagatgttcctataaagtagctggaagattctctcaattgataattaaatatttaattcaaacctaaatatttatttcaaaataaatatctataataaatttaattataaatattcattcaaataattaaatatgactaaatttattattttaaatttaaatatttatttaaataaaagttttattggttttaatatatatcgtatacatctaaaaatagatacatattatatttaggaagcctaaaaaggattaaccttgattaaatttttttctatcatcactacttctaagagttcttactcgtgtgttgaaaataaataagaacacaatatacaatacatattttaatagcccacattattctttgtgtgtggtggaagattcagaagactacggtgtgagttcttcattattatccgagggtacaacttacaaaaagaaacaaaggataccctgataggattcgagaggtaaattttttttcaactatttattaaagatttaatatatatacatatggtgattcttaggatgtgatacgatgataatcaaaaattattattccattgcgtacctaatttagtactacaaaattaacaaatgctattagagcgattctattatggatatatattaaaggctaattaggatttttgccccctgaattttgacatgtacc

SEQ ID NO: 391166 - DNA, 564 bp, Cannabis indica
ttagcaactatacggtttgttcctcttgtccactttgtcgacagagaaaaaagaaccagagctcgagaaaaggttggcttatcgaccaaacagcatacccgcctctcttgtcggcaatgtctttccttctctggcgtctccttttagctccggtgactttcagtcttcattacattgaacacaaagtggatgttgtttctttatgtcaatattgcaacaagttgtatcggtaccggaggagcaccgatctacggaggcagaaggggtttcaaggcgcagtttccaaagagagaacaaccagcatcggtaccggagcaatggaaacgacagattcttcgaggggagagggaggaagaactgggttggggtttctgaggaagggaaatccatttatgggatctgtttggggcaaagctcatctatcgagatgagggagtccgacaatttctccttgaaggaaaaaggaaagtctcagatttagggattttggaaacagaaaaaacgtataaattaatataaaaatgttaataaaatgtatttatgaaaaaaaaaaaaacgttttaa

SEQ ID NO: 391167 - DNA, 1612 bp, Cannabis indica
gttcttttttgtttcacgaaaattggtagtctctcaaatggttctaacgaaactttgctgtgttttcttgaaggttatcgaacactaagtcaagacgtagaagaagggatttgtcaagtggtagctcatatgtggttagaagcggaactcacgtctggcttagatagcaatgccgcttcttcctcttcatcctccgctgcagcaaaaaaagggacaagatcactctatgagaagaagcttggtgagttctttaagcatcaaattgaatcagatatttctccggtctacggagatggatacagagccggtcaacgggcagtacaaaagtatggtcttcggaggacccttgatcatattcgaatgacggggacttttccttattgatatattttattttttacacctgacctgattatcattatcagtcatagatatctcattcatatcattatagtgtagtttattttttttttttttgggtgtgtaataagttaagtttccagaagtgttaattttggttatggttttgaacaagtacgtaaaaaaaaccaaaaaaaaaacaaaaaacaaaaacaaaagaaagaaaaaaagacgacgaccgcgtcttcatttggcaacaaatatttccaagaaactataaagcggaacaaaagataaaatatttgatcaatttggagtcatcattagaagaacttgggcgcccatcaagatcaataatcgaatcactgaaaaacatacttgatttgccaattcagcattggtgtgttatgcgttcacaacctcaggcgacatggatggaatctctgttagaatctgagtggcagagcagatgatcatacacttcgtactggctgggtcttttgattttggtacgatagggcttagaatttagcggggttgagcttcaagttttaacttttctgcttgcaacgcaattaaatgtagttctacttttcttgtagattttaactactatatatcacctcaaaaaactttaggttcatttaatattctatattcaattgcttaatcgtttcgtttgacggttaatggaaatttgggtcagcaatatttttttttttttttatttttttttaaagtataaatatattgcaacacaagttacaatatactcaaatcgaccttggactgttgccgttccaaagcacctctctctgatgcctgaaagcagctttggccaaactatgtgtcacagcattgtgatttattgggacataggaaacaaaaaagagagacaggccttaatctggttcaccaaatcaaacaaaggtgatttatccttccaacgatgcctcaccttcctcacaagaagttggctgtcagtttcaattcgatccaaaggaaactcaacagctatacaccatcgtagcacccaaagtagtgcctttgctttagctaataaagggggaagaactccatcacaaggtgaagacatagtagctacaatatcacttttactatcgaaaactgaagccccaatcccaattttttgcaactgattactaattgcagcatcaacaagtagcttaaaagaacccaccttaggagcatctggagtgaaactgttttgagaaccttcttgagaatcttc

SEQ ID NO: 391168 - DNA, 610 bp, Cannabis indica
ggagttatgatgattagtattgtcgctatcgtctagtgtaatcacataccctttctcttgcattgcagcgtctttaccattgcattcaccttccaaagccaactttactgcttgtgccacctcttccacgggtgttgttattgttgcacactattcgtatattccttcttcctagttgaactgtgccccatcaagtcaccatcaccataaccagcgcactgtccataaacttgagtgggcattaaagatcaatcagcgagttggaaacaagagatctcttcagaataaaagtcaataactaatccaaatccgacccgaaacttagttagagctccttcgcatggaagacttctttgaagttcgtgaaaaaaatagttgcggtttgaaatggagaccgggctcctccgatggcaaatcgaattcagatcgtatatgaatattacgaacaaggaagttgggtagtgagaaacgccattgagtgaagctctgaaaggttctgaattcgagttgatggttacattaggttgaaaaaagcgtcgatggcagcatcagtgaagaagaggattcgctactactattgctctctgagcctgatacactttctccactt

SEQ ID NO: 391169 - DNA, 594 bp, Cannabis indica
aacccattttttattttactttttgaatattccatatcgctgttatgttctattagttactggtactacatggctaagaatattgttttagtacgcaatttatttggaacatagctattgtttccttcaatttgataaggattaataagtatgctttgcaatgagcttaaattttggttctctagtgtttcacggacaataattttcctcgcttcaaattcacttaaatcccttctggtggcggtttgatggctttttgacttgtcccatttgaggtggggtaatagatcttcaaggtacatcaggataagcaagaaacatgaatgttagatcaattttttccttgtatggccgtagggtcttcaacttgaaagaatgatgtcgactaaaatataatgctaaggaataatttgatgtggtaatttgtaggaaaatttccaattagtattctgctttatgaaatggtagcacaagaaatgaaacatatgagttttgtattgtttgttataaaaatataatattaaatattggaaactatttagtcttataaccttaaattatctttggatttctagctggtggtctaaagtagtt

SEQ ID NO: 391170 - DNA, 1925 bp, Cannabis indica
aatttttctaaaattagtaaaaaaaatatagtaattttaaagaaaatttttttgggccctaagctagttgaactctaggcacaagcttactccgtttatgttcaggaccgaacctggtagtaccttatgactgattagcagtttttcatattatttgttaaattaaattgcgtgggacataataacattatgttatttcttgtggtgctggacctatatttctgaatgtgatgcatactccattaagtcttattagtgtgttttttttttggtactgtacatacaggctgctcttcctcaaggaattgttccttttgtatttgccaaggagtataatgtacatcctgatattttaagtactgggtatcaattctattcaacccccttttctcttttttgatttcttttgtgtgttttcagaataataatcctaattcaaatatctctctaaaagagttctgaaatgttggatttgttttttgaaaatttcagggtaatttttggcatgcttgttgccttgcctatagcattgatgtacttcttcttgttagcactctaaaatagtgacaagtgtaacaaaagtagagccagaaaatctctgcaaaaaaaattgttgcagatgattggaagtgagtgggaagagtgtcctcattcaatttattcaattgttttgagaatgtaatatgacttgatttgctcatgagaagatacagcccaaaattgtattataatcaactgatgagaagatagttaatatacattaatgaatagtgagataactgttagttacaagcaatccaaaatatatgattagattatttttggtttattataaaaaagtaagaaagtggtcaaagtgttcattcaatggaaatctaagataccttgcacactgaggttttttattttttatttattttttattttttaattatggacttttatttagagaaaactaaattagtagccacaaaaaggactacttcccttaacaaactagagtttttgacttttgcctctctagcccaacgtgcaaattctacgatcgaggaacaaaagacacaacaacttccttaagtgacttacagaggttcaaacaaaaagaaaacaaaggataaatgctccaaccaaacagtaatgaaccaaccgcaaaagcagtagcagctgacttcgagccagtttctattcgaacttttggcacctctttctccaaagccatctgaaaagccaaagcaataccacaaagctcacctttaagtacattgtagatagaggagaatcccacaacgacccaagagtccttaaagacctgttcatgcttgtgaaaaatagcaaagcctgcttctttgtcaacaacagaagcatcaattttacaacaccaaaaatcctcctcaggatgaatgtcaagctcctgcagcttagcatcaaacacatccaattgttcaaaccatagccagttactcaagaaatttacagctctcgagagacaatctttgtacaatgtctgcgcttgaaaattaactcattgcgccatttccacaaagtctcacactacagtttgataaacttaggaagggatatggaattagaagtagaaatagagttactattatttattttattttctatctattataaattcaatgtgaaatttactaaccattcattttgtattgcaatacaaataaagatctggaacctacctggcggctcattagttagcttgctctgcatgttttaatattgattgtattattaatggagacaattaaattcttcttcataatatttcttataattaaattattttgaacactgcatataaaagtcttctaagaatgccaatttaattaaaagtagtaaaatcacactattggcattaataggaaatacttaggtggcgtttggttggaggtaatgaaatg

SEQ ID NO: 391171 - DNA, 717 bp, Cannabis indica
atatagacacactttatatagaatagatatatatatatattaggttgaagttaattttaattattatgatatagataatataaattcataatttaattaaataaacaatattatttttaaaaataataatatttaatataaaaaaattaaattaaacattgttacaagggaatttagttcaatatgagaatccaaaaatgtaactgatgatcacataatataattgacattaatataaaattattttttgaattttcttttatcaaatctaacttcaaacttaaatagaaaaaaattatgcatataactatctatatatgtacatcacaactaaatttttcaacacttgagattatatatacatatagtttggcctacgaattgacactatgaataaacccggtctccatacaaactcacctatataaaaataaaaaagttttcgtcaatgttagattaatttgaaaaatcaaaactaaataataaggccgccattattaacagacaaaacgaagaaagaaaaattatcatggagctgaagagaagaataattgagacaaagtagaggaggctaataatgcttactttgtttattatttttttttagagtaattagcggcaaaatcccttaactatcaatttacttgtaaaaaaccatctaacctcatattttagtgggaaaactctccaaagtactgttccgttttacatttttaa

SEQ ID NO: 391172 - DNA, 1409 bp, Cannabis indica
atggctaataggatgcggagttctttgggagttgttatttcggattcacaaagtgcctttgtcaaagggcggttaattcatgataatgcaataattgggtatgagagccttcattgtatgaggaagaataggtttcagaatgggaaaaaattggctcttaaattggacatggcgaaagcttatgatagggtggagtggtgctttttaaaggcggtgatgcttaagctcgggtatcggttggaatgggtagagaaagtcatgaaatgtgtatcttctgttcaattttatttcctcattaatggagagatcaaggggtccgtgacaccgcagcggggacttaggcagggggatcccctatccccctttctcttcctcttttgtgctgaagctttctccggattgattcaagcagccgaggctaatgaacagctcaaaggaattaaatttgggaggaatggattaacggtttctcatctcttctttgcggatgatagtcttgtgttttttgatgcaacaagagaggcatgcagttatttcaaatcaattctggacaagtactccaaagcttctggtcaaatggttaatttttataagtcagaagtatgttttgggagaacggtgcaagctgatctcaagacggatctcgcggagttcttggggatgaaaattgtggacaatcatggcaagtatttgggtcttccctctcttgtgggaagaaataaaaaacaactctttgatgtcatcaaaaatagagtgtggaataaattgagagggtggaagggatcgatgttttccatggccgagaaggaggttctcattaaggctattgtgcaagccattcctacatataccatgagctgtttccgcttgattaagagcaccattaataatatacatcggatggccgctagattttggtggggctcatcggacagagctcaaaaggattcattggtgcaagtggaaggtgttgtgtaagccgaaggaaagtgggggattggggtttcgagatctggagttattcaaccaagcgcttcttgctaaacaaatttggcgatgtattcgttatccttcatctttatgtagccgggttgtaacgccccgatttctcgagacgtcacactagctagtccgtttaaaaccatttaagataaagacaataaaagacttccttaatgaaaaataactaagcatgagatcacattatttttaaaacaaaatatttatttattcataaccttaaaatttaaagctttacaaaaactatttgaatcataatctttaatgaaatatttttaaaccaaaacatcatgacaatcccctaacatgtaatccatgcctcgagctcgccaccctcactgtatagttttgcctttacctgcacacagagtacccgtgagctaacgccc

SEQ ID NO: 391173 - DNA, 3939 bp, Cannabis indica
aaagcaaatattgggaaatcaaacgcaatccagtgcgaaggaacaatagccgtcaaaagcatgcaaaagaagacgtgtctcgagatactaattattcagagcattaattagccgaaaactgaagggacgcctagtcacactcacatcaaatcatgaacagacgcactcgacaaatgtcacccattcaaatgtaaagtcagctcagataaagtctacacgcaacttcagaagtcccgtacagacttggggggcaaatgttatcccaattttttcactatgacgtggcatcacatgcctgtgacacgtggacttgatttcccacatctgcctgagagagatgcatcgagtagggcacatcacacacctacatggacagtgtctttccagccgagctatggataagccgagaagagaatcaacacttagcaatttcataatttgcatcgtcaagcccaagaataatccctataaatctggcatatcatagagatatggtaagttgtccagatcccacagtttgtgtattttaaatatataatatatgttcttactaattatagacattttaagaaaaagggaaaccttccctcaagcatgtagccctataaatagtgatcattctcactagtaaaggggtggaaagaataaactttagaaagttctaggagagcatactcagagatttcactgtaggagctttaatggaggaaacattgtgttctttattcttaagtcaatacaaatcaaggggagtaggctattaccgaacttaacggggtcgaacctctttaaaaaccttgtgttctttacttatcttttcatattatatctataccatatcccttatctcttattattaagactaattgtcgttggctagaagcgaggtcaacataaagtatcgttaaccctcgacaccatcgagtttcttatgtcactattattgtgtaattaaacaattgataaataagaaactgaatagcagtttcaaaggagaataataactgtttcttaacagcagtaattaccgtatcttattttgacatgctaagcagtgtaattgcctttccttacctcaagtccaaagtcaagtgtcggagctgacttgagtggaatggtgctcgacaatctagggccctatgtcatgcaaacaacacttgataaataacttaatcaaactagaagtaggccctaaactcaaaacttgacaaaccctaattgatactagcttagaaatagccttaagatcgataaaacacataaaactaagttttggataaacaccccaaacggctaactcgtttcagaaaaaatagggttccccactgggtcaaccggttgaccaattccatagtacaacgtagaaccggttaaccaatttctactgcagaaacgagtaacctagtttttgcaccaaaaccaacccaaaactcctccaaacctattaaaacgttccagaatagtttaacaacataaaattaacataaccaaatactcaaaactcaaaaatgcatcaaaattataaacttaccattgttgagtgagtttttgagttcttgatctcaactcacccaactcttggcacaaaggtcctaaaatcatcaactaaagcttagataatcctaatttataatcaaaaaaataagctctaacaaggtaagcatacaaagaacctgcttatcataatcctcttcaaaacctaacattagaaccttaaaaccttcaagaacactaagaaaaacatacctcaagtttggatgtcacctaagtttgtaacgccctatcccatagggaccccacaagtgtaattttataaattagtttaattataatagattaattaattattaaaaatagtgatgatattaaaaacatgacgaaaataaaacactaaaaatgggcatcataatggcattaaaaatgtatttcggggatccctgttataaaaggtttacaatcagactatgtacgacaacaattcaaaacacaaaaagtgaaatagacagtagatacatccctaaacaactcctagaaccttggctcacaagccggtggggtcaatttgtatatttctggacaagactgtcacctcatggttaatctagtttttatttgcctttacttgcaccacatagcactcgtgagtcacaaggaattaacaagaaaaattaataacaatattcatatagtttattattcgaatataatcatttatagatagacaatcagaataaaataatcacacattactcataagatgaaatctaaatcacttttcatatcagccacgaataaacatcagtatacaaatatttggtaatacaaaactcttataccaataatagaaatcatattcattcaataatataaattatatatatgttacctcataaagtaaccatcttcattatatcacattgtttaatcatgcaagtcgtttctttaatctaatagtcttgtattgcattgcctaatcaggcaagcccgtgccatagcttagcaaccacatatcacataatcacatcacctaataagttgagcccgtgccaaatacttgcacccatatatcacataattgcatcacctaataaggtgagcccgtgccacaacctgacaccaatatattgtatcgcctaatcagatgagtccgtacctacgtcctgtactcacaagtcactattgccgtacctaataaggtatgctgccaggaagaaacccaacaaaggtttcattacctaataaggtttcattgcccgtacctaataaggtacgtcgccaggtctacaacattacctaataaagtgagcccatatatcacattcatggtatcatcctattatcattgcttaatcaatcaatctttttattatataacaataatatccatatcttaatcccaatagcaatcaattctcaacaatattaattgcattacaacataacatgctatgtagtgaaatatacttttcttacctttaatccaaattgatgcatgtcggccaacccaagtggagaaacattcctagtgatcttggccctatgtcacagcaacggtaaaccaataagtgtttaccccaaaacactacttaatattcacataagacaatctaaggattttaccaaccccacggtataaaaacactaaaataaaactttttttttactccaaaacatacatcatattgtagggatggttgcaagcttcaaaattgtatatagaacgtcaaaaagggatagctaagtcgaaagttatgacaaaaatacaatttcttatctcctaataatttccaaaaacggtagaacatgaaaataccaaatttcacactcgccaaaatactcccaaaacctatctaaatcattccaaacttcataggacacatatataccatatatactacattcccaacgtaaccgaaattaaaagagcgcccttaaacaaaaaactccattaacgttcggactaagctttaaaaagttccaaactcgatttctaactcaaaatcacctcaaattcaacaagtaaccaccaaaactagtcccatagctaccaaagaacaattctacgaagtcaaaatctccataactactccaaatcacaaagccactatataaaactaattatttttaacttagaacaaaattaaaccatattttaaactttccgtctttaaggatttgctatcccgctactaccagagcttagatcgctagattacgggtggaaaatcaaagaaaatggatagaaggcgatgtgggtttcattcgacggaggacggagggtttgttcgtactattttgtttataaacttaaaacatatatatataaataaacttatctgactataagttttaataataataataataataataatataactgtgataataataattatataataatattaataaaattttattattaataattatctta

SEQ ID NO: 391174 - DNA, 601 bp, Cannabis indica
aactcttttcagataatataatatgaggtacttggaagaattttaccttgggcgtactactcactgactttcttctcatcttttccgggaattattggattgtgtgttctttttccgtagattatttgttgggatcttgttttgttttgaaatatttcaattatatattaattatattaatattatttgcttgaagcaattgaaaataaaatatatagttcttgtgttgggatattattttgttgtttttgatacaaacattttagttgcagctgtctaaaaccctagtctctttcagagaagaaatgtcacagttcagaaagctgacttagggtttatgccttgactggcaactcttgcagccttttcaataatgtggatgttgactacttttctaactttcttcatatctcaataaaattaaataaaataaaatctcttctctcgtaataatatttaagagcatgggaaactagtaagaaataactctacactacaccccataagagggtgtgtagggctttccactagggcattaaaatcttaaaatagtgatttttgaacacaaaattactccaatgaacactaaatattatcctat

SEQ ID NO: 391175 - DNA, 1474 bp, Cannabis indica
aaaaaggttactccaaggcagttttttatattcagcaaacaacaagtgatatccctgttgtattttatatttctgcataacaaaacttgttagtgaaatctgttgctgaaatttgttcttgacagccactacttttttctatgcccaactgcaatccgagggagtaatatagctccaccaatcttgctccttgatatacacattgtgtatccatttgataaaaatacaatcttttttactagctatatcccacacatacctccccaaggctgcaatgttccaatgatgaacatttcgaaatcctaaacccccttctgccttgggtctgcaaactgagtcccatgccactaatataatccaggaccaactccttcttgtgtgcccttccagagaaaagacctgcaagtagcttcaatgtcctattcaaaagtttctttggtaggataaagatttgagcccaatacgtatgtatggctagaagcactgagttaatcagtgttactctccacatataagataagttcctagtgctccacatctttattctgcttgtcattttttccagaagactttgacattctactctagatatcttctttgagcatatagggataccaaggtatctaaatggtagtgtactccttgtaaaattagatgcctcaatgattctagtgacttctgattcttgcattcttgcacaatatattgttgttttctgctcatttggttgtaggccagatgaagctgaaaataatttcagcccttgaagtagcagcaaaacagatatgtaatctccatgacagaagactaacaagtcatcagcaaagcacatatgattcaatctgagagatgcacacctgtcatgaaatttaaaccctagccagtctccaaccttggtaaagattctagataaatactccattcctaacacaaataggaggggagacttcgggtcaccttgtcttaatcctctctttgcattgaagaatccacacatagagccattcaacaacagagagaattcgggggtgcaaattgttaggctatttttagcctatattttggatcgattttatgtgcgcttttcactgtgttaggacggaattacgcttgttttctatgtttttcaggttctttggaataatagaggtctcaggatgcaaaagtccagtaaaagacgagttgagccaagaaaaacacctttttgaggaaagatgcatatctggccgcggctagatacagcttggtcgcggctagatcatgaagcagaggcactgatttttgaggctacagtcgccgcggcgagatacaccctcaccgcggccatataaaagttacagaatcgtgattttaagcacctatctggccgcggcgagacacagcttggccgcggcgagatcccgtacggcccaggggtaaaattgtccgacgaaccctaaaaatcacttataaatagaaaactacgattggaagt

SEQ ID NO: 391176 - DNA, 704 bp, Cannabis indica
tagctaattaattctgaattagatcattccaatcctagggaatatacataatataaatatatgatggtttaatatgaaatccacgggcccttatataggtgaacttttgttgatttcttttgttaattgacttttacatgataatatatattctaattagaaatatttgtattattaattattagaagaacatttgacttttgtgtaggccgatacctttgccttgccttctctctctacttttctaactatttaattaattataatttattttctcagattgtactaattaatattaattcttacgtacgtaggattttactagcttaaagaagatatattgggtaaagaaatcagtactaggggggctgggagtaagagtaagaatctatgtgttatgagttattgaaagcacggcttatatttgaaacatattatatattatgagttttcatttcgtctgtttaattaatatggtttcgagtttgaggtacgtacttatatgttggcgcaactatatgttagtgttagattttatatcactcataaaatatgcaacaataaaattcaattctatagaaaaacatattacatataattataagtgtataactatagatctaaagaatacctttgttgattcaaagagaagaattcaaatgacggaagcgtatcttaattcatagatagtgatgatcttaatc

SEQ ID NO: 391177 - DNA, 1175 bp, Cannabis indica
cgacatgcgtcttttagcatggctctaaagtaactcggagacacccaccattttaaggagtccaataagtcacaacgtgcgagtgcgtcacgcatctttagctagtgatatacctcaaaaaacggctgggagaatctcagtgactcaagggacatgcgtcctcaagcataaccctgaagttactgagatactcccaccatttcgagaatatctaccagccaaagagtacgcttatcagaacattagcgcatgtcgcaaatggctgggtgtatctcagtatttcaaggaacatataaccgcatatatgaacattagaatactgtgatacacccaccatttgaaagacttaaccaatgttcccacaacaaaatttacagagtacaaaatcctaaagttctaagtagcagttagaagtttttaagtctctgtgaagcctaagaagaacagacatgcgtgtattcgaggtgttcatccgaatacccgcgtgtattcaaaatataaagtggcgtctgttcacgtattttttctaaaattcacggttatgccaattttaagtcatttttcctgaaattacccagattcttacctaaaaaacatagccccttacgtatttcttacaaacatgtattcgtaaacccctcaaaggtgttgaaacccagaaaaatagcattttttctccaaacagtaaacaaaaatgcagtgaacttcaaaaactaacctttagttctgagaaattgttcctgcgattgctctcgacagcacttgagattgagaaaattccacaaagaaaggcgaaaatctgggcaaactatgaaaatctccgttggagtctctgagagagagggaataaggaagttaaggaaatgagggaaaatgggggattttgattcgaatcaaagggtttaaatacccatatccctcattaattgggatcacgacacgtggcaaccggaatgcctaaagtcgcccaatccaacggccaacaatggccacgcctacacgaaaaccgaagagttttgtgacgtggcaccataaatgcaataaaaagtaataattacagccgtcattttttgaaaccctcgaagggacaaccaaaggtcacctcttcgtgacaacctttcacctgtctctcgcgtatagtttcccttgtgaccgcacctgtcacatcgcgaaac

SEQ ID NO: 391178 - DNA, 1302 bp, Cannabis indica
tgaaagaacacagataccacatataactcttttgtgtaaagtaattttaaattctccaatttatttctagttttggtttgcttttgcaaatttgtgttctgcaatgacagagttacaatatgttgctatagactattacagatgtatttttactataattcagtaaaactattcgcatttacaaaaacacaattttttaaaatatataattatatatgctcaatttttcaaatcatataattaaacataacacatcaattttgtaaacatgtcttttcctcttacatgtacgagtttttctttagagctacaagaacaacattcaacaatattaaacactgcataagtaccaaaaaccataactgtaacaacactcttttaatatatatatatatagaaagaaatatagtttattgaccctaatttgattactaatattagtgaggaaaaagttgaaccaaatatataatttgaatttgtgtagtagctatccattgaaattacactattgagtaaaaaattactaatggactcagatcaagcacaccaaattgagatttttagaactgaaaaaagaaatatgatacatgtttgcgatccctttcactttgccttacattttcaacctcaaccaaaagattctcgacagccttggaacgatgcttcaaaaaatcgattgttttattgaagcaataatcgattttcttaaatcctccaatagcatttgattatttgattcaagattgtaacaaagtgaagaagatcgattttccttaaaatcttacaataattattttgatgattttatttgggatcgtaaagtgtgagaatcgttgattacggtgaatcagtagaataaagtcttctagaaggatcatccactcaggcttttcactgaaatttcctcttgcgcttttttatttattttttagaagttagccggagttaacaatctcgttaacgagagttaactttcacgttaccttttgtctagagaaaaacaaaatatttaaacaaaatgttaaactaaaattatgttaaataaacatattttttatataaacatatgtgagtgattattcaatagttacatttttattataaccatatgactacattttctttaatctgtaataacaggttaataatagttagactttccttttttagatttaatgaattataattaactattttcttaaaataattaattaaatagacattccttttttagaattatttaattataattaactattttcttaaaataattaattaaatatttaacaagacctctattag

SEQ ID NO: 391179 - DNA, 771 bp, Cannabis indica
tgactttgacccggacccaccccaccccagacctggacctagccccaaaccccaccttggccctgacttgaaacctagactcgaccccggccccaaccccgacacgaatcccaaacccaatactttgagacctcaatatgaacttgaattcgattcaaccccaactagtgactttgaaacgaacccaacccagactgcagcaccagacctaaaccaagccccggccggaccccggaccccgacttcagacctgaacccagccccaaccaggatccctcccctagcctcaaccccaattccaataactcctttaaaatagagatttaaaaaaaataaattaaggaaccatggaaaaattatcttcctaccaatactaaaaaaactcaaaatttccgaggattttacattgtcggataaagaattcccgacagtctataaaatcgttgtctatacgagtgtcgcgaatactggatagaatagcaacggttaaaaattatcgtggaaaagaattctcgacagtttaaaaccatcagctatagtcgatactgttgcccctgtttttgcccaatatacgtggaccaaccagacaaggacacgtggatcaagcaacttataatccaaactatttgctaagtccttatgtaatgaagcagcatccgggacatgtctctcggagaaggcatatggaaccccatatgctcccggaagcccaagtaacgctaaggcatctccgcgaggtgtcaggcttcccctgagcaatcaagtcgcatt

SEQ ID NO: 391180 - DNA, 1397 bp, Cannabis indica
tattttatacggagcttctaaaataataaaaggggagggggtctattatttttaagctacacactctctcagggccacttcctgctatttttttttattcagtgccacttttagctgcctttttctttctttcgtttttatttttttttattattattattttcttgaatttgttttcttttattttgtttgtttgtgtcaacaacaattttttttttttttttacttttattatgcttttagaaatgaattgcaaatacattattaattatttggatttttaaaaatagtacataaagtattttaaatcaaaagaaattttttagtttattttatattttgttaacaaaaatttaatatttaaaatttagtagacgttatatatagcactataaaaaagatactagttggttttattttgatatgctctattttgaaataatattattccatatatatctttgttatctatttaagttgtttaacatttaaaattatagttttattttcaagttatataatattgttgatcaagatacattaaaagttgcttttctttttcaatgagaacttttatgttaccttcaaatataatgagctacaataaaatacaaagaatgaccaaatagcttagtagcaataataggagtatagtttttatttttttcggtaatataatcattgtatgatatttaagataacatttggtttctataaattgttttagaaatgtattggaaataactctataaataagcttttataaagtgcataccatagggtaatgtttaaatgtgaattaaaaatatatttttttagtaatttacaaaattagttcacatattgaattttttttaagttatgagctacctcttttgtttttaacaaaatatacattaaaaaactataaaatactttgattcgttagtatattaaatttatttcatgttaaaaatttgattttttttttcttgaatagaagaggaactaaaatgtaattttttattaagatcaagtaatcaagttatttaacatactatatgaaattttttaaatataaataacaaaatatattttagtgacctactaaaattaattgacgtatctatttttgttgattttaaaattttgtcactaaataagaaaagaaaaaaaaactactaaattatttttatttcggtcatctttactgataatggcaaaaaatatatatatatttcatattaaaataattattttaaaaagtagatcataacagtataatccttaagctcaaataattacagatgaaattataaattttttttatcaagttttagaaaaaagaaaataaaaaaaagtaaaaaaaataatctgaatctcatttcactgaaagaaaaaagcaaaaaagtaaatta

SEQ ID NO: 391181 - DNA, 668 bp, Cannabis indica
attattttgagaaaaagcaaaataatttgattagataggtgtatttgatattgtaggaaattaatgcattctgaaaatgcccctacaccaacgccacaaattcaaaaaaccaaggtcaaaattgaccttccctctcttgtgcggatcaagagagattccctcaaaaccctagcctctttaaggcagtataaagccttctttttccaggtgcaaaccgtagcaacacaaagctttcttttcctctaaacctagcagccaaaaaacctctctcagcctctcttcttcttcctttaaaaccctagcagccaagcttgttactctttcgacctagaactacagcaacccctctttctcttcttcttctcttctagttcttcttgcttgaaacaacaccagccgaacccctttcttcttgctgcaaacaacaccagtcgaaccccaagcctccttcttcaaagctgcgatttttttccttcctccttcactacacacctgcaacacacacaccacacaacccgaaaaccagagaaaaaacctaaaagaaaaaaaaaccagctgaaaaaataaagaagaagaacacaaaaaattgatttcagagtttcccataaaatcattggtacatctccgtcaagcttccctcaaagatgcttgaatctccactatgaatg

SEQ ID NO: 391182 - DNA, 1087 bp, Cannabis indica
aaacaactttcacattgaaaagatacatgattcaatttcttaaataatactcgaaacaaatatttcaacaagaaaaactaagacagccaagtgtataatgccaaactattaattgatcatgaacagaaagagaactaatactactaaacccttgagaaatttcattattggaattcttatcttcaaagtagtagagaacattagtcatcctagcattgctaatcatcttccccaaactctgatcctaaaaagggcaatgcgatttatagaaaataacacaacaattagaatctcgagataattttctaacagacaagagattagaggaaaattgaggaatatggagaacatatttaagatctatccccttggaaattttaattaaacctttacctgcaatgagaaattaccatctgctagcttaacttttttactattcgaacagggtatataagagaaacaatttagaagaataggtcatatgatcagaagctctggaatctatgatccaaggagtagaaatgtttaaaaaacagtttagaacatctatttcattacctatatgtgcaatagaaacagtaggaatactagatgaggtcaaggtaatttttaacaatgcatgaagatgatccagttgctccttagtgaatggactggtttcaacttcattagccgttggcatggaccttcctgatctctcaactttgcttttccaattggctagtttcccatgaattttccaacaagtctcacgggtatgacgaggtttattgtagaagtcacaccacacccgaggcttctcatcagatttgggtgaagaattgctgtttctgccataacctcctcccacaatagccaaagtcgagccttccacaacagttccaagaaccttttttcccaacataacactccttcaattcaagactcctctcttttgaccttcgagatcacctcaccaattgaaggtaaaggttgtcgaccaattattctcgccctcacctcatcaaactccacattgagtccagccaagaacttataaatttgagtcttctcaatagttcttttgtagtgttttccatccttaatt

SEQ ID NO: 391183 - DNA, 2149 bp, Cannabis indica
cagcactcttctcctcctcttcacgctcacgagcttccaagacagaagtcaaagccaactgctccggggtagggccagaataacgaggccgagaacgttccactgccgagatgattttcgaagcttcgcccattgtcatgatcggtctgctagaaggagaatccgcacgttttctgttgaatcgaaaattatcacggggaggagatgccggagcacacagccatgaaccaaatctcccattgtcaatccgtgggttatctccaccaaagtctcgaaggggacaatctaaagccttatggccaatgatgccacaatcatagcaaaaatccggtaagtgttcatattgaaagaggagagaaacctcattcccattatcatcaatcgcaacccgcagcccccgtttaagaggctcggtgatatttattcgcatcctcactttcatggtgccattaacaatcttgatgtcctccaacttaccaatccgttcaccccattcacgagcgaaaagttccgtcatacaagctaaaggcacattattaattgagatccagaaagatgtgaaatcaaaattcatctttgaaatttcacctagacccatcggtttgacaaagcatatcaattgtttgtcaattgtccaagggccaccaccataaactctctgcctatcctcacggcagccaaaggaaaatcgaaaagtgttcttcgaactcaactcttcaacctggaatctgtgatttatcttcaaaatccctttcattgctctctcaatcccatccttattggctggtctaggaccaataaccttcccaatcaaacacaaatcaagtttcttcttaccctctgcaatccctaccttattaagaggtagaacagggccatctccctcatcaagaatcaagacttcagatagcctattgaccaattccaaatccataaccctatcactgttaacaagatcaaaaaccggcacaaaattaagaaaatcacgaacttcacccttaccatgaagggacttcttcttcccaggtagtttcagcagtccgaagctatcgggagactatacgtatacaccattttaaacaaaaaataaaaataaagcatatatattaattcaaaaataaatttataaaaaactaaatatacactactcactcactcatacccccagacatatattggtaactaaatagcaacataaaaatgtagtgtagtcaacattgtagacaacacaattattttaatataaaaaaacaattatgtattaaaataagaaaattatgtgtgcaatttaaatacataaaaacttacacgaaagcaatattaatatatatacttataaaaaaaactaaacgtacattaatatttattctttgtctttgctaaataattaaataacaacaaacaatgaactcattagacgaaaaaattcagaataatgtacatatgaaaaaatggaattttaaattttttggataataaaataaaactataaaacaacactaaataaatatacaaatcataggacatcacactacaagaaatatcacttttgccagcaaatttttgtgctagaaaaaatttagtattgcgctagtaaaatagaatttacttctgatgtgttggcaaaagaggttggaaaatcaacattggtattagaacttttgatagcacaaaatgaaaagcgctagcaaaaataatttttcccagcccgtaaatgcgctcgtaaaagttagattttagcaattacaaatgtacgctagtaaaactttaatatttttgccagtgcagttcgctgcagcgaactggactggtaaaagtgacatttcttgtattgtcaacaaatattgccgataacattaaaaaaacataaacactatacatatttgaacaacgacataacaataaacaaacaactttataacaacatcacgttcatatgcaaattaaatagaaatttttacatgaaaaatctattttacacaatttattacctaaatacttctatacgcctatgtttacatttttacttacaaagttggttttattacacaaataccacttagtcatcattccatccatcatcaatcaaatcctactctcttccctctcttttttcattttctatcaatcaatccatcatttcactctc

SEQ ID NO: 391184 - DNA, 2316 bp, Cannabis indica
aaaattcttatacatttttagcatttaatccaagtcttcatgaatcactgtaagtaattattctattcactatcgtaacggtaacaatttcaattttttacatgtacgtcttcttttatttctaaattgaaaaaagaattaaatatttatattagtatatatattattaattgtcaatataataaataagataattaataattaaaacttacattttttaatcatttaaataacagttaggggtttgtacgcgtgacgatgtcactcatgtatttcaatacataaaaattacattcttggttgttaaagttattttgaacgatttgctagtaaaatttctagccacgtcccaataaacgcatttgatccccctaaaagttttgtatgcactgttttaaaaattatattgatattttaattaattaacatatatatatatatcacttagtttattaaaatatttgttacataaagagtaattaaattattacctttttaacatctcatgaatttgttgggaaactttgtggtcatctatagggtctaaatggttaattttccctggcgttacgacctctagcattcaatgggcattaaaaaatatatatacatgtatataagatagtgtaaaaataattttaagttataataaagaaaacaattttaaattatctcttaagtagagtttaaccgatatctcaagcaataaagaacattcagcaatggaacattgcagcacttggcaggtatgtttgggatattgcaagcaagaaagattgtctttttgtaaaatggatacactttgtatacttgaaagaacaacaatggtgggagtatgatgctcccaattgtagttggtattggaagaaaattgttggagttaagaatcgattaaatgaaaagattgatcttgctagttttttgctgcacaagtataaaattcagcaaggttattatcttttattccccaacaaggagagggttccttggtatagagatgtatgggatagacttatctttccaaagcataagtttatcctttggttagttatgtggggcagattaaatacaactgaaagactggccaaattcgatattaatgttgatgatacatgccaattatgtgggaaggagaaagaaacaattaggcatttattcttcgcctgtgactacagtaggaaatgcctgcaggaggtcaaatcctggctgcaatggagaaccaaagcagagtccttacaaagcctgcagatatgtattaaaaataccaaagcagtttcagcgactcgaagaagtatgctgaaagtagtgctggctggactagtgtatcatatttgggaggctagaaatgatgtattatgaaatcaaaaggtgtggcatgtcaaggcaatggtgaaacgcatacaatgggaaagcaagctccggattatagaagttatgcctaggaaaactaaagctgtagataaagattggattgtgaacatataattctttgctttaattgtaatagtgtaaatgtctatctagttgtaaaaaaagaagagagatcagatgtaaacaaatgtaagttgtaagatgttgtttgagcaatacaagaaccttattcataaaaaataaaaaaaaataaaaaaaaagaatatttggtgttggctattcatcaatgacaaccaatgagccaatctttctgatgcaaccttaaaagactcttccttctctatatcattgttatcgtgcactgcaaaaatctctaattgaaaattcatctcaaatcatgtaactcctcccaaatattcctgcattaaattgttaaatataaaatttttgtagtaatttcagtagaaattgatatatatggttaattaggttaaagcagagtatacatcatttcaaaacgcattccttgatttccaatgaagtcacacaacaccacctgttgtaaaacttctccaaattttgtgatctggatacgaggtgctatgaattcacgtggtacccgaatcgggattattgcattatttgccttgattctcagaaattcttcaaccatctatctgattgccctgggaattagtgccacgatctctcgagtgaataatagatcaacttgatcacgaccgccttttcgacaaggcatgggaccttttccctttgacatagcacgtcttgatggtggttgagcaagtggaccctatacaaaacactataataatatatcaaaatttttcataattctactaaaattttggaagcataacgactgtaattgaacgtcctcaaaaattttaaacatgcctaaaataacaaacaaaataaataaaa

SEQ ID NO: 391185 - DNA, 977 bp, Cannabis indica
agttatataaaactcgatacttaattacaacaataaatatgacaacgaggagagtactaatcattaccgaggaaagtactaatcactaccttgtagcatttctcatatatatatataaaacaattttattaggaatcagtattatccaacactttttataaataacaattcgttaataatacatcttaaaaattattttcttaaattatacagaatctaatacttacttacacaaatataaacagtaacttttaatattggtgtatggagagagagatgactagaaatttcttattactttctctgcgtgcaagctaatctgatgaatcatctatatgtgcatctcctacggtggaaccctctccctataccctataccctacaccaccaccatcattaccttctctttcttctctcaatttttattattattattattttttaaaaaattaaaaaaaattaatttacattatttctctcactttgttttgttggggtttgctttatatatatatatgtagatggggtgcctctatttccttactttgcatgtctctctctttctctctttactttctctctactctcttctataactatattactcttcttactcccctcatatatatatatatatacacacacatatatatatatatacataattaggcaatatttgcaaacatttcttcctaaaaagaaaaagagagctagctagtgtttaattgcatttactgcatggatccttcaactggacaaaatttgcaggtactcatgattttcctcaatttttaatcaccttttcttcttttcttttgtaagtatatatatatatatagaagaattatttagatatgtatatatgatcttaatttgttcattaattcagtcttttctttctgtttctgtattttttcttttaaggggggagagattaattagttatatatatctatatatatgtattttgttcttct

SEQ ID NO: 391186 - DNA, 1555 bp, Cannabis indica
agagagagagagtggaaaaataataattttttttgtctatttgcttaagtgtggattaaagtatattattcagcttattcaactaaaattgattttaaaaaattcactaacttaactaaaagacaagattaaggtaaagaaaattacctatttgtccttttcttctctaagaagtaagctcaattcttaggggtaatatggtccaaaactataatcccaaaaaaaatttaacattccaaatgtctaactatattgccccactatttctaaactacttatcactgtctaagtgactatacaggccatatgtcgcattccactattactggacataaaatatgaaaatcataaaatttcacatttaatatacttagaatttaaatatatctctataattacataaataataattaaaagtctatttctgaatataagctctaattatttactaatttttataataaagctaagcagtcattacaagtttacttttaaaaatgtattaagaatgacttgaaggtttgattacaaaggaagacaaaatggtttgggtttgaggttcaatttaaaatatttcataactttttaactaactacatttttttttacaaattaattttttttaaatagggatatttatgaaaagtaaaaataaattataaaaatacgattttatgaaattttaattttttagggtctataagttttgaaggagcactattccaggattccttctctagaagtggataagatttaaattttggattctttaaaataaaaagaaaaaccattaataggaaatttaatataaaatttctctctaaaatatgaagattttacactatgtagttgcaaataaaaataattaaataggaaatgagctattatacgcttagtagtgtctaacatcatcacaatgtggtgctttataattaaatagttattaatattttttatatataataattataaattaaaatatatgagactaaatatttaggaattgtttggtgtatagagtagagtatagatgttggtgaattaatgtatagtaactatagtttatagttcctcacccgtacaatactttccaagctaattcctcaataatcataacaaatattcccttaatcaattcttgtaatagtgagaatttgtaagaattaaattaatcatggatgacaccagttgctccataaagccacctaactgtctaattaccaaaattgactcacattaagctctttagttacttgtaactttcatattgtaggtatgtgagcaactaatcatattaatttattatatggttctatgataaagcaagtgtgtgtaatgtttcctagcctaaaagacacttgcatcaataacaaatagtaattcaagtgaaaaaaggtgcactttttttccactcaaagtagtcaatgcagtgctactgtgtaagtgtggagaggttttggttttggttttgatttttttttaaatgaagtgcggcagagttattattattagatttttttttttgtcacaaaagtaaataataaataaaaagaag

SEQ ID NO: 391187 - DNA, 1068 bp, Cannabis indica
agcaggaatcgtacccatctagaaggctctatcgctgaatcttttgtggttgatgaggcattaacgatgtgttctatgtacttccaagaagtgaaaactcaatccaattgtcctaaacggaacagtgacatcatcccaatatgccagttcgacaattttctgtattcaggcatgttgaccgaccactggtatgaggacagtcgacacattaccaatgataagtaagcataagatagagtggtacatattgaacaactgcacaaaggttgagccgtatacgaagtaagtataaattctattataagtaagaatatttcacttcacctaaaaaatctttaacttacctccatttttatgtagtcagcataaggagttgcttcatgcaaggggtgtaggcaatattgaaaatgtgcaagacaatgagtttcctgaatggcttaaaaaacgagtaagtattgctgcctctaaatattcataatgccgtcaccctaactcttcaattttccttaataactgttattttttctgaatgtagattaatgaactacggttgaacaactatgctgcagtgtcagatgagttgtatgctattgcgaaatcagcgaattcaacaatttatttttatcctggttgcatagtgaatggcattaaatttttagttaaggaaagcgatgacaatcgcaaaatacaaaataccggtgttatggtgccaagtgaacatggacaaaatttttatggcacacttgaaaaaattatggagttgacttatttaaaggactgcagtgttttcttatttatggatacttatttaaagggctgcagtgttttcttatttatgtgtaagtggtttgatactaataggagtagaatagatagtgatggtgttttgactagcacttgcattaactgagaatggtatcaaaaagaaccgttcatacttgcatctaaagcaatgttgatatattacattcttgatcttaagaacggtaaagactggctgattttcaataagtacatccgtagaatgtctaggacttcccgaacgatgatggggatacatcctttata

SEQ ID NO: 391188 - DNA, 1114 bp, Cannabis indica
aatattttttctcaaaaatacaagtgttttagttcaactaaataatgctaccgtacaaataatcgcaacaacattatgaagcaagttacgatctcttttgacttttgaccgcagcaccaatgcgttaagactatggccaaatggcattaccaacatacatgagttgctcggagaatgggcattgaaagaaaatacaagcatgacagtcatatccaaaattacactttgggcaaaatgtagaaataatagtgatacctcttgttatcaagtgatccctcattaataagttattatgagaggtttgcaaaaaaataaatatttgttttagtgttgataatctacaccaaatcactttacaatatcaatgttagcataaggaatgagaaaggaattgtaaagcttgcttatttgaaatctaacccattttccagcatccaggattgtatctcgtgtaaaaatatctctaagattaagtttacgtcaataccaactcacaccccctttcttattgataacttaaaagtcttggtgttttaagtagagggcattgatccatttaactcaaatgaatcttgcttcctaaaaacagtccatatatatcgagtaatcgaagttttgttccacttagctccttcacggaattccaatcctccttagttcttaggcttgcaaacaagatcccacagggctaagttcatcttactagtattatctttcacaccccacaaaaagtccctgcatagtttatcaacatccttgactaatttctgtagaagcataaaaatactcatccaataaaacggatgcctaacaacaccaattgaatcaatccactctactagcaaacaagagatgttggctcccccaattatgaagcttcaattgaatcaatttgtagatttatgctttaataaaatattaaaattgagataattaaggagagaagagaaaaataatttttgagtaattttaaaatgccatctcactgcctcatacttctcctttatatatacactagtaaatatctcgcgcttcgcggtggatatataaggtattttaaattatatataaaaaataaattgtgtattttgattaataatgattacttagtaaa

SEQ ID NO: 391189 - DNA, 907 bp, Cannabis indica
aggaaaactaatcatcactatggtaagaaatataagttgaaatgatttactgtatttctcttctcttttttttttgttatattttaggatatccttaatttaatcttcagtttcttttgtagataacatttcctacgatggagaaattttttttggaatctcatgattctatagagataatttggccagatcaactccaagatgtatcttacatgcagaatttagaagatttaaaggttgctaaatgtgaaaagttaaagtatcttttttcttctgctatggcaagagccttggttacatcttaagaagctaagcatagagaaatgtgagaatatagaagagattttagtcataaaagaagctagagaagaagaaagtcagattgaggagcttcagcttgatgatcatccacacctcagaaattttaatgttgaacaatatttggcaatcgaatgcccatctttagaaatattggatataagtatatgtccaaaactaaagatgttcatcaagacttgcaccacagaaattgaagagcagagtgtaaaggtacacatttcctttttgtttcaattggtcttccatgcattatattctaatagaacatgttttacactgttttgaaaaggtagttaaagaatgtaacaaaagatgacacttccaagaaaaaaaattgagccttttatgttttgtggtgatttttggtaaattttagtaaagataacactgaaaataattttttgaatgctatgatgatatgtactacgtatatgtatctctttatatggttgagtaatatgttatgacaactcaactttcctatgaatcataggattaaaagtgatatggtatcacttaaaaaatataaatgattaatatttaataacatgcatatagcattatccat

SEQ ID NO: 391190 - DNA, 741 bp, Cannabis indica
ttggcaaacctgtgacagaggcgacaacagccagtggtggcggcgggcaaactccgatcgagacttaattgggtgtttatgatatgtctatctgaaaaatcatggtttttctgattttgaaagtaaacaacaaaaacaatttggtatctgtttctgttaattaacaaaaatcactgtattattttactgggggctttgggtcattgacagatgaaggaattaatgttataatatgaatatgagtgtgaagagaaacttaatgaatatatgtatgtaggtatatatatattacatgtatatagttaatgaaatatatgaagagttttgagtaataacgttaatggtgagaagggagagtcaagagtgtaggaatgataagagattggctggcatatctcccatctttgatggtgaccgatattggcggtgctcccttgaagcacctattctttattattacatatacgtcccatactaatattagataatataatttgccatttaattgcattaatacattatataattttattataatatatgtacataataatttattttcatataatcatacattctaaattatttttaatttattatacaatacataaaatacataaatagtaagtatttgattatttaatttattatcactcattattatagttattcaatgatgatatattaataattattttatatttttatataatttaaaaatcaaccattattataaatatt

SEQ ID NO: 391191 - DNA, 1538 bp, Cannabis indica
ttagtaaaggtgggacaatttattagtatcatctagaattctaggtgaattgaaggcgacaatttttttgtgagttgatctagttataacaaagaaaaaaatgagatcaaaagggacatgagtgaaactgcaacagttagaatttcacgatctgcaaagaaaatactagtaggtgtacaatcccacatcgcctgagggaaggtcgtatatgatgattttgagattatgtaggcgtgggactacatagttgttcaggacttgaatgaattgcttgggactacctatattagcaagaaatatcttattttggtagcccctcatgaaggaaccccacgactaagtgttctcgccctggagtgatttcatctggggagtttccccatgaagcgtgtgagttagagcaaaatacgttggaaacacttggattggtctgtagggctagtcgtcagcccagaaagtagctagagtgacgcactcgtgtataaaagccatcaatcagtgggagtaagggcccaagagagactttaagcggggacgttaccagggtaacgtataaaagaacgtcagtgaaagtagtggtatcactaaggtaaaaagattacctggattgcttatggtgatacgataatgatgaaaagtacttttgtaattgattggataatcaatatggtatataaggagacctttgaaattttgggaaaagattaccttcttaagcaatgatggaaaggtgtactcacccagaatgggtaaaaagccaataaattgagatgcttgggccccttttttgtttcctaggttacaccttcggaataccgcagtaatggacatgtatttgagtgattggtgaataatggatcacaaagtaggttgtttattaaacaatggactacataattgaggtaaactaagtcttagaatgattaatcaagtacgaagatagtgatgattgcaaggaagcaataatagcgtaccaatcatggagtgaaatcttagaggtaataatagaaaaggaacatgagagtcttagatgttgatgaatcagtatcatcaatgagaaactcacaacaagttggagtggtagttcacaccaagggattgtcaataaaacagagaatatgcttgagatacatatatatatttctagatgtgttaaaaagggcattttaggatttttacctgttgtcgtgatttttgtaagcttaacacgtggatcctaatctggaaaggctaaatgataagtagcctgtcaactctcttgaccattgtttcgggaaggtggaagcattagctcgcagaaagggccaccaaaaaaggaactcccttgaatggcgatactacaagaaacttccacaaaaagaactcgctcttagcaccgggaactgaagccagctattcccggtggacaaaagtcgagtgctcccgcaagggtatggttttctcaccaagtgcttgaaggtgtcttggaatgcgattagttaagctataaccctgttttgtgaaggttctgttggaatatgttttaccaagatctagat

SEQ ID NO: 391192 - DNA, 1032 bp, Cannabis indica
attacttacttcattaacaattacatcaatatgtatttatagggtagagaaagtatagttggaaagttagtggctaaattttggttgttctattccgacacaaacatgtaaaagagaatatattctggcaattacaaacggtgcaaccatatccattaatcttcaatcttcatccatataaacgatgtcgttttcactctttgaccgacaccttcgattatacaaaatatattaattaattgcaaaagtatattatttttaaagaatataattagcaatttagccaatataaagcttaataaaaaaatttctcccatgatttatttagtatatatttatcgcttttgcaaatgacttttgaaatttgagatttgactttattcacattttttttattagttctaatatcatcgttaggggctaatttcacttttttttttttttatcttattttattttgtagatattttgtggagcattttcatatgttaatgagttggtgtgtaatttttatgttacaagttgaagctctagcttttttggtgtactatttgaggacgttatagttttattgtttaaattttcgggagcaattttgtctcatgttactcgtttactttagcagttcatggtttgacaaagcatgcccttcgattagacgatgaactatcttggttcgagcagagttcctatgcattttgcggatatctgcactgtaaatttatgagtgattctaatcactacgtcacaaaaaaattctctaaacttttacattaacataaattaagttgtgttaggtttcgtttcattattttatttgaatactgatgtatcattgtaaattagtaactttgtctcttaaattttaataactatcaaattgtaccctcttaaaataaaaatgaaaaagattcaatttttttggtaaatcctaaaaaataaatttagatcttaaaaaaattatattttgaatgattaagaaaattaaaaaagaaattaaaattttaaaactaattaaacgatttaaaaaat

SEQ ID NO: 391193 - DNA, 1048 bp, Cannabis indica
ttttaaaccctatagcgtcaccttgaacagcatcggtagcaaattttgccaaaaccgacgccaaaaccccttaaaaaccgcctttaaagcccaattttgtagtagtgattcggcgagtaaccaaaaagtttagatgattggtaaaaaaatgcaaagccaagacatggtcccccatataggatccatcctcatgcaaggaccctccaccatccttgtgaaggagccaaggaccctccttgatcattcttggtcgaggatccattctcatacaagtatcatccttgatggaagatctatttttatgcaaatatcttgatgaatgactcatccttaagcaaggattaagaggaaactttgggatcctatgctcaaggaggcacctccgggatccatgcttaaggattcacccttcaaaagcccatgctccaggatgtatcatctaggacccttctaaagaaagcatcctttggtattctatgctctaggatgtgccatctgagaccttactccaggatgcaccctccgagatcctatgctccaggatgcaccctccgggatcccatgctcccagatgtaccctctgagaccttactcaaggaggcatccttcgatatctttatgctcccaagatgtaatatctgagacccttgctccaagacgcaccctcctgagatcctatgctctaggaggaacctctaggatcttatgctcaaggatataccttccaagatcatatgcttagggaggcactctctaggaggtcttgctcttccgtcaaggatgcccttgcctcctccctcaaggagcctttactaccacattaaggtggcttttctcttccctcaagcatgtcttccctcctccttcaaggagcctttactcccacataggtcgctttgctcctacctcaaggaggcctcctccctcaaggatgccttgcctcctacctcaagtaagtctcgcctcctccctcaaggatgccttgcctcctacctcaagtagggttgtacaaaaaaattcgtaagccgcccaaatcgaataacccgcc

SEQ ID NO: 391194 - DNA, 1724 bp, Cannabis indica
ccctctctctctctctttctctccgttttccatatatatctccccatttctctccttgattccctacttaattgggctgccccaccatgatgaataatgggtgcaacttaatagcatgagaagctttgaaaggtgaaaaaaaaataagttgatgaaaatgctataatggatatttcttttttgtgactaaaagggaaattcaaatgagttttctttctctctcttctattttattttaatttataggagggtgtggtgtgattggcagattctttttgttctttgtagggaagaaggaatcaaagaatcttacattagattttaggacccaggccataacatatttttcttgtaaagtagtagtaagctgagggaataaaaggaaaaaaaaaagaaaggttgaatcaaacaagaccttgtaatgaaatgaagatgagatacaaattcctatacaatgacacccctacagtatatgctttattgtaaaaaaattgaagtgaaagaaagccatgtatttgtaggatcatccaaataaagtggaatctgaggccctgaattttatactcaaccctgtcatatacagtctattactcaaagctttaacatacacctctgaggtcccacatatgtaccatccatcagtcaatattcctctactcatcatttttcgttttacactaatctttctaacattaattgcaatttgtttgagacaattattaactgttcttgttatctcttagttttcacattgacatggagggggtccaaggaagggtgacatggcaagtcataactggacgtaaagttaccttaatttatccaaagttcaaatatacacatatgtacataaatatttttcatctagaaggtaaatcaaagtttcctttcaatttgcgattagctcatcaaaatttgatccatcatcttatagtgctatctatgtgacacatagtgcaaattgtactgtacaatcacgatatgcacacaactcttttctcaaagggagcacccaatgaaatgacaaaaaggtccatataatatacaatcatgcatgcactactttttcttttataatgtaataaatgtgattagaaatcaaacagcacttgctctggataaaagtctcacaaagaaatatattccaaagggagtgttgctttaatctgtaatgcatatccaggacgattggcaagtgaagaggagaaattttcatcccaaaaaagaaaagatgaggaaaaaaaaggaaaagagagtgcacaatggccaacaacaaatcgtaaaagtcaattgcataagatcaaactgtggatttcttgggttgcggtcaagaagttttgatcacttggaatcaaaatccaatcattggtttttaaaagccttaccccatctaaacacagccacatgtacattttggtttgcctcattgatgtaaccaatgtttcatgattcaaaagtacctaaagttttgattcttaatgttattgaaattaaaacaatcacctcaaaaccaactggcaatgagtgacctcaatacttttacatttaatccatgtgggaatcaccttacggatctcaggcgtctttgcaccatctggatctcgtgcggctggctaaccatctggacatgtgtggatcgaaagcccgctagagatatgactctgataccatgttgagaatcatggggttccaactcaaaaccaattggcaatgagtggagtagc

SEQ ID NO: 391195 - DNA, 671 bp, Cannabis indica
cttgttaatataattttaatttttaaaaaaaatattgtacacatatatatacactaatattgtattacaattcacaaattcaactataatgatttatccttgtatgatttctattgaagcatatactcgaaagtgggtgtatgatgaacgttgtataatacatacaacaattagtaacggtaactagtctttaactagactagactagtatataacttgatttttgaagaaatatagaagaaaagtaaggagaagaatataccaaagaaagtaaagggtcttgatatatatcccaaagaggaaaatttattttagatacccgaaagtgtaattttatgattcataatgtgaataaatgagccttgacttataatactggaattttctgccacgtgtggtttttttttctctcgtgcctcctcagggaggcataatcaataaaaaaaaagtaaagggagttggtttggttgagcatttgaggggatagggagagggagccttgtgcatgaatggatcgataatattggattggatttgaaacgaaattggtaatttgatgtagtgaataagtatcaagagagtaacggtgagctaatttgaatggaagatctttgatctctccttttaatgtactcaaccctaattttttttctcaatgaaattttgttcat

SEQ ID NO: 391196 - DNA, 1126 bp, Cannabis indica
tatatttttactctaactattaaatactcatttatatatattatctaataatcattatttttaatctcattatttccgttgaaaaaaattaaagaatatcttccacgtcaccatatggattgaattgttgttatgttaaaggatcatattaaattaactttgccttacaaggatcaatcaatatatacatatatacaattaattaattaatttgtcaaatcatatatgtgaacacaatatatgtaaatatagctttgataaggtttacataatctatataacgtataattcttaattatatgtatgttataaaaactttgatattttgaaatcaaacaactagtttttttctcttcctaaaaaagaaaaaaaaaaacttattatttgccacaatatttatcttattaaagaaagaaatttctagagattttttttaaatcaaacatcaaaatttgtcaagtaaatcatgaacaaatggatagtgttgtttggttcccaagaaagatgaaaaggaaattttggtggtcatgatgattagttacctttcagttttgatcaatcaaatcaattttcatttgagcattagtaatagagaaatgctaaagggtaccactggtgcctagcacccttctacgtgtcaatatcactattagtgtaattaagtattgggtcccatatagtttaatataataattttttatggagtatcgctaaccaattgcaagtcgacacatctagaaggtgctaggcaccactagtgcccaatagcaatgctcttagtaataaatacaaaattcttttttttggtagaaaaaaaataacaaaattcataattggtaataattatcacaagcgccaaagtagtttatttatttctctataattattttccctaattagtgcatgtttattcattttggatatacatttattttctatatttttaaattatataaaaattagttatatgatcaaaataattagcaagataaggcatgaatagattaacaaatacactttaaattaaattaaaaattaaatataacccactaatatttttttcctattattctgtcttgtcaatctccattaattgttttaaacaattttttttttcttaatatat

SEQ ID NO: 391197 - DNA, 692 bp, Cannabis indica
tgacatataaaatgcattctgaagtcaaataaatatccgtaaactgataattcataactaatatgcaagtttcataattaaaccctatttatctgctaatttccagattaaagttaagtggtctttacaagccatctattgttgcggtatgcaagatagagaactccaacgcattatagatgcctcgggttttagtacaaaagagattccattctgatatcttggcatccctatttgctccaaaagaatatctagtaaggagtgctcgattcttactgaaaaaaatgacagctagaatcaaggcattgggtactcgaaacttatcttttgcaggtagagcagttctaattaattctgtgttgcttaccatacattcttattggagccaaatcattatcttgccaaagaaagtaaccaaggaacttgaatccatatgtcatgcttttctttggaaaggaaaacacctgctgcaaggttcaggtcttattacttgggactctgcttgtcaaccaaaggctactggaggggtcggattgaaaaggataatagaatggaatattgcaacgctctttaagtatgtatgggctgttgctaacagggaagaaaatctttgggtgtgatgggttcatagtgtgtatattaaagatgaacattggtggtcatacaagccaccatcgcatgcaagctggtat

SEQ ID NO: 391198 - DNA, 2337 bp, Cannabis indica
aataaatacatattcatatatatttttatattatttgatgacaatgaaaggcaatctagtatcttcatagatttgtgtaaatattttctgaagtaaacattttatatttattaataatattatatttatatgaatataaccaaagaatcattgaaatgattattattgatgcaattaaatagtgaattttgaatatccaaaagaattataaaaaaattgcatcaaaatatcaaaatacagaatattattaaaaatatatttatagagagagaataaattaatttagtgatctattcatatttattgaattggtgctatatgtacaaataaaaaacttaacatattgaaatgagtatcattcgccacagagaatgataggaaatcgattaatttaattttaaaaaatgttcatattctatatattacttgtgttataatatctatatattgttattagtgtaaccctaaataaaaagtctagcatttttctacttgaactacattaattttaatacatatatattatatataaaaatagtttcgtttgaaaatggctcatgggttaaaacaaaaaaaaaaaaaaactcgccacttttaaaaagatagttctttgatagcatctcaatatactagtctaatataacttttgatattgaactatgacaatgaaaatatttataaattaacaaaaaacattcataaccacaaatatcaaagtattaaatcgacattgtcaataactctagtagtgtggcaaggaatttagtttaacatgtgatcaatttaaataatagaaaacccttaaaaattctcaatatcactgataccttgatgcttaataaataagcgagtgaaagtaaccatacactacttaataaataagtcagtgtcaaaattaagccaactatcattgtcattaagaaaataaacttaaaaacacaataattacaacaagatatgaactagatgtgtaatgacggcatgattagattatggattagtaaaggcaattagcattacttaatgatatttatgatcatacatgatttaatatttattgtgggtcttatttttagaaattgacattagagttagaatttctcaatttcgaagattttattaaactctaagtatattattatgtcgtatgtaaattttacaagtttttatgatttttgctcggtgatgatggaaaatgcgacggatggccgatttagtcacatgtgttagcttagaaccttttatttagcgaggtatccataaattaatatttgaattatatcaagattatgcagaattatgattttgaactattttatccctaagcccatttattagttaaatttaaagaaaggggataattttagtattttgccttggaatttagtgaattattccatctttttatagctgatcatttagaattttgattaaccaagaattattaagaaaataggaatttagaaagaaaaagacaaaattgcacctcttgacccttctctctattcagctaaagcaaaaaccaagagaagtcagggtgttcttcatcaattctgaagaattctagctgaattcaagtggtgaagattcaaaggtaagccctaaccctagttcccctttgtttctagtagtggaagttaagttcaagtaggcatttttgggatttagttactgttattgttgttgtttgagttatgtttagttgtctgaagttaatttgaggttattctagattatttgaagttatttagatggttgattttggtgttgagcaagtttgagctcaagaactaaaacttggctcaacaatggtaaattttccaaattaaagttattttcaattttgtcactttgatatggtttacaatgatgattataggtgttctggagcttatggtaaagtttggagtagttttgagtcgaattggagactttttgtttttctgcagtgaaaaagggcagaccgtttctgtggaaacggtctattgtttttactagtgtagacttagaaaaacggctcactatttttacagaaacaacctgctgtttttcaggcaatttcccttttttgttgattttcttgatatttaaggctttgtcatgctatttatcgagaaaaactcttagttgcgagtttagatcctcgaaaggttttagaaagttgtttacccattttacatgattgtgatttaaggcctccgttcagtacgtgacgttccatttaggtcgactgacacacttgaattcaaaaacgaggtaagactagcatggatggcttaatatttttaaaattaataattatagttaaatttatttagtacccatcaatgggtaata

SEQ ID NO: 391199 - DNA, 1310 bp, Cannabis indica
gaggccttcgtcaaggagacccgatgtctccattcctatttcttcttcgccaggaggttctgtctaagctcatctgcaaggcagaaggcagaggcttaatccatgggatcaagattgctctttcagcccctccagtttctcatctaatgttcgctgatgacatgatcctttttgcccgtgctaacaacaatgaagctgagaagctgatggagtgcatttcaacttttgagaaatggtcaggccaatcttgcagtaagcctaaatctagtgttcttttttcgaagaatatcaccaggagatttaaaaatcaaattttgggtaacctgaatattgatcaagttcgtggagaagaaagacacctgggcaacccattcgttttcaaaagaaggaaaaaaggaggactatgtgaggctcaaagatagcataatgaagaaattagagggatggaagatgaagcttctatcatatgcagggcgtctagccttaatcaagtcagtaacttcagcaatgccaatttatgctatgtctacctctaagattccaatctctacttttcgtgaacttgattcgatgatgagaaaatattggtggataggcaatgtagacaaagatagatacttggccctcaaggcgtgagatcaaatttgccaaccaaaggcttcaggtgtactggggttgaggaaatgtgaagacatgaacaaagccttgctgtctaagttggcctggagtcttgctgttcaagctgataaaccttgggtcaagtgtttgttgggaaaatactgtaaacatgagagtttttggagtgtcaagaagaaaagcagcgattcttttcagtggagaggcattttggaaagcagagaagcgattctaaaaggctccatatcaattgcagcttcaggttgttctattaatttctggcatcagccttggatcccttggctagaatttaatgaatttgtggagctgatggaaagtatcaggggtagaggatatacaattcaaacattgggggatgtctcaattgataatgattggaatgaggaggtgattttataagtttttggcactgagttggggtctcgcatcagcaaaattcctagaatacctgccccttttacagatcagattttctggaaacacaatcagagtggaaagttttcagttaaagctgcatatagtgtggaaaatactccaagattttccccggaaaaaagatttggaagttgatttgggatgcaggaatccatccaagaaactcagtgctgttatggaaaatcttgaatgaggctattgttggattttatgcccta

SEQ ID NO: 391200 - DNA, 1537 bp, Cannabis indica
aaaaaaaaaaaaggaaattggaacggtcgtaaaaaagctagtaaaatctctttacaaatatatataaatgtttaataagggaaatatctcttttgattgagaaataagggaaacattaaaaaagcagtcttttacatatatatatatgggtattaataagagaagagcagaggagaagaaggaggaggctatggcggcgatgatgcttattccagatgatgtactctctcaaatattcatccgaatccatgattgccgatctttactccgatgtaccgccgtttgcaaggcctggttttctatcatcaattcagaccactttcgccaccaaaaacagaaacgattatcaaacaatcttcaacaatcaaaaccatttacccttttatttagacatggtcgcgttgacaaactaacaaaaccctttccctaccaatatttctcaaaagaatcacagactctacatcagaagaacacaaacaacaccaacatcgtacattctcaggatgattattacctcaatttcttgccttggccggagtttcgtttgctttcggttaccaacgacttgcttctgctttcacgcgaaatgggaaaggatttcatgatctgcaatcccttcaccaaacaatggattgtgattcccaagactcctatcgacttaactgaagtattcgattatagcggacacggtgggttgatttgcgaaaacaaggatgataaattattcaggtacagaatcatgttagtatggaggaaagtttatggtgaatcttacttatctgattttggtcaaataaccttttcttccgaaactggacaatggagttcagtaaagaacataactttacctcacgatttaagcgatgaacctcctattgtttgcaatggaatgctacactggctatctttgaattatgatactgcaattgctcatggcattattgccttggatccctttcatgaagatccaaattattacaattatattcaatttcccttagcctttccccaagatgagaggcaaaagcgttgggttaacatccgtcttggactggtccagggtcgtttaaggatttcacttgttaccttcttgactagaaggaaaaggatcttctctgtcaaagtatgggaattgaattatgataataacaatggtgatgatgggaagaccacctcatggagtttggtgcatgattttgagaagagaggaattccttttaagtacaagtatgtggttgtgatggctttccatcccaccaatgataatgttttgttcattctatttgataatattcatgtttaccaatatgagattagggaagagaagatggaaaagatttatcaatttccagatcctggttatctacaatttggaatacgcgtacagaacttcccttttgtctatccattttggcctactaaaattcctacctttccctctctcactgtctcagctcttcatgtttgagacttatgttaatattagtaatatatatatatctattctatataaagtgtgcctatataactaaaattc

SEQ ID NO: 391201 - DNA, 594 bp, Cannabis indica
gactacagtttttacaaaggtgtaaatatgcacaccaaaatattaacaaagaaaaaaagctcttttcacttgtggctagctgattcttctggacaattctcttggcttggaaccgggacgcaaaggttatcatcgtgatgatttgaacatccacatttgaaaatgtcatgaggattcactgtgaattggcagtaggctgtttgcaacatttgatggatttctaccatggctccagatcgctcatctctctgatccatatcaataagaatctctgcaacatggttcttgtaaatggggttgaacctctgccgacagtattcattaaaaagaatagtgaaaataatcagtggaatggtgaaacctgatgcaactggagactttcttaatccaaaaaccccaagagcaattatttgcattaacagtaatgaaaatatagtggtattgtgaacaataggccagtactgtcccccactttcgtattttgtaacatacacgttcagaatctggtttcggtagacaaagaatgccattataaaataaaccagcaagaagggtaaaattaagggaaccaagatagaacatgtgaagccaatg

SEQ ID NO: 391202 - DNA, 520 bp, Cannabis indica
aaaaaagaaaaaacgtctacacataattcaaacttcgaacaagtaccaattaacatcacaaatttttgagcgattacaattaacataaaatgaaatcagcgaaaataaaagaaaatcaagaatctttagaagaaagataagcagtttggggatcgaattggtaccgtatcggagcgcttaagaagtggaccctggagcagattccgaccagaacctgaagctagctgccgtttgatcttctccaagctactctcggcatccccgggcctctgctaacatatcaagattcaaatttagagtaagaaattaatacatagaaagagagtgagggagagaaagaaaggaagctgaccggagaagcaccattggtggccatagcagatcagaaaagagaaattagaattgggaaaaggtttgtttgttgaggaagatgtctgttaggtttgttttggttggactagcaggtattatttttattatttgttatcgaatttaacagactatgttagtgcacgtgcct

SEQ ID NO: 391203 - DNA, 1270 bp, Cannabis indica
tcacttgggcaaggcagagagaaaacgaagctgagatggtgaggtttcgagtcccttcagcgtcgtcttggttcggattcgacgaaaggaagaaaacgatgggaaagagaggtgagccttcgtcgtatgggttgggaagtcggtggcgccggctgggttggaagccggcgtgctgtcgagaaaggagaagggagaaagaaagaggggttgttttttttttttttgaacttttttgctgaacgaaggaggctatttgtttggtcaaaagaaagtgtgaaggttttaattttggaaccctattctttttttaactttattattttttaaattgattttattgcctttttttttaatcagacttttaaacttctgaaatcaatccctgtaaaaaatgaaaagaaaaataaaagaagtaaagaattaatatcattacataaaataatggagcgagctgtatttaaaaaaataaaaaataaaaaataatgaagtttacccattcacgccaagagtgtcactataggttaatattttctataaaaaataaaaataaaaattatagaaataactctttagtgacactttgtatttttagtgactctgattctaagaaactaacactgcatttttagagtctttttgtgagtgtcactaaagctcatctctaattttttagtgacccacaaaaaaatgcgtcactaaagtgtgtcactaaaaggtaagtttgaagtagtgaaaccaaaaatagaaggaatagataccgaactaagaatagcttgaacaactaaaatgcagtccgtctctaaaatgacatgtgacttgttattcctctttatccaactaagtgcctctttgacacttagaatttctgcaacttcgggtcggcaactgacagaagaaatagttgaaaatgcctttattactttaccatcacagtcgcgtgctacaaaacccgtacagatctcatttgtatcttcaaaaactgccccatccacattaatttttaactgaccagcagccggtttggaccagtattctcttgtgtcagtgcgattggaagccagggaaatcgagcccggccgcttagactgagcacacgtccattgtcgaagattggtacgagccagccaaacaacatcagcagcactacagcttctaccattccaaaccaaccatgacagcttcttctgccaaccctatattgcctactgccaacacttccataaaccaatcaaaaaaattatttgctactgaatggccaacacctaacgca

SEQ ID NO: 391204 - DNA, 568 bp, Cannabis indica
ttagtcatttttaagcataaaatataaaatttccctttcgttattagtgcaattaagtaaggtaataatttttacgtaactaatcgtaagacgctacttctaggtgatgctagacactactgatacctaacaataatgctctttttgaaccttgaagaatagttgtatgtcaaactaaaatatacacattatcaaaataattgattaattgggagaatttttgttatccatgcaataataatttgacgcatatttttaatatttattttcttaattattcgtgtacatttatgctgtgtgtgggcatttaagggtgttcataaaatatttacccgcacgatccaatccaatttaatctgtaaagtacggatattcacacttgtgtggattagattgaaaatccaaaattcgcacaagtgcggatttgatattaattgacatgtaaaagcaaccgatccaattcaatattacacacatatttatacatatgttaattttttcttacatacaattaatattttaatgtaaaaaaaatattaattaacaaatctaatacatatgatacaaa

SEQ ID NO: 391205 - DNA, 964 bp, Cannabis indica
tgtcagctgagtttggagaccataaaccatacttttttctggtgcagggctaaacaagtctagaggaattgggattcaacaatcaattggcatttgtcaaagactttctccttctcagactttctggtttatgtatcttctcaattgcaatctaataaggtcgaacttttcattactattctctggtgcatatggacagcaaggaatgcagagacacactccaaaactccaaaatctgcattgcaaatattgcaatttgctagcaattatctagctgaatacaggaaagctcaatctaaacaccatctcactgccctcagtatgtcaggttccccagcagctaattgaaacgcaactgctgctactggttcactatctttgaatattgctgctgcaactggtccagaatcactgcctcacacctttgtccaacatactttggtgcctccaactaagcctaaatggcttgctcctccttcgggcagactcaagctgaatactgatgcagttgttaatgtctccactggtgtgtttggactggttgctatacttcgtgactctaatggtgaagtccttgctgcaatggttaaacctatgaaaggttgtatcaagactgaggaaatggaggctttagcagtggcatggagtctcaaattgctactgtccctcaaactcactgttgattttattgagacggattcattaatggttgtaaatggtttaaaatctcaaactaagggtctatctactttttatactgtacttaatgatattacatttctattatccaatttcccacgagcacagatctctcatgtttataggtctgctaataacgaagtccacttgttggctaagtttgctcttacggtggattcagattgtatttggttagaggaagttccaccacatctaatgactgttatgtaatttgttttttcagattaatataatagtcttttct

SEQ ID NO: 391206 - DNA, 576 bp, Cannabis indica
gagttaacaaagacacaaattttacaaggaattacaagtttattttttttaataaagactattaggtggatttattttaaaaataacaacaaattttattttagaaataccttgttacgtcattcaatatttaacagtggaaaaaatggctgtcaacccaacaatcaagttttatagcataataagtaacgtgtattttgctggatttatcgtcttgtaactggtagattcctatgtgtgacaatggaaaaaaaaaatatagatatttaatatttatgattatagaatattgagcaattgctaattaaatacaattaaattgcaataaaaatgaaaaatggccggtttcagtgtcaagaaccccaataccaacataaataaataaagttgttcaaaataaataaagaatattgcttttaaaagaaacaacaaacactattcctactttataatttttattacatttttggaaataattaaaattagactttatatatattgaataaattaatgtttttaaaaaatttcttttttttttttttaactttttgtattttttttaaagaaagaaagaaa

SEQ ID NO: 391207 - DNA, 1056 bp, Cannabis indica
gttctcgggaccatacaagccaatgattggctaagcttaaagaaagggaaagagatcttaatggacacctagagaatgaggaacttttttggaaacaaagaagtagagccatttggtaaaaccatggagatcgaaacactagatactttcaccaaaaagcaacctctaggcgaaagaaaaaccgaataaaaggtctctttgataaaaatctgcaatggatgagcactaaggaggacatcgaacgaaccatttgtgaccacttccaagaattgttcgaagcaccagcccatggagatgctacgatcgccaacttgcaaagatttgttcctttcagacttagcagaaatcaaaattacattctgctaacagagttcacagcaaaggatatacaggttgcactgtcccaaattaatgcactaaaagcccctggagtggatggaatgtctcggattttttatgaaaaccattgggaagtcataggagaggatgttactcgggtatgcttggaagtcctcaacaacaatggagactgcagacagataaataagactcttctctgcctcataccgaaaactaaacaatcgaaacaagttggagagtacaacccataagcctttgcaatgtgagctacaagatcatcgccaaatgccttgccaataggatgaaggatagcctaaaggaagtcatatcagaaaatcaaagtgcatttatttggggctgcctcattcaagataatgcaatattgggttttgaaagccttcactgtatgaaaaaaggcaggttcggcaatcgaaaaaaatagcactcaaactagacatgtccaaagcatatgacagggtggattggagattccttgaagcaatgatgatttgtttgggttatgacaaacggtgggtggacaaggttatgaactgcattacttcgccttcattctcaatacttattaatggagaagtgagtggtcaaattcaacccagccgtggccttcgtcagggagaccccctctcgccttacatgtttcttctttgcttgaaaggcctctcttgccttatccaa

SEQ ID NO: 391208 - DNA, 1379 bp, Cannabis indica
atcactccttgttaatttggctattatattgtacttatctctaacattttgttagtggttagttacattcatgcaacatttaacaatatataaacacattagttagttcatcaatcttattattagagtttttgttgcaaagtgatctatacattaacatgatatctagatgccataaccacttgaggctagctcaagtggtcataggtgggtatgtatgtgttggaggtcctgggttcgagtcctaggtaaaacatggttgtaatatataaacgcttaaaaaaaaaaaaaaaatatctagacgccatggactccatgtccaatgtcacgcccccatcggtccatagccaactcagagttcaattaaaagaaactcatagtttcaaatcactttctatcaatcttattcctaattctctatcttctaaaatgagagaatatctatttatccttactaagagaatatcttactaattccagttgtctgatatagtagtgggagtcatggctctagtgagtattattctggtgaacataccacctccaaaagcctctcattctattctgatgccagttgaatgactagtgaagatgatacttttatgtctccacttaattcaatctcactgaaaaaaaaaataaaatttctttcttgagaccccaaatttgagtcttttgtaatattgcaaataatgttctgcaaatatttttcttaaaaatgaaaaatggtgaaaaaaaaacatataatcataattatatatacatacataaatgtgagatttttctgtacttttgattcaaaagctttgagatatttccgactttgacaaaaaaatggagagggtgagattgagctcttaatcacacaaaaatgagaaaaaatctagatcgacgatgagaaagaaagggggcttctttgaataattttgttactatgtggctttaacatattttttgttagtactcataacaaattctactaattcttccataaacaacaaaactattctattttatgaatatttttctatcgattcacatgcaatctgtttataagacatataaaatttattactgatacttgtttcagatgatttaagtggaagataatcctcttttttaatcttgacatggctaatcacttaaattgtagctttggaatattataatttttacaaaacatactaattggttttataatcaatgtgggagtagattaaaatattaaaatgactttttcacactacttccatcatcattataagaggcaaatgtggttgatagaaattcacatgaatacatgatcatattattattatcaaaatttatccccaactcaatttcttttaatattcttctaattcatagttattgataca

SEQ ID NO: 391209 - DNA, 1102 bp, Cannabis indica
gcgtgtgtgtttggaggtcgttgagttcgagtctcagtattagcatagtgtagtatataaatagctaataaaataaaaaaaaaaaaagagttacaaaaacttataattaaaaactattgttttgtggttatactgacatgttgttttatagttgttctccttcgtccggagcaagttttgaaataacgtccataaacgtatatgaatttattgagcacgtttccagctttcatgtctaacatttttgtccctataaatactaattgaagtgctggtaacagtcatataatgaagatattttaatttttatatgtgatcttcaaaacactataaatagaggtcctgatagtctaacaacaagtttctatcaagagaatatattgctaaaaacactttaagcttgataaatttataaaactatttctattcttttctttctctaagcgtttgtagtagagaaataagcttttgaacaaaggtgtaagactttgttcaaatttgttgattttcctattatacacttggagtgtatgtggtattgagattgatctcatatcttttatatatatatatttatgttatttatgtattatattttatgtatagcttattgctttgagataatttttttcttcatcttatattctctattttatgttatattttgtttaatattaaaatattattttaatttttacttttgttatttgtattatttataattttattaatttagtaattttattaaaatataacgaagaaatattatcattatgaaaaaaatatattatatgaaaaaaaaattttggtaataaaacatttatcagcacattttatattcatatccaaattttgaggataaaaatatatatatttttgtaactaagaaaggtttccaaataagcccatttggattcaataaaaatatttggtgtgatttattatgaaaaaagaaaattgggttttgaataaggaataaatgtagggctttatacaatttccaccactagaatcgtgacaagttgttagtatacttttttttctttttaaaagggcgcatttaattgaagtgtaaaaaatattaactaaaacttgcctagct

SEQ ID NO: 391210 - DNA, 1366 bp, Cannabis indica
aaaaataaaaagttaagaactgagccaatttttccttataaaatatggtaaaataactctattttgtagagttatcactcgagtttcaaggtaagctgcaataggtgtcatccatgttggagtgtcatccaactgtcgacttatttagggatggtaatgctgggttcctctaagaactatattggcaccaaattttccttatcggcaatggtgctacttgcaagatgggcaagtgcatttactgtagcattctgctctttagggatctgtctgattgtgtagcctttgagctaacttagtaagtctttgattttgctcatgtaggccaccatttttttatctcaagctgtatattcgcctaggacttgattcacgactagttgagaatcgctgaatatgtctaggtggtcaacccgtacttcatgtgctagcttgagtccagttattaaggcttcatattcaacctcattatttgaggctttgaagccaaattcgattgctccgtgcagttgctgccccccatgtgttataagggcaatgcctgcactggacaattggtcagtgtagcttccgtcaacatgaagtttccacgttggttcttttaggtttttgctactgatcttgcccttgcttcttctctggctattgcgtttctcttggatcttgtgagattttaagagatgagtttgtgcactcagccacaaagtttgtaagggcttgaccctttatggttgttcttggttgacatgtgatgtcgaactggccaagtcaatgtcccacttgagtagtcggcctgatgctttaggtttctgtaaaacctatcacaatggttgatcggtgtacacctttatagggtgtccctagaagtagggccttagttttctggacaccaggagcaagctataggtcagcttctccatgagttggtactgattttcagtgccaattagtctcttactgatgtattatacaaggtgttatacaccatcttcttctcttgtgaggacatcactcatagcatgctctgtgactgctaggaacacgcctagctcttcattgtcttggggttttgaaaacacaggttgttgagctaattgtttcttcagctcccagaatgcggtctcacatttcattatccactcaaattttttgttgcctctgagattgttgaagaagggtacaaatttgtctatagacttggacacaaacatgctaagtgcagcaatgcgtcctgttaggctttgtacttcctttatggttgtgggtgactttatgtgcaaaagggcttggatcatgtttgggtttgcttttattcctttggcattattatgaagccaagtaatttgcctcagcctactccaaaaga

SEQ ID NO: 391211 - DNA, 630 bp, Cannabis indica
atgtaagcgcatcggctctagcagtcatcaaaaccaccactgtttcgtactggggaccaactcctccaagaatgtacatttccaattcttgatccgaagtttgtgaccagctgcagcaagagaataagcaagattcttcattttcagaatgtactcatcgatggtcatggagcccttcttcgttgtctgtatagagaggcgaagttgcagctgccttgctttggattgagtggcaaaaagactctcaaaaacagtccaaatctcagcagcggattcacaatgaagaacatgccccaacatcgcctcggaaagagagttcattagccaactcattagaagagcatcacaatgaatccaatgatcaagaacagggttgattgtgtttgtacctggaattaggggttctggtcgaggagtggtgccacgaagaatgccttcaaggcaatgagcacgaacagatggaatgatgagcgatctccagtaggagtagttgtgtcgatccaatcggatattcaacggtagcagggtatttgggacttgaaattgcagagcggcagcctgagcttcgatcggagcttgcggtggacgagggggagcgatattgcgtggatcgtcaggatcagccatagg

SEQ ID NO: 391212 - DNA, 705 bp, Cannabis indica
tctcttggagaagaagaaatcttagaagaaatttcgtagagcttcggctatctcctttttgatctccctttgtatataaatcaaggagtatttataggctaaatttcaggtatggacatgctcatgacccactttgggcttttgcaaaaagcccactattagggtaaaatgcatgtaataatctgattgttgggcccccaataaagtttttgcccgtgcgtagaagcagttgggcaataggggatcacaattggtattggacacgtgtcgccaaaaaatttctccttgaaaaaaaaaatgcctagacaaatcgtcaagcaaaaaggtattaagaggtgggacgtacacactaccatagtctgacataggggacaagatttgatcttatattagacaaaggtataatcgtcgttgagtcaatccgagtctctcttggtggtagactgtagacgtacgactttttttgggtagtcaatgtctgtgataggccctttgagtagccttccgagtgtctcttggacataccttaagcctagttttctgtggattctggagggatagtaagactttcgattctagatggcgaaggggctgtaggtacgaaatactcctacatagcttttgggtcgttcgtatctgttctttggaattcgtcaagccttctccttaacctcgtatctaattagtgtactgctcgaggctgta

SEQ ID NO: 391213 - DNA, 838 bp, Cannabis indica
ctttaaagaaaaacaagacctaggttgttgttctcaaacctgaaggatagaaagtgattgattgcaagtggatttttaagctcaaggaaggaatgatagatgatgaaccaatggtgtacaaagcaagattggtagctcaaggttttactcaagtagaaggtgtgactactttgaaatattctctccagtggtaaaaatgagaactatcagaatgatgttggctcttgttgtgcaatatgattggaacataaaacaaatggatgtgaagactgcttgaatggaaggcttgaagaaaccatctacatgaacagcctgatggattcaaggtggaatctaaagatggagagctagtttgttcactgaaaaggtctttatatggtttgaagaaatctcctcgacaatggtataagaaatttgactaagttgagacaagggttggatacacaagatccaaatatgacacttgcctttatattacaaacttgaactcacaagctgtaacatttttactagtgtatgttgatgatacgttaatcatgggaaaggatcaaaatcaaactgaaaaactcaagtatgttctcaaaagaaaatttgaaatgaaagacttaggggtggctaagaaaattttggggatcgagatacttaaagataggaagaatcagaagatgctattgactcaaggcaagtacattgaaactattttaaggaaattcaagatgaatgactcaaaagaactaaagtccccctggctggacactttgtgttctccactagtcaatctcccaaagatgacaaagaaagaaaatagatgatggaaataccatatgctgaagcaatt

SEQ ID NO: 391214 - DNA, 1537 bp, Cannabis indica
aaaaaaaaattacgacgttttttggctaaaacaaggtccaaggttgaatgtcttcataaatacttatggagtaatttagcgaatcagtgttgtcactgtcttcgaggaaggtttgttgatgatttccttgtgcccccagttgggaatatgtagtggtagcttgtgaccttgaagggtaactcgcctcttgagtaggttgtcgtcttttgcgatgagggttctccctttgttcctcaatgtcgacccttatattactaggaacatgaggtggtcgcagagatgggtcatgggtgccatgtgtggcacagttttgattacctaatgcatgatttgcatcattgttgacatgaactcccatgttacctctacggaggttgttactcaacggtggaggtatattatttttccaagaagattgtaaagactgcttaagatgaacaccttggattactaaataattagggtttatgcatgagattttattattatttataaaaatgcatattgtggaaatttatttaagttcatatatgtttattatgctatttatgtaaatttcttaatgttcgtgattgtgctcggaagcggcggaaagtgacgttgggcctttagagagtcgcattttatatgttttagaatattatagtgaggtattggaggtgttagaatttcgggtttagtaatgaccaatttacccttgggagttttctattagtgaatttaattaggggcaaaatggtaatttgcttagaatttcttctttgtctttttatgagtgataatctgattattaactcatatatatgttattaattgtctttattttggtcaaagaggaaggaatagcttttgaccttcaagaaagaacctagaaaccatttccttcaccattaagctctctctttctttcttttctttcgaaccaccaagggaccagctggaaattaagttttctcagctcaattcagtaagttttaagaggattggaagcttcaatctaaggtatatcactctactttgctttctttgtctttccctttagtttaagttagggttgatgcatgtttggctaggaagtaggggctgtgtgtttgggcttaatttggtgttgttttctgaagttgtgtagtgattatttaggttgttttaaggtaaattggatggctgtattgctttttgaatcaagttggagcttttgagctcaagttaaagctttaatggtgttttcataatttgagttgtatattgtagtttgatgcttgaattgagttggttggagtataaacaggtatacttgaagtttttagaaagtttagggttgaattgaggtgtgggggtcagtttttgggttcccagcacagaactggtcgaccggttctgggggacttatagaaccggtcgaccggttggtacccaggaaccgggctttcggttgggaaccggtctgccggttggggctttttcccgaaccctagtttttcttgtttttatgttatttagggttttagcatcctatttatcgatagggttatcttta

SEQ ID NO: 391215 - DNA, 1287 bp, Cannabis indica
ggttgaagtgttgagtagatggcttagcctctttgttggctaaagcttgctggccatgcaccgactaggtgcagactggcctgtcacacagtgcttggaagctggctggcctatgctggccatagggccgaccaagcgtggctagccgacccccttgagaggctggttcgtccattttgtcgtcctcctaagtactcggacccctcattggttgaagtgttgagtagatggcttagcctctttattggcgagttgtactctcacgtggcattgatattggccactggaacatgccacgtcaagtgaaaaaaaattgggataacacttgtgactaaacgtcgactaatctcgagaattagccttgttagtttttgggttaacaacttttaaaaaaatattttatatttattaagtatatttgttttatttcataaatttatattaacaaatttcataaatttaaagtttcttatatattatgatatgttacatgtgataaaatataactttaaattatttttttatcaaatacatttaaattcatatagattcttaggaaaaaaaaatattaaattaagacataaaaaagaaaaaaatttgtatagcataatcttttatatatttgtgattataatgaagcaaattataatatttttatcattataattaaaattttaaattttaacaatcctttaaaatttataatttaccaaacattcagtttagttttttttttttcacagttcaattgcacttactttttctcacaacacaactaaagttattttccccatcagcacaactatactaaactagccacaatttagtcaactaagtttaccctatttaaaaggtaagctttccttagttaaaaaacaaaaagataacacttattaactatgaaaaaggataggattactgtgtattgatgtaccttttactatttcgacatttagaatttttttttttggtatatattttctttatgaacatataggttataactatttaaggcattctgtaaaattttgaaaaattttaaataatttataatataaaaaataatatttaaacaatctattttaaacgcgtaataaaataaaaagaggtacacatacaacagactatttaaatcgtattttcaacacgttaaatttttctacatttctcaaaataagtgttcttaaataactataacattcacgatcatgaccaaaaaaaaattaaactaaaattttttcccaaatgccattacaaaaaaagtacatcaatacatctcttctaggg

SEQ ID NO: 391216 - DNA, 2565 bp, Cannabis indica
atatttctatgagaaatttaaattataagaagcaatgaactgagccctaaatcacatagactaatttgatactctcattctaaattaaaatctatgtatattcaatttttgaattcataaagagaatctaagaaggtgtgcagtcattcacatacacaatcatcacaaactcaatagatcttatatgaagatgaaatagaaaatttgtattaatttataataaagtttaaagaaattaaattaaaaatgctaaatagaatttagttaaaaataaaaattaacatattcattataatatctctaaaagacatattcaattagaaattaaaagaggaaagaaagaaaaaaaaaactagactagagttgtgttgctccaattactaaaaggccaaatttcgtcggtttttaactgacatttatgctaatcctatcggttcccataaccaacgtatatacagcagacgcaaaatggtatttttctgggtcagtattaaacaatcgatatcaaaatatcgcgttgctttataactgactagaaaagtataaaaatcatattttatacttttttccatcgattttgtaccgagaaacttaaaaataataaataaaaaatacaaccatttgagatactgtctgaactaaatatcgattaattaaccaaaattagatccaaaatatgctccaacccaaatatcgattacgaaaccaaaacacagttttcaacaaaaaaaaaaacagatttgaaaaaatgctcgaacatcgctggggctctcaactaccagcgatgaaacctgcaaaagaaataaaaaatttccagatctaaaaaagagagatcccgagagagtgatagagagagatctagagagagatagaactatacctttggtgcagcgtgagttcgacagtggcaaagggaggcaaggaggcaacggtcagagcgcacaggggtgggtcatcggggttgggcgtccatcgcgattgggtggttgttgggggctatggtgggaaagagaactgagaaagagagaaggaaaaagagaaagattatttctttacgaaaaaaaaaagaatgaagaagaagaagaaagagagatgtagttgtaatagaagaaagagaaagagaataagatatatttaagtgtagggttttgttttaaggtttgtagaatgggtttgtgaggctttaaaaccgatgcaaaattcaaaaatgtcagttttaaaaagtcacaaaataggtttgcaaggctataaaactgacgcaaattctatataatttttcttttaatttctgccttttatcgtcagttttgtaattagcgagggagagagaaccgacgcaaaccattacttatttgtgtcattttgaaaacgaagaatctatttaatctggcactattcaggtcggtcaacgtgatgaacagttgtgttgacggacttgaatagtgaattttgtagtagtggatctccaatgtgctctatcgtttgttccttcaaaaccctctcaaatttgacctaattactctaaattcgtaaataaaaggtctagtccacacaaacttgcatttgcatgtaaaagaccggtgctcgcagattggtttatctatgtatttttctacttcgacctctctcaacaaaatgcacataacattcacagaaaaattctaaatgcgctaatgcaagatgctcttgaaagatgagaaagaaatctaaaacttttatgttctaatttttactaaaatctgattataatatgatcaaatttaggcttaaagtttcacctttaattttcttgtaacgttttcctaccaaaaacacaaaaataacaaactaatactaaaactacacaaaatgaataaaagaaactaagcataagaaaatgaatctaaaagactttaaaataacacaaatccaaaagaataatgatgaaaaacaactctattttgtatagttatcatacttccaaacttatcatttactcgccctcaagtgaagaacttacccctagactagacaacttaacaagacacaacgcaactgattcaagtcaatcaaaatacaaataagccttaatttgacaaaaaaagacatgcaacatggtttttagaaaattcaaatcatatgctctaattaataattttagctcaattacatccattaactcaacttaattctttctttcagctcatgaaatcataataagattcaaccaacaattgaaacaatttatacatgtcagtacaaccatcaaactatcaacaaaattcattccatatggttgtactactcgctatatattttccactaatataaaccaatgcatgattaagaatcaaaaggtgtttctaggcttataatgaaaggcttagataacagtagacaatatagtcatttaagctcatgtaccataagcttagaaactttataaaccaatcttgatattcacactataattcaacacaacctcacatgcagatattaaaaatttaggaaggatcaattttaagatgttatgctgtcgaatatttgagagcataatattttgaatttgattattatttttttaaa

SEQ ID NO: 391217 - DNA, 1237 bp, Cannabis indica
taaattgtgatatataagataaaagagctactcctcccattgccaattggttttggaatggaacctcattcatcttattcctcaaattctaacaagatacacactaaatatattgagaaattttgaatatatataaattgagatataggtgctttggtacaaagtcatatcaagtaattttttggaatggaaacatataaatagtattaatgagtcactaattaaaatatatctatatatgtacgtaccgccaaaatcatctatagatttttaatcccatatctatagaatttcgtattctaaatattattggtagatttagtttattatcttaagcttttaattattattaatttttttttggtagattatttaaaaaaaaaaaaaaaaaaaaacaaaaaaaaaattacaaaacacaattttgtacgaaaacagaattttatatatttacggtaaaatatctatttttttgatgtattattatggtctaaagtttagatgaaagtaataaaaatgtatatataatattggcagcaataagtaaattttaatttctgtaattttttttaataaaaaaataacctatcacgaggggtacctagccctccgagagattactcacatattttgaggggttggcccgccaagattgcttatatatctcgacgagtctagcttgtcgagaatgaccctttctcaatgtcggtattcaaattcacggcggtttgcgcctactgaaatagaacaataacaggggcccgggcctgctgagattggcttgtttcttgtagtaaatatatatatattaatatatgcttcacatctgtgtgaagtctatagttgaaacagaagtgtgaatttttcaagttaattgaagcttttgatgaggagaccaaattcaactaggattttgttaccatactttatttctaactctacaaatacatattgtcttagtaagttagtattatactaccgatctttattatttcgagcatcatataaattttttacatcattaaatttctcatagtgttctaaatgcatttataaattttctaacatatacaattcatccaactttttgacagatagatcattatattattaacacatgtctaattatcatatatagctcttccttccctacattaatagtaactagtatagaacggatgatgagtaatttatgggataaatatttaaatttaatttttagttataaataaatatttaa

SEQ ID NO: 391218 - DNA, 1091 bp, Cannabis indica
tttttgtaaaaattctcttgatttttaaaacgaaaattttattttatttttgttttaagttataaatttacgaagttttgccactataattatccccatattatataattcacataaatttaaggaccacatattcatatattatatatcatgtcaatcaagggagagatatttaaagtggaatatgacgtcatgcgtctactaatctaatacactaatatttttaaaaataacatattttataatttgtggtggcaaaggcaataggtgatataagcagcgaagaagaatgtagaggaaatatggcattggcttcttttaagtttttaaggaccccttgagtggagtaaacgattaaaagatgaggcatgatgacgtggatgccaccaattcatgactttagtagtttattccattctctctattatgtgttttgcattgcaaattgatgagttgatactgagtacttgatttattatttactttaacagatttgtagacttatatttatatattgcactcatattttcaattggttagccttaaaagtttcaataaggcttaatttttaggaccatgtttgccaataaccttttttctttttcaaagaaaaaaaaaaggcatatataatatatattctaaactcttttttggctagtttttgttgtttgttcttttcttttaatttattctctttcttcaactctatcattttcttttatacttttcgaatgtgtataatataaatattatttgttcaaaattgaaacacacgatacaatatttaaatagaggacgaacagaataaccatgaaaactagatacgatatttatgaatttttagaaatttaaatcctatataaacatttctaggaataattttgtatatatatatgaataaaataaaagttattactttttaattaattactattaattagtaggtataaaaaaatataatattatagtaaaatttacatttacaataaatatttataattttgtatatacgttctaattacgtaaccattctcttttttgttatatatatatatatgtagcgttaaatttctatactaaaataactaagt

SEQ ID NO: 391219 - DNA, 900 bp, Cannabis indica
gcaccatgagtagcctcatagcaaaagctcaatcacagaacataaattacacagttcttttgaaattcagaatacatcatattcaaaactaagtaaagataaatagtaccactcaaaaatacaaagcatattcctgattgaagcaatatcatataataataactgggatagaacagtagattgataattcattacaattcaacaaataaatacaacaaaacagaattcgaaggagataaaataaaccacaaaattatgaagagggaaaaataaatcctcgtttcaaaattcatacctgtgactgtgagtagtgaattaataatgattttttatgagtgaaattcgacaacacctttgctcaccaaccccacaaccaaactaaattcctctttagagatttgagtaactgagaaagaaagaaagaaagagttgaaatttagaagaaggtaggagtattttaagaccatcggatcaaatttaatctaatggtggaaagtgaaacagctgttattgtcttaccttagcgattgtttaatcaaacacacacccaaatctttcatcatgaattgatgatgtcttcacaagatattcctttcaaggctcactgtggtccaccggtgactgtaccggcggtaggcgacgggaatggcagcaactgttgttgttggtgtgactctgagctagaacaactaatttaggttttctttttattatttattaaatggatttcacttttgattcaaatgtgatgtgaaaaagggttgtttatttgatgtgggagttgttttagttacattttaggtgggatttggttagaagtaatgaaaatataagaataggaatggaaatgagaatgaaatgaaataaaatttaaaatgcatacaaaaataataaaaaaat

SEQ ID NO: 391220 - DNA, 634 bp, Cannabis indica
cctctaaaattggaaagtctactgcagacaatcctggacagtttgttgttgctgttcaaccattcagatctaagtttaattacttgtactcattgtggcacaactagacatactattgatagatgttacagactcattggatatccacctggtcataagttacatgaaaaatttccaaatcgaaatgctgcacctaaatctgctgctacaaatgctatgggaactgatgaggaaaagcttgaagactaatgttcaatgccaaaagcttatggccttgcttgctcagaaagtacctaataaaacttgaatcaatacacctgatgagcagcccatagtatctcatttctctggtaagaactcttttgtatagtgaaaattggatcatagatactggggcaacacatcatgtgtgtcacaacatctcattactcaaaaatgcctatcatgattctcgtcttaaaactgttttactgcctaatggtttacatacacgagtttcttgtcttggaattgttgagttaaaccataacttagtccttaaaaataggattgttcaaaaaaaattaacaaaccgtccaacccaaataaactgcccaaaccaaattgagtaaactgacaaaaaatacaacctgaa

SEQ ID NO: 391221 - DNA, 976 bp, Cannabis indica
acaaaggggcactcaaaaaagaggtagataaattattgaccaattactttatatgtgaggccttttatcccttttggatttcaaacccagttcttgtaccaaaaccaaacggcacctggaaaacttgtatcgacttttcagacataaataaggcatgtccgaaatattgtttcccactacccatgatggaccacttagtggatgcattagcatgacatgagctaatgacatttatcgatacatcatttggatataaccagatcataatgcatattcctgatcaggaacatacatgtttggtaacaaatatgggactttattgttataaggtcatgccattttgttcaaagaatgctggagcgacgtatcaatggctagtgaatggagtgtttgaaaattagatttggcaaaatatggaagtctatgtcgatgatatgctggtaaagttgataaaaagcaaagatcacacaaaggatctcatggaatgctttgagatacttggaatgtataatatgaagcttaatccaaagaactgctcttttggggtttcctcaggaaaatttctttgtttcatagtaaacgcgagaggaattaaagctaacctagaaaaatcaaggccctaattgagatgccctcactagcgaagctaaaagaagtccaagacttgacatgaagaatggtagcattgaatatatttatctcgaagtcaacatattagtgccttccattctttaatgttttacgaggcaatagaaatttgaatggatgaagataagagggaaaaacaaagcaacagtaacctgtttactatattagttaaaggttactaaagggtaggtaatacaagatatccccctcttcgaaaaacttgcattacgcccgattgatacatctcgcaaattacgaccatatttccaggcacatcccaaatcaaagtcccaatggatcagccactaagacaagatttatcaaaacc

SEQ ID NO: 391222 - DNA, 527 bp, Cannabis indica
aactaaaccaaaacttaacatagcaacaacaaaactactctgaaggttctacgaatctaaagtaagaaaaacaaaagcccacccacgaccattgacccacctgctgttagactctggattagtaaaggaggatataagagtcattgtatctgggtggttactgagtggaaattggttagaatataatatataatatagatgagcgtatatatagcttctgatttcttttatattcaataaaagctcacttttttcctcgtatctttactgttcaaataaaattctggtgctggtgttaaaatattgtcactgatattgttctaatcctgcctcttactattttaaaggagttgggtcttatcacctgcgcaccagatacgagcgtcaaacgtagctagctaggccaacagaaaccaatgtccatggtgggtcatattatgcaatgcagttctccacattcttcgaccaagaactttttgacaaccccaattaaacaagtcaactctgctgcaacagaaccttaaccc

SEQ ID NO: 391223 - DNA, 613 bp, Cannabis indica
aataataaggaaaaaaaacatccctgtaacattcaaagacaaaaatgatcctcattaagatcgccatttctatgaaaaaaatgtgcaactctacttgaaactaagggctagtacaaaagactattacatttagtgataattttttagtcacaacataatttttttataattaaatatgacttttagtcacaacacaatgctacttgtaactaaaatatagtatttagatacaaactgttactaatttagttttagtcagaacaagtattgtgactaaaaatagatttagtcacaataaattgtaatttttgtggctaatactttaagccacaaaccttttagtcacaagttttattgtgactaaaagtaaaaaaaaattatagtaggtgcatttggaaaggcaagagtgaattggaattgaatataaattgaagttaattatacagttttatttatttgtctgactacataattacattttaactgtgtaattagaaataattgagaggcttcaattactctctctaattctcatgccccccatgagaattgagtctaaatattacagtgtgcaaattcaaaaaaaatttcattttaaatattatgtactaaa

SEQ ID NO: 391224 - DNA, 629 bp, Cannabis indica
attttaattggatactaatcataatatgtactagaatttctaattggaaagatatgagaacatatttatatttagtatcctattatttaatgaatagtttttaaaacattgaagagaatgatgaggttttgattgctggattcagaagaaagggtcacgttgtgggagatattcctggagttaggttcaaggttttgaaagtgtctggagagtctgttggctattttgaaggagaaggagtagcccagatcttaagctatcattcatgcttttcaccctaaaattgttgctgtttattttagtgttatatggtgaattttgagtacaattttttatatttggatgttgggttgaattcactagtagttattgtcccttttttttttgaaaaagagaaggagagcacttagcaggcctcccctgatattattaaagtctcacttgtggcggaggaaaaccatacataaaatgtataacaatacaatgagttagcacattgagtgaccaatcaaacaaaaggagagaattctggagttttacatcaaaccactccaattcctgcttaaatctaggaaggagaaagcctcaaagtgtttggttttaaagatccatgtggctgtccaaaattt

SEQ ID NO: 391225 - DNA, 2856 bp, Cannabis indica
gtgcattttatcgtagtcattgtagactattttaccaagtgggtagaagctgaacccctagcaacaatcacctccaagaaagtccttcactttattgttaagagcatcatatgtcgatttagacttccacagaagattgtgtcagacaatggaaagccttttgacagtgacatgttcattgatttctacaatagacatggcatcataaaaagcttctctctcatggcctatcctctagcaaataggtaggtagaaggtattaacaagaccctcaaggacaccttgaagaagcaccttgaagaggaaaaaggtaattagcctgaattgctcctaaaggtcttatggtcgcacatgattactcagaagacaaccactaagcaaactccattccctctagcttatggctatgaggggatgttgcatggagagccaatgctaccatctcacaggaggacaacctatgaccagatacaaacaatatcctactggaagaatcccttgacaaaatagaagaaagaagagatcaagccacgctaaagctacttgcctaccagcaaaagtcgcaaggcactttaacaaacaagttaaggataggaaattcttcataagagacctagtgctacgaagattgttcctaaacacaaccaatccaacactaggagtgtttggacccaactgggaaggccgctatcaagttttaaacataactattaagggagccaacaagatgggaatgtataacaagaacatggagctcgttctcctaccaagatattggaatggagagcagctgcacaaatactaccagtaaactgcttacagaattttactttgcagtagtaaccaactcttcattagagtaaaaaagaggtagtacccacagccttttagcgtgactgcccaacattcttcaaaggtggcctctacttcgcatgtcaagtaggggttgccatttgatatctacaaccatacttcttattatgtaggcttgtagattcaatttatgtaagttgcacggtaacaaaggcgaattaatgaataaaaagcaatgtttatgttcaaatatgttttgtctaaaccacttgctaataagattaacttcttaaagttattgtttttttagttcctcatacgtacaagaggtagcacccaatgaaaattcccaagcaaggtctatgaaactttggttaattacaattgactaagagactgtaaatctacatactcacttggggggcaccaacaacatacaatgcatcgaactagcatagagaacttatccagaaaaattttaatgcttagtataatttactaaacctgcctctaagttaggtgcatgcatactttagcttggcataaaataagtaaatccagatacttacgtgtcaagccaataagaagatagctaggattaaagaccgccgggttggtcacatatccataataaaaagcttcagggctaaatagtagtaatatttaaaaacagagtgcctataggccacaagtatgaaaaggaaagccttaaggatgaaaataagtagtgttcataagtgaaaggctaataggccatgtggaatatgaaataaaatgtctatgctaatgaaatcataaattgaaatactaatattctaaaggtacatatgtggaggtggaggtaggtctgatacagaagatgtagagtccagatcgctggagtgcgggtcagccatagcctctataggctggccggccacctggtcaaagtcctagctagccacctcctcagggggtagaccatctccttatcaaactaccccgaggacgatccttctggctagactgcaatctgctcagcttcaaacctgctctcaaatagttctttcccttgggccaatgtgcactcaaggaatgcagcattccccatataagaaagatcaactctggggttgtgcaacttgaactcgtacatgagcttctagacaagatgatgtactcgtcctttatggcctgctggcaatcgagggtagcctttagcttctcctcacacctcctgagtttagtccctaacctggagttgtcagcagcgagcaagttgttctcttaattcttggtgtagaccatgagctctaaactagaaatcatgtcccagtttggtagggcaagagcttccaaatcagtcataaccttacccctcgccaggagatcagcctctagggtctttactttctcttagagagtactcgaggagcccttgagtttccatgccaaaagctaagcttcataaagtcctgaaaacaaaacaaggtcaagattagtgctagaagaaaacactggccggccagtgcctctatggtgcaaccaaggctggctagcctctcaaagacactacaatggctggccagcttcatacaatagcccctatggccaaccagcttacaatcacataaaaaagtgagcaaagttaaatgtgcaactatctgaggccatctcttgaagaccgatagaagagagcctctttaacttgccatcacgaagctcctactgctcgttatccacagtagtaaaggctttgtccaaagacctacaaactacctccatggctctctgccccatggctaaacctactctcgactatgcttttaggcaccccttcccgaaggtcgatccatcctcaacggagggtcatctatcatggtatgcccagctgccgcaggcccagtaggagaaggaggaagagatgaccccgcagcatcaccaaaataggtggttgggaccaccttggccctcgagtaagctgaaggctcatctaaaggtccaccagctaaacctttgaatttggaagacatatctgcaagaagaaagtaacaaagttagaat

SEQ ID NO: 391226 - DNA, 737 bp, Cannabis indica
aattcgacgaagggttttatttaaactcattatatcttttcaactaattttaattctaagcctaaccctagaaaaaactctataaatagaagatgatggtttttgaattcagtagactctaataacctatctcttgttagaaaaaattgtaatcaagaaaattcttttattccctgtagaatttctaaattctttgcctttactttcttaaattttcgagtgttagctgttttagaattgctcgcacaatttaagacgtggaagattgtgaaaaaaggtgtatttcaaagaataatctaggtttagtatacgttaaacctctgcaatagaaagaaacaagagttagaatattgaagggaaggagtcttatattccgctgcaaccaatataaggttttctacaacttttacatgtttattttatcgtttttagaaatttcatatttaaaatgtaagattatatatataatcaaacataaatgtttataaatcaagatcatgttaaaataatttctaacagacctactcttaggggaggggtgggggaggtgactgtctaacatactttaggggtagttacctatcttacacttggggataataacccaccctaagagggtggttgctcaaaccccttggggtacttatgcaccctaggggtggtcaattttttcggggaccgtcgctaaaaaaattaagtaactatttaaagtcgtcaggaaaaatttagtattcctg

SEQ ID NO: 391227 - DNA, 799 bp, Cannabis indica
aaaaaaaaaaaaaaaaacttcagccacgtttgtgtatagtgtagttggtttttttgttcaattttgttgtagttcgttttgatcattttttttttgaaaaaaaaaatctattttctcttttatttatccctcctaattgattttttttccttttttttttctattaattttcatttaattttcttttttcatggctatagctcgatttaagtcttccttgcttgtaattaaaaaaactctaaaaaaaaaacctaaatctaccttaccccgacgtcaatagggaaaaagaattttctctcctagtcctacttctcccgttcattccaaacgtaagttagtggctgattctccttctaagaggaattctaaacgacatcaatctatgttggaagattatgattctgattttgaccttgaagatgagtttattgaaatagctaaagttgccaaagtaaggtgtttgtttttgtatttttttagaatttttgtgttatatttttaaagttgtatattattgtgttttagtttttcaattatatttgaatagtgtattgtttttatttttatttgtatgtgtttggtgttttcaaataatttatattttctttaacagttgtatttttttctttttttgtttgacttgttttttttgtagggcaagggaaaattccctactgtcaatattcctcgtgatgttgttctagaggagattcttggtgaaatggttgttaaggtttgtgtactttttttttttaaaattatttcttttattgttttttgttttttttttttgtataaa

SEQ ID NO: 391228 - DNA, 979 bp, Cannabis indica
agagagagagagagagttagagagagacaaagcaccatatagaagagatgaggtcttaaaagttctatgttgataagaaagagtcaaactcattaacccaagacctccatcatcttgttacaattttatcatctgagctttacactaaatatgatcgctttctcatgaagattatcacgctaagcttatccaaaaaggtaatcaaaggacaatacttcaacttttgttatattgagtttctctctttctactagaagcttattttttttttcacatcatttcattccatgtacttatttttttatttcattacagtgttacatttatgacaactcatatacacatcattattactagggaagatgaataacatgtggcgttatgtgactttattagaattaaagtatatgatttttggtataaggtatgttttttaaacttacttttataagaatgttatatatataacccttaactacttagagtaaatttagaataatattgatgtaatatataaggatgcatacatggagggaaattgttggagagtgctcccctagtccccatcccaacttattccgtataagcataaggtggggagtctccttatctagaaatgaattttgttttaaaaatttaaatgtataataatattaaattacataaaaattaaaatattacacattatttattattcgatgtaccaattattataaaaaacataaaaaattatgaaaatgatacgcattgttgacctcaaatttagccaaccgatagcagagtcatatttacaatgatgcttgtcacatgttacacaattagaacatgaaagtaaaagaacacaaggatttttatagagatttgcccccctgagttagtgagtaataacccacaccctatttaattagatgtagtgataacgagagacaatagtattccaatcactataggtgggatctaatatagctctcttaaggtt

SEQ ID NO: 391229 - DNA, 1314 bp, Cannabis indica
actcttgacttgttgttatttgacaacgtcaatactcactgcgaccttagatctatgaaggaaattggaagaacagcaagtaccagaaatttaatgaaaaataaagaaataaaaaaaaagataacactagatttttttttttggttttttaacaaatcgttttgtttaatcaataacctatgtcctgttttgagcttcaacaattcatatcaaatcagcaaatacaacctccttttccgacaaaagaaacttatagaagttcaatcactagctgtttaagtgtccaatcttaacgttgagtcgccttaaccaaattgagtgaagtaccatatgagtcacatcaaatggctgagctggtctattcaacacaaaatgcctcttcacctgagaaacttgattatataattttaagtacttctcatttggaatagcacttaagatgctcttaagtttttgtatttttgagggtctgatttgtatggtaaattggctccaatcaagtacatcactaaaaggcaatgagtaactatcacagattatcactgggacacaccctgcattgattgcctccaccactcttggactagccacttcgtatccactcgggcacaagcaatacttacttctgcccattaactttgtgtagttttggcctctttgaagcttctcatgtacctgaatatcattgtctttgtctttccattcttggaataagatctttctaatatacccgtggagtctaccaacaaagaaggccaatatcgtgcggttctgtgggacttgccccaaatctggtgggctcaaggtacttctcaaattgatttcaggtaatgagacatctcttttgggttgaaatccttctgagatgttggcattacataaaactctgatgaaatactggaagagtttaggtttctcatgtgatatttctggcgcctaaaattttgatagagaaaatacatcattaactacaattggaccattaatttgacccatcagtgatttatatcatgcatgctgaaatgacatttgaataatattcatgaagacactctacatgcaccgtaattattacagaaaacaatgttcactttgctacttcaagatatatgatcagtatattcaattcacaaatgatcgacaagactatacccacattcattctccaatattattaatacaaggtggtctactttaacaaatgaaatgttaaagtagagtatgcatgtgctcatatatatatatatctatatatattattagtagccatattgagttactcacccaatcgtggcaggaaagcatgaaatgatc

SEQ ID NO: 391230 - DNA, 1929 bp, Cannabis indica
aaaaaaaaaattgtaatatgtgtaaactgctcatacagtcatactacacttgtggtgcaagtgcagtttagaaaattacttaaaatgtatatgcaagtgatacaaaatgtttgcaaaacaccaaaactgtaccgctgcacaatcacctctagaatcaagattccaacatcctactcctaattattaatagagtaaattacttttactcaatctcatagtcatagtttgtaactttggttcaaaatagttacctaaaaccagatttaaattaaaatattttgaacaaatttaagaattacaaagtcaagaaaaagtacttccaaaacatataatcatttttttttaacaaagaatcttttgagtaaatatgaagagtctaaaatggtatcatacgaattttgttttaaatctcttatatttatttgaatgcatcctcagtacctaaacatcatgtatatatatggccggcctattgttaatgatacattgttgatatacactacgtttaaatatatagtttgataggctagcaagaccggagttgtgcttacacgaaacagacacgagtccgagaggcacgagcacgatccgataacaaaaattatgtgttaatttaggcacgacatggcatgacatgaaaagtattagacttaggcacgacacgacacaaaaaatatgagtttatgtacgataaggcaaggcaagtctgaaagcatgacacgtgataagtcggtattttttcttataaatataaccaatttatgtattaatattcttaaattgatttttcaaagtattgattagtgtgattataatttattagactattttaaagactaatcatgcatttggagtcattaatttggatagattttagcacattttaatgaaaaatagtggaagtcaaggagctcgattttacaaggcaaaacttattgtaaatttcgacgaccttggaagcagattgaacatgaaaattttagatctcgttcttagctttccggaacatcttcaatcatccaattctgagttgtattgaagaagtcatgaccaatatacaaatctgaacacgcgacaaaaaatttcggcaacaagtcatggccgcggcgagcacttcccttcgctgcgagagcatgattctaatttttttttcaaattttatctttcttttttttaaatcataggatttttaggagtatttataggacttatagggttcgtttttagcaacttttagactgcatttttgaggaagaaacccataacaaatggagaagagggagattacatcactaattattcatcaagttcttttcttcccccaaatttctttaatttttaattaattatgattatgtttatgattatagttgtgattatagagtagtttctttttagttaagcgtaagttatttcaaaatcctaaaacatgaatttttgattgttaataatggatgttattctagatttctctcatattaaattgtttctattcttgaatattgtgaattcttattaggtgtacaactaattaagatttttcattattatactattatcttagaattacttctcacctaatagtttaggattttaaataaagtgataatttgcaattataatagtaatgtcaaatgtatcattgattgtgatgaaaaatagaatctaagttaaatgaattatatgctctattgatttgttaaataaattaacttatctccatagaaattaataattttcttagtttaaatagattgcatgtttcgtggatctattgcttaataaaaaagatttaattattaagcatttcaccttgatgattaattgtaataggaagattcgaaaaattgattgcttagcgctttttgtggagttaataatttaattgggaaatcagaataatttttattattattgatattgaatgat

SEQ ID NO: 391231 - DNA, 1590 bp, Cannabis indica
tgcaacgaaactctcaaagaaagtaggaaggaaggaggttactgaggcggtacaggatggttcgatggaaagaattgctgaaatagaagccctggagctttctcatgaggatgcggcgagagacgatgaccctgctccaatcgatatattccaacctctctcaccaaaatcgtctctggatgcgattaagaggcaggaggatgttcgaaatgactttgcacacttcattcaagcaaacaaccaatgcaacagtgatattgcagctggtaagaaatcgattcctcctattctgaggtctaattctattgttcgaaacctagagaattcttttaagcatgttaatcagaatgtgaacaaagtgagaattacaatggatgacattgaagatgaaattcatttttggaaatcatccatagtatgctatgtgttaggggtgaatcccccactccatgttttggatggatttgtgcacaggatttggcaggggaaagttgatcgagtgaaaatgctgtcttatggcatctttattattcgatttcactctcttgaggacagggatcaggtcttaaatggtgggtacattttttcaatagaagaccggtgattatgaaaccttgggacccaaatgaaaactataaaaaagaagatgttcaaaaggtaccagtttgggtacagctggaggaattggaattgaagtattggggtcagaaatcactcttcaagattgtagctcaagttggaaacccgattatggtggatagtgtaactagggaaagagagagacagaattaccctagaattttagttgaggttcaaatggaccaaaatctgccagatctattggagtttgagaatgagtttggcacgaacacttcggtagggattaaatacgaatggaagcctatctcttgtacacattgttcaggtgttgggcatgcggctgcagagtgtaaaaagaatagcaatgggaagcagaagtggattgttaagagttacaaaagacaacaacctcaagtggatgaggaaggttttactaaagtgcaaagcaagaagaatagtgttagtcgagagtctacagggactaaagatgctggtgctggtgtgactattaacactgaagtgggaaatatgttccaggtgcttgaggaagaggaattggttactgatgcaaatgttcatgaacaagctgatgttttgtgcaagacatgagggggggagatccctctctgtctaatggataaattgttagcctggaatgttcggggagccaacagtcaacataagcaacaaatgataaagcaatttatcaattctcagaaagttgattttgtaggtctccttgaaataagagttaaggcttcgaaacttggagccttatacttgaatgtgtttgtaaattggtgtttttcttccaatatagcatggcatgcaggtggtaagaatgtcatcgcttggaatcctgatcgatttactgttgacatccttaaatgcactagtcaactaatgcatttaaggctgacaacaactgaaggatttaatagtctcttgactgtggtttatgcatcaaacaatagaactgaaagaagagtc

SEQ ID NO: 391232 - DNA, 989 bp, Cannabis indica
tctttacaagaaaacaaaaagtgcaagagtagcaagataattaaacgactaaaaaggatcatacagcttaaatttgttatcaaaaggtaaatcaatttttattttgtagagttatttgcagcaaaacttttccaactctcatttcactttcaaataaccatccaatctcaaattttatggaaaaactctccaaaatattgttctatttgtatttttaaggtgttgtctccctatctacgttaaatccttattttacttacgtgacaaatcatctaaaaattattctttgtagtcatatttttcaaaactaaaaattattaataaataattaaaatcaaaataaaataaaaaatttaaaacataaatattttttcttcttctctctcctccctcaatcctcctctctctctccttttcattcatcacactctctcaattaccaactctcatgttaccaccaccacctaaaccattaaaacctccgccatgacctatatttcaaatcattaataataataattaaaaaaaaaaagaacactacttctgatctaaaataaaaatacaaaacttacaaattccctaagcagattcataattcaaatccatatttgcgtatattccccttataagttaaaactaagttactaattaatttgcctaaaatctttcttctcccgacttaattgaaatgtttttgtattgtaggtaaggtttgatttattaagtgttttcacttacatagttgcttcatgttgtaagtaagttgaaaatgcaagatggatcactgaggattggagtctacctacccaaatgtaagtgtgacccaactatagagttgttagagtattttggaaaaaattgtgttttgtttaaagttcaataagttagattttttggttcactctgaataattatttttgggatgtgtaatattttaatattaatattttaagtatagacatactttcaattttttttttctaatttat

SEQ ID NO: 391233 - DNA, 1113 bp, Cannabis indica
caagagtactgtcaacaattcgaagctctgactgtatcgatcggagctgtcgtagagcctccgctgggataagccatcatgaagaggctgaacgaagaaattcagggcaccctgcgattactcgaacccatcagcttagagaagacgatggagatggctgaggttgttgaagcaaacccaaaagtggttcgagccttttgtgttgggccgaataaatgtggaggcccaattaagagttatggggtcactaatatggttgggtcaactaatagtaaccctaataggccatgaaattggcccaattctaagggactaagttcaaacccaaacagtcatcctcaagggatttacaatcgtttcccttcgactacaatggccaaagatgcaccaaaaacatatcgacgtatgacagaaacagaagtccaaaaaaaaaggactagggggtgtgctacaagtgtgatggtccttggacttgtggtcaccaatgtaaggctcttaaattacaaataattttggtccaagatgattttgaagaattaaaagaaatgctagccatggatgaatcaaagggtgccgaggtggaaggtttaaaggaggcgcaagtggtggaggtctctttgaattcggtggtagatttaacaaaacatgaaattaatggggagtgtctatggtcaagaggttactgttctaattgacaatggagctactcataatttcatagcttcttcgttggtggccaaacataataatcacgcctcgcctactaactcttatggagtgcaaatgggaattggagaagcagtgaagggaacaggaatttgtgtagggggacccttcaatcagtagatattgtggaaggctttctacccctagccttgggaagcactaatgtgattttgggagtctagtggttggaaagcttaggagaaacgtatcaccaatggaaagaaggggtgatgcgattcaaagtggggggcagaacagtggagttgcgaggagatccgaccctccataagactcgggtctccctcaaaacaatggttaaaactaagggtgttcataaaatagtcgatctaatccaatctaattcgtaaagtgcggatatccgcactt

SEQ ID NO: 391234 - DNA, 849 bp, Cannabis indica
aatgggtgcatcgacaccattaagggaaaccaacggagcgcgagaaactgttaaacatatcaacctgagtcgtgtatatggttagggaagaagcacccgaagcacttgggtcagaggacatgatggacacaaaggttatactggagggacacaaagacgaattagatccaagagtcagacttgagcagaatttagaaccactggagaaaattaaggaagtgagcatctacaaagaagaccctactaaaaccattagggtaggaaagcaccttccccccaccataaaagaagatgtaatcaacatagttaaggaaaatcaagatgtactagcatggagtcattataacatgactagaattgattataataccattttccatgctttcaacatctatgaagatgcaacaccggtccgtcagaaaaggagacctctaaatcctgtcagatctgatgctataaaaacagaggttgtcaagttgattgccagtgatttcctgcgggagtcattatacctaatatggcttgcaaaccaagttctggttccgaaacccaacaccacatggaggaggtgtataaatgtaatacccagaattaagaaatggattagcaaaaccctaattggataattatgaataattgaggaattatattattatatagttcaatatatgtgattttatatgaaatttattatgttagagaccacgatggtgagctaggggcattttggtaattatgacccgagaagggtaaattgatgaaattaatttaattacgtgcttaatagaactatattattatgtagtatgcctgtgttgttttttcaggtgtgttctgacaggttggcgc

SEQ ID NO: 391235 - DNA, 561 bp, Cannabis indica
cataatattaaatatatgttgcacgtacttcattgaattaatttattagagtaattactctaatcctaacaatttaacttttccaccgagcccaaattaacatatatagggttgtcctgcttatttatagtgattattatctcttctatatggtgtatttggtaatgattagtactataaatattattaatttaattatgtatgatttttgtttgtttgatctctgcacagggaatgttatctccttcggcctgtttctttccccagtgtaactctctctctttctctaattaagatagttttgttcgtattctgttatatatttaatcattaattaattaattaaattgaattacgaatagtgtacttattgcatgttaaattagagcccacgcatattagatcacgtccagatatccgccaatactactcacctaacctttttcaatagaatgaaataagttaaacacttacaattaccaaactcttgccatatttatggaaagagtttatgattaggcaagatatattatgagtaatttcaaaaaaaaaaaaaaacaa

SEQ ID NO: 391236 - DNA, 482 bp, Cannabis indica
tttctctttttgtgtccaccattcaactactaataccccactattcccaccaccactatcccactattcccactattcccaccaccactactactattatcctaaatcaaataaaaacttaaaaaaaaaaaaatactagatttgaaattttcttcacaaatctaaacccttaaacagaaacaaaaatccataattgattatgcatctgaaattgcataagcaaaccaaaatacgaaaaaaaaaaaaaaacagatctaaaagcccaaaccacttgagctccacctgagctgtcgttggcaaaaaagatggcttgccatcattggcgggaagagagagagactggttgagtgagagagaaggcgtggggtcctagatccgccattaaagcaagcgatctgagttcttacattcttgaatttcttggtccgtgcatttgtggagaaatgaagaagaagaaaataagaagaagaaaagaaaaaaaa

SEQ ID NO: 391237 - DNA, 699 bp, Cannabis indica
aatttttaattttttttttaaaaaaaaaaaaaggtgggttaaaaatattaccttcattcttcaatttataattgttataagtttccaaacaattatattatggctttattattttaatttatcaaattattttgaatgtctcctacaaaacacctattaaaacaaatctgtaagcatcaaatctaatggtgcatttaatggttttttatatattaataaatattgatttcttcaaccaattatataactatactatatatatatataaatattatataacgtattgtattgaaaccaaggtagtcggtgagtattcaagggaaatacatttcaaatgggcttttaaagtatatatgtataatagaaaaaaataacaagaaattatagtattttagatgaattgttagaacaatataattgatacagatagaaattgaacatgagatctgtatcatgtttcacatatataaacttttaaattgtatttaaattatataatttagagttggcgacaacattaaagaaattattgaaaaataatgatcaaagttttgattgtctcgaagcctctccttaaggaaatttgattttcaatacttaaaaatccttaatattttattcttaaaccaatacatttcaaactaaaaaaatatgacacttttatctaaaaccaaaagggaaatttgaatttttatactt

SEQ ID NO: 391238 - DNA, 1877 bp, Cannabis indica
tggaggaacgcataggagatgttagcacaggactgagtgaggagatagttttgaagttaatgaaacagcgcaaatatgaacctattccagtagaagccggaccagatcccgaaccatgctgcatctgccaggtactagtttttcaagtgttccctatcattaggaaatagaaagaagaaaagatgcatacattaccatatctcctcttagaaccatttcatttaagctcaagtttatttataacaggaggaatacgctgatggagacgatgttggagccctcgactgtggacatgatttccatactgactgcgtcaaacaatggcttatgcagaagaacctgtgtcctatctgtaaaacaacaggcttgctaacgtgaaggaagggagaaagccacccaaagctcttaatcatagtattttaagtttctctatagctacatttatcaattggttcccaaaataatctatttatgaaacttttcacttgaaacttgttgtagttacatttatctgcctggtttcaggaaaagattatagtggggtatgggaaaggaacaaaaaaaaaaacaaaaaaattggtagaaacctttaaatttggttaatggatttagcaatgtataattttaaatcatggtgactataagaatacattggagtaatatttgtgaagtcgttgaaaacttctattatgattactacttatttgtcactattgattgactttgttacaggagaattgaaaaagaggagtgctaccctaaacttcttgttacaatctcttactcaatttctacatctgaaaatatgtattggaatatatttttttttatgagagtattcgttatgcttacaacattattcagaaaaatatttgaatttttttaaaaatttacagcgatgatattgtaattataaggaatacggttgtgaaaaaaaaattttaaaaaatattttaaaatgtaattttggacgtgaaggttgactaaggagttgtaattagcattgaaaaatattcttgactcctaattgaagttgtattctgttgcataaaaaatagtttaggatttcttgaaataatactgataatagttttcatcgattttgctagcttatcatatatatgatggttttttaggtacttttttgggtggatgtatgatttttttgttgctagatgtataccacaaatgaaaaatttgattggatgatatcccatgttatattttcacacacgtattcattattttcatagatgagtcttaggctacttttttcagatagtattagatttcatgaaaatttacataaattattcaaattttttatacatttatgattttttttttttaatatttttatggtgtccatgaaaataataaaaagataatattcaaacataaaaaatatacaaataataaaaacttaataataaaataataaaagtacaatataaatgaatatattttatgtaaataaaatttcaaaaaattgtaaaaaatatttaaaattttatataactgtatttttgtaattattttgttatttttgtgttttctagaaataattcttaaaattagtatgtactctaataaactttttaaaaaatatgtaccgcaatgaaaatgttttatatgaacatgaaaatatgcaatatatatggaatgtattctgtgatgtaatataaattttgttttgttttttctttttgattttttttttttttattttgtattaagttggaatgtattttaaattcggtttgatattattctggttttcaatcgttaaatgaatttagccttgctcaaatgattatggagaccactaatgctattgctacccatgcaaaataaattcatatgtatatgtagaagta

SEQ ID NO: 391239 - DNA, 892 bp, Cannabis indica
ataaatcactcaattctatctagaacaaacaaaaccaaatggttagttcggttcccacatcactccttagtgatgaatccaaatgttgttaaccccaaaatttagcatagctaatccgcagggttagttaatgattaatccaggagattagcgagattagccttcaaagttagctacgagtgtactcactcggtatgcacagcccaagagctactcgaaacttatcgattagaagtcaacttgggcgcccattagggctttaaagtgcacgagtgtcgtttctcgtagacttctcttgaaagtatgaaacttggctctggcatgtctctcatgtattctaggccaatgactgagcaaatcgcccatatgaagttgttaagaaccaaaattaatgcgagacgacgcatatgatgtcaacctgggttcccaatactagtattggacccaggttgagctctaggatgtccacatcacatccccaactccatggttcatcgttttagggtcactaggacatgttcgcttaaactttgtcaaaggatagcacccagaaatgacttcgttgaatctcgattggcgccctctgatgtcaactagggtaccaacacagttaccaatgcctaagttgaccaccctagtctttttggaggtagggcccaagattgtttccttcttgccatgtgtcaaaagtggtgtccatgtcatcaggtcaaatttctgagtaaacagttatcaaatataattgtccttgtaattaatttttagtccaagtaagagattgttgaattatttttaatatcccaatgtgtatggcttacaaattgtgacagtcagtagtctcgtgatcagtaaagggaaataccgggtaaactgtgcaatcccacaccgcctg

SEQ ID NO: 391240 - DNA, 1301 bp, Cannabis indica
gtaggaaaaagaaaaacagtttttccaaatgtaactatctaattaggttttgtctagataattctcataccatacataattatcaaataaattttaatcacttctaactcaattatttggtcgtgatgaaattaatcagttgaagtgcttaaacaaaatttaattaattacccaacaaatagatgtgacaaagaatgttctatttaaaagattttttttttcattatttattattttattaatttaatcttcttattgtgacatcttaaccaatatgtcggactaatataaacgagaaaaaaaaaaatcactaaattttgaaaaaagcataaaactggcacaggtaaagttaaacatttaatcgtttgaagattactactcaacttaatatgaaattatgtcttttatttttattattatttcaaaaaaataaattatagttgttgttaagacttgaaaaaggaaagattccttgaactataaggtttctgtttttagaactttttaattagtttgtattaaattggaaatttgtgaccacttgtttttgatttccatcacacattttttatttatttaattaattaattgatatatgagataaaatgagataatgaaaggtcttcttcaccaaatattagctgctgaaatgaagtgagttcttgtcattaagatttggatatcattaaattaagtttgtgaatcaattacatatggtatcataaatatttatttattgattaaaaaaaatatatttaaggttcaccttaattaatatgtagatggattatgatctgaacattagaactaggtacacaatattgatgtgaacatttataatatatagtgatcatgtttaactatctaagctcatatttcattatcaaatatatattatataaacattttgaaaaataaaaaaaattagacacaatgtcattgagaaagatcaagaatattgaattattaattcccattgaagacttttttttccttatactaataataaaaattatgtctagtttgaataaatttttataaatacaaatacatgggaacaactaaagacaaactcgataattaagtattagaaaaatagacttaaaatttaattgaaagacaaaactattatgtatatttataatcaaatctttttcatgtttcaaaaaacccaagctaattttctaagtctgaaaatgatctcatgaactctagaatgtatacttcaactaatgataatgaaatctctaattaattaatggagtgttttaaaaatatattttttatgatttatttataat

SEQ ID NO: 391241 - DNA, 1706 bp, Cannabis indica
cttaagttgaggactccaatcagcttttaagaatttttcaatgcccatcctattaaggaacatctcttccttaggtgaaatcttattcaaactcgacctcttaatgatttaaacaccattggagatggtagaaaaattttctaccaatgatgctacataatttgttttaaatttatgtatattttgctgacaattgtcgtagattaactaacttcacctatttagagtagatctaagttagcaaaaatatattattattcaacgtattaaatagtgtaatattttttaaaaaaattacctcttaaatttttaatagttgttgaagttactatcacaataacaagaccattatccatctcgtacaatgttggttcaaacatcttctccaaatctctccacaaagtattcttcgatgtgaccacactataaataaaaaataaaaataaataaataaaaagtgaaataaagtatataatcaaacataatataatatgtttataggttaaataaaaaaattaaaacatatactaccaaatatatcattaattatcttaaacttactaatctgttagaatggtgatatctcattttttctaaccacttctaacaatttcaatataacccacaccatataggcacgcaacaacatctaaagaaatataacattattattttagtatttaaagatattaagttcaaatacttcaataacaaagataaaaaaaagatacctaaaagtactttattattattaacacgcaaagcaatcaaattttgagttataaattagaatctaaatcgtttcttcctctaacttcacgagagaagttccaaccacaaaagtaatcttatactcattgaaaagttgtctatattctcctgtgctttctacaacctttaaactcttgacactacacaaggagccttaacatagtaagttcttaaacctagaaactaaggtttttgtgatagtgccatgcataagattttcctataacaaaaacagtgttcaataagtataatgtaattggatgaaaaaaaaaaaaaaaaaaaaaaaatctataaattaatattacaattacctgtccatcaataaaagttaggttgaggtgaatctattctccattcttctaagtattaagagattctcacattcgacataccctaacttttatcatctgactctctaatttattatttaggtcaataagaaaagagtactccatgaagcacactgtacacaatctaaataggattattttttttttgtggtaaaatatatagtcggtatcaaatggaagacaatataacaatccttaaatagttgatggtatgaaaaagtgtaccttctaaaatgactttttatggcattaacaaaaataattaattgtagaatcattaagaatgtatttcaaaagacattgaagacatgaaaaatgactaataatgtgttatcccaatttttacctacttggtgtggcatgtccacacaggaaaggctgaggccacagaacacaccttgttaatagatgagaaaaatcaccttgcacaacatgtcaataaataagagttccaaataatcaagcaagaccaagttgaaggtgttggaaatattttaccaggatctatttactatcatgtatgttagattaacaacctaatatgaattctaaaacaataaaaataaacacatataaagttagaaa

SEQ ID NO: 391242 - DNA, 935 bp, Cannabis indica
ttttacttttttagaaaatataaagctcattttattatttaataagttagatggtctaattaataacttttgtaaaatcatatttactttacaaaaaattataataaatattataattattatatccaaacaagaagttaaaactgtaaaagtagtagctaaaaatatgatgatggatggagggaaattaaactatctcccaccaaaaccataaagtttttacacgtgtgtttactgtttaaaacaaaataattactgtttgaaaacagtgaaagaggggtgaaactaacaagagtaaaagcttttggagttttgactcttaaaaataaataaaaatacaaaaaagtgggggcctaataataatagtttcttcaaagtacgtgaattaacacactactctagggccttagtaggggaacccatgatgtcgaccattgatttttatacctattttttctaccatcacacacatatatatattatatattatattatgcatgtacatgacacatatgacatgatcatcatcacaatgataatgatatatatatataaaaagtatatgaaagaagctgacatatatatctgcccccacttcttctgacacctgtccttttgataacgacatgattctacaaaaaaattgagtttgtataacaacaactgaacaacactgtatattgactattgacccttctgattcatcttcttttttttttttttttttttttgtaataagtaatcaacttcattaactcaagagcaatcgctcaaaagtacaacttcaagttccgaagggacattatccctcgtgaacatacgatcagcaaacaatcgagactgacgtgccataacatgtgcagctcgattagcagaacgtttaacaaaccttaacgaaacattattcatagagtctaacaaagacttacaatctt

SEQ ID NO: 391243 - DNA, 1962 bp, Cannabis indica
aataagggttcggaccctaacaaatgagggaagtattatcgattctctgtccttttacattctaaagcaatatcaaccctatatgtattattaatttataattagtttaaataataaataacactatacttagatacaattttgcattgtattaattgttaggattataattttaatacaatacgagtcgtattacttaatacataacaaataatctgtattagtttttgtattataatatttagaaaaggtctgagattagggacctggaggtcgaggtcctaaatctgaatcctagacgcagatccggacttagacctggacgcgaatcctgaattcggactcggactcggacttggacccgaatcctagagctagatttgatgaactcagacctaaacccaaaccccgatccgaatcccagacccgaaccccaatctgggactggggtctaagttcgacatgaggtttttggcttggggtcggagatgggatctgagtctagggccagagttaaggttgggattgaatttatgataaaaataatataattttatacagcatattaatataagtcaatactaaacatagttacattaaataatataaatacaattcaatacaacataatacaatataatacggtgtactaaatcagccaattaataataatgataataatatataagagtacatatagttttggcaaagtctagactatagagtatatgtattaattgaaatgagcccacaccacacactatagggccgtgtgtgtgacaaccacaagccataaaatagttatgtgatttgatattgatgttactttgcttgccctttcaaaagagttacatcaaaattaatttattattattaagtttatcttaatacgatgcgcttcatattgagaaaaggatattcttaataaaatccttacaaaaaaaaaaagtcattcttttgtaaattgggtgaattctatcaaactatttctcacttgttttttaacctttaacactttgtcatttattttctttaaaaaaaagagtaataaataaagaaaagaaggagtttaggggagtgtgacaaattgagaagcatccaaaaacagcagcccacgtgatattatcacctaattccccttcgaatattggaaccaaatactaaaatataataatagaatattcattactatgggcaactaatttttcatttgttttttttttttgtttttaatgaaatggtggcacatatatacaatcaagattcatatattttaattttaaataatatatataagatgtgttacttaattataacaatcaatttgtggtaaaaaaaattgaaaaaattctaccatcaatctcttatattataagtttttaattaatttttgtgttcgaaaatatatattagaatttttttttttcataacagcttttgttatactcacaatattatttatgtaaatttttgaaattttttaaataatttagagtgtctaaaaataagtttaaatttttttgaaacatgtaagataaattgaaatattaagaattttatttttaatattgtaaattatttaaaattttacaaaaataatattgtaactataataaatactgttataaaaaattaaaagaatatttcaataagtgattttgggtttggaaattgactaaaaaattataattagtaatactaacaaaaggtaagtagttagtttagtttgtagcacttaatttttatgtaaaatatttaggggcaaatcttcttatcgttaagaatttattacaatgtaatcatcaatgataaattaaattttaaacttagctaaaaagaggagtgctaccgtcaactttctattataaccttttagtcaatctctacacccgaaaacatatgtcagaatatttttttttcaaatttttttcacgggggtgttcgttatgcttacaatatcat

SEQ ID NO: 391244 - DNA, 1030 bp, Cannabis indica
gaagggactgctggtatgttatgagcatcaggagttattatgcatgttgtgttatcaataagactttttgttgtgtgaagatgtgtatgaatgatatcttttggtgattgattgtcaccagggatggttgctggtgtgagaagggcaccggtttcatttgtagtattttggttaatttcagtagtaagtgttggtgtttgaagagcaccagaagtagtagttggtatgtgattgataccagatgtagttgctggtatgggtgtggtgactcgagtgagttgctcaaaaataggtgtgatgatttgttgaaaaaaatgatctatgttagtaggggaagtatgaccatttagagggaatatgttctcatggaagatgacatctcgagagtggtatatttgtttagtttcaatgtcaagcaaggtgtatgctttcataccttgaggacaaccaatacaaactgaggcacgacttcttggtgaaaatttgtgcaaactggaagggagagtaaaagcataggctaagcacccaaaactttgaagatgtcataaatgggtggtttattgtgaagtatttcataggaacttttgccttgaaaaagagcagagggagtcctattcatgagatacgtggccatgcctatgagatatgactagtatggaagtggtaaatgtgattggaaacacaatgctctagcaatatttaaaatatgttggtgttttctttccacaatagagttttgttgtggttgttcaacacatgaatggtaatggataatgcctttggatgcatagaaggattgcatattaagttccttggcattatcagatcgaattgctttgatatttttagagtattgtgtgcaaaccatgctatagaacatagggatgacagattgtactttagatttggttttgagcataaaagtcaaagtaaatcgagatttatcatcaacaattgtgagaaaatatttgtatccttcaatgcttattatgttgaaggggctccaaatgtccatatgaattaaatcaaa

SEQ ID NO: 391245 - DNA, 697 bp, Cannabis indica
gacttgcttccagaaacggtttttcaatagcggaaggctctatggtcatggagttgggatacattcttggaaggacctgtctaaatggactttgcccactttatcttcgctcagtggcctattaatgggcctttaatgtaaacctgaatttaacatgctaaattcggaaacgcaaataacaatactatctaataccacttgagatagcatacccttattaatatatttaatattagatctcatatattttaatttaataattatgactaaaaattattaaccaatttttatactccacctcatggtggtattgtcaacaatattctaatttccaactttttaggtactttttaattgaatttcttgtagtcattgaatataatcttgtaagagtcacttgtgttatgattgcaaagtaacactttagctatttttctatatagttaaccaaattttatttacaattctaatacacattcaacaattcactagacatatattatgttttaaaaataacttgactaagtacttccgaaaagaaaaaaaaaatagcttaattatacttattttacatttaaaagttatccaaaataaccttaaaacaaattttaacttataaaattgtcatatttttaagggtaaattgcagcataaatagctaatattttaaattttacttaaatactttatctttatt

SEQ ID NO: 391246 - DNA, 1291 bp, Cannabis indica
gagcagccgcacctgtagagtctcagatggaggtcgatgaagtggattgttgctgaaagttgcaataatatgcagcagatttggcccaaagttgtgttggtgagaggcctggtttgccgtgaataaagttgttcctgtcagtccataaaaaccacatagtgcagagtagttgttccatttccgaagtagatttaagggtagaaagcagcatcaaagaatcatcaaatctcattcgagaaaccagatcaaaatcaagagaaaaaccagccacacgccaaacctttttagcatgtttgcatagaaacaaagcatgctcaaccgattcccaggcattcgagcaaaggctacatgctgcagaatctataatcttgcgcttgcacagagcagcagcagtgggaatggcacaatgagaagctttctaaacaaagattttaaccttggatggaagttgcaggttccaaaagtatttccaccaagtatgctggttattagaagagttagagagctcagaatcttcaaggtcatttgcaagatgataacccgattggactgtgtactcattggagtttgtaaagtgccaaatctgttggtcgaaaactgatgaagaagatagaggaatggacaaaatatagtccaagtctacagctgagaaatcacgagcaaggagtgggagattccattctttatcatcagtgatgtagtaagagactaaattctgagtgtctcccaagaagcaaataggagtgaattcagagtgacgaggaatccacggatctgaaatacatttaacacttgaaccatccccaattttgagtcttaaacctttcacaaggagatcacgcccccaacaaataccttgccaagtgagtgaagaacagccagttttagaagcttgtaaaaagtcattatgtgagaaatacctccattttaaaacacagctgagaagagaatgtggaaattggatgatccgccaagcttgtttagctaacaacgcttgattaaaatggataaaagaacgaaatcccatgcctccatccatcttagttttgcaaagaagtttccactttctccaatgtgtcttcttcttgtctttgtcagaaccccaccaaaaattagccatcatttgttctaattgatgactgaaagtagaaggcaacttgaaacaactcatgacgtaggtgggaatcgattgaaccaccgcttttaggagaacttctttccccccaatagaaaaaagtttgtcattccaagaattcatcaatttccaaattcgttctttaatatcagcaaa

SEQ ID NO: 391247 - DNA, 601 bp, Cannabis indica
aaattatttaaaattttataaaactcaatataatatcttaaatattataaagtaactaaaatatatcaaattaaagatgctcatacggaatatgtgaagcatataaatgcccaacatataataataaaataaaatatatgatatatacttgtgtaaatatctatgattcttatgccatacttcatacttgtgtaattttcttaggtttcattaatacgtacatgtgccaacattcttatcgccataattacgagagtatgcatattccaaaatagctccaataacaatgctattaattttcaatttttaataccttatataaaaaaataaaaaaattacaaaaattattacttaattagtaaaaacttatacttgaggagtgttaattacaacctcaaatcatatgctgaaatattttttttcaaatttttttatagtgatattcgttatagttataatatcatttttataaatttttgaaaaattctaaatagtttacagtgtcgaaaacaaagttcctaatatccagtttactacgtgtgttaaactattcgaaatttttcaaaatttacagggataatattgtaagcataacgaacac

SEQ ID NO: 391248 - DNA, 2135 bp, Cannabis indica
ttggaaatgccctgagagctaattttatcttcaaccaagcaccacttaattattataataatataataataaaaaatattttataatattgtggttggaatagataaaatctacaacagcatatttagtattaatgcaaactacatttagcattatggttggagatgacctactttactacatctatttgtctttgcaaatttatgtgaggactgaggagtgagccaaaattttagatcactgcgggaatcccattaataaaataaagggtgaacaatctacttgcaatggcaggtgatatcttctcaatttaactttctaaggcttctatcaatagagttttgataatagaataaaaattatattcatgtgataaaaaaaaattccatggcttggaactaagaccttgtagttgtagggttatgatgtcaacatcacaaacaggttcatatggcatcgcatgcaaagcatcatcaacaagagacaacctcacgcgcaataattgccttacgctttgaaacatacatacatatattccttcacccaaaatattctgttggagatgtaatgccccacatagaatacatctttgaactgataattgataattgagaattgataaatgataattggtagataaatccatgcaagtactacataaagtcttgctctaagcgagtactatacctctaattttattttattatttttttttaattaaaaacatacttctaattttatcgtctagcaattgatactgtaggtgctccattaaaaaagaaaaattgatactgtaggtggccgagtgtccagttcaatttgtcaaccaaaccaatgatgtatgtagggccggtcttggtttattttggctcctaaaaaaaaaaaagttaaaaagtgtaattctataaaacgctatttagaaaggttattttagtatatttttttatttatttttaggataacttttagtataatattttatttttcataattgtgtatattaaaattatttaaattttatgtgtaaattttaataataataatttacactatcgaaaataaaattaatagcatctcgaataaaatgttcaaatagtgtagtactacattttagtacttttgagataattaactctataatagtgtgataaatcttgaactaaatttagtatatattaaaagttatgctaaatttaacataaaatataatattgtgttaaatttagcatacaataaatacaaatttttaattatatttttgttattaatcattaatgatagacatagtatacacttttaattataatattgacattaaccattatttaattataatgttaaaatattggtacctagcatcctcctcggtgtcatactgatattggtatcattaagtattaggtctcatataatttaagaaaatagcttttagagaatatcgttaaccaatcacaaaatatcaccaagaaaaagtgttggccaccactaatgcctaatagcaatgctcttaatttattaatgaatattaatgatgttttattttttaccataatttgcatattaaaatactattgtacattggaagaccatagtaaatattgtagcaaatatagcatttgtctactttttgtgtcaaacttagcacaatatttataggagtgttcattggaccacatctaatatttttaggtatatccagttctgatccaattatatattagatgatagattttaccatccgatccaatccaattaatttcagtcatccaattgattcaacatccattggatgtgagattggatccgttctatttattggatgtatttcatatatatttattggtttagtttaggtttaaccaatatttcagacctggtatttttgggatcggatcagatgcatccaatattttaagtttagtatgtaggattagactagatccatccaatcaaaaaaaaaagagtaaaattttaatgttaattttatatatacatatagattttacgtataacaatataaaattaattactcatctaaactaaatgaaaatactaattagttcaattggatgtattaaatttctagatactccatccaccatccgatccgattcaattggatattaaaaaataac

SEQ ID NO: 391249 - DNA, 600 bp, Cannabis indica
ttttttctttatacaagaaaatatatactatgtattaattaaaattaaaaacattgatattgtataaattattataataattaatattaaaaaaataaatagatgaaatgataagcttaacgtgcgccatgtggcgatggttaggatgagattatgatgtctctccttagatttgcataacatttattttttaatataaaagttagcataaaaaaaatgaaaattcataaagtatttatacattggtaaataaattagagcttctctacccaaaaaaactagagattttaactgaaaatagttactaaaatattttcaggttttttgaatatccaaattaaaatatatgaaaaacttttaagaggttagttataaaggagaaaataattaacaaagaaattcataacaataacaaagattttggtggttggaatactttttttttccattaacaaatcttatgtggtatgtttttgtttctgccgactataaattttaattatattattaatttttgatggaaatatagttattgtatttatgtatcttttcatattattgaacaacaagttatttttctttaaaaaaaaaaagaagaaa

SEQ ID NO: 391250 - DNA, 733 bp, Cannabis indica
tttttgcatgaaattatgattttggtggctgttcttgctgtggttgtttgtttttgttttttgaggttggattatgtttaattaagctgttttgagctggtttggtggcttgtggtgagagttattcagagttagagcttatgagctcaagctttgctctcacatggtgaattttgaatttgagcatgttacgtggttttattgcttgtgatatgttctttattgtctaaatatcaggtctagaaagtttgatagagtttggggttgaattgaagctgtaggggaattttttgtgattcctgctctgaaccggaatttcggtttagggggacttgtaggaaccgaaattttggttggtccccaaggaacccctcagaaccgtaattctggttgggaaccggtctaacggttggggcaattttgggaaccctagtttttcccatttttgtgatgtttagggtattgtcatgttatctatcgataggaaaacttttagtttcaagtttaagtccctagaaagtgagttagcgtgtcacttacctatgttgtgattgatgtgatttaagagcctgtaattcgtcgagcagttgttccactcaggttggctggctcacttgaattcggaatcaaggtaagattagtataatgttatgcatatgttattacatgtttagcgtacatgttgtttatgcctgttagattacgttgatagcagtaatagtatacatagagt

SEQ ID NO: 391251 - DNA, 833 bp, Cannabis indica
ctccaaagcattatctcagttgctacgatgagaaacaatgtaagagttttgttgcatccagattaactcctaagtgggaaaagaagagagcaaaaacacaagccatcagggctaaaaatatttacaaccatagaacaggatgtgatactgtgaaaaaggcaaaggtagaaaatgtagaaagagttgggccaccaactcactgagtttgatagagggggaatatggatgagaatgcataccaacaagaagagtgagatcgaagccctactaaggagaaaactgattgaattgtaagtttcatttatcaattcattttaaagtgttgtgctatattaattcttaataatcaatttaaattatatgtatgtatgttgattattgcaagcaagttgaggagggcagattggtgctggaaggaaagaagggcatactaatgttagccttggggacaaatgagcaagctggacgtgtcagagggatggtgcgtggcgtcagctaaacctaattttctgagaccccacgccttagaaaaaagaatatgagtaaagacaataatcacatagttgcgctcgagacgtgactttatgaatacgaggaacagaatagacagcaacaagaacagatgaatgaaatcttccaagaaattagatctcaatagagaaatgtggtacttctcatgcatttggttcaggagttggaggagcatccaatgaactagcaacagtcaacaaagcctattctctaccaccaccccagctcaatttgtcagggcattcgttccaagcccagcaaatcttgagggggcatcttcttgttgggttttatgccctaaa

SEQ ID NO: 391252 - DNA, 927 bp, Cannabis indica
gttaagtagcttgtattgtgtttgacacatttttattttgtgtcaacttgtgttgatttatttttaaccaacacctaatttatttaaccctaactcataaaattcatatcctgtttgtgtgtcgtgtcgaaacttttttctatctttaataataaaaggtattagtggggttacgtagttatataaagagcattgtgtattgggtacagtggtattaacattttttataggtagcactttacaattatttaatgatattttttaaaaattattttcttaaattatacaaaaacatacttaattataccaataaaaatgtaataccaaatagagtagtggcaatcgtatcttttaaccattctcgtatacataattatatatatagtagtttaatatatatttgactttattattaatttgtggttgtaaaattattatatggaaacaaagaccaagtcaacactttaaacctttgacgtcgacattttattatgtgtccacacacacactttgacactgctacaacacaactcttctttctcttattttaattgttttactatattcaatatcctaaattaataaaaataataataacaaaataaatttctcatgacatggattatgcatgtttttgtaaatcatgatatatattaatatactcaatcgactcatcgtaatatatataagaacattaaatactgacaaatatttctaaaataatttcattttattatgaaaataaataaatagttaattatataagaagggaaaaaaaaagaagaagaagagagaggagagatattgtgtatatagattttcaatgagtggtcaatgcatgcaacgaccgacattatatatgtgtactgtgattattttgtttgttttgtttttttttattagaatatttctaattaaggaaataaa

SEQ ID NO: 391253 - DNA, 1218 bp, Cannabis indica
tattttcatcggtcattcaatgtcagctcaagatcacaccgaaacaaacttcaatggtttatctagtgaatacaatgtagttatgacatctataaatacaaacttaatgcctactctaatattgttgagattgaaaccctctttatggctcaaaggttcgattggacaaagacaatactgagcttgacattgccgaggcagaagtctgtttggctcacacaaaacccatgtcttcctctaatattttttctacttttgcgatgtctagtgtgatagttagtagtcctgcgatccgtacaaagagaaatatctggtaagttgtgcaatcccacattgtctggaaaatgtcaagtttgatgattctaagactgtgtaggtatgagactacgcaattgaagataacctaaatgcatgaattgattggtactacctatataaacaaggtgcatcttttttttctagtattccatcagaaagaaactccacaattaagcgtacttgacctgaggtaattttataatgggtcctgggaagtttttccagcaagcgtgcgagtgaggacaaagcaccctgaaaatactcgtgttggtctgtaggaccagacgtcagccagagtaacgtactcgtgatacatcttctatctgttttgcattcctgagaactttcattctaatttttttcgtgatcatgtacgttataattatttaggaccacttgataagttttagaaaattctgcatatttataataccaaaaataatgttaaaatattttgttacacccataactatttgttctcatacatgttgtcagggtcaacgaccatgagtattaatgggcccaataatttttttatgtttgtgtcatatctaaactgaagtttaagtattgttgggcttattaattttataaaattttacaaaaaatatcatttttttcactatataaaagtatatagtataaaaaaaattggccctgaatttgactggaacctaagcacgaacttagcctaattagtccagagtcgagcttgcatgttgatatgtttgaattttattttttacattgtaatactatttgaagttttatgaaaatttgcaagtactgatcataattaagtagaacatacacaattatgaaaaataaaatgactaaaagattctaccgaaacagtttggggtcaagcacgcttaactgtggagttctttcgtgatgggc

SEQ ID NO: 391254 - DNA, 1944 bp, Cannabis indica
gtaaataaaattgcctgatgggttggcattccgaaattcatagaaaacatccaaggcaactgtttctaggttttccacctccttcaagagctcctcttccctcgtcttcctagacatgacgtcctcttccaactttgaaagaagagtgtggagactctccctctcatctttgagcgtattgacatccttggataaggcatcattgtctgcctcgagcttggcgattgatcgcatttcataaatcacctgatttagctcgtcgaccaagttgttggcggtaaggagcttattgttcacctctctgagctcattcctcacgtcctggactttcttgttggcggcatcctcctccctttgcaatttgttggtggtggcaaggttctttgccaccatggatttggcgcgagagtaggcgtaagccatcttcatattgacctacatagaaaaaaagttaagacctgcatgggtaaaaaagataagataaaaacaaaagaagaaaaataatttccccgagcttcctccttcaggactccatccattaccacccccaacgatagcccattgtcttccccaaacaactgatcgctcacctcgcgaactgaccgatcaaggtagtactggagcatgccctttcccttcttggcctctgagcttagcaccacgacgattgaagaggccttcgttggatcggatccatctgagctccccctttaaaactcttggacttagatactttctgggcttgagggtccacaacagacacagcctcagagacgttgatcccttctctggccggcaccttcgccttggatggagccttatcgacgcgagattgtttgggcgggggagtttggcccgaactgtcaccagtcctcttcttaagagcttgcaacactttctaagacatgactacatataagcaaaacaagaatgttagaggcaaaaatcatataagcatgtcatggaacaaatacatacaagttaaaaaatcctgcacatgggcaggagcattctcgcgaacaagcaaagaaggtgcctcgccatcaaaagagtttgtctggtcgtgcttcgtcaggatggtcgttccttttccctccactgaggcgaatggtcggacaggcctatcaggttccctaatcctgatagcacactcaactggtgcctgttcactcggagggaccttcttcccttttttgctcagtttttccaaaactggccccctgtcccgtttaggttttgccttcttcgtctgcttcatgggcctatgcacaaaatcttctaggaagagtttgtacttgacataattggccttagtggcaagaagagtaatgttttgagcatcatctggcagttggagaattatttgtgccctcttcctgagccctaatgtgaagggagggcagaagtacgacggtatttgctggaactgagtgtggacggtttccatccactacaagaagtagtactcttccacaaagatccctatcttgctcaactcggagtcacggttcccgtcaatcacttctcctggatttgagaaagtagaagtacctcgacctactctgcttgggagttgattttagattaaagagctagttggtgtcgtgcggggatggctcatcacatccttgtgaggtgtagaggatgaaaatggcagacaggtacttctcaaagtaaactaggtcggacagaggtggtagtaatctgtaattctcctaaagtacgaaagcaagggaaacatagtaccctgcttagggtgagcatccgaccaagcgcagtacccctcccttagattggtcatcagtgttggaaatattttaccaagatctatatttacaaccatgtctgtttcattcacatcctaatatgaattctaaaacaatgaaataaacacatataaagtttaggaaaccttacatttggtgcagcgaaatataatgactc

SEQ ID NO: 391255 - DNA, 2024 bp, Cannabis indica
tttgaatgcccggttgcacaccaatgtttgatagaagtaaagagatggctgggatggcatgcccaaaccagcaacttccaacaacttctgagatggatagggagatctaaattgtctaaattcaagaagggtgtgatggttgctgctacagtcgggctaggtgtatagcttgtggagaagtccgaaatgatgtgatctggaaaaaataaatgtacaatccggtacgaattgttgaagatatacaatggaccaccaaggctcggattgaaagaaaattaagaacattgacaaagagtggttttttggattatagagcttatacacaatatgtttagggaaagattatacaattgtatatagagttcggcccttattgggtgcgcatagtttgtaaaaaaaaaaattcctattatgcaatacaattcattgatttatcaaaaaaaaaaataatataacaaaataaactaattttaaaatagatatggttaggcaattattatgttaataataaaataataaataaataatatttttctaaactatatgtcaaaatatctcaaattaagccttttttaaatttctacaaaaatatctaggttatttaaatattttaaatattatttataaatgtctgataagtaaaatgatataaaatatcatttttttaacttataatttgtaaagaataaaatatttcactaaataaccaattttaaatttaaaatattatggttaggatgtctataaaagtatctaggttaatttcaaatttattaattatttaatttatcttgtacgattattttaatatatatttcaaattaaaagaatatgctatcttttaatttaaaatatacctaatattaaaatttctaaccttataattaaataatatataaatattaaagaaattaacaaaattttaaaatgtcaccataatttaaaaaataaaataattaatttttaaatttaaacctcaaaatatcaaaaattaataataatataataaataattaaataatataaattttaaaaattgacatttaagtataaatgataaaaaaaataaaattttacttttgacatttatgatttgaaatgaaaaaatcacaaaatttagaattttggggttgaaaatccatttgggcgtgcaataggctgcacacagccttcgaatgcgcgcgcatgagttggatgcagggtccctgatcgagggaactgggtcacctacaacatgtaagcgcacaggagggagtatctgaacgacgggtagtgtgcgcttcagacacagtgtgtccgagggatcagcgagtggatgcggtgctcgaccctcgacaccctttggaccccaattttcaaatgcccataactctcttattttttatcagaattgagttccgtaaaaacaaaagttgcataatttttcacaaggatgccttgcgccgctatagatttggaattgaatatcactctaaattatatagaacactctatatgtaccacgatatagatacgttgtgattatcaattgttacaaccctaatagtcaaagatcctctatagatgatctacatcgaaaagggacaaatttatcgttctacccttgaatgtattttattcttaaaacacttagttacctataaataatattttagtaaactaatataattactaaatgagatctcaatcatttatctctattcagccaagctcgaaggaaattattgtttcacttctaaatacttatagaacctatagattccacatctatgattaatgctctcactcaattgaactaccatattctcaagatgtaaatattcaccagaatgattaattagcttccacgaacaacttgaagaatataaataatacaactaattaagctgaacctaaccatatcaggattaagatccatagacctaagatcaaccagtgatattgacttagaaaagatataacagtaagttatgatatcttatccaagttcaatatcggtccaattcaatgtatactccatacat

SEQ ID NO: 391256 - DNA, 820 bp, Cannabis indica
attaaaaatgagagaattaaggacagaagagaaaaatagctatgaagagattatagagtgtcatgtcaccactctattcctctcttttatatatagattattaaatcataaaactacattaaatttcaaatgttaataattttaatatctatattttttaataattataagaataaggattctactaaatttttatttattctcaaaaaaataaaattgtagaaaaatttatatctttgttatgaaatattatatatggatgtccaaatcaccaaattaattatcaccattaatacttggttgcattttcttttattacatttgctaacatagattttcgttaacgattatgagcctattttcgaaatagattttgcacagaaaatataagtgatctaagaattatagaaatagaaagaacatcattttacttttgcagttaactctacatagtccacgagtcaatcttattcagaattttctgatacagaactagggttctttcacaaacagtctgttctccttttttcctataaaagttttttggtcctttttctctgtataatctacccctatttataataacataggttgttagttaattacatttgatttcaaatcccataacaatattgtctcgctcaagactatgcagttagcgagttatagatatactccactaattctgtacttaatgagttattccatttaatataattgctattatatttggtggttcatattctctgagattggcacgtgtcactttctgaaataacagtcgaattttaggtacaacaatttgttggaaatattttac

SEQ ID NO: 391257 - DNA, 985 bp, Cannabis indica
ctctctctaactcttctctgtttttccctcttctttttttttttggtttttctctctgtacaaatgagttgctacctatctgaagggttgaaccgaagctctctttctcaaatgaacaagttgacccctcttttgtaatgttgttgttgttgtatgtgttatgttgtgttgtgctgagaagagttagttgaaaaacagttaaaaaattgttagaccttttagtttgtgttgtgacaagttgttggagtcttgaatgttgttatttaatttttttgtgttgtaaagagctatagccaagagctataagattttagcctatgaaaactgactattccaaaagttataatggtctgttgagtcttgtaaaaaaaaaaaatcttgctttatattccttgtaacttattgaatgtatttcattatgagacagttagtatagagatttatccaacaatctatatacattttatgctaatatacttttaatttttaatttattatttatattctaaattaaatagtttatgtaatatcattaaaaaatatataccaatagtatatattattactaatatcacgtatattaatttatacattacttttttacttaattacaatagttatatttgtagcacctactagggaatccgaaggcttcttcaaaactattatttacaaaaaaatatcataaatcatacaaattaggggtgcacatttacaccagaaacccgaaacttacctggcctaaaacttgaaaaatcctaaaaaaaaaaggctctcaattttagtaaactgggttctagttacacccgattcattattggctgggttcggatttcataaatctaaaactctaaaaaattaagttacaccaaaactcactcgaaacctggatatatataattttttatacattttcgaaaacataaacttaaaacaaaaaagaaaattaattctaaacaatgatatatcatttttattttcttct

SEQ ID NO: 391258 - DNA, 732 bp, Cannabis indica
ttttttttttttttgctctgtttttcttttttcagagttatgggtatgggttaggatttcatcttctttagtagattctctattgtttttttaagttttagtgtgtactactgattagaagtgtttttagtgcatcattttggttactcattcttttgatggtttggtactgtttaatttttgagtattcttatctcctgtatacttaaagaaatagttaaaactcgtcctttaatttctccttctcattctataaaattagcttctaataagaaaaaaaatgaataatgtatttgatgatgaagatggtggtgattctgatcgttctgctggacctagtgaatcctttgatggtagccgtgacactgctttgcaaactaagaggaaaagagttgctgagaaagttaagaaggaagatgttcggaatctgaataagatgaagcaagtctgaagatttgcttgaggattatgatagtgaagacatggaggttgaagtttgtagtgatttgaaggtattttcatgattttatatattgtttgttactttttgtttacaatttattaaatatttaagtttttttttttttattttagagtttattgttatatatatgaagtattttttatcatttattataatttgtagtttatatgttaattttagttttttttttctttatgcatgttgttgtttatgttttgtttttgttcatgatttttgtgtttgttttg

SEQ ID NO: 391259 - DNA, 513 bp, Cannabis indica
tattcatgaaaaatatgattttgtttattaaaaaacatgagacagcctcatctcccatttatttggttgactaaaaaaattgattttgtttgaactataaatattataatacataagcacgtatgtatatgtatggagttcacgtcttgagtcgagagaagtgataaaagaataaagtggcttgactcgggtgtttccatgtctttatgaaaaaggcaacacgacttgcatctcaggtcctgaattgtcattttacaaccgttggatttcaacatcccattcccatacaacatcaaaaaaaacaccacaacccaacactagtgagacccctttagccatacatgacaaaaagagaagagccaaattttgccactcctacattccatcatgtaaaaatagagcatcataatgttgagatgaataaaataaaatgaaaacactctcaaatcgatagaaagaaagtcattgtaaccacaccacaagttctcttttgttgtttcttttttttttctt

SEQ ID NO: 391260 - DNA, 712 bp, Cannabis indica
ttatatattaccagctatatagataggaaaaattggcttagtgtgatgattttcatagggaaaattgtgtggaggggcgtttcgaggagggaagagggagccgataatcaaaaccctaagtctgtgaaaatcgataccaaacggtgtaagaagacaaaagaggagttaacgccgttaataaacggagcaatagacgacgtaagtcggcgggtctctctcacaccagtcacgcccaacgaaatgagagtgggtttctttttatttttatatttattattatttttttttttttgaactattattcttgcgcgaaaagcaagagtagcccaccaccgtggataatcatcgggagagaagataaagttacgggtaggtgatttgtttcttgtcacagctggtttttattggtctaaatttgtggggccgggtaatatttgagccttattggtggatatattgtctgtgagtaaatgagttaattagttgacttaagtaatttaaattggatgttttttagtacgtttaagtggggccctcagcgtattgtccagtcagctcacaacaaaaaaatggtgggtccaccactatgaagcttcttctaaaacgactcaaaattcaaatttatatgatttgcattttattttttttgtttgtttaattagaatagaataataaatgagataaatgaattggtttaaaataaaaataagga

SEQ ID NO: 391261 - DNA, 1888 bp, Cannabis indica
agggcataaaatccaacaggaattgctagaaaggtctcgcaagacagaggagaagatgggacaaagtactagaactctgattcgacaggtagtgaaaaaatgtaaagtgtgaaatggctgctgagagtatttattaggccccaagaaaggtgtcttccattaaaagtgaacggtttgactcgttcgcccaagggatgtttgactgttgaatgagtgggaagctaatgaggcatatcaactcccaactgttagcttctatcattgcatgcatcattaaaagggaaagcatgttcaatccaatcgtcgccatttttagcatcccacaaaaaatgcgcccagtacgctcgcaaaactcaaaagttagcatttaaagccctgacaaaaaaacaaaggcaataataccttctgacagtgatacttcaattggcagctgatgacgtgatgagataaataattcccacgtgccaatagtcactcaggaagagatactgcaagctcccagactgtggtacttcctagaagcttagggggtaaatgttatccgtgttttcgtgatcatcacacgcgaattctatttaggataggctaagaagtcattagctgaccaactctctcaactgatgctcctccgagaggataaaagacctgtttacaaaaagggcctccgtgattaggagttctctgattaccaataactcacaagtcatccgtgagctgaagtcttcccagtcctaggaatcgaagccatctgagtatgagttcttttcagaagggccaaggcatgttaggatacgtcaaaccgggctacacccttagcccacagaggctctgcctacacgtgttagacttcgaacctagtgactaggctttttcaggtacgacgtcagaggttgtctcccacgacacgttatcatacagagcacgcgtgtccttgtgtactagaccaaatgatccaacgactaggaataagagaaattcaaaaaggaaaagccctaagataacactcgtacgaggcccaacttgtacgatctgacaccgttaaataccatatgggaaaaattcacctatcaatccaatggtcgaatttggcccaaacgatgatcaatctaaggcagcacatgcaaagaagttggcctataaataccccaaaaaaaacataagagaagaggaccttttttcggagagaagactcattcttcgctatttttttgggaaaacacatttgtattacacctaaagaacttcaatatattcctactaagcttcctcttcttcaagagaaacacggggaaaaggagtttcagtctattgtatctctacttgtataaacagttacccaccgatgtgcctaataaaatggactcatggactaaggatagttaacacatgaaccacgtaaaaatctcttatttgttatgttgctatttattctgttgttcctttcttaagctctaaaaatatttagttgtcgaaaaactcagtaaacgacaacataaaatgatttttgatcttttattaattagtaaatttggttatattgaattgagttttatttagggcataaaatctcaatagtcctaactttgttttgttgttggaagagccttggcggtgttaaacctccgacccattgaaccatgaaactagaaacaagaattcaaaggtagaagaacaatgaaagagaaagaaagaaagaacagagaaagaatggagaagaaagaatgatttcattaattgaaatgtggtacacgatatatacagcaggtaattgaatcaactaacagaaaacagaaaataacagaaatgagctaactaactaacaattttaaccaactaactaactaactgttagttgccttaactgttggaagttattttaccaggaact

SEQ ID NO: 391262 - DNA, 729 bp, Cannabis indica
catattcctaaacctagatttttacggttttcatagagcaagttcaagactattaaatttttttataatggaaacccagaaaatcaaagattcaaatattaaagaggaaaaagacgaagaacttactcactgttcaaagatttggtgtagttcggatgacactgatcgacactttctggaaatactttgaagggtttgagaggaaaaggtgttcttgctctgaaatcgttaagaaagaagatgctaatagtggtttattaagactttctgccctatttataagcaaaatagtgaggaattgtaatcatttcaaaatttaaatgcctcaatttcccgcaaaaagtaaacgttgggcagctacgtacctgaagagaaaccttcaaaagcgtgcaaatctcaaaggattttgaggtacaatcaatcatcatttatgagccgaatatcgaagagactcttggttagaatcacatcgaatcaccaatagatgcatcgaacacgtgtcacccgttaaaacatgcatttaaatcgagtgaagtctatgcgtgactttagaagtctcgtgtagacttggggggcaaatgttatcccattttttgcactatgacgtggcagcatctcctagtgacacgtttcgatcattctttacatttggcttgagaaatgttccgaacagatttcaagcaacacatctgcatgcacaaagtctgcttgaccgagcagagcaaaggg

SEQ ID NO: 391263 - DNA, 763 bp, Cannabis indica
ggtcacttgcaattcacaaagttcatagaccttgctgggaattttcttggggtgctactgggtgtacgcatgtggaactgaaaaagaataactttaagaagttatcttgttagcaagtggtttaaacataatatcattgaactgaatcaccgtttttattcgtcaaatggtcttgcttatgtgttgttcatgtacaacgtacatgttttttgtaacaaaagtttacaacttaatgtccacttttgaaatcaaatttttgctacccctgcccgacatgccagacagaggccatcactaaagaacaatggagaggccattgctgaagagtgatgggtacttagctctttttagaattcctacacggtgaaacattagaggaaccactattgaagagtacaagttggtgagtgagattacttactgagatgttctccattctagtattttggtagaagagccaactctaagctctcattgtcaaattattctgctagcaagatgtggtttacttcttggtcatagtagaccaaaagtatgagagtagactattggcggatcaggctagccaaggtatagactaggtggccagccacgttgagagagcatcgcctagttagtttgatgaggttatggtcggccaacctgtggaggtagtggttggccaaggtgttgagcatatggccggcctgtaatatcccgataagtcttatagtaaataattagggtttatatttatattgtaacaccctaactaccttaggcg

SEQ ID NO: 391264 - DNA, 791 bp, Cannabis indica
tttttccttcttcttctttatttctccctctaattgtaaattctaagtgaaacatttcatttctctctcccctgtcactccctttctctccctgctctcctgctcgacggcgtggtaagaccacaaaccgctgttgtcggggtcgatggtcctaaggaccctgaaacccagctctttgattccaaaaatccaagacctgaccccctctctccttctcggaatctttccctctctccctctcttccattttcccgctacaatgacaaccctacagccgtccacggtcatgggtggtctaacaagaccatgggatcgtgttccttaggtgtcgaaactaaaaatcctaccttttttttttttttgctttggctagtcatgaatagaagatgtgcgattaggtcactgatggatctacatttagttttagaagatatgcgacattgtgttcgtcatctgccagtgcgattaggtcaccaacgactatcttttgattgggtatttgattttcagtttgggttttcatagcatatggtatttgaatttgttttgacatttctttgttttggtgaaatagtgagtgtagtggcggtggaagaggtggtgatggtgttagaggtgtggtggtggttctggagaagaagaagaaggcggataaggaagatatgagggtgttagggtttcaaagaaaagaaggaaaaaaaacaaaaaggaaaagaaaacaaaaagaaagagtaaaataaaataaaaaaatatttttttcattgtttaattttttataatttataatttat

SEQ ID NO: 391265 - DNA, 948 bp, Cannabis indica
atatatatatatatatataatacatgttattattgcaaggattaaataccttatttccaactaaatatcatccttctttgacaataactaaagtgttattatctatgttttgtatttaatttcacattaatttcctcatactttcagggaaaaaaaatgattcaggttgataatataattgcgtttagggctttttgaagattttatgtggtggatctcatgtacttttcttaaagcttggcactcttttccctcttttgaggttttatttaggaattttgactaggcttcgctacatatattataattaatttagtaagtttgtttttgtctaaccaataattatgtaatcctttttggatgtttagtagttttgatcatattaatttgttacccaaattatactctggattagttctcatataataattgaataatttaggtgcacatacaatggctttaataagattgggtcccgacctagtcgggatgcttcttttgctttatcagaaaaagttgtaagtcctgacaatggtaattttcacccatttttatattttaataattaaatacttttgtttatattttaatgtatatataacaaagactcatattgctaagtcaactgaaattaaagaatataactcagtaataattaatattgaagataaatcctttatattattttattttcttgctgaaatatgttatataatacaaaaaatgacaatgtgtgaaataattaacattgtctgacaaagaaaaagagtactctctgttcagtcattcatcatttcttttcattcaattatataaaaacatcagtgaatattgctgtgaggaattaatgtaaaaccacaaatgttttgatccattgaatcgataaagtgatttattttttgggcttggtggtccggcgctgaagccgtggtcagcgagagggagaga

SEQ ID NO: 391266 - DNA, 733 bp, Cannabis indica
aaccatcttccacgcatcactctattcacaatcactgtttttagcaaattcactaatttttctcagcccaacattcttcaacaatttcaccaaaatccaattcaaaccattcaaaccaaaatttagcacactgctaccacacttaaatcacaaaataactttcaaattaaattaccaaatcaaaacttagctcaaaccggtttcttgactcgggttgatgaaagtgtcgactgaaatggctcagctgggttgcttcgaagtcaggtggatccgttgaatgtgagctggttcgtgcgagctgctggattcgtggatgtacagggactgtgatgctcggaggtgtgttctggtgaagtcgtgggtggtgaagtcgtggttggctattgggttattatcgagtgagggtggaagttcggttgaatggagatgaagtgctgggttcgaacttggagagtgaaggtcgactgttcgaagttgaagttgggttcggattgaggttatgggagtggtgcactggttcgagtttgggaatttgggggcaacgggttcctggggaagtcgtggttggtgcgaagtgatgtgggtgactgctgggtattggtcacggtggagctcagtcgactgggggcgtgcgagttagcaacggggttgctgtttgagtgaacgggggctagaagctataatttgggtcagctgagtgcgatttggtggttcaaatggtgagtggaagctc

SEQ ID NO: 391267 - DNA, 657 bp, Cannabis indica
ccgatttgatccaattaattttaatcatcaattcgattgaggattggattagttttatttattgtacatatttcatatataaatttatatatatatttatatctattgattttgttcaaatttatctaatattttagatctactattttttggattagatcgaatccttctaatattttagatccatgatctaatccaaaaaaagaaggttgattaagatttttgcctctcaaactttgacatgtactaaattattgagattgttagatttaaggtattctgtccaattttagtaaggtaagtctaatatggatgaaagttttcagggggcatgatttagtacatgttaaagtttgagtggcataatttgatgaatatcaaagtatgatttaatacataaatatttactgaattagaaaaatttaatgaaattggacaaaagtccttaaattcaacaatcttaatagttcagggaaacttttaacgataaaaaaagttcaagaagtatgattcggtacatgtcaaaatttaagaggcaaaaatcctaattagaccaaaaaaaagtaaatttaaatcttaattttatatatacgagtataataatataaatttaattattctattaaactagaataaaataactaattagttgtaatt

SEQ ID NO: 391268 - DNA, 352 bp, Cannabis indica
tattttttattttgaaaatgaactgttgcttcattttaaacaatagcaacgctattagatactggtacctaccactattaaaaagaattaaactattcacaaataattatataagatttaatatttaattatactaaaatttcaataaataatgctaaaaaatattggaagaaattaaaaaatatctatttttttatactttaattaaatttatctattaaatgaaatttaattcaaatatatatcttttttatgagtattgtgcctaaattatttttacaccctcacatatagtgataggagtaaaattaggggaaacttatcaaaatactagaatttagattaattttta

SEQ ID NO: 391269 - DNA, 639 bp, Cannabis indica
attggaaatagacccataaattctacatatctgagccctgaaactaataatcgctgaaaggaaaaaacaagaatttaaagacaacccaattaaatttcacagaaaataattgaaaagatcgtaccgtttgagtttacagaatcaacggtggacggtagtgcagccatggattcagtttaagcgaaagtcgatgatgggttgtttaggagagaaaatgatgagttttgaaggtggaaaacgaaaggggttttggaatgttagggagaatgagaagtgaaggttcgagtattggagttatcatagcagtggtaaagtcatatacatatataaagtgagagagagaggaagtgagaaggttgtgtagtgaggggttgatagctttggaattgggatttgggagtgagaacgagagatgtgccgaaccatgcaataagccatagacacatatggatgcaaaaactactagcaagaactgaacaaaacagcagccttagaatgtgcacaggaacaaatttccagttcaaagaagttttgtacaaagcaaaaaaaatacaaaaaaccaaactcgagaactataaattatataaatgtatatgtgagcgatagtgataccttcaaactcgagaagaacagcaaact

SEQ ID NO: 391270 - DNA, 747 bp, Cannabis indica
ataaatggatgaggtgaaataaaaaagaagttaaaaatttggtaaaacattttaaataattgagtagaaaacctaatacctatccactaaatatcatgtgatatcaactaacttcatattctctatacttataactatcaagccataaataatgatagaattttataaattaaatttatatttttatcaatcaaggtcaatgcatgcatgccaaggtgtgactaatttaagaatatatatcatcacttgtatttgattggttcaacaaaaataaagtcattatagactcatcacccatggcccaatactttactcacgcatcatcatttcaattacaattgttgaataatctttttctataataaatcacactaaccataatatttatctaattactaaactatctattatagaattataacttgatagttattaagtataatataaatactataaataaaaataaaaaagttaaaattaataataaacagtgattacaatttgaagagttatacattacaaaaaactgataattttagtgataattttttagtcacaacataattttttgggtaaatattattttggaccctgtgttttgtaaaagttacagattggactctgtgttttgttaaatgacaaaatggaccctatattttctaaaatagtaaaaataagaccctgagcttaatttttaacaacttttttttaatataaccaacttgaagacaatgcttaatacgaaca

SEQ ID NO: 391271 - DNA, 1934 bp, Cannabis indica
acatggccgaggttactctgtgagactaacaactggcttgctctagtaaccagaacaatcccaatggcaaacatcccatgcatgcgtcccactaacccatacaatatcacgcacctcccttaccgttagatctcatctcatcaaacctataataactcatctcatcacccttcataatatcaatatctatttataatacaacataactcaatatctaaccgacgccggttaactttaactcaacaccacagtcaacttcacccattttaaaagcactctttttttctccattaacaaagaacctcgcatacacactcactcttcttttcactctctaattatgtcagtaaataataaatattataatttatatatttatgtatagtctgatatatataattcaactcagctgcgatgaagagattaaagctgaaactttttgcttaatgttatttagctcctagcccaataaataaatcagtctaataaatattttcttatatatatataaagttctggtcagttattttttcctgaattttgcatgataaatgtagttgatgacactgtctatattaattaattaaattgctgaaaaatgatgaaaggtatcaatcccagttgtgtttatgacttctccgaccaccatttctccagcgtcagcgccgcagccgcggcggcagccgactacaacgaccgcgtcgacgatgcaatctacggctccgatgagttccgaatgtatgcatacaagatcaaacggtgcccgaggatgagaagccacgactggacggagtgccttacgcccaccgcggcgagaaagcgcagcggcgggacccgcgtaagttcaattactcggctatagtctgtccggcgtttcgaaacggcgccagctgtagcaaaggcgacacgtgcgaattcgcgcacggcgtattcgagtactggctccatcccgcaaggtaccgcacgcgcgcgtgcaattcaggccaactttgccagagaaaggtttgcttcttcgcccactcgcccgaccagctccgcccagagactaagtccaaacgccatagccatttcgcttatcggcctacggcggcagcggcggcggcacgtgagccagcggaagtggttctgaatcgctgtggtagtgatcatctcgatcacgtgatgatgacaccggggaggactagtactatcatgaacggtgcagatggtgccacatcatcaccgtatttttctaataataatgatcatgattatgattacgatgatgaggatgatgattataatgattcttttcagaaatttgctgatttcttgaagagtttgagggcgttgaagataagagatctgggtggagatacttatcatggtagtgggggaaggattatgaattccgggttggatgtttcggagtcggatttgccccatgttgaatggatttcgaagttagtgcagtaaatgtgagaaaattttacttaataataatgataataataaaatgttgagagaagattttattattaaaatgcatatataacttgtaaacaagtatatatattcagctcagctgtttttaagcttttctaccgttttcctttctttccttttaatgtaaaggtgttattgtgtactcagtcgtatttcagttatatatgtttttatttcccctcttattaattaatgacttatttatatatatagtcatgttatgtatatatgaaattattcatataagaactgagaaaaattagtaattaatgattaattatatcatagaaaagaaatatatatataaataaaagaaagatggtgcaggtggaagcagagagaagagcagaaaagagtgtagtggatcagaccagttactcattttgattcctcctgttctttatcaactgctaaaaacttttctcatcacgttgccaagtgtttgccgc

SEQ ID NO: 391272 - DNA, 1500 bp, Cannabis indica
aatttttagaaactaataaaataaaaatttgagaaataataaaatacaataataaagaagacaaaagtttttacgtagcttaggtgttaataaaccatagtccacgagtcattattattggccttatgaaacttgatgtgttacaatagtatttgcaagaaacactaactctgctctcttagtttctcttgaagaagaaagcttaaaggaattttaaaagagttttgactaacttgttcttgattcctcttttgtatagaaatagaaaggtatatataggataaagggtgggtatggacatgcccatgacccacttaagatttttacaataagtccactattggggtaaaactacatgtaacaatctgactcttggactcccaagaagattttgtgctcgtacgtagaagtagctggacaataggggaccactaattgtacaggacgcgtgtcgccaaaaggtttcactttgcaaagtaaatgcctgcaatatccgtctggcaaaaaattatatgggatgctcacaccatagtctgacattggggacaagatctgatcctatgtcagaaagagtataaccgtctctaaacgatctgggttcttcttcaaagtagacctccgcattccttttaggcaatcagcgtccgtgactaacccttcaagtaaccttccaagtatcgcttggccacactttcaactcggtcacctccgaaccccgaagggatagtaggacttctgtgtctcggaagtcatagtaaggcaggatgtacatcctttagccttgggctgttcctgaattcgtgaagcttctccatgacctgaccttgtaaaagggtcttagttagtgactacttaaaatcatacttctcttttcatgtcacgagtctcccattcagaaacacggataacaaacctcatgtttaatttttttctcctaagtgtctctatagtccatatttagagattattattcattcttcaaatatatattatattccccttctctcatttttcttatattattttatattaaaatataatatatatatatatataaataatatagagaaactattttacatataaacatttcatgtaaaatataaaaaataaaattttaataatgtatcgtaaaagatagaataggtgcaagattacatattcaaattcaaaatgtagaaagttgttctaaatattttaaaaaccaagatcaagtcattcctaagcaaactcaaaaagaaagttcttctaatgtcaaaaaaagaagaagaaaaaaaaatatatattcttcccctacacagactcgccaaggcatgcttcaaaatcccacattgccttcaatgggcttatattgagttgggtccaagcatgacatatcccaaggccttaaagagcttagaaattagaatgatgtaaatatagggagagaaaaagggaaacttacaaaaatactggaatttggattaacttttacaaaaatactgtcacacagaaattttt

SEQ ID NO: 391273 - DNA, 1044 bp, Cannabis indica
aaaaaagaacaagaagaagaaagtgccacaatctcatggttgagtctggttatgggcatggtcttgaactggactctagccaatctggtctatttcgagttgtgattcagttttggaagaggcaaccataatttttgggagaagaaacctctccatcaaatttgtaggagtcagctgggagatatgtgccattctccaaagcctgtaccttcgccaaatactccgcttcatcttcccttaagaccttgagtacagaaggatacttattccataacaagtgaagggtgcttacaaaggctatctcaacgctttgcatgtgataggtctccgcagcctctgtagcttccttctcaaccttcatggaatcttagatggagtcattgatgtgttggtagtaagtggtagcagacctacaaaaagccctgaaaaccacaaaagccttgtgtcttttagcttcccaggctaccttacatttcagtagaattttctcattgtcaacaaggttcttccaccaatccttctctgccaaccgatccatctccaacttgtgcactcccttcgactctcagattcagacttgacttccttgagctttgcattatcatcccttagcttaatatttagaacattgaccttaatctgcttataattagccacggtgctcctttgcagtacccgagcctacaaaatgtcattaagatcattgacctcttggattttcttggaaagagattccacttcgatcgtagcagtggacaactcagtctataactgttgggttttttgctgatgggattcaatggccttgttaatgaagtgattatatttagcctcaaccgttcagaaagcgtctttgatggccctcctccaaaagtcctttgcttgaattttgatctcctccactttggaagtcagtgtccatttgtcggccgtaagttggtctagctcgacagccatggagttggattttatgccctaaataaaactcatttcaatataatcagttttacttattaatatagatcagaaataacatttaatgtt

SEQ ID NO: 391274 - DNA, 1019 bp, Cannabis indica
gatgacaaaaaagtgtagcaatgagaagaatatttcataatagttactaaaatcaaaagatgtgtaatttaatatttaattgtattaacaaggatataatattgtataataacattggactactgatttatttagcagtttttctttggttttattttatttaaggggaaaaaaaaggtatgtgtagcaaagaaagcatcttcatgctaattaaggtgaaactattcattttcttctctaaaaaaatgttgactttttattaaaaaaaaagaataaacatgtgacagtagcccttgcagttgtgattcacacatgtgagatgtgactgagtgtgactatatctcattaatttgaactcatttaattaatcaatctctaccaacaacatatcattttcaattaaataattactcaaaacatcagtgttgacctctactttcttagtcaatttgcctactatggaatatattataaactttgacctaattaaatatacgatgcgaaaaaaccggtggttccccaaaaaaaaaaaacaaaagagattttcaaacaaatcacatgctataatatgataaacttctattttataataactaattacaataaacaatgggattattgagagctatttttttaatgtgaattaacttacatatacttgcttaattcttcttcttttttcttttatgtttttattaaaatcctaacttaataactactcgttatttctttcttctattattgttttcagttacgaatattaattaatttattataagttagcaaattagaaaaaaaagtaacaactttttcaatttgatgaaaagtctaaattataaatatatatatatatataaatccatatatatatattaaattaatttgcggtataaataattaagtttaaactctcagttgtaaataaatatttaagtttaatttttgacagtaataatacataagttataattttagaacttctataggtacctagctgttaaatgttaagtaaattagta

SEQ ID NO: 391275 - DNA, 1924 bp, Cannabis indica
ccgcagtgatctttcttgcacgaaaaacatcaagcatgcgagagtcacattgaacttttatgaggcaagctttgacttccgagaaagaaggctgaagttgcataaaaattaaagcttaaactttgcttgaaaagatcaaaaggagaaagcaccaaggggagtaaggtagacttcaagcaatccttcaattctaggaaagatggttgaagatgtgccatacccttagtgtatctttcttactgaaaaaacaccgtgcctgcgagactcacgttgaatttttatgaggtcaagcttagacttcgcttgaaaagatcaaaaggagaaagtcaccacgggggagtaagataaacttcaagcagtcctcccatttggatgaagggttgaagacgtgtcataccctcagtaatattccttgcacaaaaaatatcgtgcatagcgagagtcatgttgaagatttatgaggtaatgttcggcttttgtgaaggaagtactgaagttgcataaaatttaagattagactttgcttgaaaagatcaaaaggtgaaagcaccacggggagtaagacagacttcaagcagtccttccaatcccgaaagtagggttgaagatgtggcataccccctgttatactttactttgcacagaaaacatacgtgcatgagtagactcacgttgaatttttatgaggcaagcttcgacatccgtagaaaaaaagactgaagttgcataaaaattcaagcttagacttggtttgaaaagtatcaaagtgtgaaagagtcattggggaggaaagcagacttcaagcattccttccattctaggaaggaggattgaagatgtgttgcacatccaatggtctttcatgcacggagagtaatgcgcctggatctcctgagctccaaaaagctccaagagctgcatgcacgcaccccagcatgttctgggtattctatttcctttagtgaactacaggccatccaatggcttcttaaggaaagactcgaactctcaataggataggcaattgtccagcaggaagttcctagttggtttataatttctcgagttactttctctgatgtaactacttgtttgtagtcacaccaggcaacaaaaaccttctgtgcaaactgtgcaaaaaatggtctgcctcaaccaataataccataactaggcatgacttgaggatcaacgaacactgacggtactgatggtctcctctcagccgccaccattacaagatcagtttctgacccactacacaacccaacgcaaatgtaggggaagtagttttcggacaacagatctggcctttgcatcggtaccggtgctgggtctttagcttgattgagtcgttatacctgatgacccttcttgagttagtcatcgtaagcacatcgggtcttagtttctttgcctggccctaacacctcttgttcctcaccgtgtctatttagttatgttttagtggatggaaaggaacacgagtaggaggatacaagtggccagtcatcttgcaagggagttggctggccagatttgggtttttgggggcgagtgcgagtatgctgagtgtttctaggctgcatgtgttcatcttctgcactttcttcaagcgcctaagggtgtagaccctcggtctgaacaatatctctggccaagaccctcttgacctttggccagaccctatcaagaagtcatgtggccttccttcttctttctttgcacaagctcttccttttactggcttgcactggcgaccaccgtgcatgtttctttcctcagctctaaattaaagcagaaaaatgtttaccaagttttttggcaactaaatatttttagagctaaagaaagtaataatggagtacatagcaaaaaaacaaataagagattttacatggttcaggcgttaactatccttagt

SEQ ID NO: 391276 - DNA, 1851 bp, Cannabis indica
actaataaaattataactatttgtttaattagaaaatgtaagtgcagtgatatgcatttttttaggttcaattacaaaaatttgcctatagcactgattattatggtcacctgaattggttggtatgcggaagtttctcttttgtggataatgaatctttttcactgatctcatatagttcagttgagctctctggtagtgacaaccctctgtttttaattgacacaacaatgacctgtaattcaataacattaattaaaacaaaaacaaagagttttcagctatgtatttttgtgtatttatatatatcattaagataaaaagaagaagaagaagaagagagacctttgtgatactcaaaagaggactatctcctgggggtcgaagtcgataatatggcttgcctaaagcaaggacaataaacccaaaaaaggtagccagagttgatgccataaatccccattgccaccctttttcagtgttcaaatacacaatgactgtgacccctatacttgctccaagtgttatactaagcaaaagccaattgaaaaaggtggcaagagcctttgcctctttgggattatggttatcgaattggtcagcacctaatggcgtaagtgaccctctaacgccccctgagcctaatgccaacaagtacaatgacacgtagagcaacactgatacaccacctttcacaccacttcctatttctggctgcaaatggtgtgtgcctgcttgaatcgtcataagcatcaaagcctgttaaccccaagtatcatcactactaagtttgtgaaattaataccagaatttctagtgctccaaagataagacaagttgttaatctgcttaagtaagtgtctgaaatgaagccaccaactaaggagagcaagaaagtggttcccatgaaattggtaagagtgttggaagcgcctgcgttgtcgaaatgcatcactccaatgaagtaaatcaccaaactcaccatgtttgcaatgaaccccatgttctcaaatgctgccaacactgtataaatatacacacaaaattatatataaataatttattgcttaattctcttaattagtttaattatatttgttgtaccgaagatgaatttgcaagcattgaatcctccttttacttgggattgggactcgtactttttatcatcactacctgtcttattagcctcctctacttccccctgagtgtaagacaaaacgtatgttattaaattataatttatactgaagagaaatatgggtttgtgaattcacttaccatgattaaaaattataagttggacaaattaaagagatgaaaaaaaggtgtggtggtgagattttgtagagtagaaaatagagatgaaaatgtgtgggtatatatagctcatacacatatacagatgacaatattacatgagctagctagacttagttttcaacgtccctggctgctccagatttatcgccttcttgttctttacttaattaatttgtccttatagtgctgcgagcgcagtcactgtaattagaattttattaatattaattattaatctgaattctcacaaaacgctttattgggcaccttaaaatgcttgcttaatagtaataagcaatgctcatttgataaaaaccatgtgcaactaatcattttggatgtgaaaatgacactacaaatataaacattataaatacttttgcttaagatgagaaatcgaatcacttttaacaacatttactgaatattcttattaacaaggacgggtaaatcaacaaagctttgtttggttatttccttttttttttaggatatgtttggtatcatatatatgtttatttatttttt

SEQ ID NO: 391277 - DNA, 733 bp, Cannabis indica
tatagttaataataaaataaatagtaatacatataatactaatttgataagtttaacaattaagatatattttagagtttaaatcccaacaatcttactttttagtgggcttcaattttattttattttttgcctaagatctaaattaacataaggtggctctaacacaagtaatatttttttagcaattatgatgtatattatatgtaatttatttcactttaatttgctactttgtagacaatttttaatttaatttgtacatacgtactcaattcaattggttgaaggaacatgcatgcatgtcacacgtacgtaccatgtgcccttttttttttgtaagtaataagtaaaatttattgataccaaaataatacaagtaataaaagggtaaaaccccaccattaagcaattgtaaaacaaatggaagacactacaaaaggctcaaacaaatacaaacacacccaacctattccaaaactaatctatatctatatagtattagctttagaaggatcgaattaattataaattgactaattcttttatgaactatacactttattacattttttatgtaatgatcactttgtgtttccaaatggcaatatttctaaattttcaaaattaatctcatacactgtggcaagaagaatgcattataaaaaagtttatttttagtaataattttttagttacaatataatttttttgtaattaaatgtgactttta

SEQ ID NO: 391278 - DNA, 905 bp, Cannabis indica
agtcaaactcactcaaaggaaaaacaaaggcttcggccccacaacaaagtccaatccaaagaagaaatgaaacccctaatataaaagggtaaacacagtaagctctgaaaccctaaacacttctcttcttcgtctcttcttctctatctaagaaaaacaaacacatatatggttttctaagagcttgtttggttgtgtttttcgttttcagattttaaaattgtatttttaaaagtgagaatagaaaataattttttatcattttaaaaatttagtggtgtttgactcaggtttttaaaaactatctttagcttttttttactaaaataattcaagattctacaccatacccatcctaccccagacccaaacctagacccggacccgaacctagaccctgaaccccagccctaacccagactcggacccgaaccatgaccctgaccgcggaccttggacctggacccagaccttgaccaggacccaaacgcaagacccataccctaaactcgaattaagacctagactcggaccttagactccaaccttgacccagatctggaccatgactccgaccatgttgtgatattttacacacgtaagtgcacgtatcgtttacaagtaatagactcaccaaaagtgaggtcaatcccacaaggattttagttaagtacgttaaaattaaatttctacttctatttggttaaataaaaattaagaaaaaattaaaattagagaataaaaatagtgcaagaataacaaataaaattaaataggaaattaacggttagtaagaattagggcttcgacttcaattgtttctattgattatggcctaatatgattatctccctattatcaatttctatgcaatatagcaggtttactaaggtaatttatagtct

SEQ ID NO: 391279 - DNA, 1074 bp, Cannabis indica
ttagtacaagtcaatattaaacaaaacattgtattaaataatacaaatcaatacaataaattccaacacaatacaatacatcatggtgttctaaacgagtcctaagagattgtgtttgtaaaatacttggagagaatttataagggaagtgtttgaatcttgaacaagtgttggttcaagaactctagagtgagaagagtctcatgttaaatgcataaatattatatatttaatagtgtatgttgacctcaaaaagtgatcgatcgacagcagggtcgtacaattctgatgcttgccacgtatttgcacaaataagaaatgaaaaataatagaaaataaaatttgttatagaggttcgacccccttgtgatagcgggtaatgacctactccccttttagttgtattatatcaagggaaacactatctagatcactataggtgagttccgctatgacactcttaggattacaaggtatgaatccgtattagcaaaactcaagtgttgagatgtgctagggtaggcgtgtgtgagagagaaagtgaggaatatatggtttatcatacaattagagtttagaagcaagtttctaacttggaggcaacttaggttttcagcctgaagttgaggcctttatataggaggcctaaaatcctaggtttacagtttaaatcccttagtattcgtatagtttgttagatatttacaaaagaccaaagcacccctaattctagatgttattcaaccattctattgggcttttaggggtctgattcacaacccatagttgttgtccacgtgtagaagtgtctaggaaagcctgcagttcactccttgactggccaggcccctgtggaggccaggctggtcggccatggtgatgtccaaggctggctggccataggggtgggcgaccagctcctaagagagggggttggtctgtcacttgatgcccgtttgagtgtacgggttttcatttgtttagatgctgacttggccttctttttgtgagttgtactaccacgtggtacttgttctgtccacgtaagcatgccacatcatgagaaaaaaaatt

SEQ ID NO: 391280 - DNA, 1929 bp, Cannabis indica
tatataattaaaatagtaaaataccatcaaaaggatctaattaaatccctcatttgattgatattattgatcatcatcccatatcttcatgtggggtctttttaaataagctgcaagctctcaatgtggtccaataatatatattaatgtaagtatgtatctacatatatattgccatactgagacttgagaatatagttggattacttgaaagtttgagtggatatatttaaatttattaagaagaatcaagaatcaagtcattgatttcatttcattgatttagatattgtgcgtacccttacttttttatatgtagaaggtataaaatgttgtgtcatttactaatttagaagtattactatattgggatgaaatttggcactgaagagaagatcaagagagtcgaaaatgagtctacatttacatgtttttgtcatcgccgccagaaactgtttatttatttatttttataatgtcacatatctaatggattttattccaaaaataaaataataaaaagagtataatatgagtatgcttaatttgcctttacaaaatgaaactttcctaatagttacatattaaatacaattaacagcacaataattacaaaaacttgtgtaaatatattatctttcacaaaaagctgcttccatgactacatttcgtggaaatgccataagaatatttaaatatatatttatatgattgtttttatataattaattacactaataaataagtaacattattaaattgccaaaattatattatgaggttaaactttggtaactactagatgcaatataaatttcacagattaattataatgtgggataaaatacacacatatttcttttatatatagaataaatcacacaaaagtagtaagatttatattaatatgtttggcccctcaaacatttttttattttatatttcacaaatgagaaaggaatcatattccttgatcatcaatcagatcgattcaataattatattctcttaattgttgacgagatgttctttcttttatcatttttattattacaactttcactatttttttgcagctagctagcaagacagacaaattaacaagttctttacaaatgactaatcaatttgttagctatacccgtgagtacttctccaccttcctatagctgtaattgacatacattatacataaccttctctcgtggttatccttaatatataattacaccacagcaattaaatgaaaatattcagtatgaacatgcatgcagcatatatatccatttatattccttacataaatatatatacactatatatactaatatagatgtcacataaacataataaagatcatgtgtatcacaatatgtagtatagcctagctaagctaagaccatactcgatcttatgatttatgaaatggaaactgtgatcctttttattagggctgttctgtacgtatcggatttggtatgattttctttttctttgaaccaaactattattaatattattattattagtttttgaataaatcaggagattatcattattattattatggttttctaaaaaatttaaaatatatatcaaattatattaatgttattcaaaaaaattaaaatgtattggttaagaattgcagtttgtattcaaaattgttctaatattttttgtaagtaatactttttttttttaattaattatttattattaattaaggtttctaaattttttaaagtttataatcaaaacaataccaactcataatttttttttttcaaaaatatctgcatccaacactacaagaaacgtcacttttgcctgcacaaaagttggtattgcgctggtaaaatagaatttacccatgatgtgttggcaaaagggggttgacaaatcaatgttggtattagaacttttgcc

SEQ ID NO: 391281 - DNA, 649 bp, Cannabis indica
ttaaatgagatttcggtagacatttgaaaaataaaatagagtaaatcatttttttggatgcgtaaacgaaggatttagcataacatccttgttgtactacataaatttaccattatatatatatatatgtatatacattttggtgctcattttctgagatattaatgtaaatcatatatatacagttgagaattctaagtcatgtatttcttttgatcaattgtactaactttatattaattagaggatcctagctaacatttcagatcataaaattcaagcctagttgttgtgcaattgatcaatcagtttaaagagtaattgaaactttcagttgactgttagagaataaatatatatcttatatataatcctcttgaaatttcattgataattgattgagtttagttgagttgagttgaggctctatgttggactgttgactaaactaaagtctttgcttaagttttagaatcacattgtacgtaggaattaattaattacaaatgaaaaactagtcaagagtctttaactcatgcagagctagtaatagtatagtatggttggttggtatcatcttgacatcttcatatcagaccaccttagttgggctgactctcaaaatattaagtgcatgtttgacatcata

SEQ ID NO: 391282 - DNA, 1498 bp, Cannabis indica
atagctccatcttcaccaaaccaaaaacccaaaaatcaatctgaccaaactccattgtcggacctctataaacatcgctaatcgcagacgaagctcatcacatgccgacctccacgaaccttgcttctcattgtctctccgcgaacctacatcttaatctcatccctatcaatctagaataacaaaagggtaggggaaaaatacatctcattttaatcatctctaaagtgctgcagtgaggacttctaacgttgggctcgtgagggctcgatgatggtctgtgctggtgaaagacgggagagaggaggtggccagaatttgggtgcttcagatttggttatgtatttttgaaaaatattttgaatgagttgttttattgtttttgtcagatctaattgctttaatatctaaaatatattttttatctttcgtagctttatctcgcatttgaactcgtcccctaaattagatctagtgctacgaagagagcacctgaaacttctttaaagatccaacggcagtcgggatcactcctccgagggcatttcgaaacttcagcacacgatatgagctgacagtgtaccaacggtcagaactctaatatgaactaattttttggacttatttgacagtgtacccagtttcttatgtgtgttgcattatgcacatgaactgctaggtatggatttaagtaatgttagaatttagtttgtgagtttttgttttctggttattatttatcaatgtggtttctatgagttattgttttttattttctggtgaatattgaaaaataaagaagaaagggtgataatggtggatgaagaagacgatatacatttagtaatttaggttttttttattgaataattaataatctaggtcttaagagaactttagttttaatctttactttttagaaaaaaaaaatatttaaatatatatttttaaaattttatagtatatttttcattttttatattaattttaaatatttaaataatttttttattaaaaaaataaaaaataatacatttggaccaatgagaggatgacaagtggatacttacctggctttaacggtcaggtacctacggaagttccagaactctaacagaaggtatttttactgctaaaaatacgacttaggtatttatctgctacttggagtaaaacttaggtatttttaccgcaaattactcattaattaaattatacaaattaaatttccaactctttttcgtcacaaatattttgataagataagaggctgtgcgagctttttttttaatttttgaaaagctttttcatattcctcggtccattcaaacttctcgttttcatggaggattttgaaaaaaggaacacatttgtctattgattttgacacgaatctgctcagggcggctatttgaccagtgagcctctgaacttccttgatctttgttggcgacttcatatccagaaggacttgaatctgttgagttttgtgccctaa

SEQ ID NO: 391283 - DNA, 1119 bp, Cannabis indica
atatataatgatcctagtcatatgatactatgggtggggacttattattattttattgttattattataccatttgtgttatgttgatttgaattattttacatcaacatatcttatgatgtaaaggaatgatgtattgttcatatcaaatcagtgagaattgttaataatgtattaaattcagacaaaaaagaaatatatttaaattcctttttaactaaaagaaaaaataaatatttacatcaaacattagaatgtgtggtgctaaatattatgattaacataataatttaggatttattatttgcggcaatactacttgaattattcatttgttacatttaattttataaattgacttctttaagattaaaatcttccaaactcaaatattacttttctattcaaaagctctattagagcagttttagtgaaagtagtctaagggttgctcactagtaaagtaggtcctaatttaacttttcaacatttattaattattatttttgatttatcttagacgtgattggatatattatatccatactttgagcaataaatatacaagtttagttttgtgacatgtgtattaaatttcacaattaatgaggtaacaattaggctcgatcattgaagaatctagatttaatatacatcccggagaatactagttaagcaaatatcgctacggttaaagtagccatcgattgattaaaatactcaaaatcgccttaaataaaagaggaatattttctcatcttaaataacagagtgatgaaggcacaattaggaaaaattatctcgcatgatacactcaattgacgagaagaagaaattgtatgttttgcctaagcccaaaatggcaaatgctgatttggtttcgtgaaacaactaaagtagcttataatgaacgcctcagaagatttaggacttaaactaaaggtgcttaacttgttaagtcattcaaaaatatttctggtgtagatatcattgacgaggagagacaagacttatataaagcctacttctggtaatcatcttagatggtttataatttggatcaaagtaacttatgaggagtctggtaattactttggaaggtttgtaatctggaccgac

SEQ ID NO: 391284 - DNA, 1461 bp, Cannabis indica
tgtgtgagtgctttaaataaattttagaattacactgttatttagactatttaatatttttatttgatgtatgtagtgatcatataataatatatattatcatatagttaatttatatgtgtcatatattcaatttctaactcttttgaagtactatatttaagttatatttaaccttgtcaacaattatatcatctaagataatgccaattttaaagttggctatttcacaatgatatctattggtatggaaagaaacattgtaactaaatacagtgccagcaaaccctataaaagattaaaagaagaagaaaggaatagatatttattcctcctatttcagacaaactatgaaaatattttttaagggtcaaattaaaagaatagatcatcattataatgagaagtagcaaatagaagtttagactccaacatatagatacatatttttctagcataaatattacatgactcaatcactttctctatattcaaaatctgattgtgagggtctagtagagaagatgataggtagaaataaaacctggagttctagaaattttttatgctggaagaatggtttttatcaactctattttgctatctattaattttaattggtctcaaattgttatcttgtctaaatctgtggtgtagaagattatttagatttgttgagcctctctttagaagggagcagatatgtgtaatggttctagaaatgttgtttggcatgattttttgtaaatctaagaacgaaggtggtttgggtgtcaaagacatagccttatggaatcagtgtgttgttaggaacatatgtgtgggatatttctacaaataaaggtaatctttaggtgaaatgagttaatgatgtgtatctcaaaaaataagattggtaggactaccaggtccctttggagactagctggtattggaaaaaagttgtatcaaatgaaaaaataaagttaatcttctcgcaataggactttcaaaaatattaatttttcatagaaatttgtgtcctaagatgtctcaaagaaacttattgagatggcgctatgaaaatatttgggatagattttgcactcccaaacttaggttcataatctcgttagctttgaagagcagactttcgacatattacaaattatgtcgatttggttataatattaattctccaatgtgtttattgtgtggaattgagttggagagccactctcacctcttatttggctggtgttacaacaatattgtggttcaacttgtttggtttggataggaagttcaactaaaagagatatttccatatgaagtctgaaaaactgtgtttttgcaaatgtcaattatatataagaaaatataaaacagtatgcgtctgcagaagcagaaagtaactctgctacagcaaaacagaacagacagaatataaaatatttgcagaaaaataaataacttgacaca

SEQ ID NO: 391285 - DNA, 1085 bp, Cannabis indica
cttttggctttatttgcatacggattaagataatttcttcttccttctagctcccgatctagtaatataccatacctaggaatatatacatattttaatttatatatatatgggagactcatcatcttctgcttcttatattcacatggtaatttgaatatatagtcttactctgtgttatcagttctatttattaatttatatgtgagtaatatatatatgtatgtgagatggatgatatatatgcaggtgcaccacttgatagaagagtgtatcgtgttcaacttgagcaaggaagagtgcatggaagcactatctaagcatgcaaatatcaagcctctaataacatccacaggtaatatataactgcatatatgtatatatcgtcatacgtcgtacgtcttttcatcatcatcatatcttttacatataaatatatattaattgaaaggtaacgcagtgtggaaggagctagagaaggaaaacaaggagttcttcgaggcctacgcaatgaaaatgaaagatcaagatccagatgatgacaataagtcaaggggcacagaatcacgttcaagcagctgatcatctcaaccataccatatatatatttaaatatataatataaccagttagtgaacactgtagtctgtaggtgtaaattgcaagcatctcaataaattaacctcagtataggaaaaagagctataaacgacaagtcatataggggaattgttcatgtacgacctttaagtaggttggagttgggtatatttgggaaagcgtaagctatatagtacgtggttgaatgggcctcatgcatggcgacacgttttgtatacgtggagctgcccctttctccattcatttcaccatcatcaaataaaatagggcattttacaaaaatactgaatttggggtaatagttttcaattttactgccacacggcagaattaacatttatactgtcctccgtttttttttcttttatattgtcaaaaacaaaaaaaaaagaatgaagcctccatctttgacaatcacagacataactgtcacgacccgagccctaggctgtggcagatgtgta

SEQ ID NO: 391286 - DNA, 504 bp, Cannabis indica
ctctatccattgggatatccctcgcattcccaggttattgttcctgagtatttatgggattcccttgattattttcttgtctcttggtccttgaacctcaaggccttccttgtggtcgcattgtagatggaccaggttaagtttgaggagttactccctgtgcaaccctggcttccgtcgcttcttgttctaattcgacatttctctagtttgaaaatctgattggatcataggcgtcttcactttgcctttttgggatctgttcaccagttgggttgaaatctccatcgttccttctagaacggggaatttcagttgtattggatctttgtgatccttgaggctcattttcaaggcaacaggttgcctcctctggatgattttcttcattacgctgagtatcatccgccataattacagattttgagttgtgtctctgaggagggttatttttgagtttttactacaaagactctcaatgaaagcaccaaactgttaacgcaa

SEQ ID NO: 391287 - DNA, 570 bp, Cannabis indica
gaagtagaagtagaaggagggggtgatgaaactttaatagctttccctctttcaacctggagccaagactgtggattgagagcgttgagctgagtgtctttgtatgattcagaggggaaaaaagtcctcatggggcataacagattaaacaaatcccagatctccacaatacccttatgggattttctctcaaaagctcaaacaaatgaaaatatatatggagaaataataagagagaagaaaactaccgcaataaaataaacaagggactaccactgatctcaaatccactattcctgagatgacatcttgttcccatccaggaacactatttttcaaaaaatgaaattgaaaataaaatttacaaacacttgaaaaattaagtgggtgctctaatttcctaagggaatgaaaaaaaaagggacataaattaaggtttgttacgacccaccaaaaaggcacaatcttctgtgagtttgcctcctcttcattctgagattcgcagaaatgaactctagtttacaacaaaatttcattagcttcttcagtgaaaatttaaaaaaaaaaaaa

SEQ ID NO: 391288 - DNA, 1666 bp, Cannabis indica
ttttgaattaatacttcaatggatgtatgatcacaattatttattctgatgtgataactgcgttaattgcgaatgctcgtaaacatgatgcattcaagaaagtggattaatacatgtgcactatatatcgcatcattgttgttaataaatttgaagatggctaaggtatgattagacaacaattttggattgactaaagtctaaataaaactttccacatagtaacattgatggattagaatcaacgttggataacaaatagaaagaatagaagaattaaagccttggcttatctaaaggatactacacatgctatgctgactatgttaatctgtttatccataaggttttcatgatcgacaatactatgtatagaactttgagagatatcgagtattcttactcatttgttaagatctatctcatatgattgtcttaaacatagtctctcaaaattttgactcatcaaagtttgaaagcttttatattttagaaagttttaaagtgaaaaacacctaatgagattaatctatgcatgcataataatatgcaatcacttcttgtatgtattgtttttgggtgccaagtacacaataagactgatatatagtcttaatttttgtaccgcatgcatcttggcttaatggttgttatatatttcaatgtctccaagaccaaattatatgtagtatacataccctatccatataatatcatacataatttatttgtctgtctattagatgattgagattaatatgatgtttgttgattatatttatcaagtgagagagatattaaaatcttatatggactaatataatcacaaatataatttttatattcacaaccatgttaggtattttctaaagagacaatatgagaagttttttgcaacaactcttaagatactgagattcaatggatcatatcgttttattctgaatagcctcgtgaatgttgtgattaaataagagtttacatctaaggctattttagaaattttaattttatgagacaatacaagacattacatttgacaatcttagattttaatcatataagagaaagcgaacatctcaattttataaggaatatcaagtttaatatgtttgcatcttctaactattattgttgataagtatatagaactatgtatgttggagttttaaggtggtactagacatgtgttaaaattttattttaggaaaattagattattgttagggtttatgccctaaaaagattgtaaagacatttcgtataataccctactagaatagacttgttatcgtgatattatatatgtaacaattatgaatgttaaaagaagtttcgccgtaaatatcccttatcaaaacaaattacttattttccagtaaaagcaacgtgaaaacaatatttttctaaaaacataaaaaaaaaacaatactctataataatatttaggctaattagtaatttttcctcccgaactttgacatgtactaaatcgtgccccctgaacttttttggctgttagaaattccccccaaactattgagattgttaaatttaatgacttttgtctaatttcattcaattttactatttcagtgattgtttatgtactaaaccatgctctccagactttgatatataccaaatcatgcccctcaaactttga

SEQ ID NO: 391289 - DNA, 839 bp, Cannabis indica
cactaataataataattagtgtcgaaagccctcccaatccataattaaatcatgtggtcattacatcctagattcagcatcccctaaagttgtatctttaagtccttaagtttagctggagccatcctatatggtacttttgaaataggctctgccccaagtgccaagttaattacaaaatctattttttgctacggtagcaatctcggtaactcctcaggaaaaatatctagaaattcttttactaccctgacatcctcatgccaaaatgattaggatccgagaatcctgaacggacccaacattaaaaaaaatggatcttcaccctttgattgaaaagttaccattttttgcctacaatcaatgctggtcaaatacttggacaagaaattcattccaagtataatatcgaactactatattaattataactccactaggtaaacactcaactccctattttcaattctagctggcatacacctaatcaatcttttggagataaccaactctctgctaggtagtagggttttaaaccctatctcaataaaatcacaaggccgacctaatttattaattactgtcgacgctacatatgaatgtgtagtcccagacttacacagtacaaaatagtaggagtcgttgacaagaatctgacctattagcactaaaggactgactgcagcatccacttgtgtaatggcaaacacccgagcaggtacgagttttgtctcttatttttgctcttcttttttcgtctaagggcatctttcttgaaatgcctgaccacgccacactcaaagtgtgacaatcagtaatcccgtgatccgtaaggagaa

SEQ ID NO: 391290 - DNA, 1032 bp, Cannabis indica
gatttaatcactaacaatggataaacattattagtaaaattacaaataaagttaagagataatgatggttaaactcctaatgttagttttattggtcaaagttaactatttatataaacactttgatggcataactaaaggtagtagattttgttgtagttagtggtctatctagattttttttttttaggaaaaaagtctcaccatgatggaactcaaaaaaggtgggggcgagaatacattattgagtagcatctgctactaataagttctgaatataacttggggaacccgaccatcaaacagtacttgaggacattgtaagagcgactttagctaagatgtaggcaacaacattaagatagcgcggtgaaaaaaaaaaatatcttaaaaactattacaaagattaccaatttcatctaagataagacccaaagaggaaactagaaaaattttgttcaccactttttgcacaacattcaagcaaccaaattcatagatgatattgtgatacccaaagcaatgacattggaccataactaggaaactaggctactttctcttatcttcactacaatatcactcatcttcacctcataatataataataattaaacttgttcaacaatatatataggattgttctgtaatatactgatttatctttatttgttatgatatttgagaaaaatttgtagtctaattttatatggtcgtcttaaaatagattttttgaatcttatttttcagcgtgttaatttttttttttaattttcaaacttttgaaaaatgtgctaaataactacaaataagtagaatttatttttttcaaatatcacaattaataaaaaaaaaatattttttagagattgtcttgtagaatttttttatgagctcggtctaaatatatatatttatttatataatttttttatttattttgttattatataaatttaatatattttaaagttagttgttattgtaataaaattaattagttattttatttaatttagataaaattataaa

SEQ ID NO: 391291 - DNA, 1776 bp, Cannabis indica
atacttctcaataataaaagccatacagtagcataaataattggagatcttttttacaaaacaaaattggcaaagaaaattttacaccatataaatttcaataatataaaattaaattaaaaaatagcatatgataaaaataatgataatgataataattctagataaaaatcatagatataaataaagtagagttggatttattaaaagtgagattggaggtggggtgagtagtgtatatatagtagagtactagagagtagacagggtggagtgaaaagttgtttgtgaaaagtaggttgagagtaattgtaatggtaatatagtagtagtagttctttttaagctcatatgacgattgggcaccatcagcagaattttgagcgactgaaacaaatataatttagtcacactcatcaaataaaacagcattgctattaggtaccactggtgcttagtaccttctcgacacgttgcgttacgattggctaacgatatttcctaaaaattattatattaaactatatgagacccgatacttagttggaccaataacgatactaacacataagaggatgctagacaccaatagtgtcctttaccatttcacaaataaaatgctcattaattgctttgcccaagctaaacccaacatttttttatatttattacatgtacctccgcaaactccttccctatttctaccgccgttatctcatccctacttagccccgctgcctccttttcacttacctttattattacttatgagttctctcaacaaaaaaaaataaataaataataaaaatgatgtattaatttagaaagatattattgattccaaaaattgttagtgtaattttttgagttatctaaattaatgagagaaaaaattccaaagtatattttaaaatggtattttttctaaaatacacgtaaattataaaataattataaaaataacttaataaatttcaattacaataatattttattacgttattaaaaaatacatttattctaaaataatatacttgatatgatactaaccccgaaattcttttttttttcttttaaattttcgtgcatttcaaaattaattttttcattgcttttgatgtttttttttttgggaaatcagcaagtgttcttcattactccaataaactttgtatttttacatactaaacaacacccttttatctaagagtctgaaaaagtttctatacaattcacaaattcataatttgttaaaccaagataaatcttctagtgatactttgttaggccatacactatgtattctattattacaagtatttttcaattgttgtataagaacattcagattcttatctctttgctatcaaaacttcatatttctagccttccaaattaggtacaccaatgcagcaagagcaactgctggtgtaaccctcttttggaagctagaaaccttccacgttgcttatgatcatgttgataatagaacaacaagtagtttttttttatatataaaaaaaaaaaagaatcatttttatattatataatttgagatatattttggttacctcgctctacaacttacatatatacatttaaataatcaattaattatttttgttatattaatacatttgagtaacttttaagtttattttcaaaaataatgagttgttaactaataagctactatattttagtaaattatatttttaaaaaagtatatatcataaatgtttaagtgacccatattttttaaatgtaaattaatat

SEQ ID NO: 391292 - DNA, 1237 bp, Cannabis indica
ctagtccaagtatgttggacatgaaaagcataccaaattaaattatattagcacaattttttttatatatttttaaaatttaaattatatagcaaatttaaagaaaaacgtatttttatttgagataaatgatggttgactggccatttattgtattgatttgattaaaattttataatttattatgatattaaatataataaataataattttatatttcttttcaaaaaaaaatataccactttcagattttaacatagaacaataataattttacactaaaaacaaatcataatttaaaaaaactcaaaaatttaattacacgattggaccaaagccatggccattgacataacccaaacacactagtcaactcaaatcaaacttaaaacatatatatctaaaaactttaaacataaaaataaaacaaatacagagattacaaaatttaaaaaacatgtacatattactatagactttatatatctaggtaaagcttctctcctccgtgaataatgaacgacaaatagtaaacggagttcgacattgaatgcagaacgacccatctcctctacgaacagtgaaagttaaacgaacgtcaagaaagtcaaatacagagattacacactgttcttctactttgtaggcggcaaatgtcgaatgtctaccacctgtgcaagaccaacttcatcgaacccccaaatcctgagccccaaagctcgatttcttcaaaccccaaagttcagtctgaaactttctcttgaccaaccccacgatgaattagcacgggagtgagagattaaaataagagagagggagagaataaatttgatgtaaatgagattagatttttttttgcagatgaaatatgtgcagctatgttaggttatcttagagggataagttaggttttatatgtaaatatataatataatcataaatatttgaattatgatataatgaagattgatatgtgttcttcaatttcgggtccattatatgataataataataaatattttaaaagtttcctttacttaaaaagagtgataagtgtgagtggtccttaaatttcttgaccggtatgcgtgtaagctaactttttttcaaggaatgtcacgtccagcataacttgattagaaaactaccccaaagtatttttctactccagtagagttggacatgaaaatagactatttttttaattaaaaattatatatatatatatattacgtc

SEQ ID NO: 391293 - DNA, 1416 bp, Cannabis indica
aacttgtcttaatgtcgcgacaaaactagagggtatataatgatcataccaaaaaacttgttaatggatgatgattagtatatcaatagtactattaaatattttttttttattaaatggtatcattaatgtttaggctttgcaaattgtggtagtagtaccatctcttaaaaattttctttttatgtcaattataaagagggctttgaatttaaataaattattatacaatatataattgtacggattgaacacttcaatattgtccttaaatgagaataggcaaactaaaattgacaaaatatagttaattaagcaaaatcataaaacaaatacggataccaacatatatttatataatatatatgtgtatggcctacttacccacaaaaagaaatgttttatttgaataattataaagctctccctttcagcaaacaaaaaaaaaaaaaatagtaaagctctcccttttcctgttgatatccatttcataataataaaataagataataatactggtagaagtgagaacacttaattgatgagttctatataatgattatccagttcaatatatatataatgattcaataaaaaaagcaaaatagtaaaagcgcacatcaaacagaaactcccaatatcacaaaatcccaccatctcacacttctcactcccttcatcttcactaaagcacttaaaaatggctcatgaaaccccaaccgtccctatatattgatttttttttagcttatttatgctgtagattcttaaattatgtaagctttggtgagttggtcctaaattttatttttttggtaaattactctccaaattatatacattttagtgaatttatccctaaattttattttggtaaattgatcctcaaatttttattttattagcaatatttaaatctccacttggatattgatatttttattattttttatgtatttttacttttttttttttttgttattaaattcaaagaatttcattttttaattttaagacattgataaaacaattatattaatatatttattcatttatttttatttctaagtattcatataatatttatttttttaccaaaatatttaaaatatgctatattcatatatgttatttaaattttgcatcaacattagtaaaattatgagtccacttctgagtttaaattaactaaattttataatataatttaattatttggtagtttatataaaaaagaatattattttggctacaagatgttgcgaaagagtaattgtactatctaccaccacgaactattgaaacatgaaatgatatgaagactgttttcttggaacgatactttccagcctctaaagttggaagcatccaaaaagaaatctgtggaattcagcaaattattggagagtcacttta

SEQ ID NO: 391294 - DNA, 824 bp, Cannabis indica
cagaatgtatggtaagtataattctgtttactttctctaattgaccatcccttgttccttgagttttgtccctatttatagaaatctaggatgacagttatcccttgtgatcttatcacttgtaaccgttcatgaaacgtggacaatccccacgtttcatatttactcaaatgagataattacaaataactcttcataactgcacgtttaattttatctataggcagttatgctgactatgtttcatcatgaaaaaacttgctattatagtcccttcttgcaaccatagttgtttcgatctttggcgccaaaatacctcccgttgaatataagcttcggttaagttcttccttgcctgtttataatttccaactgagacatcatctcgacccaacttccacctttgcatctcatcgcgacactttttaattatatctttgaagttgcacttgaactcctttccccacacacgcagatgttgtccacaaaaactcactttataatctcatcattcccacaaagcttccaactatccataatcacttgaaagcaaagaggctcccttaaccacacattctcaaactgaaaccgtttagcaaaatggtagccagcagtagaaaccagttccataagaatctgggcatgatccgaagtagatatttcaaggttatgaagtagtttagcagatgagaacatgttcaaccaagcaagattagctaaccccctatccattaatcgaacttcaatttaatcctttcacgctcccaggtaaaaggatagccacataactccatatcctgaagaccactatccgccaaagcttg

SEQ ID NO: 391295 - DNA, 1322 bp, Cannabis indica
acaaaaatttagagctcatggattcaatttccttaaaaatatttgtaggaatacgataataagccatggcatgtgaggggatagcatgaaggacaaccttaataagtgtttctttacccgacctgaaaaaccatttatgattccaagagtggaggacagtggcgattttatcattaagaaaagtaaaagctagatatttcacacgagagagacattgaggcagacccatatatttagtaataaaaggccgattttccagctgaaaagtgctaaagaataaatccctaaccccaacacaggtgtttggagagaacaaaatagaagatttggcaaaaattaccatttgtcgagaggctttggaataagtggtaagtgcacaatgcaaggcctcacaagagtgttgatcagcagagcaaaataaaaaactatcatctgcaaaaataatgtgagttatgaaaggagcatgcctagaaatagcaattcctcaaagaagtcccctatcctaatagttttaaagagttacaaaaagacccttagaacaaaggataaacagataaggggataaaggatcaccctgcctaaggccacgagtaggtctgatagatccatgaacctgttcattaatagagaaaaaaaattgaagcagtggtcaggcatttgaaaataagggagacaaaatggatagggaaattaaaatgaaacagaagatgtctcaagaaataccattcaacccgatcaaaggctttagccatgtcaagtttaagggcaacccatccctgcttacccacagaccgattagtaacagcatgcacaagttcattggctataagaatgttatcctgaatgacacgaccccaaaacaaaagcactttgacaaggggagataatcttatctaaaaccagcttaagcctgttggcaagaactttggatatgactttataaaaagtagtgcaaagactaataggcctaaagtctttgagtgaattggtgtgttattttttacgtatcagaacaataagagtagagttgatatcagtataatcaacccccctattgagacaatcaagaacaaccttggtgaaatcatcacccaagacagaccagtttttctagtagaataatgcgttaagagcatctaagcctacaacctcgtcccctgacagttggaaaactgctttcctcacctccttagcaatgaaatctttggcaagaaactcaatttcagggttctctagcccaaggcccaaaaaagcaaagattgaagtgttggaaatattttaccaggatctagatttactaccaagtatgtttcattaacatc

SEQ ID NO: 391296 - DNA, 558 bp, Cannabis indica
cccgagcaatcccctattctcttctttagagcctgaatcatctatgagacatttctgcacgtacaaaacaatacagccagaagaagatatgaaaaatgagaagacattaaaattaagaaaaataaatacaagatgaagtactctgcacattggcgggagcattctcccgaacgattacggatggagcgttaacatccgaagagtcttcctgctcctccaggatatcttttccttttccttcgacagggattgatgactgagcaggcacgctaggctccctaatctgaatagtatgttctatgcgcgctttctcggtcgggagagttttcttcttcttgcgcggcctctcctgctctgaatatttttgagcctccttctcttgcttagaatattcttgaacatactgtgtaaagcccgcttagtttaatttggaaattatcagttaattatgtttcattatgaaattatttatagctatttaaataatttattatactattatttatggaattcagtgatgcatttttatgtcatgtagtagtttgcataattttgcat

SEQ ID NO: 391297 - DNA, 1213 bp, Cannabis indica
ttgttttttttttcttttttaacattgactgtcctatttaaataataataatagcatatgagcttattcataatattgttatttgaattttagcaggaggttttattgggaggtgatataagtggagagcaattgagagggaccacaatcacaattaatggtgttgtggtcttttaaaaaacaaatggcccactttcactttcactactacacatgaaaaacacttctacttctcactagcttaatattcaacaaactaaatttaatggaaaccccatcattaataaattagtcctttttttcgaatattcgatgctatataatataaatatatatatatatacaaaatgaaaataattataataattcaatagaaatagtttatgagttaaaaaaaaatagaaatagtttatgattcatacattatagtgacacagcaaaatactttacgcaacaggataacctttttgtaactatttaattttgaactccaaaaaatcaataggccatcgttaatgtaattctaaagaaagagtgttgaaacctcttcttctaaccagagaaaacaacacaaacaactataattttttatacttatgtatatttttaattatataattaatttcttttatattattcaataaacaacgttatttttattaaaaaaatgtttagttgaagtgatatttatataaaaaaaaaaaatctaataatatttaaaatttattgttaataattttagtttagtagtaaatgaaaaagcccctattttaattttgtaattcttttcatttttagaaatatcatacattttttttataataataataaaaagatatttattttgttaacttcaaaagataggaacattacaacagtaattttttgagaaacaaaaaacaagtttgttctattttattgtttttttttaaaaaaaaaaatacactaataggcttaaatttaaaatgtaatgttaaaaaaatatacaattaatataataaataaaagataagagaaatatttgaagtttaaatttgaattgtaatattttaaaaaataataacaacactttctattatataagcacattttatataatactatattgaagttatgtacgtataattaattatattttaattcttttttttaaataatatattataatttttaattattacaatatacaataatattaataatttaatgaaat

SEQ ID NO: 391298 - DNA, 1308 bp, Cannabis indica
tataggttagtaaatcaatttttttttcaattccttcaataatatcgacaatttttggatcacatgataattataggggtaatatattttatcctgccttaattgagtcatcaatatatattttgaaaatttatatcccattaaagatgattatgctacagcaagacaaattgtgactagcttgaagtggggttaaataaattacattgagttcagaactcatactaatctctttatttactgatgtagaaaagattgtgcagcctaatttttttacatctatataattggttaggtttacacgaaaacaaaagtcgtgactatccacattattatggaggtagtaacaaagaggaaagcaataatattaactcatctctttacttattgaagtggataattgaaaatggagattttaaagacctaatcacaatctatattattaatatataaactggttaacttgaatgcggttttcatggtttgattctttgttctcgttgggtttaatagtattattgtgaaatattagagttcgtttggtacgccaatattacaccatattgtattgtatagttttatattaaatttgattttatgcaatatttttatgtaacactatatctggtattaacttttatgagcgcttaaatatataatattttagtataaattaaaataaatatgatatataatccaatttaatataatacaatacgatttaatacggtgttccaaacaaactaactcgtgtgtgtgattctttcgaataagatctctcttttggttgagtttggtttggttcttattgatattttagctttttgtgatagattttttcactgtaatcgtctatcaattctttagatcattagactaattagttatatctttactcttctaagatttggtggacagatctctcctcttgtattgctcacaaagtaaagttttcattctcttgagaaaaaaaaaattattatgagatggtttgagattatttatataagaaattttttatgtgataattataaatattttaagtataattagatttaattattaaataattttaattttttaatttaattttttgaaagtaattgtcaaaatctcacctatataaataaaaagccagtttagaagagtgctagtggaatattttgtaaaaatagtattaaaaattttattaacaaactttatatggttgtagaaataatcataaattatattatgagaccataaatgattattatagtctcaattttttttgaaaatgaaatatcaacttcattgaaatttagcatt

SEQ ID NO: 391299 - DNA, 1028 bp, Cannabis indica
tttttttttagtaaaaactcaaattagtttttttttttttttggaataaaaaggttgattatttcattagataaactttcaaccaatacaatagactttaaagtagaaggagcaccaagcttactacaaagacaatttgacataaaataaaactctcgagcaacccaatgagtgactctatttgcagattttttaacaaaaaataataattatttaaagaagaaaatagtaagccatattcttgcaccaacatattagcttaattgtaataaaatacaaaattgagaataaactatgacaaaattgttaatttttttatttagttctacattattttttttccagaataatttatttaggatgtgtgcataatagttaaaaaaaaggatcaaataatattaatatttatattatttacgttaaaattacattttcattagagttatatgaacactagggtgaagattatgtaattttgatgattgtatgacaaacaaaaagagtagatctcatatttttgtttttactaaaaagaaaagtatctttgtttagttttatttttggaattttcaatagtatatttatgttttttcaaaaatatatttaaaagtttttttgtattttgaaaaaggaatatatttaaaagtttatactatttttttcctaaacaaaaagtttagggcattttaaattatattgttatacacattatttagctataaacaagttgagtcaaaatcatacataaaatgagtagaatgttgggcagagtttaatgtgagttatttaattatatatcccaaaaaaaaaaaatacacaaagtattttgtttcgcaatttttacagttagataattttttttattttttaattataattttacagtattctatataaataataaaaaaacaacatacaaataacaggaaaataacaacaacaacaacaacaacagtaacaacagcaacaacaacaacaacaacaacaacaacaacaacaacaacaacaacaacaacaaaataacaaaa

SEQ ID NO: 391300 - DNA, 758 bp, Cannabis indica
aaaaagaaaaaaagaaaccctaattctttaaagtttccaagtaatattaatatatgtatacatacatggaaaatcttataattgttttcgaaaattaattataattgttttaaataatttaagagtgtgaaaaacaaagctcaaatcaaatattaaatgattatttgaaattctttttttcacactttaaattattcagattttttaaaaaattaacatacaaaaaattcaatgttgtaattacagtccgtcattaatttaaaaatatgagtaatttgcagtataaatatttaaatttgtcttataatgacaaattaatacttaagtaaaaaatttagcagtaaattaaaataccttccgttagggttctaaaacttcacattttataaagagataccactatctgatagtaatacccctttgtgaaatgtagtcccaaaccatctcagacacatagttataaatatgtacatgtcgtgttataacctaattaacccatatttttcgtactttttaaaatacgggtcgtgtcgtgctgggccataaaaaaatatgagtcatgtcctaccgtgcaacaattttataggatatgcctgacacggctcgcaaatctagtataattcgtgtcgggctgactcatttttcttaaatagactaacttgtttattgatacgagctcaaattcataccttatatttttacgtttttattacacttgatgagctaaatactaaaatatatgtgtattttatagtttt

SEQ ID NO: 391301 - DNA, 1011 bp, Cannabis indica
agagagagagagagacttaactcatattttgttttactttttacacttttatctaaaagcctctgttaaatgtcacgatgaactgcccacatatatatataagtgtacacgtggtaaatttttaatggtctaaataattttaattttcaatataataaaaattatattaaaatttcaaaaaaagaaatagaaaaaaaaataattagaaaacatttcttttactttttctgaaatacactaattaataaccctaacatatctttataacatgagaaattaaattatagatagataattgagtggcacctttgaaatttcaaaataatgttatttgataagaatataagaatacgttatttagatttatgttaaaaacatatttcaaaattacctcaacttttaaaaaaaaaaaatataaaaaatacgaaatatagtaaaaaaaaataaataaagaacaaataacaaattacaaaaatacaaaaagtaaaaatagtaattacagtgtttattatttttttatatataacaacaaagtttattatttactaacttactaaacatttttttacacttatataacaaatttttatccatatttttataactaattacatataccgtaaattacaatattttttccaagaatccccatttaatttttccaatattttttgtttgaatatttatatttccttgttctcaaaaaaaaatatatatatatatatatatactagttaagagttacgtgccgaggcacgtaaatattagttttagttgaagtttagttttttatattttttcttatttagattgtgtgatcatacaaatgatttgttttattaaagtaatatttgtgctattataattgagtattcaaataaaattaggtatatataagtcataacaaaataatactttattatttacttatagaaaatttggaggaacaagacataagttttgtaaattttaaagcaaacattatgtaataaaaattaaagtgaatgtgcg

SEQ ID NO: 391302 - DNA, 907 bp, Cannabis indica
agttcaagaactatcaagttttgcaatagaaacccaaaaaattaaacattcaaacatataagaggaaagaaatgaagagctcactcactaatttgaagcattaggttttctcagattatagtagttggtgtttcctgaagattctttgaagaatttgatagaaaatggatttcttgctctgattcttcaaaagcaaaaatggctaaaagttgttgattatggtttttcagtcctatttataagcagattaatgaggtaaagtaatcatttcaaattttaaatacctcgagttcccccaaaagtgtacgttatggactcaattatctgaaggataaccgacgaaatgtgctaattctaagacgtggcccgaggtacatgtcaatcagtattaatgagccaaaaattgaagagacccttggtcagagtcagatcgggtcatcaactgacacttcgaacacgtgccacccgttcagataaggatctagaccgagtgaagtccacgtgcgaccatgaaggtcccgcacagacttggggggcaaatgttatcccattttttgcacaatgacatggcacaatacacaagtaacacgtgtcctgcattcctcgcatctgggcagagatgaatgtataacttctaattacccgagaagggtgaagggaagatcatctgagtaggcatagatttggcttttcaaaccacttatcaggacttaactacttcaaaatgatctcgtgaagttcaggcacaaaaacaatgcctacgatcatgtgattgagttagagaaatatggaaacctgttccaatttcctattttgtgtatcataattatgtaatgaatattctttcctattttatacattgttagcaaaaggaaaaccttccctcatgtattaaggccctataaat

SEQ ID NO: 391303 - DNA, 1663 bp, Cannabis indica
tacggctctgtcgaaatagagaaggagacggacgatgcttttatgggttggcaatggtacagtggtgttccgatgagagagagaagttttttttctgatagagtttaggtgacaaagaaatcgagaataaaaagaaaaaaaaaattgttggatgaataaaagtgtgacacatatgcaatgtgttcatgtagacaatacttaaaaattctaatatgacaattaacaataaaaagtaaataaaaataatgaattgactaacaaaatataaatttaaaagattttagggttaaaatattaattttaagaattagttgcaattgtaataatttaagaaattttgctgcaacttaaatttaattgtaagaaaaatcgaagaccaatcaaaacagggctactcattattatgtgcagaaggtaatgatatgattggttagaaaatagaacacttatttataatattttccaagcaaaaaagaaaacaaaaagacaatcgtggtggcgttgatggataaggacaaagacaatgaaatcaattaagggtccccaaaagacatcttctttcactgtgtttccatgaaattaaagttaactttttttttttttgataaaaaaaaaaaactaaagaaacttactttcccataacatcccatataaatatagaacaatcctattacaaataagtggtgtttataagtattaattagtaatattttttaaaaattattaaattaaattatataaaatctgacaaaaaaaaaaaaatattagaacagtacttttagcatttcttataaatataataaaagaaaaagaatgttttggacattttggtcatcatgctattccactgtctactgtccagctcaaattatcttttatttcataagagcaaagtgaattcgttatgattactttgtttaaattttgttaaatttgagtgatatgtatttttaaatttaaatcacattttggggccactttctttttccttgtaaaagtattataaaatataatttgaatgtcataataagctaaagtacaattgaatcttctaagataataagaataagtcttttgtacaatttgacatatatgcctaatattgagtaatacttatatttttgtcctttaaaaaaaaaaaaaaccctatattattctgtgtaacaaagtgtattaaaaaagtatgtgtaagtaatagcaatattcttaaaccaatgcccattctaaaatattttttagcatgatggtactatgatgaactttaataatgaagtttaatctccaagtcttctaacaaaaaataaaatgaaatataattttaatgaaatgatagatggaatgagtttgcattgttgtcggaagaaataacaatttataatcttatctaaaaagcacattgtaaggagttctttagtttggtttgcttaaattagttatagaatctccattatgacatacaatcataggcataaaactcaacttttaatattattataaaattatataaagaaaaaagtcatacttttatcaatgtgaatttcatccgtgaaagaaaatatacaaatgtgtaagggaaatttgattttttatacttacaaaattttaatattttattcttaaaccaatacatttcaaactaaaaaaatatgacacttttatctaa

SEQ ID NO: 391304 - DNA, 506 bp, Cannabis indica
gtgatagggaacttggtggcggctcgagccgcggcgcaaatggggtggattgagtgcggtttgtgcatgttttcgttaggcatggctcactatttggtcctattcgttacgctttatcaaaggttttgtggagataacgctctcccggtgatgttgaagccggtgtttttcttgttcattggtgctcctagcatgggaagcttggcttgggcctccatttgtggaaagtttgactatacttccaagatgctattcttcctctctctttttctttttatgtcattggtacgttaattgtatatataattactatattattcataaatgtgaatgtgatcatatatatatatatagcattgctattagtaaccagtactatctagtactttattgatatctcgccttgcgattgactagcgatactttttaaaaggtattatattaaattatatgggatccgatattaagggtggtaccctttaacatcccatatatatatatatata

SEQ ID NO: 391305 - DNA, 801 bp, Cannabis indica
ctaatttgagttagcaaaccatcaatgtcgcgacaaatgttctccttcttttggactaattggacagcctgtagacaatcagattcgatgctaaaccattgatacctgtgttggatacccgactaaagacccctacaaatcgccatcaattcaaactgcaatggtggaagttcctgtcgcaccgccacagcagcagcatgaagaaccacaccagcagagtcacggttaacccagcctagacccgaacctcctcctccctgcttcacacccgcatcaacatttatttttacaagattcggctgaggaggagtccattgctgagctgctcgctgaaccttcttgctgctgctgctggcatctccttggaattcagcaatataagtgccgcaccattccaccatgtcctctggtttcggactacaaccaccatgaaccaccaaattcctaacattccaagtattccacaacagaaccagaagaaaagcaaacttatctttgtcccactccctagctagacgcatgagataggacaaattatcctctctccccaatctcttcatctccttagctagaccactcacctgccagaaacttttactggccgcacactcccataaggcatgggcaatggactcatcagaccgactggtacaacgagcacaggttgtgcccaattgaccccctcgtttagtcatcacagcattagtcggcaaccagttttgaaccattttccaaacaaagtgcttaatttttggagggatcttcaatctccacaactttctcctgttggaaatattttac

SEQ ID NO: 391306 - DNA, 679 bp, Cannabis indica
ttttgggtttgcggttaggtcctggatcctgatccaagttcaaagcccaggttctggtcctagtttggagcccaattctcgggttcgggtctcccatctattatttggtcctaggtctcggtctgggtccaagtgcatgttttggttcgggtttgggtcccaagtccaagtcctaatttgggtttggatctgagttcgggtctcggtctttgggtctgggcttcgggtcccatctttgggtctagttcttgcgtccagaccccggtaattatttaggtaccaggtcacacttcccggtctgggtccaagtcccgctccaggttctggtctaagtttgggtttgggtcctattacggtccctggtctgggtcctagtcccaatcctagtccgattctgggtctgggtttggatatggatcccggtctgggtcgggatccgagtctaggtataaatctgggtccaagtcctggatccaattgactacgggttaggtcgaagcctcaagtctagattcagatctcagtcttgggtttggctccgagtccggggtagtcaagttttgggttccaggtctggggtcgggcctcgtgtcgcgagtatgaggtcaagttttgggtcttggtcctagttcttggggcttagttcatgggtcaggtcccccatctaggtttggatcct

SEQ ID NO: 391307 - DNA, 724 bp, Cannabis indica
aaatgaagattcagccaatacaacgtctaacaactctgacggggggtcgttaaaataaaaaacacaatctaacagataacaagcactacactggagaaaatgtgctaccttgttagcagaacgtttgacaaaattaaaattgacattagtcaactcaagtaggagatttctgcacttccacaccagcaacccgaatgcagaaggcattagaatattgcttttaactgcttgaactgccactaggcagtccgtttcgagcgtaacaacctcccatccttttctcttaatacaacttagggcctctttaatcccacttgcttcaaaaatttttgatgaaacatggccaggacgacacttggagacaacttcaacaatttgtccagcagaatctcttaccataaacccaaagccaaaacaaccagctgcttcaaatatagccccgtcaacatttaccttaatcatgttagccaaaggtttcatccaatgctctatctccaatccttgaacattttgagcaagaagaggatccatacgattttgttggcacaacaccattgattaaggttcgatcttgctttgagaatcacatttgctgttgaagttgttctatgcttccaaagcatatcatttcttgcattctaaatttgtcaagctaccattaatacttcgaaaacagtagtgaaaaaccgtgtttttgcaaaatgtcagttatatataagaaaat

SEQ ID NO: 391308 - DNA, 876 bp, Cannabis indica
tttttgtttttttttttttgtgggataaatggggaccatgttatcttaaagtgtatacacaaaccaaatattttttaaagtaataataaataaatttatataaaccaattagagtttgacaagattgagtcattttacacttttagactattgtttgaaaaatgagtattttgtataaagattcacaaaagacaaaacaccatcaaaatattcttcttcttctttttcccctaaaatagaccataaattataatagagagaagcaatataaatttaattttcttaacatttaatgtgaacttgcttgtttagtgtgataatgtagacactaaacaatgctaaataaagatttgtttgtagtaaaaatgtgtaacctaactcaccttttgcatttaagtccctaacacctttttctttacatattagtctccgacctattaaaaagatagcaatattggtcttttttagttcttcatttattttttttattaaatatatagaggatatagtttggtatgaggagatcacgatttttgttttattaaaaaagttgaaatgggtgatttaataatctataactgcaataggtgtgctactaaataattaaattttatttttagcactgtaaattataaataatttttttttttttataagtgattttagaaaattaaaatgtacacaattttgaaagaaaaaaatattagactaagcacgacggtttttgaaggtgtgttataaaattaccctaaacatcataactctacaaagttatagttagtgaaaaatcttattttcttaaatcaaaaagggaaatttacatgatatactaacttttatcatttttttacaaaaatactgccaagcggtattttt

SEQ ID NO: 391309 - DNA, 1739 bp, Cannabis indica
aagtgacatttcttgtagtgaggatagccatatgggagaagttcaaacaccctactgatacattgtttcttactcagactatgaagattagtttgcatgaaaatagtgatgttgtgctcaattcaggcttggtcctcggcaaaaacggactaggcatgtgcctaaggataataggacccaaactttctccaccatgaacaatattatacgaaatcgttcgaagacattccatgatcatgtcaacccacgcctccgcaaagcccatccgtaataaaatagcttgtaagaaagactattccaccctatcgtatgccttactcatattaagttttagagccatataaccattatttctctgttgcttacgtctaagataatgtaatatctcaaacgaaacaagaacattatcagtaatgagcctcccaagaataaacgcactctgaaactctgagatgatcttcgataataagcttttgagttgattagccatgactttcaaaatgattttatatgatacattgcaaagagcaataggcctcagatcgcccataacagaaggagacttcttcttcgggatgagaacaagattagtagcatttagaccccgaggcgtgaacttagattggaagaattcctaaaccatcttaacaacatccttacccccaatatgccaacacttctgatagaaagcagacgtcaatccatcaagcccaagtgacttgtctgggtgcatttggaagacaacatgtcttacctcctcctccgaaactggctgtaaaagagcaacattatcctcatatgttatggatggttgcataacatgaagaacctccgcacaattcgaccccatagaatgaaaaataccagtgtagtagtctaccataacctgagacagacctgacccccactgaacccaagaaccggcctcatcttttaattcatgaatgaaattatttttccttcttgagctagcagcagcgtgaaaatacctcgtattttggtcaccctccctaagccacaattgcttcaatctttgccgccaaaaaaaatctttttgatgatagatttcagcaagttgttttctcgcctccttatattcagaaagagactccacatccaactggcctttaaggagacgaattctggttttataactttgaattctctccttaaaattgttagttaagctccttccccacacaccaagaggaccttcgaatagccgccactttgtcaacaatattacccgatacacaagtttctcattgctcctggataatagcatagcaattagaatcacgcaaccaagcattctcaaaccgaaacaccctcctagaagctgccttgaactgaaaatatggatccaaaaaaagaagacaatgatccaatgtggaaaagaccatgttaatcaacaatgcattcggaaacagactcatccaagaagtggtagctagcgctctatccagcctcacttcgatccaactgtcagtgcccctactcttctcccaagtaaacggatgacccacaagctcaagatccacaagattacaatcagagacagtttgttgaaagccatctataagccaattaggataaggattaccacctcttttatcatcttggctaagaacattattcaagtctccaataacacaccaagggagatcattctcttcattcaacaccctcataagattccaagtattgccccgcaacgaccgattaggttctccatataa

SEQ ID NO: 391310 - DNA, 595 bp, Cannabis indica
ttttttaatttaacaaaaaaaaatacaattacataattttattagttttagtatttaaaataattttttagttaaataatttttaatagttatgtgaattataattattgaagatatcataacatgccaaaaaattatatttaaatagtgtattttacgcgtaactattttattttatacgcgtacgtgtaaaatagactgtttgaacattttttttctattttgtaaattatttcgaatttctcaaaaattttataagatatattaaataagtataacgtacatatatataaaaaaaattaaactaaaaaattattttaaataacgaaacaagtagagagtatatcaatacatctcatttaaaaaagtgtagtgtaaaatcacctgtaatcatataattgaaaatagttgtgggtttcaatcacattcattaatttcgatagcttgtgtgggaatgaaaatagagtgtaatcgaaaaacaagtatattataggaaaaaaaacaggaaaatacaaaaaaagaaaaaattaaaaaaatactataggccgactcattaaacatttatacaacccacatacaaatatttacaaaaata

SEQ ID NO: 391311 - DNA, 756 bp, Cannabis indica
aaaatgtggcaaaaagatggccccaaacataaaaaatagcattttgaagcttaaataacccaagcaaaagggcacaatttcggcccaaagtcctctctcgcgcgccacgtgtcacgcacagaagctctctgtgcccgtggaccccatgccagcagcaccaacagtaccttctccccctcctgctcccacgcgtgcgtgacgcacacggctcctcctaggtcgtgcgtgcgcgtcactcccctgccctgcgactgaattgggctttttctgtccgggcacttcagccccaaaaaaaagtccacttcttcacttttttacaaccaatcaaatggtgacatatggcaatggtttatcaaaccaaccaattcgagcacgccacatgtcactccgattttaactattggtataaatatttttacccatatacaatttgtaataagtttaattgcacattagtccttttgccttcctatacatagaggcttagatttttagaattttgtacaatttcacagtttcaaacagaaaaattaagagaaaacgcttaaagcactcagtgttagtttactattttttttggttaatttttttatgggtttcttagctcctttattattaaggcagatgatgaaacctaatgtatttaattaagtatttatttttattttcattctcagtacaatgtatgcttatggttttcgcttcttaaaataatttttttatctttaataccatgtattttttatagttagaaat

SEQ ID NO: 391312 - DNA, 632 bp, Cannabis indica
tttttcttaatcaatattttagaatctgacccaaacttagattttgaaacttggacttggatcttgaccccaacctcggatctagattcggcctcagattcggactcaacttaaataaaatcaataaatggaaataaaaatgaaatttacagaacacacttttgtttttcgtttttaaaattgaaaaacaaaagtcgttatagaacgtatttttattttttaaaatgaaaattttaaaaataaaaattttacttctatttttatgattaaaaaatttaaaaataaaaagtgtaactaaatgtcacccaagttagttgacttgttaaatcagattggtataagatagtcggagacatacattttaagatcttgattcactattggcgatgctctaaccttataaaatacaaaggtaacgcaaaaacagtaaaacttctatccaataatacatttgggaccaagcaaattatattttaattgagaggttataactaaatagagttacattagaaaaaaaaaatattaaaatactaaaaaatattagagtaaatactattttgaaccttgtattttgcaaaagttactaattggactctctattttgttaaataacaaaatggaccctatatttt

SEQ ID NO: 391313 - DNA, 1398 bp, Cannabis indica
gggtacccttttacttaaaagagaggaaggggctcgaataattgagttgaggttcgtatcaatagagcaatggaagtagctatcatattttttgttggctaagcttcaaactttagaggtgagtacttctgatcattgtcctcttcttttgttcctttgtccaattgtttactcttcatttttccttaagtttcggttcgaaaaagcctagttgaaggatcctatgggctttcaaataattcaagattattgggaagaaaatgttgattgtaatctctttgagaatcttcatgtctgtagtgatcgtttgactaactggggtcaaggaattataagggatttaaagaattaaatgttcttgtgtaaaaaagaaattagaaagtttaaagaacatcgggatgatgaatcgtacaggaggtttaatgaggctaatgatagactgtcaactcttcttagtataacggaaacttattggcgccaaagatctaaacaactttggctcaaagatgaggaacaaaacaccaaatatttccatgcttccactggtgcaagaagaagaaataatttgattgtaagcttgtagaataatgatggggatttggtggcatgggtcgatggcttagaagatgttatggctgattattttcacaatttattctctacttctgatgtggattgggttagtatggtggatggtgtgagagtttcggtcactaagtcgcaaaataatgagcttctgctgtctgttcaagctaatgaggttaaaacaatattattacaaatgcattcagataaagcttctagttcggacgggcttagttcgggtttcttacaaaaatactgtcatatagtgcatcatgatgttgttcggatggtgcaaaagttctttgagattggatgttttcctatatgcgttaatgacacaaacatcgtcctgattccaaagataaaaaaatccagttgctatgaaagatcttagtcctattgcactatgtagtgtcatttataaagaatcagccttcggtcatgggagattgatctctaaaaacattttggtatcttttgaagtaatgcgttatctcaagaggaagagagttgattgttgtaacttattttattatgatcttatttacgaatcatgtatacaatataatctaacattttaaatatataaagtaataacaaagaatttaaacctttgaaagatgatagttctcacattaggttgtagcataatataatatttttcgtcctaacattctaacctttaatttttttgttgttgtaaggttttaaacaagtggagagagaaagagattatgcaataaatcgtgaattattaaaacttttcctaattaatcttaaatattaaaataaataatatatataaccaggatc

SEQ ID NO: 391314 - DNA, 655 bp, Cannabis indica
aaaataaaattaaattttaagatcctatatctagtaggaatttaaaatcccatttaaaaattaatacaatgagtctcatagtattttgtggatataaaaagagtttatggccattaaaatgaggtatattgtaggaaattgaaattgacttttaatatagtccccctcattatttattgttatgtttgattgatgtaaaaaaacactcatttttcttttctttttaaaaaaatttacacaataaattaaaacactcatttttttttaaaaaaaattaaaaattaattaaaaaaatcttttattatacttacgtcattttaactaatcacttcactatttttttagtgaagcgtgagataaaataatgttttacaataatatttactttttatttaatttataataataatgttactattattaatgacgtattacgtcagtcacatttgacgtttttttttttaaaattttcttgtgttttaaaagtaactttttagttactaagaacatctctaatggagatataaataagtggtataaaactaaaatatagctcatttaaccaaaaaatgtgctccaatagtatgccaaaaagtgataaatttggcacatagtaaattttgtaccaaatttggcacaatattttctatgatat

SEQ ID NO: 391315 - DNA, 632 bp, Cannabis indica
tccggcaaaagaaggtaataatattattattcattgttatgtattttgtgttatttcaatctaagatgtattatcattgttcctttgattaatgttatattttgatttcgtgattttttattgttatcagaattgaagatgttctttctcgttacataaatatgccagatcatgatagaggagggtatgtacgtatatagatatgtaatataattaaccaaaactttcttttatataaatttggatttgattaaagattcaacttactaattttttattctttctttcagggttgttcgaaataaagaggtagtagatatatacatatgacttagtatttgcatggcgatgaagatcattctcaaaataaattaataatttgattaaattcaattgttttttaataaaaaaacaaaacagtttttactcggcaccttgaagacactcaagatggaaagcgatattgctcttcaaattgcaaagtactctctcttttctttatttagcatttttatctttataaacttttatatgtattaaattatgtcattaatattttaagttgttaaaattttcttgaactattaaattattaaatttaaaattttatctaattttattcaatttcacta

SEQ ID NO: 391316 - DNA, 1129 bp, Cannabis indica
tcgtgttcatctttgttgaatttactttataaactgatttactttgattgactattacttgtgttcatcttgcttgtgtatcttcttagatttattgacaaaaaaacacatcaacagtttggtgctttcactgagagcagtgaacacaagtgttaatcaccacttataaacatggtgagtaggagatagacagactatgaggatgaagaccatgatgaccccatgaatgaagaaaataccatggaacaccatgaagagtattaacccgttgaacccactggtgaagggaactctcgacacctaggaaaacaacccatgcctgatgacaaaggtcaattcagagatgctggaggttcatcatcaccatcccatggtatacaacaaactagcaatgtccatgaggtgttcgtggaaaacaaggtattacgccaatacctagatgaaactctcagactcaacagatagtggaaatagagatatggttgccaagatgccacaaggccgaaacggcgagaaacccacgagcgtcccggtatggcaagaaatggacgaccccgtgggagccgttcgatacgttaccctatcgaaggccaagagagatctaggtaacgaataacccaaagtcatgatactaatcgtaatgccataccacaacgaccttctcatgagaacaacatccattgaaggaggattgagcgtcctccatcacaataatgacaatgggaaacgacgccagtcgtgagaacaaaaagaacaatacattccctcctacatagcaacaaactaggagggacgtgcaagagcttggtgcccctcaaaacaacgttccacatttccccacaaagaggcacctgtgaggagaggggcacaacacacaataatggagtcccgtcatctcaactgtcttcgactcctagggatattggtgttgatgaggatgaaagagatcatgtccagaacccaccttttccaatcaggtttcccccatcactataagacatccttagcctcctcgacctaacgcaccgccactacatcaaccaaccaagagaggaggtcacgacaaagggaggcactgcccactcgtatccaagttaagacttgactcggccccgttcgagacgagcga

SEQ ID NO: 391317 - DNA, 1132 bp, Cannabis indica
ggcggtctgggcatttaataccgacggatgcttccgccgtaatatagaaatctgttgtagtggtatattgactcgaagatcaacgaaggtttgatgtcttatataaatttaaagttcaataatttgaaggatgctattgaaaatgcaaaagttatcaaaaatagagatgatagtcctgatgaaagtgatgagaacgctaaatttttgagtgtttactttcatattaagtttattttcattatttatttctatatttattttttaaaatgattttgattttaactttttttagtaggttgatgttttaaatgatattgaagtggttggtataaaaaatgaatatgcaattgaaactgttggatttgatgaggagaatactcaatctactaaggttatttttgatttgtaaactataatttatagtttattatttagtttttcatataagtatattttttttataattttgattgttaacctctttttttttattattattattatttatgattttttaattttatttttgtaggttgttaaagatgatgattcatcatttgatattatgagttttattattttaagtaaacttgaatggttcaaggaacaaaataaaactagtaggagtagataataaagatcgagttgatgatgatcatattctttttaaggatatagtgttaagaaagataaggaagatgaagataataatagagatgacaagataagtttatttaatagatttttatttttattatgtttatatttatttacgtgtttaacttatcttgtaatttattttgttctcattttttcaatatgttttaacttttattgtttatatttttgggggtagtgatgttgttaaaaagatttgctcaaatgtatgtggagatggtagaaagaatgtggaaatggtggagtcggaaaaattgataataagatgtggttcttgttggattaaaaaattttatgtgggcacatatgtataatgtatatgctattataaagtgtgatacaaaattaagtgaccaattatgttatgggtatcaaaagggtattaaattgttatggaaataatgtgtagataccataagttaatttataatttgttgaggggccaaattataaa

SEQ ID NO: 391318 - DNA, 533 bp, Cannabis indica
agtaataactaagcatgccttgtaaaaagagtattgcataggtcgacaatcttagagctatttgtctgaagcaaggttcttctggatataaacctcttaataacattgtaatcatttatgtccttgtatcctcaaaatgtaatttttgtaaataattgtatctctctttgtcgacatgtgttgccgttgcatcatgtatttggcaatctgctacccttttgcagcttgaaattgtatactttgtacatattttagtgtcgatatcactttgaattggtgtctaaaatattttctcttgcctatctacagatttggcgttatattttagttcttgaattcttcaatctagttaacacttgaaatagtttatgttcatgaatcatgtcttccaatcttccaatacttttggttagatcttatacatcctccttcggattaaaagatgggaaatttaacttagtgtgtttaaatgtaaaacatgttgttttaatataccacctaattagaaatagtatatacttttaacatctttc

SEQ ID NO: 391319 - DNA, 813 bp, Cannabis indica
aagtggaaactgtatccaaagatcaaaggagtacatgagcagagaggtaaatgtatacaatcaaagaaaagccacttgttctaagcctaaagcttctttagcggcagaattagcctctcgcgggacatagctaattgaagcttgaggaagatcgacaagacagaaggctaatgattttggtgagaaattcctacagatgaatgttatcagtgtgacccaagcgaatagcatgcatgagattcttgcaatcagattcaatgtgttgaattgcaagcgagttctcgtgacaccattggagagcaagttgaagagcatgtgcttccattataagcggttgatgaataccgtgccaggaaatagctaaggctgcaattgcatttttggtacgatttcgaacaatgaagtcgaagcccatcttgttttgttgaatattttgggcagcatcaacattgagtttaagatggccagttggtggtggttgccactgggatgaggaatgacgagtatcttaaagcttgtgtggtgtgttgctttcattatgttgctggtattggagtaggtaattttccgtccattgaatgagtgttgggtcatcttaagctggcttgtgatgtaatacttgattcctgcaatgccaaactttctagaggagacaaacaaagaaatgaaagtctttaggtgtcataatatcagtacttaaaaataaaatatcattgcaatgtaaggagtttaaattaatagaatgattataaaagatggctaatttctaaaccttctggacggatgaacaaccaaacagagcatgtgctaagg

SEQ ID NO: 391320 - DNA, 1705 bp, Cannabis indica
acttatttggttagaaaatatcaatcattttctatgggatattgaattctaaattacatgtcattatcgattaaataagttatacccccaaaataaattgataatcacactaatttaatgttattaacttttagatttttcactccttatcacatattgatgagtatttaaagtaaagataacaatttaatatttactaacaaaataatttaaccttcatagagaaaatacagtattatcaattatgattataaaagttcttttgcagcatttttgttgttgaggaaagatttctgcaaaacacagcctaaaaaaaaataaaatactagtgttgactttgaagagtgtcaagacgatgtcgtttgataaccttcgttcagtagagcgcgaaaaaatagataattaacattaagaatttatagtaattcactccccgttcgttaattggtaatagagctaagtctacttgagctctcattgaattattggtactcataacacttggtctaagtgttgatagaaataatgcttacaaatagcgtgactcagaacgtacgttcagtgtgaaattagaaaaaattacttaaaattttagatattaaattttctagaaatctcaaagtatgattgaatatttaaatttaaaatactaataaaatattcaaataaagagcatattctaagatattctctttgagttgatctgggtttgccattcaaatattgactatagatattctacgcttaatctgatctattaatcttgtttcttgatgaatggtttaggtttacccatcttgacttgaatgatgacctatgatcttcgagattgaacgaggtctgttgatcaaaatttgaggctttgatacctaattcatactttcccttatgatgactcaaatttttaccaagaggagtctaaatgtggctttcgtcatgaaacatcaattgaaagatatttttaatgaaattagaatcacgtaaatctcagttatattcagcgagatatgccaaaacactactgtagtggccaaaaattacaccaggcccaaatatctcggcctaaatcggaattacaatcctttacaattaagtcagtaaatataactcactcatccaaaatacattaggctttggctaagatagcccaaacgatcccagtagctataagaccaatctaatacaaagaataggaacgagtctataattgaagcataagaatcgatccttcctcttggaaaaagggaagaccacttcccacattcgttcttcagaataggggaattcaaccatcagaggctctataaaagaagaacccaggagtcctgaaggaccatctcatcttaactcactgaacactcactcaagaattcacgcaatacattaccattattattaccagtccttctccatcactctacggtgcaaatatttatttttatcttctttatttacattcatctattcttcatttattttatttatgacttgatcgtcgaagtcccttcggctggcaccatccggtgtcccaaggtctcaacaatccttttcctttgttctacgagttgttagtacccgcgatccttccattccgatcattgtagattttggcctctacaatttggcgcccaccgtggggccctgagaaactgaatcaagagcgaaggacactgttgtgaaaattatattgctttataattgcgca

SEQ ID NO: 391321 - DNA, 2175 bp, Cannabis indica
taaaaataaatataaccattatagttacatatttgatgttactattgagacatcttccattcctataaatattcttattctaacttataatttttaaataataaattatataataaaaagataaattttaaatttcaaaattcatatcttaattaagatgtctataaaaatatttaagttagttttaaatttattgttatttaattaatcatataagataatttataatataatattttaaataaaaaaaataaatatatcttttgattataaaatatatataatattaaaatttttaatcttataattaaataatttgtaaaaattaagaaattaagaaattttcaaaatttaaccataattcaaatataaaataaataattttttaattcatacttcaaaatataaaaaattaataataaactactaaaataattaaattattaatttctaaaattaatatttaagttcaaatattaaaaataatattttatactgaattttagagttttgaaatggaaaaatttgtaatttgagtgaaaaatcacaaaaaaaaaaaaattggatccaaaagcaccctgtccaaactgacaggctaggtgcagcctatccgcgcacgcaagaggctactggcagcctcgttcgcacgcgtaggatgcttcttgcagcctgttggttcggacaaatagggaacaggcatgcttcaaacttcactgcgcgcggacaagaggattcttgtccgagaaacacacgcatgagaagggatgcctttcgagatgtgcaacgctcaaagggctgctcgcatggcagtcatggcaccgatttttaaaacaccataactttctcgttttttatcgaaatcgagttcaaaataaacttgcttaaaatttcacaaagatcatttttaaaataatttcaaaagaaaattaaagttatttatcatcaaatattttagatatttacataaactcattgaattcacataaaccaccataaacacatccaaatcaatcaaaaaatatacacaatcgttttaaatccatattttatgaaaataaatcattaccatggctctaataccagttgttgaaaatttattttaccaaatctagatttaccagcatgtatgttcattataattcaataatctaacatcctaaatatgaaattcctaaaaatgataaataaatacattagggattaagaaatccttacactaatattagtagaataatatgacttctttcattcagatctctaacccttgattcctgtctgtagtagagcattatcaagatctgaacttagattctccttctgatgacaattgaactacatagtcttcctcagtatgtgtgggcatattcttaacaccaaggagcacaaaattttgagtaagaaaccaagagaatttcgaaaataatgaatggaatagctttctttttattcagttttgttcagacaaaaagagagtcattaatcattcaatgaaatgtcataatgttctatttatagggagatactagggttagattttagaataaatgagctgaataaaagaataaaattgcttaaaatattcaacccttggccaaactcaacatcaacgcccatgggtttgaatttttacacttttgcttccaaaagcaagacaatatttttctttcttcaaaaatgtcatttatctattctaattaattacatgctaattttatctatttaataattataattaattattaaaaaaaattaccatttaaatatatttattaattagactctccaatgtctcttaattaataaacaaaccatgtattttgttttcttcttaactatgcccttccttagtaaaattcataaataagacacagttattatttagaatcttaattgattaaataaatcaattaattgagactacaaaataatattatttcagttagtacgaagaccatgggcctatataaccaagctcctataaatagattcagaattgcactattgattacatagagcactctatataccaaatatagatacattatgaattatctattgttacaatctaaacaatcaatgatacctctacagacgatttatattgagtagggacaaatttactgttttacctttcaatttattttatccttataatacttagctacttgtaaataa

SEQ ID NO: 391322 - DNA, 501 bp, Cannabis indica
tattattatctatcaaattaaatatggttttggtcaaatataaatgattataaaacccatgttagaagcaattacattatctaattattactaaagattaattatatgagttatacttatattaattttttttttttttgtaaagtatttaatatttataaaactttaatttaatttccaactttgtcaaactttaggttttcatgagagcaggaaaaaaaaataattcctttagcattttttaaaaatatttatttaaaatataataaggctaattagtaatttttcttcccgaactttgacaaataccaaatcataccccctaaacttttttggccgttaaaaattccccctgaactattgagattgttaaatttaaagacttttgtctaatttcattcaattttactgtttcaagtactaaatcatgctcctcaaattttgatatctaccaaatcatgcccctaataacttttatatgtattaaattatgccccctga

SEQ ID NO: 391323 - DNA, 741 bp, Cannabis indica
ggaggcctggccgagtgactttgtaggatgcttgaccgagtgactttccagaaggcctgactgagtgactttccaaaaggcctagtcgagtgattttaggggaggcttgaccgagtgactttgcgggaggtctggacgagtgactttgcaagaggcctggctgagtgactttgcaggaggcatggccgagtgactttgcaggaggcctggccgagtgactatgtagaaggcctggccgagtgactttataggaggcctagctgagtgactttgcaagaggcctagctaagtcactttgtaggaggcctgatcgagtcactttgcagaagggttggtcaagtgactttgcatgaggcctagttgagtcactgtgcgagaggcctagccgagtgactttgcgggaggcctggccgagtaactttgtaggaggtctggcggagtgactttgtaagaggcctagccgagtgactttgcaggaggcctagctaggtcattttgcaagaggcttggctaagtgactttgcaggaggctggttgagtgactttgcaggaaggcttgttgagtgactttgtaggaggcctggccgagtcactttgtcagaggcctggccgagtcactttgcgggaggcctaaccgagtgactttgtgttaggttttaaaacccatttcaatataatcagattgactagttaataaagatcagaaattattttatgttgcatggtacacataatttattt

SEQ ID NO: 391324 - DNA, 1011 bp, Cannabis indica
aaaaatatttcgaccaattaataaataatgatgtctatttaaattcatattgtgtcatttctattaggaagttataaatttaccattaaatgtgtacaaaggtctgctcgaatccaaagaaccgaatagataaaaataatacttgtgatatacaagtggccaagagtcaaatgtctgctcggtcactgggggaacctacacccgtacacatcattggtaaaagtaacaagctcaaaaaaaaaaaaaaacaaacacagttgcacaaatgattatcaaaacaaaggatagtattcattgaaaaagacaacaaagcacggtaaatctgagattaaaagctgcctgatcagcttgttgtcttaatatgaaaaacataacccaagtttaaaaaccgcttggccggtcttatttgtctctaaaaaagggcctacgggggccgaacaaatacaaaaaaaaaaagataaggaaaagtgtttagacggaaggggtcctgggctctctgtacggattgacctggtttgcagggactggaggctcaacattctgagcagcaggggtgtcgttgctctggtcggttggaactgtagaagtggttgcctcggggttctctttggctatctgaccgacacagaaattaagatacattcccttggaatcaccaaggtaatcaaattttttgagggattacccttccagaaatcataaaagacctcgagggcggctatttccgggctctccacctccttctctagctcttcctccctggtctgcttagcctggacatctccctctaactttgagagaagagtgtggagactctccctctcgtccataagagcattaacatccttggacagagcctctcaagtccaacttcgtaagtatttttccccacttagctggtcaaacagatcagcgattaagggaatggggtatctgttgcgcaaagtcaccttgttgaggtcgcggtagtctatgcacagtctcaaggtcctatccttcttcttctagaac

SEQ ID NO: 391325 - DNA, 896 bp, Cannabis indica
acgaaactgacgacctacgacgcagacttcctccgtccggtcgctacccaacaccaacgcacactcctcctgacgacacgctcatcgcctctcgccctcctcggacgccgacggccatagtgaaactttttcggctacagcggggaggttgattccgaatttgcccaaacgtttgtgattgcctgctggcacaaactcaaggctcttcttcctcccaattgggatctaatcaatcttgtgagtccagaagagacactttcgaggatcttggactataccctcatggtaagttagtcatattattattattattatttctcatattgatttgctcgtaattctcgaagcttctttcctctcttttacctccaatcgacgactcttggagcggctcagatacctggagggcaaggtgcaaaaatcactagcccaatgtggggctgcgattaagcaatgggatgatgcccagtaggaaatcacccgtccaaacaggaggctgagaagtcgaagaaagatcttgaagaagccgagaaggccatcaagacccaggctgatgaatttgagaagacgctcgctgagaaggaggccaaacttaaagggaaagaagccaaactcatagggaaggaggccgaaaccacaaaacaatgcaacaatatcagcctccgtactgtataccaagcctggatggcgaattccaacatggacagaagcttcttggaggaggaggaagagaaaactctggcttgctgcgataaggccaggaaggaggaggaagaggccgaggcagaggaagaagaagaagatttatcgaagtctcccaccatgtaggcttggtttctattcatctctctttttgtttttaaaaatggccttttggccgagacaatggtttgccc

SEQ ID NO: 391326 - DNA, 2110 bp, Cannabis indica
ccattaaatagtcacccatatatatatatgtataatttactattcattttatatatttattggatactatatattaattgtcttaaatattttttattaattttttttgcattttaatattttttttatacatttgtatttattaaaattatatattaaaaataaataaaatatattgaaattaaatttatgataagtaaaattttgataatgtattttaaaaaaaaaaaaaactaggttgtaatataaaagttaaaaggtgatagagaaactatggagtgtactcctctaagtaatgtaatatagtggtggagtttgttggggtggtccaacatggctgtttttctaggttttttatttttccaaataaccaaacgataatgacaaagtttctgtctctggtgacacagtgtagtaataatgagcactgactctattctgtgtttaattgtgagtttgccttttctctttccaaaattaaaagcaaaagctcaatcctttatgatgaaaatgccattaattattttcattctcctgcatgcatatatttccacctaatctattaactttttgttttgaaataatataaaaataatgggagcattctgtaatatatatttgttttttctatttatttttttaattacaaaaacgaaagttgataaattaaaatatctgtttcataattgttttagttgttttattttaaaaatataaaacaaaataaaaatttgttttgaaaatattatctttttgtttttgttttattatctaagtgaggggcggatccacatagaggcgaggtggggcgactgtccccctaaaaaaaaataaggaaaaaatatatatatatatatatatatgtattttagctagttacatcatatatttttaaataaaagtgatatttataaacacaatataaacttcgtcataatggtaaagctatttcattcacagtcctagtcccaataaatgcatatttgctttagcatttgaattttatttttttaacgtctactaataaaaatttgtatttagtgtcttaattattgaacccaatatttttgttgttatttttttttactttatactacatttaatactaaatataaatttacattaatttttaatatgttatacaatataaaaaaaagaacgcccctcctcacgtaaaaaaatagtcgcctcccctccaacctaaaactcctaacgttcgctactgatctaagtgagaagtgagaaagtaaagtgagagaaagtgggtaggggttgagagcttaagtttcatgttgggaccgaggtccgacatcaggttcaaaggggattgtgccagggttcgaggtttggtatggtccggccaggagtcaagaacaaaaatattgataaaaagaataaaaatattataatttcaatatattttaattattttataaaaaaaacatataatattatatagaaaagttaaaaaaataaatagtagtaaaatatatttagctcaataaatagttatctcaacatttagccaagcactattcattaagttaaaaactatgtaaagtagttaatatttaccttacttgttaaaaacataattttgtaagttttctctatataacttaaaattgagctatttcagctcatctattaagaatgctttaatatagtctaaatttgatccatactaagaggaaaattatagtaaatgaccctaaataataagattatgttagtaaatgttcttattttaaaatttgtagtaaaatgacccttttaggttatttattatttatgttgtcttttccgacataaaaaaaaaatcaaaaaaaaaaaatttcatatttttttttagaattagaaacaaattacttcaagattatgttatatatacattagttttgttaaaatattttttattaaaatatattaattttttatgcgttattttgggttgttggtatatagatattttgttctacattataattctgttttgttgtataatatattattattcttagatgatgtttattttttattttgctatgtacaatacattaatatataattatcttaacataatacaaatattttaatgtatgtatataat

SEQ ID NO: 391327 - DNA, 934 bp, Cannabis indica
tatttaattatactaatagcgattgatatgacactaaagaaaatgttaactactaataatatcttttcagcaattcctatgtatatagttttatctttatttatagtattttttatagtaaaggaaatgaattattatttattttagattgggaattgttagaggaacaaagtatgaagaatggtgagaaaagagaaaacataattgttgcatgtcatcaaccccaatggcagcatcggagcagacaagcttggataatgggatgagagagaaccatatatatatatataatattttgtgtaaatcactaattatacatatatagaacattttaaaagtatttaaattggaagaaaaaacatttgtaagattttctttcttggaaaaaaaaggattttctctttttgtgaaagtagaactctaaaaagaagaagctaattttactacatcaagcgaccgaatcctagcaagttaattgtttcttagacctcagttaaaaatttaagaaaaaaataaggctgagcatttgagctgataatatattacaggtaacaaataacaatgctactcgatgtacataatttagaaagatttttttttttttttttttggaaagaacataatttagaaagatcatctcagcatatatgtataaagttttctcagtgaatatgaatacatgtggttgagggtaagaagtgctgcaacaaaacgacacgtcatataggtaccacacatatacattagagtaatttgcggcaaaacctctttaattatcaatttacttgcaaaaaaccatctaacttcatatttttgtgggaaaaccctctaaagtaatgttcagtttacatttttaaggtgtcgtctgtccagtcttgtgaagtcctaattttgcccacgtggcatgacaggtcactaaaaaattatcttatgt

SEQ ID NO: 391328 - DNA, 1817 bp, Cannabis indica
aacagtcaaatatccatctatcaaaaatacgttttttctcagtgttttaatgcgctggaaaatagacttttcccagcgcacatttttgctcgcaaaagtttgacttcttccagctcgtaatgtgtggtaaaagtagacttttccaacgtagatttttgctggaaaaagtctaacttttacaagcacattcatttttgccaacgtttttcattttgtgctgacaaaagttttaatactaatacggatttgccaactccttctgttaataaatgtgctggcaaaagtaaatattgttttacaagcataatacctaacttttactgacgtaaaaatgtactagtaaaagtttcatttcttatagtgaattagcacatattggagaaaaaggtcttaagattataagaaggaaatgtgtgtttgggacagatcaaatcgaagagatagaattctgtgagcagtgtgtactaaaatttgggaaaaaaactccgacaacttttttgataaaaatgtctactccaataatttttttgacaattatgtttgctccgacaactttttcagcaataattgtccttagaattctgtcaattttatttatgactttttgtttccttttccatattttaaattttgtttattttcttttgtattattttttataccacttaagagtaaactttaatttttttttccaatatttatgaaaatcccgttttgcaaaataaatcgattaaaaggtgcttggtgtaaaaagtccataatgttaacatataataataataataaaataataataataataataataataataataataataattatataaaagaataacaaacaaacctggagatcaaattgccgaaggtatggtacgtaatcagcaagattgaaagctccgaacaaggataaagcctccctaacaagacccttcaagtcacagctttcatctctaactctccccagtatgatcctacacgagatatcagcgatggtcttccccgccaattcactgatatcaactacctcaccagccgccgcagccctcttaaggctcgccatcatagacccaacctcctccttccttagcgcagcgaacgagtcaatctttgacgcgctcagcaggtggagcgtgcaaattttcctcacgccgcgccagtacgaaccgtaggcgttaaacgccatgcccttggtgccgtaccacatgcactccgaggcctgcactttgggtcggctagcgaaaacagtgtcgtgcgtctttaggaacagctctgccgcttccgggctcgaaacgacgacggttaggacatggcctagcctgagggacatgattggtccgtacttttttgctaggttttggaggcctcggttaggaagtgaggtcagcatgtgaaggtttccgatgattgggagaggccatggacctggtggatgtttgtggtggctttgggagccacgtcggttgagaatgaagcatagagttccgacgatgattaggaaaatggctaacaaagtttgggacaacattttctcttcacttattgaaagtacttcactacttcatggctagctataactttatacacactatattatctttttaactttataaaaaggaaatttaataattgtacaacaaaaataacataattacaaaaaaggtgcaaaaaaaaaattattttaaaaacttatacattttgaaaacttattacatgaaaccatacattttaatcattaaataaaacaatatgtttattaaaactcaaaataaaaataaacaagttaaatattttttttattaaaaaataaaaatt

SEQ ID NO: 391329 - DNA, 1521 bp, Cannabis indica
attcccttcaaaaatggcagctgtcatcatcttcaagaagggactgtgtacttagtcttcttttttgttgttaggtaaatagggtacaaaatgacaccctaaaaatagaagcacaatcctttctaatcttggcccactaggtttagtcttcttccttccacagcaaccagctggcgtactttgagtaactgatacataattgttgatgtggataagtgaaattcgttttttatacttcttccacgtcactgcctatagcattctggcagcatttcctcccagatttcagcttttctttccactttgtctttgcatcattcattttttctagcaagttaatttttctttcccacagcaaacaagcacatttaattaaaaaaacacaactaaaataatatttttacaagacttaaaagctagcttactaaatggaaaataaaaataaaactaattaaaattaagcaaacaaatacactttcactactcttctcacaataatttcagtttagaagcataacaaataactttataccatagagttatcagttggccttctatgactcccacttggatgtagtgtctgtaccaaggtactagaacaaagagcatctgagacgatattaccaataaaacatttgtttctcaaaaagttttattcacagtgagattcactttaccttgtgcaagtgaatcgattgcctcttgagccaaaaatatgttgcgaagtcatttgtaagttaaggggtccatcaccaagttatggccctacactgttagtcaaatagagcacctgtgtagtggagtcccacttagcttttttgataaaattgtaaatttacgagtgctatttctttttgattcaaaatagttagaggtgtgcagcccccctcaacctatgtaattttatttaatatctaatgaataaaagtgttgagtaaagcttgttggtactttattattattgatcaattgcagctcacatacctgacgacgctcccaagcattgagtaaagcttgtcgggattggtcttgaggtaactttaattatttatttattaagtaatcactaccaagtcgtgaatctcttgatgattggttaaatgctcaacatgtgacagtcctctgaggctcgtgattaagaaagcccaacggaatttggtatggcaattgaccagtgaaggcacttcttcgatcactcagaaggcatatacccactaatatgttaacatgataattcaaaaatatttgcacaacacagttagtatgtctgtattttaagtgaagtaaaatacaagtaagccaataggctatttatacacttaggcaaaagggatgacactaactaacataactgttaaaaacagttatgacagttagtgtccgagaaagagtgcaggtattagtaggcatacaaactaacatatttcaattataaccggtttgagttattttgtgttatttgttttatgcattatgttatagaaccggttctatttttatttatatttgagacatctactt

SEQ ID NO: 391330 - DNA, 1496 bp, Cannabis indica
aaaaaaaagaaaagaaaagtaaaggaattagttgttgtcgtgatgaagaacaaaattaatcgatatagtgtgacaaaacaaaatgaattataatagagataaaaattggacggataataagcgagaaatgccttcatccctgttaaggaatagcaaattacctacagtgcacctctgctctatatcctgcaccagcaacctgtttttcatcagcatcagcacgtgtgcaaattcattctcctcaaggattgctgacctgtacaattctgttaggatttatgattgtgtaatcattacaggatcaaggttgttagaatattctctttgtatttgtgtccagctgtatagagccgtttggctcctttctctgtatttatcttttcctatataaatgaaatactgagcagccattgtctttgagctgcatttactaaatacaatccctgcataaacttaaacttggtattagagctaccaggcccgtgccatgtctacccctaccaatccagatggaggaaacaacgcagctccgactgctgcttctgaagaaagctctgcagtccagggacctacattcaacagaaatggtggttcgtcttctcaaaacacacacacacatcttcctccactcacaaccctcaatcagcccttttccctaaaactcgatcgaaataactacaccctgtggaagactatggtttccacgatcgttcggggtcacagactccatggccatttaaatggcactcagccatgtcctctggaatttccaccaactgaaaccgtcactgtcgatggcgtctccagagaaatcatacaggttaaccctgaattcgaacactggatcattaacgatcaatttctcatgggctggctttacagctccatgacagaaagcatagccactgaagtaatgggctcagcctctgctgtagatttgtggcgtgacctggaaagcttatatggagcatactcaaaatcgaagatggacgacaccagaactctgattcagacggttcgaaagggatcaacacccatgacgtaatacttaaggcagaaaaagaactgggtcgacatactcgcgcttgctggagacccctatcttgaagcacaccttgtggctaatgtgctatcgggccttgatgctgagtacctttccattgttgttcaaatcgaagctcgacccaaaacaacttggcaagaggtgcaggatattctcctcagctttgatagtaaaatcgaaagactacagaccttgaactcaaacaacaaagcctctggtgctgttccacaagcaaacatggctgcaaaaaccaactcagggcactcttctggacgtggtcgtggtgttttctctcatcagaatcaaaactacagtggaggaggaggtagatactctggcagaggtggtaatcctggaagatctcgaggcagaggacgtacaaatggtccaagacccacttgccaagtttgtggcaagtatggacatactgctg

SEQ ID NO: 391331 - DNA, 1596 bp, Cannabis indica
aaaccttgtaggaataaaattatagtaaagaaagaatacattatattcttatctccctttctttatagcgtttatctcaactagtaaaatctttgagttgacgtgtcttaattttatataccaacttctcaaatattattgtacgaagagcatttctaaacaagtctacaaaatcgtcacaagagcgtatttaatggacatctatttccctttttttctgaagctcatgcgtgaaaaaaagctttggtgaaatatgcttagttccatcacatttgatgaaacctccttttatttgagcaatacatgcaacattgtcttcgtacagaactgtggaaccttccttcttagaaatatgacatgattcttgaatatgttgaatgaatgatctcaactatatacattctcaactcacttcatgtagtgcaactatttcagaatgatttgatgaagttacaatcattgtttgttttgttgagcgccaagatatagcagtaccaccataagtaaataaataacatgtttgtgatcgagatttgtgtggataagataaatatccaacatcagtatatcccaccaattctgattttgagttcttggagtaaaataaacccatgtcagtcatttcacgaagataacgaaaactttgtttaacttcattccaatgtcgacgtgtgagtgaagcaatatatcttgctaacaaatttacagagaaagctataacaaaccttgtagaactagcaagatacattagttcaccaattgcgctaagatataatacttttgaaccaagaatttcttcgtgatcttctagaggatgaaaaatttcttttttaatatccaatgatcgaataaccatcgaagaactcaatggatgggctttatccatgttaaatcgtttcaagattttttttttatacaatttgactgataaacgaggatcccgcctgataagtgttcaatttgcaaaccaagataaaatttgatttttcctaaaaaaaattcatctcaaattcatttgtcaaatatgttattgcctcaataacctcttccagagttcctatcatattcagatcatcaacataagttgcgatgataacaaattctaatttggatttcttaataaaaatgcatggacaaagtgaattatttatatagcgtactttcaatatatattcactaaggggattgtaccacatatgaccagattgttttaaaccatgtaaagatctttctagcttaattgaatgcatttctcaagttttttttattatatgcttcaggtatttttaatccttcaaaaactttcatgtaaatgtcattatctagtgacccatacaaataagttgtaattgttgactcaaactcttaagtctttttgttttgatgattaacaaatatttgattattatttgttactaatgagttgttgattttgtagcacaattaaagataaataagattttaagacaaaattaactctaagggtaaaatagtaattttattaaaattctcaaaagtgacccaaagtgaacttaaaggcttaagaaactcaagataagactccatgaaggtttatttatatttcctagtcttgta

SEQ ID NO: 391332 - DNA, 940 bp, Cannabis indica
aaaaaatagttcaaagaattagagtttggagatcccgaagcatttcgtatgtgggtagaacagtattggttaactcagtcatgaaatctatccattcctattgagctcaactcatgataaatcctaagtctgtacgctgagtaaatgttatatgcaaagttttttatggaaaggaatgtctcattcaaatgggtcgggcctagtttcttgggatgaaatgtgcaatacgaaaagagaaggaggtttggggttcttgaagaataaaaaaatagaaatgagacagaaattgggaaatatgtctaggctatagagtcgaagcaagattctttcgggtaaattgggtgaattttgtgtaaattggaaaaaatgattggatatcctatgagtccccaagttctggtagtggaaacaagtagtttgaatcaagaacaagctcagggacatgaacttttttactcactttaatacaagggaaatacaatatcaaagaagggtataaaactctttgtccttcccgctaaacgatgacttggagaagtggagtttggaataaattgtttatatcaaaatatatgtttgtgctttggttggcaattttggatagattacacttgaaatctcgtttgtacaaatttaatattcgttcaaatgatgattacgtgctttgtgatatggaaaaaaaaactagaaagcatgtattctttgaatgttatttaagtgcttgtgtgttggctgctatttgtgtttggttggagtggaacatgaaacctatctcaattcccagtctaatttgttagatctctaagtctaagagctcaagaggttgtttaactgtgttttcaattttcagaattttattttcaaaagtgagaataaaaaataattttttgtcattttaaaaatttaatggtgcttggctgaggtttattaaaaatatttt

SEQ ID NO: 391333 - DNA, 1509 bp, Cannabis indica
aattagaacagtgggaaaaacaaaatatctggactgcacagtactatcataacaacacgaataggcagaagactaagagagcaagttgtcttccaatgattcaaacagctaaaacttaccagcacgaggtgagcctggtggagagagaagagtagtagaagatcctgcacgaacagctgaatatacaacggatagaacagttgtacacagtccaagagtcaatgtcccagtagaaactgctttagaatgcttgtggaggccattgcactcgtaatccctaggttcactggaaagtgcactgtagcagaggtatgtgcaatacacagataggactgatgctggcaaaatgctaccgtttacctgttttcatcagaaaaccacatcaggaaaggataaatatagtcaagatccttacaatattcatcattcatgtgcaatcaatacacaaagctttgataaaaatctatacacaacaagaagaaacataaatttgcaaggctttgaaccaaaggggtaaactgtaacacattaatctttcagatctgaacaagtgtcaaggtgaccaagtcatcaactataaacttacagcagggtgcagtgctactatagcgaagacaaacactgaaatcaaagtcataacaatgaagaaggtgttgagaccacagtcatgtccagatggtgtgaaccagtggaagagaagtccagaaaaaacaaagctcgccaaataacaaaatagtgaaacaacaaacaaagcaatgaacctgcatttgaaagaaaaaattttactaaagccacaaacaaacaaacgcaagtaataaataaataaactatacacaattgttcagaaaaataaagttttggttggtaaagaggttatggttttaacttgcaaactgtgcagaaaatatcacaattgtttggttatttatcttaattactaaggtctttatttctcataaagtagtcatgatttatcatttcttataccaatgcccaatgcccgaaaagaaagaagaatagccagagtaagaaaaaaaaagggaaaaggtaagaaataactcgctgaaataaaaagaacaaaaaaccaatagtcctaaactaaccagaatcgctcatcatagccaacccatgtgtcattccatctgtgaacgaaatccaacagaagcacaacttgaacaagaagaaataatccggagccaaactttgaaattgtctctgcaaacaaaatggtaaccataagctaaacacacagtcaaatacattatataaatatatatattatattggaaagataggaattaggaagttaggattatactaaatcacaatgcagataaatttaatttctatcatagtgtttgtgcttgtattagctccaagtttataatattaatagtatcaaacgataggaaactagggatgagctgatcaaacatgcttctagctaatttgggggttaagaaaatgaaaagcaaaaccaacacactactatcgttcatccatgctgca

SEQ ID NO: 391334 - DNA, 747 bp, Cannabis indica
ttcatgtttgctaaagttgtatatgtcatggttgattgaaaatgagtcaagaaaaaatccacgaacgtctcccacgttgagatgactgcttcgggcaattagctgaaccagtcatgtgcatgattctccaaagtcgcggtaaggatacgacacttagccaattgaggtacatgatcaaattccataatagtgttaaatttatcaagataatttataggattgacggtacctttatatttaagcgaatcaaaaagtctgaagactttggggagtctggcttgttgcacttcttcggtgaagggtgatgttctatgcaacttataagtgtcctttctctactgctcaatcatccttagcgctcgcagaacaatctcttgatcaacccctcctggaagcaggggattgttagcaggtgcaatttggtttctcgttggtggagctgctagtgctatattcaccggtactaccacatcgttgggcacagctggtgcaagtggcgggttaacgtccttttttgcattatttgtatttgtatggggataccttgatcagccaaaaggggatcacaagttttctcctttgtaatttatattgtgattcctcggggtctaggaacatgcgtgaaacacttcgttgaaggcgttcttgcaagtcgcctctctacacatggtaccttcctcctagccttgtgaacaccgttcctaactgttgggttttatgccctaaataaaactctgtttcaatgta

SEQ ID NO: 391335 - DNA, 936 bp, Cannabis indica
aataataataataaagtcaatttgtgatatgcttatttttaatacgttgttactttttttatcttgtgatttaaattatttatgaatatatgatgtagaaattcgtaaatattgtaggaatcttttcaaatcaaaataacttatcgtgtaaccaaatgatatactttgtcaaattataaattgctgaaacaagcgagtaacacgagacaaaactcctctcaaaaattttgacaataaaattataacgttctccaacagcacaccagaagagttagagtttcggcttataacattaaaaaactacctctcaaaataaaaattaaaaaataaattatattagaatagctattaaagaaaataatacttcaataaaatactaaattcttaactctagcacttgattcaatcaagtaaaacataaactaatcaaattaacttaaaataactagctgaaagtgttactctttcgctagtagcaccgactatcacccaactaattctaacccgctaaatttaataatcatactatattaacccctaaaataagataatttcctaaattataattaacgattatatcatttcccaaaaataagcaattattgtctaaattttttttaatatctcacattttgaaaaatactaatttaatttgaaaactcaacctaatacaaattaaagtttgaaacggccataaaaacatgaagatgtatttcaacgagttaggagcgttgtttgaagatgttataactttattatctaaattttcaggacaattttgtcctatgtagctcgctctgagaatttagcagcccatggcttggcaaagcatggtctgcggttagacgatgagctatccgggttcgaggaggttccagcgcgggtggcggacgtctgcatcgtaaattcatgagtgattctaatcactttgtcaaa

SEQ ID NO: 391336 - DNA, 1753 bp, Cannabis indica
aatatagtccataagcacgtaatcaaattaaattcacagtcttactcgagaaggtcaaaattattaaaatgcccctagctcaccaacaggatcttaacatgtcatatatcatattaattcacgtataatagattatttaataatataatcccacaataatatacatttaactagttagggtttgctaatccatttctcttaatcttagggtattacagagacgcattaaacaacacattaattcttttagcttgcaagattacttactttcgggttcttgtacacgtgtcgcgactatatttattgtttgaaatatgggcataacaatatatgtgattgcttcttttttttcttttggtggtgtttgatgcagattatgatcaaaagaggactcgcaggactaaagttgtaggtcaccgaagttagataagacaatcaacaatggtggtctatgttgtctggagcagtcatcggagttgatgaagaacaatcaacatttattatcgatcgatagttgaaggagcttcaacaacgatcaatctatgaaagagagaaggagaattggagaaaaagttcaaacgacagaagaattgtgtgaaagttttttgtgatttgttataatttattacagtatctctattttatactttatactatttttttttttaattttaacatttttttgggtcccatatattttgatattattttttgtgtcttatttttttaactttaatttttgttttctcatatgtaaaaagcacttagaattttagcttcatagcttcctcgtattgaaatacacaaaaaaaaataatatgtcactttttatagtacttgacactttaaatttacccgagtaagtgaaaaagaattaaattctaatttttttttaatacgtttttttttatacatatataatttttctaattatttatgttttttattgtattatttttaggaaaatttgcggtaaaaattatcaaaaaatttactttgatacatattagtccccaacatagagtcgttgattctaaatttaattgatccgtttaattattcaaaaacttccacgtgtcgaagtattattggtcaaaattataatattaattttttttaaaaaataaataaataattttaaaatcttaaattattatttttttcttttcttctttgttcttcttcatctttttcatcttcaaccccccagcctcgattcaccccaacctaacccactcctagtcctgatcttgtcaaccagccaccaaaaactcgccattgaccctctcgatctctcccttttcactctcagtgtttagaatttgatgtttgcctgttgtactcctccactgaaatgggattagagttattggtaccctttttcaaagttgatggtgggtggtgactcgttgtgatcggacaccgttggtagagaggcctcgttgcaactaacattgattcttcgaccaaaaactattgggcgaagaaaactagtacatttgcgatgaaccattattgaattggtcatttctttgcgctaaatcgacattttgttcaaactttcatagaaaaaattataaaaaataaaaaatcattcaccagaaatggtgcccattctcaactaaggtttgatacagttcgaatccaatgcaaaacaagtcatctcaatgaatctaatactgaaattctgtattttaatattcccaatttaattatttaattaagtgattaattaaatgcggaataatgaaac

SEQ ID NO: 391337 - DNA, 1051 bp, Cannabis indica
gttattgaatcttgttctgccattttcttgcgctgtatgaatgttgcaggtactggctgtctgttggtgctcagccttcagaccctgctcagcgcattctttttcgagcagggttattaccaccaccaccaatggtggcaagtgggacgaaaaggtggtcaacgggacacacgccctgtagatcctttgagcgggcggtttacatcagtaaaggttccagctaatcctgatcaagagaaggactccggaagccctgaaaatggtggtaaagatggtgctactactacataaattctcaactattttgaagatattctgttttgaaaatactctcttcatcttaggagtgtaatttatatttgattacagaacaagccacttggttttcctccaaaccatgaaaataactagcattacttggagacagcagcggcttgttgtgactacatgagccatctttcctacttagtactacctttgtattgattgttgaactttctgtttgttccatccaatttcgtcggccatcttacacgagcaaatttgcatatcatgacaatttctcataatttgcatcagtgttcatggaaaaagattgtcgctctagttttgttattacaacattaacaataataacacacttctgaatttcggattggatccatttattccctaatcttcacgtgcaaacaaagtatcgctcggtttaacaactttatgcatattttattcttcttgaaactgagatttaagtttgttttcatgggatagatattgttgatggagtgattatgaatagaactaggggagttttcaagtgcggattttatattttagatttagttcaatccacacaaagtttaaattcaacgatgaattgattatttttattattaaattatttaatatttattaaaaatgtatttttgttttcacataactagcaataaaataaaataaattattgctgttttatgtgtctaataacaaactaaaataaataaattcaaaggaagaagaaaaaattatatgtaaaaaagaatatttaatt

SEQ ID NO: 391338 - DNA, 763 bp, Cannabis indica
aaggtataccaaaccaagccttaaaaaatacaaaacatcatagaaatgcgatgtggtgtgatacagtgtagtttaaaatacaatttataatattgccaaataactcaataattaaataattgtttcaacaacttaccttaaaatacaacaattaagttctttttctgaaatgtgtatttacaagttacaacccaaaggtacttttttctatatatatactttataaaagttgggccaatctagataaaatagaaggatatatagcttcacttggaataataacttggagttttggacatacaaattatactactttttttttttaagtaaaacgtacattacaaaatatacactttatttatatacgttggaataaataataataataataataataataataataataatatatttatatatatttttgaaaatggaattggaataataatttggacgtacacagtatacattattttagttttaatgtgcttatatatatatatatatatttatatgtatctatagtaacatgaatgaaaagatgtatgtggacttgtttggctaaatttatgttttcaatattagttttttaggaaactcttctactaaaaactaaaaagtaaaattaacttatttgttagagggtaaacttgaaggctgagaatacacaagctactgaaactagagcaaaagctttatgcctttgataatatttttttagttagttttttgctattttaatcaaaaaaaaaataaaaaa

SEQ ID NO: 391339 - DNA, 1991 bp, Cannabis indica
tcctccaccgcaccgctcgaccgtcatgaaatcacttaccagcctctaataacaatcaaaggacaaatattagcagacttcattgctgaatacactggcctcgacgaagagatgaccccattgtttgtgaagagcaagctcacatgcatgagactgtagctcgggagtgttggaatttattttactagaatcaagatttactagtatgtttgcttgattaacaccctaaatatgaattctctaaaaataatgaaatgaaacacataagagtttaaaaaacctaacatcgatgacatcaaaataatatgtctcctttcactcaaatctctaatccttgttcctctctgtcgcagagtaataacaagatctgagcctagatctccttccctctttcgggtttggttaaccaccgtcctctgcactatgattgagtacttgacttgctatgtgggcatggtactctatcactaaggcttgaatatgatgaagaataatgaataaagtgcaaaatcactatagaaaggagtctcacatctactagttgacagagaatgaaaactaaatttagttagttgaaagtgttggatgagatgagagcatcatgttccttttatagtatttcaactagggtttaggatttaattatgtggattaaaaaagaataaaataatgggaaaaaatcacactaagtggtcggccattatgtgggcctcactagttacaattttaccactttatttcaactatttatccttctttcaataatactatatttttcaaattcaatcctataaatgtcaaaactatttatttaataattataattaattatctaataaaatagtcatttatcttatttattaattaaactatacaaagtctcttaattaacaaataaaccccaaaaccttttttcttcacaattaagctattgtttagtaaaaattcataaataagacatagtctaattctagaattataattaattaaaactaattaactgagtctgcaatgcaagcagtattatctcaattagtatggagatcatggacttatataatcaagcttccattaagtagaactatacttggtaaattctctaacttagtacttcttccttgcgccactatagattcagaattgcactcttaattatatagaacactctatatgtaccaagatataaatacgttatgaattatctattgttacaatccaaatagtcaaagatcctctatagatgatctatatcaaatagagacaaatttaccattctattcttcaatgtattttatccttaaaatacttagctacctatagttactgaaatgaggcctcaattatttatttctattaagctaagctcaaagaaaattatcgtttcacttctaaatacttataaaagctatagattccatatttatgattagtgctcccactcaattgaactaaatacttatgccacttataaacttgaaagtttgggtacttatgccgctatttactttattattaattaataactattttttcattatttttttttagaattgaatatggtattttttgtgttttaataaccgtttcttcattattgccctacaccaacaaatatgtagaattcaatattaaattgtatcaatactgtaattgtatcaatttctcatttgtgcttttctcattacaaagatagtttccctatgctgtaaaatgagacaatattctgagtgagtgaatcatgattggaataaagctacagttttagtaattaattttcattttctttgtataattttttcttcatttttgaatgttagacaatttatatgtataaactgaaacatatatgtatgtgtatataaaatgcggaattaataaaaacatatatgcactataattaaggatcgaaatacctccagtcattggtaatttgagcattagtcccacttaagcttgatctgcaaaagaaaccgattgatgtgggtaatcgg

SEQ ID NO: 391340 - DNA, 894 bp, Cannabis indica
tttctgggtttgcttcaatgcccctggaattaataatgaaactcaaaagctttccagatgaaataccaaatgagcacttcaaaggattgagcttcatgtgatactttctcaaaatggcaaaacactctttcaagtcttccacatgattctttgctagtatagtcttcactagcatgtcatccatgtagaccttcatactttgcccaatttcatcagcaaatattctattaacaagtcactggtaagtggtgccaacattttttagtttgaatggcattaaattgtaataatataatcccatgttggtggtaagacttgtatgttcttggtcgcaacattcatggcaatctggttgtagccggaataagcatccatgaatgacatgagttcgcagtgacatcaactaattaatcaatacgtggaagtagaaagtaggtcttgggacatgctttgttcaaattcgcaaagtcaatacatgtgtgccacttcccatatagttttggaaccgaaactaggtttgccacccaaataggatagaatgcctctaaaataaaattgttggcatggattttgtctacttcttcttttaaggcaacatatcttgtctcatcaagaagcctttttttttgtctttttgctgggatgttcttatccaagttgaggacatgggttattacattaagatcaatccctaccatgtctgaatggacccacgcaaaggcatcttggttgtcacataggaattggataagggactttttgatttctttattgaagtttttgccaaccttcacagttttggttggttcttctagattttgtacaatttcttcaatctcttcaatagaaccaaggtcagccctatcatcaccaatgcgaggatcaatttcctca

SEQ ID NO: 391341 - DNA, 1515 bp, Cannabis indica
atatcatacacataaataaattagagaaaggaaggacatgatagctttattgtctaaatttttaggaacagttttatcacatgtggcttgcgataaaatttctgtagctcgtgatgtggtaaaacatgtcatttggttagacaataagttattctgattcgaagaagttgcgctgtcgatcgtagttaatcatgtgtgactcaattcaccacgtaaaaaaaaaaataaataaaaaaaaaaaatacaaagaatgagactgtttgggtcattttgaattttgagattgttttggtgtaaagttattcaagagtcactacaaaaaaatgaaaaagtgacaacgtgaaagggaaaaaaagtagtaaattagcaaaaataattttgttcgaaaactagtttctaaatttgatcatttaagtcttgagaatttagttcctttaaaaaagagcatagtctcaaaaaaatagcaatgtaatgtcgtgtaccgtaagcaaggctttgatttggataattgtcaatggagttttagaatcaacttcttctttcaactccaacagatactgcaagaaatctctcctctcactaacccctttcaaccgttgagcaatcaagttctcgaacatcatatcaaatctaagagccagcttagtcatttgctttccgaccccttgcagatcaaaccgagccagacccggataaaaatcagacacattaggcttacccagaagctcagttatctcagaaataatctgccgaaactccgaacccaacttatctctctcctctccctccacagacccaccccaaagcatattcgtaatcacattcagaatggtcagaaacatctgttccccaactccgactggagacccgacccgactgtaaaagtacccgactgtcttccgaacctcccgacgccggagctcgtagacggagtccaaggtagtgttgctgagcatcttgagaacgcagacttttctgagcatacgccattcgggaccgtacggggtccatgttatgtcgtatccgccataggtgatgatacgaccggcgactgggacgtcgcggttggcgaaaacgacgtcgttgtctttcaaaacttctcgggccagagaaggtgaggtgatgactgttataccgaaattaaatacagtaaaattggaacgaattaccgatagaataatctggctgagtcgcggacaatgtcgctctctttaagacgtttcgcggctctgcccgaagtgtgcacggcagtctagcaaccacggcgtccccaggataaaacagcctctgtataatacgatacgttctgcaccgaactgtatcgctctgtaacaccctactgtttgctctcagaaaaatcgtaaagaaagaaaagaattttttttaatgtagaaaagatgtattcttacgttgttctgatacgacttatatagaagtcgatcgaaggaaaaaaacggtaagaaaacggtaatattatcgtgggaggagttggatcgtgggaggaaaaggcggatc

SEQ ID NO: 391342 - DNA, 1168 bp, Cannabis indica
gataaatattgtgacgttatgcatgtaaaaataatattctcttttagcatatctaattctcattccaccaagggaaaaacatagaactatacaacaacattaaatatcgaactcaaaacaactgtaacacgagcgatccacattgtaatatccatctctatagttaacctcacatatttggtttatcaaactaaacatacaaatcatgtatatatataaagcccatattatcataaacatatatacaaacccaacccaccaaaacaagaaaaaatggccccaacaacttctctcaaaatcttctcactaataatattttcatttgccattatagaaatgacaaagggtggagacccagatatacttacagattttgtaataccaccaaacttgagtgcaacaaacataactggctcattcttcacttacacagctctcagaaccctaaaaggaactccaaccttcagtgtcacaaaagtaagtatggctgagttcccagctctcaacggccaaagtgtcagttacgccgtgcttcagtacccggctggcacggctaacccgccacacgttcacccccgctcggccgaactccttctcctcttggatggaactctagaagtgggttttgtggacagtacagccaacaataagctctacacacagacacttgaagctggtgacatttttgtgttcccaaagggtttggtgcactttcaatacaactctgatgctaaggaaactgctcttgctctttcggcgtttggaagtgccaatgctgggacatcgtcacttcccaaggctttgtttgctactgatattgatgatgaggttttggctatctctttcaaaactgatgttgccaccattcaaaagctcaaggctggtcttgcttaattataatacatatttatatatatagacgtgttaagtgtttggtggtttttcgtttgttgaataattattattgcttttggtttgatgatcacgtatgtaatggtttgaagtaattaataataataatgaaaaactgtgtttttgcaaatgtcagttgtatatgtgaaaatataaaaactgtaaacgtttgcagcagcagaaagtaattctgctacagcaaaactgaacaggcagaatataaaatattttgcagaaaaataaataacttgacaca

SEQ ID NO: 391343 - DNA, 664 bp, Cannabis indica
aattacaaaaagacggggaaaacaaaaaaaaaaccagtaagtgcagctgttaaaattccaccaatagttacagcatcagatcatcattcttctgtagaaatgactttgcaaaagccacctccaccattacctcaacaattcaaaaagctgcaagaagatggtcaatgcttgagatttcttaatgctctaaagcagctccacatcaacataccattagtagaagctttggatcaaattccaactcatgtaaagtttttgaaggatattttgacaaataaaaagagacttggggagtttaaaactatttctttgactgagggttgtcgtgccatgttaaagaacaaaattccacctgaattgaaagatttgggtagcttcactattccaatttctattggggttcgagatggaggaagagctctttgtaatttgggagcttaatgcccatgtctattttcaagaagttaggaattggagaagcacgacctaaaacaattactttggaattggcgaattgttcgatggctcatccggatggtaaaattgaaaatgtcctagtaaaggtggataagttcatcttcccgtcaaatttcattgttcttgactatgaggaagatagggaagttctaatcattttagggaggccatttctggctatgggaag

SEQ ID NO: 391344 - DNA, 1896 bp, Cannabis indica
tttttaagtaatttgcttctaaattctaaaaaaaatatagaaaaaaaataattgatttttttatgtgacaaaagataatataaataataaataatctaaaaaggtcattttgctacaaattttaaaatgaagatatttactaacatagtgctatgatttgaggtcatttactataatttcgctgtgaacaattaacttaatttattatgtggtacttacaaaaataattggatcttttttctattaaatatgaaatataatatttctaaaaaataaattggttttgtttttaaagaaaacttggatttttttttgaccaaaaactgataaaaatttaaaatctagaattgttaaacgataactaaagggtagcgtttgaggtccaaatcaccaatgtattgaaaatagaatgcatgattgaacaacactaaaatttatgttgacttacatgttattgtgtgactgaaatctgtaaaaacagaagaagaaaaagaaacctgtgtgtgttgtgtcacacattgttagtgcttttttttatacttatagctactaaatcataaaccctatgataaaattttgataattggataattgttatgtgtgattggaatcttaaaaaaaaaattgtgtctcggatgctaatgggaatcatgttgaagaggctgaaaatattgccaatacttttcaagaatattttttctactttttttttttttatcaagagttttaaaaattgattataaaataactaagtcttaagaaaaaaaaaaaaattaaataagaagaaacaaggatttttagtgattaggtcattaaggaaccttagtccacgagtaaatattattaagctagaaaaacttcaaagtaatcttacataagtgttttggccttagtccacaagggataatattttgtttataggctagagttgggtatgggtgaacccggacccggtagtgttcagatgaggcccactgattgggtaaaatacaatatatattgacttcgggccaattagatcaggcccaattgacgagataatagtcaacagtacgagtggaattcatatggtgatgtaagatgtcatgcacaaccatgttggtatcaagaatgtcagagaatatggtgttagacaaaaagttggtttccttttgatggtgcatgcgtgcactcccttattttgacataggggacaaacccatacatggtgggaccctgtctttagaggatttcacgtaggatgatatctggaggtttgtggatgtctcttcagttgtccattccggattaccctatgagggtatccaggtttgtcctgattaacctttcagcttccagccataatagtctttaccgacaaaggggtccgaccttgtcgcatttataagctagacttatatccaaatctagagtcgtagcctaactccacttgtgggttagtttactaacttccaaattcattgttaaatgcaaaaccgtgaataggtgcaacctttaagaatttcaaaggagtaagtggtggagggtcgcgatctttccatcttcctagagtacggtacacgtggcatgagtcccttagtctgtgcctattacatgccttgagaaagagcatgcattctagggacgcaagatgacgactggtttatgttagtgggatttccaaggcaaatgtcatcattaaatggcctcgatcttgtacataacattatgtgggaattgtttacctagattttgttggaaatattttaccagaatctagatttactaccgtgtatgtttcattaacatcctaatatgaattctaaaacaatgaaataaacacataggggtttaaggaatccttacgttggttgcagcggaatatagtgactccttctgttcagatctctagccctt

SEQ ID NO: 391345 - DNA, 757 bp, Cannabis indica
ttaccaccattaccgttattccctctcttgccattgttggaaccattcttacctcctgagagctttgtctatttaagcttgttccgttcttttagctcttagcttggttgaagccttgagcatttcgctcgacttcttccaatttaatgaactcatcagtcctgtctaggaaatctctcatggtatgggttggtttgcaccttgtatctttccacagacttcccaccataatgtcccccatgatagtggtctgttttccatcatcacttagatttttcaccttagttgcttcatgcataaagcattggatgtagtcttgaagcggctcatcaggcttttgcatgatggcgactaagtcacccaattctactgatatttttcggtctgaagaaaactatgtatagaataacccttcaaactcgtcccaggaagtggtcctccctgggggtaatttggtaaaccactgctatgccgtttccgtgagggtaacatggaagattcaacatctgaggtcatccatgatcccttgaaggtccatttgtattttgaagttttcaacatgagttagggggtcttcattacctgtgtacttgcaagtaggcattttgaattttgctggaatggggaggtcattaatcgtttgtgagaaagaagaccctatcctcctttctagttctaagtcagtgagttttggtacagtaaggtctttgaccaattgggttaactcatccaaccgagcctgttgggttttatgccc

SEQ ID NO: 391346 - DNA, 1509 bp, Cannabis indica
gtgaaggttgcagggaagattcgacatttgaggtcatccctgatttcttaaaggtccatttagattttgaagttttcaacatgagttagggggtctttgttacccgtgtattacaagtaggtattttgaattttgttggaaaggggaggtcattgatcgtttgtgagaaagcagagcccctcctcctttctagttctaagtcaatgagttttaatgcaataagatctttgaccaatcaggttaactcatccaaccgagcatggatcaccatatttgtggctggttggggttagacaatattaacgcatgtattagtttggtttccttgaaccagctaaagtggatttactatctttaatccagagttgtccctattcttgttgagggcattccgaaggtctccaccccttggtggcttacaagttcaaagactgacccagattttggccttcctcctgcattttgactgtaagcccttccattgatttggttggtcgttggcctgactttcaactttgtcattgccatgactgtcagggtagttagaacgataatcactattgacctcaaggtcttcccttcgccccctaggcctactgtttctcgggtgatcattgccctctcgtggttggttgcggggctgccactccctgtgttgggctatccttccactatttttatcacagtcaccattgttgtttctagagtttcccatgccgctctgtctgagacgaacattatgggagtcatctcgtcccatataatgactgagtaggatttattcatccgtagggagcggtcaattattgttgttgggaaccctattggaggggtgactcctagccctctcttagttctttgggcgctctttaggttcgtagagcaccctcttccattggcttctcggggtatggacttcctttggataggttcggtggtcttaaggtttttgttggttgtgggtatcagtacccaacccttcagtgctttagctgaaatagcttcaaattaagtcggcaacttcttgagtgcgacaaccttggtcgtcttggcgcctcctcatttctcgagcaagatcatccaaccaaaattggaactctctcctttggttagcgagacttttagtttagggccgctcgagtttgagtttgctcttggtgtattagtttggaactgaccttgcattcggcctattgcgtctcccagttgatccatctctgggtcaattccttggatatctacatggggttcattccatggtctaaagatgccaaggccccgaccagtttgagtttgggtcgtgccgtcattaggtgggacagagtttctagtattgtaataccctaggagtaagagaatggattagtaaaaccctaactagttaattgtgtattattgtgaaattatattattatataattatataatttaatatgtggaaatttattttgagatatgacttgttaagaccccgtaggtgagccagggactgttgggttttatgcccta

SEQ ID NO: 391347 - DNA, 544 bp, Cannabis indica
aaatagtaaaaaaaaaatgtatttatatatcaatgaagattgtaaatattaccaggccagtggtttgaatttaattatctttccttactaatatatcatatatatggcactttttttttcttggaatctcaaataaaaaatacaaaaatgttttgacttataattacaccaaacagaattgtacgcaatatttaatccaataaaaaaattagaccaaacaaatatatatatatattatgtgaattagtctatcactagaagcattagtacgtacactaggttaggtggttacacaaatatttacgatcatttatatcattattcattattggctacatattttcttatttatttgtgtaggggagtaggggtgttacttcatttaaaagtcttttcacgatgaaaacaattaaacataattaatgaaccaaaacttcataatgtgaacaatgtcattgaaaaaataataagggtaaatactattttagacattgtattttgtaaaaattattaattggaccttctaattttattaaatgataaa

SEQ ID NO: 391348 - DNA, 1676 bp, Cannabis indica
aatgtcaattccgacgaatttcctagggtttgctatcggtaccgaaaaagtcaccgaagtagctgctggtgtcggaaaagtcaacggagttgttgccaacgccaaaaaagtcgtcaaaattggcattactgtcagaaaaatcaccaagaaactggtttcttcatcaagaaacagtttcttggtaattttttcgacgactacgccaattttgatgactttttcaaaatttgctgtcggtgccggaaaagtcgccggagtagctgccaatgtcagaaaagtcgtcagaattggcattgtcaccagaaaaatcactaagaaagtagtttctttatcaagaaactggtttcttcatctagaaatcggtttcttcttcaagagactagtttcttggttattttttcagtgatttttctggcgacaatgccaattctgacgaactttccggcgtcggaagcaacaccgacgactttttcggcactgactgctactctaatgatttttttggtaccaacagcaaactccggtgactttttcgatatcagtgacaaataaaactacctaaacaaataaaaatatttaacatgggatttgaaaacctaatttacatatatatagcatatcaaatatcataaaaagacctaaaaataaaaaataaaaaaaataaaaaatactatataaattggtcagacttaaatgtgccatagttatcataagaacttttaaattctcatagttagtgaaatttcctctataaaataatattattacttactattttgcaaaaataaaaaaataaaaattgtatttaattactacctcacatttatatacattgccatttaaaatatagtctaattactagcccataaaattactatcctagtaattaggtgacctaataacatcattttcacttaaatatttgttagaattttcattatttatgaaacttgttttttttttttttgagaaaaatgaaacttgttttttaacacattaaaatacatagaatacgatatattgttatttatgcaatttagcaatagatgttacacttctgtttttgtttttttattttttaatttttttgttgaaatattttaatataaaatttatttaaatttaaaattttgattaaatagtaataatatagatgaccctaactctaagtatatattttgaagtggaaacacatcttataatgtgcatttatagtataatcttccaaaatataaatgaactttcacctaaggatgaatatcgctcggtttaatcaagttaataattaatatattttaatcaatctaatataaatatcgagttatgaaaatttaattataactatttagactatttatttgggttagcccttaaactattataacttcttttttattattgttattttttcagtgtcattagaatcaaaattaattaaagtataatattatatttcaagttattttggtcaaaattagtgttaaaatcttttaagtaataaacaacacgctattcttaaaaatatcctttctatttcataagaacaaaacccattcaaactcgctttaaaaaaaaaactgaatcttgctcccatttttctctctcagacaaaaaacttaccaagatctgcttttttcttcttttttttttccaattattattcttccataaaattt

SEQ ID NO: 391349 - DNA, 888 bp, Cannabis indica
aaaaaaaaaattacaaatgagtaactatttgtaactccttctctatgttacaatgttaggtttaaaataaaactataagttatataattaatttaggaaacactctaatatatattatttacataataatatatacttgtcatattttaatctatatattatattattaaataatataatgatgtcatcaccttatgttttacctttatatatatactaggcagaagttacgtgcaatgcacgtatacttaattatatacttaatttaaagaagttaattaaaaatacataaagttttaagaatagtaaattaaatgaaaaatgtttacaaaataagttaaaagcaattacatttgaaaatataaaaaaaaaaaaaaaacaaaaaaaaaagagatccaattctaaaaattaaaagaaaatatgctttaaagctttaaattaaggaaatgtctatactctatcataaaactaaaaatataggttatatctcataatttttaaagttaatgtcactttaacaaataaatatctaaaattgtctatctcgaatctaaatctcaaaaaaatttacactataatgcaaacccaaatacaaattgaaaaaagaattatcatttttacttttcaatagctccaccagatcttgcaagcaaatcaaaaaaaaaaaattaaaaatgagaattggaacaagaataaattaatcttttacagataatgtataattgaaccctgttacaaattcagcgaaaaaaagaaaattatagaattatcagtttcataacgattatgtgatgaaaacaaattcaatattataaggctaaaacctactcaattttttttaaaaaaaacactagttgagaaatcatcaatattattctactaatcaag

SEQ ID NO: 391350 - DNA, 2474 bp, Cannabis indica
caaaaccaagaacttctcaattttttcttcgatcgacttgatgaaaaatacaatgagtcgcaagtcacaaatgtttcttatcaacatcgcatcacaaaatattttaacaaaagagtttaaaaagactattcaaagtatgtgatttggtattaagatgcgtgtttgctaatacacaaggtctagcagcaggagtatttaacccgaattaggaaggcccttacatcattgaagttgtcgttagaacgggagtttataaattggcgtggctcaatatctcgctacttaaaaactattggaacagtaaacatttaaggtcatattactagtagcatattctgttgtattatgtttgtctttgtaaaaaagttttttattttaataaagttgtacatttcaagtaatcataaagttttagtttctttaaaattacttagagagcatataaatatacaataactacgttttacctagaggtatatattaataaaaaaaattgcaaaaagaaaggtgtttgattataagctggtcagtaacagcataaagtcgaataatttgaaatctttcttaaagtagaaatggaaatagtagttgtaagcgagacttttaagtcttgtaaacaacatcaagctaagtacaatctgaataaataacagcttgcataacatagcatgtactataaatgagataccctagtgtgtcttgataaatagtacacaagttaaagtgtgaatagaagattaactgttcacacgaacaatcaaggaatgtttaaagaagttttaaatactattcaaaatatttaaagtttgctcttaaaaattattttagttgtatactaactactcgagcataattggtatagcaaaatactaactgctcgcgcataactggtgtagcataataaaaactactcatatataggcgatcaaaaagtgttcaaaaatattcaattgtgtaaggacatttaagttcatcatttaccctaagtcaagttgagaaaagtgttttgttgtgaaaataaaatttacttgtgagcaaaaaatacaacactcaaaacattcataagtcaaacaaagcaaggtaaaatggcataaaaaatgtaattaaaaaagtgttgaccatccaatagtgaaaattaaaaattaaattacataataaatgctacaaaggacaaaatattgtctcgtccaaatggctattgttcaaaagttataaagaaaaaactaagtctacattgttagagacttaaagagatcttcttcttcttcttctcttgcttcgacctcagcttcctcagcgtcgccaacttcatccttctaggtctgctcaaaataagccagcatcgcatcggcatattacctaaaaagctcaaattcattttaggattcgctatcaaggccttgtagatagaatgcttggccatcaagttggctctctctttagcatctaatttggcttctttaagcttctttttggtctcttcaaggttcttctgggccagttggttagcctcgcaaagttcctcatttttagttttaaggcttcattttttttttcagagctttctcagatttctccagatttttgacatttgtcttttgtcaagagatttctgattgggcatcgttccattgtttagccaagagctcgcgttgaccattggacttgcgaaactctgtgctaagttgactgatgctctgaaaacctctttgtagagtcatgaaggatagaaaggaagcctgcatagcatgaggacagaagaggagatcaaaatatataacaaaaaataataatatgttagaagtttgaactaaccgactgcatgaggtcaacactcctcattataaggctttgataatttcctttgttcataagatcccagtcctcgttctgaaaggtcttgaagtggcgccaactttgtgtagcatactacgagcatgcttgagaactctcgacacgtgcatatgttggtagggggcaagaaggctctaagatggtcatctcgggttgagtgccagagaatttgagctgatggatagaccctgagggttgcccaccaatgctcgcagacactagcacagaagaagtgactagagcacttgttctagaatttatgggtatgtcaatcgagtcagccttctcgttagccaccttcttcatcttctttggaacctttgggtttgactcaaaagttactttcaaaggagcagtcctctttttgcgtcacttgaatgacagtgagggcatgaaattttaaaaaggggagtggttgagatttttttgagttctaaaagcttcgtgaacgataattgcgaaagtgaaggaattttttaaatttatatccaaaaggcaataatcattcgatcacggtaaggatacatcgaatgggtgggaactaatggaaagagaacggttagaacattaatgctaaaatgatttggctcgaaattttgaactgccaaaataaaagcatg

SEQ ID NO: 391351 - DNA, 696 bp, Cannabis indica
ctcactgaagataaaaaaaaaaaccatacataacaataacataatcgttaatgtcatacaagagatctccacccataaaaaatgatgcgagcaagagggaccattccaagtatagacgctttcataaggatttcggccatgacaccaatgagtacaaaaatttgaaggaagcgattaaatttcttattcagaaaaataattcgcacatcaggaggtatgtaaagaccgaccaagagcaaagggtcgccccgtaggatgataatcaaaacccactgatgccacaacttgttgatggacatctgcaagtcatcataggaggcccgcacattgtaggagattctaagaatgcgagagaaacttacagtcaaactctttagtacgagcaaggagaagaaatcttggacattgaagaaaggagacccaagcatgcacagaaaaaggtccgagaataactaatttcaacgatgaggattccaaagtagtgagctatctacacaacgatcccctggtgctagaggtgcaaatcgcaaacaaaatggtggcctgaacaatgatcgacaacagagcctcgtccaacattttattcaaaaccacctatgagaaaataaatcttcatctcaaagacttagttctatgcccacaactagtttatggattctccggccaaagtatatcctgttggatatttattttacc

SEQ ID NO: 391352 - DNA, 1451 bp, Cannabis indica
gtaactccgaggaacctaaaaacttagaaaacacccataaatctgtcctaaaacaacgaaaaacgaacataaagtcaatccaaaatataggctaaaagtagcctaacaattttacaaaaatactgtacggttttatatggttttatgctgtcttttttaaatagtatgaaatttcctttgtgccccataacaccacatgtttcgttgcatggctttttttttattaattaattttttaaaaaagttgctcatttgatgttgatggtcaatttatggcagatctcctttttaaaagaaaaataacaaataaaataaaaaaaaaaacttttcatattataaataaccgccattgttgtaccctttttcttcttcattcatttttccttttttttagtttttgaaatttaaatatgtatgagtgtggttggttttgagcaattttcttagtagtagagttttgatcagttttcattttttatttgaaacccatttttcctctaattttttccctactgatcgttgtgcattttctcctataaatttccgtttcagttttcttttccatgattgtcacacggtctaagtcttcatcctccctgtagttaagaaaacccaaaacacccgtaaatctaagttaccccaatctacaatgtggaagctgaaattgaaagacaatcctccaagtcgttcttcccctactccttccaaacgcaagttagatgttcattctccttctaagagagtttctaaatgtcatcgaactattgaggaggagtctaattctaattttgaacttgacgatgagttcattcaattagctaaagttgtcaaggtgagtcgtttgtttttatatttttttaggatttatgtgttctttttttataatttgcatgttgttgtgttttgatttttttatttgtaatataatagtgttcttttttaaatttatattttgtatgttttgttcttttgagttgatttatacgttctataacagttgtattcttctcctttttttctttatgtttttctttagggaaaaaagaatacccctattgtgaatatcccttctgaatctgggtttgaagccttctactgatattgttgttgaggtttgtggacttttttttcttaattttcaattttttttttattttctagttgttttcgtgttgtttttcagttgttttgaaatgaatatgcatattattaatccaggattgcacatgtaaatatagacgatcccaacattatcattctaaagtaataacttctggttattatccagtcattaacgatattaaaactattctaaccccaacccaattgaaaatcttttcgcaaattgtttttggtcacttccttcgaattccggagtacattatgttggaaatattttaccaggatttagatttactaccatgtatgtttcgttaacatcctaatatgaa

SEQ ID NO: 391353 - DNA, 1277 bp, Cannabis indica
aaatcaggtcttctaatcgttacaataagagacttagtgaatgaacttctttaagaaagaccctcaaaagatgcaaaggccaacaacaacttttgttctcttctcctttgtatgttgaagatgaactgaactaggttgtttctaatactgaaatggattcatctggctcttgcaacaaagatgtggaggatagtttccaaccctgcaactcgccatgaaaatcgtcagttggtatgcgcgtggctcgggaaatcctaacgcattctaacaccttcatttacttgtaaaagagcaatctcttcatgtactatttattatccaaattaaactttattctaaagtaatatctcgttttcgtcaagctttaaattttaataatagacttgaagtccctcatgttggtttagggggaagttactcctttatggaaggatgatgtaaatgtaactcttctaaatttcaatgtaaatttttttgattgttatatggctttgggaaatagttctacttgacactttattgggttttatggggcatcagaaactcataaaagacaagaaacttggattgtattgaaaagattacgtgatgtggctccattgcagccatggatggtcattggcaattttaatgagatcctttccaatcaaaataaaataggtggaggtttaagaagtgaagtagaaatggataatttcaaaagcactcttgactattgctccttctcaaagtttccttttgaaggagatccttacacttgggtcaaaagcaagcattctacggatacaatcaaagagaggcttgattggtgtttcataaacaacagatggaattctttgtttaatcctatggtcacataacattttgattactaatatttggaccatcgtgccattagtgttcaagttgttccaatccactcagctccaaatctacagagaaagaaaacatgattcagatttgaaaattctagttaaatgatgtcgaagctactgctttcatcaagtagaattggacagtgcctagtttggattgggttgtggatcacttcgtgacaaatctacaagtttgtactaaatctctacaatgctggcatactcaaaagcatggaatatgaagtgttgcccctgaattcgcccaaaatacgtggactagtcaaattaggacacgtggatcagataacctgtaaacatttgataagtctttgtgcgccacaaggaagcgcagttaacgtgggtcccggaggaggcacccggagtacaaggtactccgggaag

SEQ ID NO: 391354 - DNA, 2035 bp, Cannabis indica
ataccgtcctatgccatggcatgtttccagttacctcactatttccacaaaaaatgaagtccatgatggctcaattttggtggggtagaactgagcacaacaagaaagtttattggaagagttggtcccacctttacaaatctaaatttcatggaggcttgggttttcggccaatgaaagctttcaatcaggcaatgttagccaagcaagcctagcgtcttcttcagcctccttcctcacttgtagctacccttctcaaggcttggtattatcctcattccacattccttgattctggtaaagggcactgcccttctcttatctggaacaacatttcttggggcaaagcactcttcttattgggattgcgcaaaacagtgggtaatggtacctctaaatctatctttaaggatgcctggattcaggattacaaaaaacttacctacctcagtataccaaacacccttaacaggaatgtgtccagccttataatagccaatggagaatgggatgtccctcaaattcaatccatctttccaaacaatgtttggcaagctattcaatctattccactccttcatccactagcccaagatcgactctattggtgtttcacccccacatggaacctatacaattattctggttaccatcacaaatatgacattctacaccaatttgagccctcacattcaattacaattaaccaagaaaaatggtagaagttgatctggaatttgaagatacctttgaaaattaaacattttatcaagcgggtgcaccatgatgctctgtctactagtgtgaaccttcaccactgctgaatagtgagtttcccattttgctcccgataccatagccaagaaaaaaccttagcacatgctttgtatgattgatttactgtcctgaatgtttggaaattaacaactttttatgaaattattaataaacttaaatatttgtcttgtaatgatgcgttatatatgtgtactgatattatgaccatcaaagactttcagttttttgtttgtctactttggaaaatatggcattgcaagaatgaaatgctccacaaaaaacaagtcacagatgcctcaatgaccattcaatggatagaagacttattgctccaatattagtaacataatacagtaaacataccaaacaacacttatgaagccaaaaactcttcacatcaatggcaaccaccacctctaggtcaactcaagctaaatgttgacgcaacctaaaatactcaaaggaacaagataggatttggcttgatagttcgaactcacaacaaagaaatcgtcacagctttggctaccccttggaaaggcatccaccatccacttatgatggaagtgcattctctacaacacactctaaagtagggtcaagagcattcacttgtgattcaccaaatagagtctgattgtaaaattcttgtagatattgtaattagaggttactctaacaatatccatttataggaattcattactaatattaatagcttcatgtctttatttcctcaagcttcaattagctatgtcccacgagaggctaattatgccactcatcatctagctaaataaggcttagaacatgagactatttttctaatgtgagcaactgtagtttccttgtatcatgtactactagtctttattttagtggatactagggctgttcatcaaaccgcccgcaccgcaaaaaaatacagcttgaaattctttgctgtgcgatcgcggtttgaattattcctaaattgcgcgatgcgatgcggttgcagttttgaattgttaatatgcggttcaaactgcaccgcactgcatattataaaatactaatttttatatttatttaggtctaatatgtgaaggtcgagcccaaacccactgattattgtattgtgaaaatctgaaactttttttttcatatttattttcaagccttatggtatttttgataagtgttgctcaagctttgttgtatttgtgatagtttaattatttggtgatagtccaaaccg

SEQ ID NO: 391355 - DNA, 2080 bp, Cannabis indica
acgatggacgcgaccctatgatatttgagcacttctcggctgtggctcagcgtctcggtgtgtatacggctgatgattacgctgatatcttggaattcttgatcgggcggtggaggttggagaagatggtggggttgtcggctgaggctcagcgagctcagaactatgtttgtgggttggcgcccaggattaggaagctgcaggagcgagccgatgatcgggcgcgtaagatggagccacaaagtgtcaagtttagctggatatttaataaggaagtcctacttgtaaaaaaatggaaaaatgagaaaaaagtaaagttttgtttttgttttggcccaccaaaaaaagtttataaatactatttaaatctgaacttctttttttttttttgaatagtttgagttttggttaattttttttttttgatcaactactagttttggttaattaataatagaaatttatgtaaaagtagtgctaaaaatagagttgtttttttcctcataggagtgtgaagtacctttgtcaattttccattgtgctcctttattttatttattaggaaacaagtcgtgctctgtgtgcttctaatcaaaacaacatatttaaagacaagatgagattgaaagatatttacagtccaaggggagtattaaacttgattagtgaattgattagttaattaggttgttaattgtcggttaattagttggttagtgtgtttgtttctctaataatctcagttggtatataagttgttgaacactttgtatcgttttagttttgataaataaagttctgttgattcaattctctctttcttccttcctctgtttcaaagctcatttgagctaataacttatgtaaaaaaaattattaatcgtaaaaatatttaaaatttcatacattaaaaaattaagaaagataattatgatcaaatatactatcaagaccaaaattaaggctgcggagtgataatcttagaaagaaatagtttaatctcatttggaacatgcaaagtaatccaaagcatcatttcattacttggttagcctggaagaggcttcaaactttgaaaggctgcttaattttagttacatccacacagctaattgtttgtcttgtaagtttgaaaaggaaactcatcagcacctattcttcaactgtaggagcaacaaacaggttcattcttaaatgtgtaactgggctagtatgaatatcaatcgaaatgagcttgagcacagtctaaattgggtgaaaaagtgtaggcagtccaagcttaaaagatacatttatactgctctgataaataccttggtgtactatatttggaatgcccaaaataatacacttagcaatgataatgtatatgtcacgagataaaattcacaggggcactttagtcattgtttctccacctccaattatgttggaatgtagcaatccctagaatgattttctcaccagctgtcaaatctttttttcattagaatagaatctcttttattcccttttgattgtatttcattgaccacgtgtcaatcattggttgtgtaatatcattgtaccctgtactggtttgctgctatatataaaaattattctcatcagctacaattgagttgatttcatttaataccctgttcattaataaaatttacttggtatcacagcaaatttaggcttgcgccatgtctacaccccaagatcaaacttcccaaacacagcctcaaactacaactcatggacgaaatcaatcagctccaaaaactacagtggttactacaccaccagcacctttctctgctccgattgcaaatccttttagcaatacgtagagccagccattctccttgaaactcgactgcaacaaattcccattatggaagacaatggttgccactattattcgtggtcatcgactggaagggtatttcaacggtactcgcgcgccacctccagagttcagaccagttgctcctgcaacaaatggagacacagatgatgttgggttttatcctaaataaaactccattttaatgtaatccattttattcaacatcaataaagaaacagaagt

SEQ ID NO: 391356 - DNA, 537 bp, Cannabis indica
actgagaatcctgaaacaccaactatgatagattcattctttctttatcatcgccatacttttggtttaaagaaactaggtggaatttgtggaatagttcctccaaaataaaaaaggtctctaaaagttgttgactcacgaaagtaggtcctaactagaaggctttcttgtccttttaggaagggtcctcaggaaagctagccttcctccattaaaggagttccaaatggctagttgtttcccctaaaagagtttctgatagtcgactctaattggcgctttcctatccacgaagctcctcctgcgagtgctttggtccgtgattccaaaagctctcatacacgctcccagaagcacctatacttaagctgacatggagatctctctcatattagagttttttaagtttgttaagtctaaactaattaacttaacacactacaagaaaatgttctattaccggcggaactattaggggcggactagatccgccggtaatagtatggttttttttaaaatgaaagtaataatattgaa

SEQ ID NO: 391357 - DNA, 795 bp, Cannabis indica
tttaaagaacacgattgatactatcgtaagagcatctttaattgagtgttttaaatatggtatacatctatttttataaaattaaattccaataatagtgtattatatggtctaaatataatttatattaaaaattatactaaatttagaataaattataatatggaataaattttatactacaataattatcacttttaaatttattttttactgcgtactcattaatatacttaatattttttatatttttatatgtatatttactatagtttttatatatttttattaattttcctataaccatctattacaataaaacttattttactcaccatgaattgaagcataataattaaatttgacaaaaatataaacttattatttgaactaaatttactacaaaattcacaccatcaatatggtataagatgagaggagaaaaatgttaaatattgttttaagagcattgttattggcacctaaagtgtttagtacttttagacatgttgtcttgtaattaattagtgatactctttaaatattattacattttactatataatacccaatactaataataatattgacacataggagaagtgataagagtaatttgtggcataaatacctaatcttaactcccaattgtaaataaataattaaatttaatttttggtaataatagctaagttatatttttgaactctaaaggtacctgactattaaatactaagtcattattcacgtgtcattttcttattagagcatctccaaagagacaccaaatttggt

SEQ ID NO: 391358 - DNA, 815 bp, Cannabis indica
atttcaaaaataacaaaaaaaataaacactttgtgtattttcgttaaaaaaatttgtaaaaatataaattttttgttatttttaaaatatattttagaaaaatgttatttttatattattttctcgtaataacacaataattttgattttaaaacaatactttgtatttttaattaaaaaaaaaaatactgtaaaaatataaatttttttgtcatttttgaaataatccctaatatatgttaattcccaatataactttatttgtattaacatatagttagttacaattattaactcacactaataataacatagatcatttattgaaatattattagatattattaaattttaaaaaaacttctatgtcacaataattatatcaatattattgttaagtaatagtaataaagagtgccatcaagattgttatcctataaatacttaacaaatttatataatattgattaatttattaaattaaattatacaatattaatattaaatatcaatattatgtcatgtgatagtactaaacactatacttcatacttggtatttttttttttttttttattttttttttgtaagtaactgttttgtagagaaacaaaggaaaaataagttttagagcaaagtaggagaagctatatacctccaaaccgaagtccaaatcaagccttaatgcattcctggcgttgtaatgggcttcttgattgttacttcttgggagtgtggtataaggatgcattaggaaagagagacagagattcccgaactaggtgaacaaggttgtataaagttgagttgtcctt

SEQ ID NO: 391359 - DNA, 544 bp, Cannabis indica
ttgtgtatccatttgagtagctgggatagctcatttgtttgggcccccatgacagccacattttaacctgttgtaagcagtattcagagaaaggacaccagaagaacaggtgttcgtgagtctcgggcagcattaaacacacgctgcaagtcgggtcatcaagcagccagaatcgctgcaatcttcccttggttttgagccgattctgcacaactaaccaaagtataaaactatgcttgggtgtgttgaatctcccccaaacctcattgatctatgcaactataacctgtacaggacagatcattttgtaacctgctgaaatcttgtattttgtttgagcaaaccggtgcacatccgtgagagattttatttggttcttggttgcaactatttgcttccaataccaacttccttgacttgtagcttgataatctcaccaattctcttctttcatatagactgcatgtagtttgttctgttattactaattaatatatttaaaaaagttattattattttttaaatatcttaattaaaaaaagaa

SEQ ID NO: 391360 - DNA, 766 bp, Cannabis indica
acaagtttatattaacttataacatattatatcatgtacaataaaatgtaagtctctctcacttatatatataaaaaatatatgtcccctcaactaaaatgttgggtccatcatttgtcccccacatcaaacttgaaaaaggcgcacaacacaaaaagtaaaatacttttcgtccaacgtccactacacgatcgacagtgcttggatacatgtaacatcagatgtactaagttttacggacgataattattccccaatggatctcacctacatgatccaaaatcaatattataatatattttacctcattgatagacttatttcatgtataaaatcttaacgagtttgggctcacacaaaacccaatttcaacctataaatagagttttatccttttatgcaacgagttaagaactttagttaaaaactatgtagaaatgagctaaaaacactcttatataaaatacttcacagctagagagcttaataatattaactcgagaactatgatttattaaacgtctcaactacatacaaattttattcttctttattttttaaacatttttcttagcttaatcaacttttaatttagtttctcaaaatcttaatacactcaaatatatatatatatatatatagagtaaactaattgagaaagaaatcagaaactaaattatcatattagaggtatatctcatttcatcatatattagtattagggtgactattcaatggttatatttttattgtaactatatggtta

SEQ ID NO: 391361 - DNA, 861 bp, Cannabis indica
agagagagagaggaggaagttagacagagagagtgggagaagagagcttttgaattgtaagggtaattttggagttttaggatgtttagagaatatttagagtgtttatttaaaggtggtatattaaaagaataatctaaatttttaagtatattttaacaaatttcccaaaaacaaattgtaatcattcatttatcttgccaaaaaaaaaaaagcattcatttcttgacaaaataataataatattatattaatcattgactaacttcttttgaacaatgaacctaatttttatgatttctctttatttatttttacataataacttgtgggtttaaaagagttaggtgttgggtgacaaaacaatacataaggtggtgtagaactctcttcaaattatatagggtaagtgaatagtacattcttaaatttagaattataaattatatatatttttttatagaaataacaaactcattttacaaatttctggaactagtattcaattagttcggacttatttattattaaattgagatcaagacaacaaaaatccttctagtgaagaaggtgagtcaaggcctaaaatcagaccgaaaggcataattgatggacatgtgaatattcatgtactaccctttattagtcccgaggaaccaaggaggctagattaactgaaagatgattatcagtttgataagaaaaattttgatgaagttattttaaaatatcaaaagatgattaaaaatagagacgcaaaatcattataatttgtttgttcctgaaacagttttaggtattttgcagggtcggccctagacatagggctaggcccgcacctaaggcctactcattttaggg

SEQ ID NO: 391362 - DNA, 1073 bp, Cannabis indica
caagatatgagaaattcatatgtaaataccgtctcatatccaaaacacaccttgcattttaaaatatagtgtaattactaaactgtataattactacccttataattaccctacctagtaattacacagttacttccaaacacatgtgtttaaccttatgttccaatacacaattgctattggacttatttttatttttgtttcaattatatttatttttgacataagaaggagaattgaatttaaatacttggtaaaaagagtatttatttttttacttttattttagggataaaggtaaaaaaaagtatgttattcaagtttattgacagtttaatttgttttaaaaaaaatgattattttttggtaactcacctttaccaaaagagtgtttcgataggttttatatctgtttcgacatttataagagcttttagtttttttttttttcccataataatgtagattataattatttagaattatcagtaaatttttataaagtcgaaaacaaagtttaaatattttattatacgtgcaactgttttttcttatatacgtgctaagtagttgtttgaactttattttggacactataaattattgagaattttctaaaaatttataagtaatctgaaatatctataacttatagtgacgaaaattaaattagacgatttttttttctttctaaatagcaaaataaaagtctatgagattttttttttatttttttttactatttcgcagtataagatttgttaataatatcttttaaaatataatttttatagtaatgtaactattttattatattttattaacaatgtgtttgaaagtaactgtgtaattactaggtagggtaattattagggtagtaattacacagtttagtaattacactatattttaaaatgcaaggtgtgtttggatatgaggtggtaataacatatgaattcataatatcttgtttggtaaaatagttagtaattacatgggaaaataatattttttaatagctaatgtttaatatgaaaagtttttagtaattacacaatgtaattacattcaat

SEQ ID NO: 391363 - DNA, 1136 bp, Cannabis indica
gagcaatgcatactacttaatatataaaagatacttactaaaaatttagacgatatattaattgttaaaattttaacaagaaccaacatacaactaaaaaaaacagggtaaatttacatgatatattaacttttgcttaatttttacaaaaatactgccaagcggtttatttttttacttttttactgttgttttttttataagtttcatactgcagtatactgtattaagttttcactggtgttttgtagttgttctattgttgttttaagttgttctgctttgtgttttactaatgttttataaaaacacagtatttttgaaaaaatttccgtgtgacagtatatttgtaaaagttaacccaaattacaatatttttataaatttcctaaaaaaaactattttagaaaaaaaaaaatattcgattagccccaaaagtactaaaaaaaattgtggcagcatgtacaaaaagatttagcaaaaggttccattaaaatatgactattaacaccacacacactctcactgttgttaatattaaaacaatatattatcattacttctttaaaaaaaaaaaattgatagagcatgatggtgctttatatataatgtctaaaaataaaataaaataagtaaagagtttataaatatcatcatttctcaatcatgagttgctttatatatgcaaatgtatctaaagcgccaaaaaatgttagctaatagccatatttaattagcattttagctaataactatttgttttaaataaaataaaatatttttgaataatataaaaaattttagcaactttaaaaaaatattatttattagagagattgctcaaagggagtaggcagtgatcccaaagaggaaaatctgtattaaatcaaaatactcactctaattatatttgacaattaatgtgttaataaaattgtttatgaattagttttaacaacattggaaaagaaaaatatgggtaaataccattttggactttgtgttttgcaaaagttacagattggaccctgtgttttgttaaatgacaaaatagatcctgtattttctaaaatagcaaaaataggaccctaagcttaatttttgacaacttttttttaatacaaccaatttgaaga

SEQ ID NO: 391364 - DNA, 1004 bp, Cannabis indica
gagagagagagagatttattatttattatggtactgggaaggaaggggccacagaaataaatggtgttgatgacacagttgacacaaccaacagcttcatttcacaattttcaaggtactcttaccctcaatgaccccccaaaataatttaaatacatacgtatgtattcatcctaattatgcgtgtaagtgtcacagggctaaaatttccagtaattttagcagtaactctggagctttttaaagtctaaattaagttttgattgcacaaaattttaatagtcttttttattgttctttaattaaccagcttcttaatacatcctaagtgtgaataataactctgtatttatcttgtgttcaatttaatcttctaaacacacaactgtttaattatgatagtttgagtgtagatatgagcaaaattaataccaatagcatgtaacatataaatacccaatttcaacatatggtgttgacgtaatatatacaacagagaaaagccaaaatataattaatggtgtttggatttgacaaatttaataaacttttcaataattgatgatttgtatgatttgagatcacatttggatggatatatatctcaaaaacaaatagcagctagctacttggttagacccacatgagtacatgacacgcccagatccctaagttattgtctacagatttagtgtcaagttgtaatgttatttgtaataaaaacgacaaaacagaaaattatatagacaaaaaagaaaaacaatagaataaggtttgttaaatcaaacttattataaatatatacttatcgaagactaattattctaagaacttcattgatttttattatcttattattatttcgtttttttttcttaaatctaagagacagtaatattgaaaagaaagagaaaaggttgtgtaatttggattcctactaattagactgcattaaatgtggggacctgaggtaacagtatgtgtatagtatttgaaatcagcta

SEQ ID NO: 391365 - DNA, 929 bp, Cannabis indica
aaatttttcagtccattaaaaatgatctctgaattattcatagtgtctgttgtaaaatgatttgtcaagtttaattaattacacgcatggtgcagacatggcaatagtctaaacaaccatgtcattattctatttgtcacgtgtgataaaatttggcagaagaactactttactgggagtacaataatgcataaatcatagttcgggggcaaagattctaaatagtataaaaaaaattatgccatgtaactcttgtaagctgctcagtgttttgacttaaaagagagttgaaagtaagattgactttattatgctttatattcacttttgatcctacaaccgagctgatcgcgatctccttattcaggcctgcataggcagaaagagctgttctgttgaaatttcgaaccttgcatttggaggtgatccgtgtcggcgcgttatcaagacattggctgttggggcaatatgctcactgtcatcatcatcaaatgttggttctcctcagctcttgtcaaccatgtagtattacatgttggcgggttcttcaccaattcatggcgcgattttaggcttactgtgttgtaatattcggtttcactgcgtatgtatgtatgtttatgtgttttatattaccatgggattgaaggttgtgtaaataaatatgtgatacaatactttatttagtgctatgagtaatgatccttggaaactttggtttgaaaggtgtagtataaagaaaccaaatggagttaaattggcttaaataattaataatcatgatcatcattatgtatgtgtgcatttaatgtagggcttggatttcatctcgtgataagaggaattaaaaataaggtgtgttttaaaaagttacaaattgattttttttttttaaataacaaaataaattttatatttttcaaaatagt

SEQ ID NO: 391366 - DNA, 1870 bp, Cannabis indica
atatatatatatatattcttctgcttgcacaatatataaatatatgacatcaatttaattatacaaatatataagtcatgaagatgatataattgtaacagtttttcagagttatagtaaatattttttcttataataaacataaagttctaaatgataatattccatcaaaacagtactgatcgattcacaagaagtttattagctaggtaaatatcaaaataactcacaatatatattatttttttttcttttaaacatctttataattataactcttcatggatgatcgatcggcatcataataatgtcgaagtacagaagttgttgccttgaattgattctgggaaaagaatgtggaatgtaatgtatcacgaaagataggatagacaagatagaaaaacaaaattattggtagaagctcaatgcaagaggacaaaataggtattcttaatgatattcattgattattattattgggtataaatgaggcaaaacaaaaggacaccatcatggctgtaactgagagaaatagcaaagagagtccaactatgaatgtgcatggcaaggttaaaagaaattcattttgaacaagaaaagcattatagctatggatgaaaaggacatggcaatggcatttgatattagaagaatgaaagagataaagtcccatgtgattattggttgattatcaccatgatcaaggatattgaaagctgttggaaatgctacagtcacaatgattgttgcaacaattagacatgtgttggaatttttcttcatccatttttcaccatcattcttcatagttgcatgttctttagtgaatatatcatttggtgtttccccatctttattctttttgttccttagtgaaggtgccacaatcttcttcacctcctgtttatatatcacatatatataattaatgatatcatgatgaacattgttagaaatttgtactatattagtatattatatataatggagcttcttgtagttgcatcactttgtcccatacactcccactaaaaaaaatctcacttttagtcacaatttaatttgtaattaaaattaaaaaagacaagactaattataaataaaaattcttatgttgtgcttaaaaaattcatggctaaaaatattaatcacaaaattaataatttagttgtgattaaacatgttttagttcacaataattattgtgactaaatttttatggttattttgattatgcctattattttttataaactttattatctaatccctattatttttattgttttttgtttttttagctttaatttagtttttattttatttttttttaatttatttttacactttacaattttagggtttcttttttatttgaaaaaatttacaccaaatactacattttttttttcaaacatttacatttttaatttgacaagaacattttacttttattactttttatttaattttttttttttcttttttacttattgaaacttcaaaaagttttttttttttgtcttttttatatattttttagtcaattttggctctcttttttcttttcaacttttaagtcagttgctacttttttttttctttctttcgcttatctctctctattttttttttctaatttctctttgtgtctctctttttttttcaatttttttctcaacctaatttttttctcttaatatatataataagtgtacatttttatatttcatttttttttacaaaaattaaacttgtttttttatttaaactactattcgtttttttttgttaaaaactaattattccattaaaaacagcagaaaaaaaaaaaccagtttcatcaatatcatcctgaaaaaaaaaaaca

SEQ ID NO: 391367 - DNA, 802 bp, Cannabis indica
tttcattgaagatagataagaaaaaagctcaatccataaagtgaaaataaagttgtacaaatactaaaaaaaaaaaaaaaaaaaaatacaatcataggataaaccacaccgattgcaaagtagataaaaaaacataaacctagctgtagaaaaatgaagggacaaaccccacaaaatgagcatcaaaaaccaacatcacaaaggacaacagagagtccacaattactaataaaaaaaaaaaaataatacacaacctcagtctaaattcaaaagcatattgaacacaaataaaggagtactgccacatcatatagacaataggagtctacactctaatttttttttattatataaattgatcgcgaccttattacaatttgtgagatgtaacttattaaccaaataactttgtattttgtgacattggattttgagaagaaagaaaaatatttgaaataatttaatataaagagtgataagattctgcaagatcatagcattgttatattattatttaatttatataacaaggacgagaacatgcacgttaacgcatgcatgaggtatagattatgtaatattatacattaagaaaataataagactaaactaattatatttgagatatttggacaatagtactcaaactttacttcatttttgtttttgggttgatgttagtgagtagctgttacatattaaatagacttgccattacattagtctgcatcactttaatcatttatattatattatgttagataaattaacaataaacctaaaatctatttgtatataatat

SEQ ID NO: 391368 - DNA, 1325 bp, Cannabis indica
aaaaaaataataattcactaacccgttagtacggtgttgggcacattacctaataaaacaaacaaatggtgtggaagaaatagaaaatgaatttataagtccaaattaacaagtttccgtttctcactcacagtaagtactttactacttttgcagacaaattcaaggttcaagatgggagtaacgctaacgagcgcgatcgtatcctcggcgcgcaacgccgtgacgcaccggcgaaactgcgagcagctggcggagcacgtgagagtgatcgacaagttacttgggaagctgaaatcaacggacctgatcaatctccccgccgtaaaggagccgttggatgggttagaagaggccctgaagaaagcggtggagttggttgacagttgtagagacaacagttgtctctacatggttgccatggggtggaccgtagtctatcagttccgtcacattcaacacgagattgaccgatatcttagactcgtccccttgatttctttggtccatgagtttcgaatgcaggtacgtacacttctcgtacgattaatatataatgtattaacaataattctaatgaacattttgcactcgtttttgcttaattttgttctacgaatcaaaaaagttagcttaatcatttaaaatttaaataaaatgaaaaatggctgaacacatttcagtttaaaagaccaaactatacctctacttttactcctattgacatattattgtcggtatggttgaaatttgatgatcatttgacaagtgttacatatctaacggtgtatgttccataataatgaaggtataaaaaagaaaaaagatcattgctattactcacctattacataaaattatattgcaacaatattttgttacacaaatcacaattttgacaggtaagaatgctgcctggaagagtgctagttactactagggattttaacatttgtcaaagaaaaaatgtacctattttatgccaagagagagagagatagagagagatctttcctttaaaaaaaaaaaaaaaagaaaagaaaaatagagagagatctcacattcatgtctaaattaacacaaaatctcagtccgtaatgaaagcacgttgagtaaatataaatgtacttctaaacaaaaatgtaaaaatgagagaaagaattgaccacagaccagagaataaaaccttcaatcaatatattatatataatctaataccaaggaaaaagaaaagaaaaagaagaaaaaggaaacctacttcttatacaataatacaattaccattactacctactaatatggtctgctaactatctagtcaagtc

SEQ ID NO: 391369 - DNA, 1029 bp, Cannabis indica
tttttgtgtaacattaaataatatattgattctatatctttttgttaggtagattatgaattttgtcttttctctttaccatttactgctaagcccttaatttggtccttttctccggatgattggatcaaaattaattgtgacgtaaatgtaggttacgattcatatgtgcatttgctttggctaggaatcacacaggttctattttgttggtgacttctaatatgctaaacttctttgaccctcttattggagagacagggacgtgttagctagccatggagaaggccatgtgttggaattttccttttgtgttaattgagagtgatttagaaacagttgtcaaggcgctagaaggatcatgccccatgtggaggattgataactatgtgcaaatttataataagctttcttgtagttttttgagttgtaatttttcttttgttttagggtttgtaattttacaacccataacgtgatttgctgggcttttgccaatgatataactggtacaattgatctttcaatcaatcctaataatactttttgtaatgaccataagatataagacttttctatctataaaagtttattttaaaaaaataaaactttgtaaaaataacagtttgtaacaattttataacatcatagtttttttatttagtttttaaacattattttcaaaattataatctatatagttataaacgtcaaaacattagttataaatttacaaattttgtttataagaaatatattttttcatttataattatgaccgaatggagtagttgctattctataattgaggtacttatgaattaattagtctactgcacctaaatcattctggttcagagaatgagctaaccatcatttttgctatgaaacttatgtgctccacttcactcacgtgtgtacaacttctatttagaattcttgaaactaactaaattatattctaattgagaggttataactaaatagagttatactacaagaaaaaaaattcaaaacactaaaaaatat

SEQ ID NO: 391370 - DNA, 592 bp, Cannabis indica
aaatattatttatctttatataacaaggtctcaaattttttatttttttttataattcatttcactcagaattgtcctgaccctgcttagtactgttttttttttgttctttaaaataaaaataaaaatataacaccgttataggcgtgtatgacaatgacacacggtttcttatgacttggccatttggggtttgcttcctattaatttaaatatttgtttgttaaatattaatgtcacacatgcaaaaagtaatattgttggttggtattttattcaaatcaagagattaatgatcaaggtgggattagaagtaggggattctctttggattaaattagaacaaatgtattacgtactgaacaaaaaaaaaagtgctatacaagtaaagtaatagttctttaatccaaaatattcctttttattattctctgcatgaaaaaggaatttcactataatattggtgttaattactttcaattcaataagaacaagtttttacaattacaattggtatatatatatatactaggtgattgttacgtgccaagccacgtagtgttagttttatttaatattttagttttttatt

SEQ ID NO: 391371 - DNA, 1294 bp, Cannabis indica
ttatgccatatttttgtaaaaaggttttaaaatacatttttacgcttgtttttcttggtttctggttcccgatcgatattttaaattgcaaaattcgtcaactatcaaaaggacaaaatgggacaggaaagaacgaaaaattgagcttcatttgtgaaggctcaccccagcgaggcgatcggtggttgtagtgaattgtcacccatgtgtggccgcatccagaggagtagacagaatcattttttttactttccaggtgccgcggcaacactattggtggtcgcagcgccgcctccgtacgagaagtgagaaattttctcttttcttgatttttgggctataaaactggattttaattaaaggagctcacgaatttcaaaggatgtggtcaaaaaagaaccctagaaacataaaaagaagactcttggagcgagcgtggcgatccgattgagttctccacctagtttctttcttttccttttaatttctttacgttttatctgtctctagtttaattatggatttgattgtagagattatgaactaattttccaatttagggatatgatgaatgttgagtgattttattccatgagttaatgtgatttgactatttcttatttcttgttcttgtgatttgttcatatttgttttaatacatgattaagattgatcaccttttgcatgattcatggtccttaaatgaaatcggaaaagtgaatagtaggaatactctaattgaagaaacatgggttttgatgtgaaacgagagtattcacatagtttgtgtgacatttgtagggatttatgccctaaaagtaagtaattaatgggtaatatattagagaatatatgaaatacaattataaaataaatgatacattaattataagagtataagattatacgatatatacatagaacacttcttaatgggtattacccattgatgggtactaaataaattaaactataaatattaattttaaaaatattaagtcattagattttgatacgatggcgaataataaaagagaaatttgaatttctacacttaaattagctacttaattaaagaaatataaaaaaatacatcttttatactatatcaaaataagtttacatgaaaatatttaaataaactcaatattttttatcattttttgccgattttttttattattattttcttttcagccgatggaacaacctcagcccatataataaaaaatgagacattttctaatcaaataaaaaaattaagtataaaactcaattttttaatattacccat

SEQ ID NO: 391372 - DNA, 1044 bp, Cannabis indica
tattcaagtaaacaagaacactcacaaacagaattgtgaggtgaatactcaacaataaaataacaattacttaagtaaaataacgggtatgtaaataacacaagagaattatagtggcttactcagagctcggtctacttagtccactttcaaagaaagtttgtgattagtcttattcatctcggatcactcctttatatagaaagcaagtgatcatttaattacataatctatctgacaggaccggtagaataattaattatatttaattgaaatgaaaacgttttataaataaatgagagaacaattgtgaccattcttattaaagtctcgaatggacacgactatatagatcgtaagaggccattcgtatattggcaacacatgaatttgcgggttcatacgagtaattgcgtatattgggtccttcgacaatttgtagtgaaagtgcaactttcacttggaagtgggggagaaacaacatgtcatcacgtataatcgatatacattacgattgatgctcacttctctctatgtccctcttttatgttccatactaagagatacatagtagtgtccaactaaattctttctcggtcgcaccttctcgtatatttctatcattcgaggtatccataggttttggtacccttgacatttcatcattttcttacaaaaaattggatgtttgtgttactctcatgagagactactcactatatttagatgaaataaatcatctagtaccatgtatcaattcgaaaaataaccagttcaaaagataaataaaataatttcattattttgattgaaaaaaaagtaataataaaaccttcattattttgttatttttccctatcataaaagtagttttgcatttagtatcataaaaagaggagtgctaattacaatctcctattacatttttctagttaactttcacgtttggaatcacatgccagaatattttttttatagcagtattcattatagttacaatattatccttgtaaattttaaaaatttcaaatagtttacaatgcc

SEQ ID NO: 391373 - DNA, 900 bp, Cannabis indica
gataaaatccttgaaccagcttactaccgaggctgctaagtctcttgaggcaaggaatgaggtctctgctgcagggattgaggtctctactgcagggaatgtcgaggaataacctactgggtcgttgctccaagtgaagttctctggttctcgtcttgacgtgattctccttgagccttcctatcctctaccccttgaggttgggactgaagggtcatatttgagctcgcaacataccaccaacagttggcgcaacctcttgacacttggatccagcgactgggatctcgctattcaacgtagtgctgaggtcctagcccaaagaagttatgagcttctgcattaggtcaattttctaaccttcttgttcctactcttccttatttttccctctttactaactttagttttccctttcctcgcatgcttggtttctcgttcacgccacacatcaccggtcgtctcagcaggttaaaatgctcgagactaagcttcgcaaagttagggaacataaggatgtcgtggcgaagaagtggagcgattctgaagctgaggtctctcgcccaaaagaggaagcaagaaagtagcatcaagctgaccagtagaaaatcaaggaactcaagattctcttaagtctctccaagctaatcttccaataaaggcttggacatccagcatcaagagaaaagaagaaaataggttccaatcaaagtctttgatacccagcaacaagagagaaaaagcaaataggaaactctacaaagaaatcataagaaaagaagaagaagtgagaaatatgaaaatagagtgccaaaaccataactcagcaataaaaaaaaagtaatagaagaagataaaaacacaactcagcaataaattagtattacaacaaaagattta

SEQ ID NO: 391374 - DNA, 1834 bp, Cannabis indica
ggttgagctttatgttgtacttacgaaggatcttaaagcattcttctggatcttccacatgcccacagccttttcagacttgaccatcatgtcgtccacatacacctccatattgcgaccaatgagatctttgaacattttgttcacaagcctctggtaggtggcccctgcattttttagcccgaagggcatgactttgtagcagtatagacctaactctatcatgatgcttgtgtgctcttgatctggcggatgcatcttggtctggttgtaacctgagtacgcgtccacgaaacttaagattgcatggctagttgtggcgtccaccagctggtcgattcttagaagtggaaagcagtcctttgggcatgctttgtttaggttagtgaagtctatgaatactctccactttttgttcagttttggcatcagcacagggtttgatacccaaagtggatagaatgcttcggtgatgaaatcatgggcccgtagtctttcgacctcattttttagcgcttgggtgtgttctttgtccaacaacctccttttctattgtacacgtcgaaagttttgatcgatgttgagggcatgactcatcataaaggggtctattctaaccatgtctctatatgaccatgcgaagaggtccaggtttgcccttacaaatttatcaacactgattttgtttccagggctaaacctttcccgatcttcagtattctagctggagaagtgggattgacctcaacttcctccagctcttctacaggtccaaagctatctacaggatccccaaagcgaggatctatgtctgcgtctcagctttggcctaaacttcattgccctttgctgggctcttattcagagctcttggcaagcatcttgtctttcttggctttagataaggccaagttataacaatgacgggcagagtgttggtctcccctcaaacatcctactccatgcctttttagaaatttcaagcaaaggtggtaggtggatcttaccgcctttaggtcatacagggatggtcaacctatcatggcgttgaaagtcgagggtacgtcgattatgacaaactgcgccatcagagttctggttgttggattctctccaacagtcaggggaaatagaatgtaccccatgggtgcaatgccttagccaaagaagccatacattacttgtgtgtagggtgctaaatcagttagctggagtcccatcttttcgtatgttgatttaaaaagaatgttggagaaggctccattttccaccatgcatcttgcgacagtcatggaaattgactcgagcagcatctccttccgtgaaagagatgtgggttctccaagctttggttgtttagagccccttttcttcaacagctaggatgtcacttttaggctcatgacaaagtgtccaagcatagcgctccctagccttgctggtcttgcttgtgatgtggggtccgccgataatttcccctaagtgacctgccactaggggtgttcattggatcacatccaatatttttatgcccatccagatccgatccaattatatattggatgttagattttaccatccgatccgatccaatttatttcagtcatccaatcgatccaacatccattggatgttggatttgatcggttctatccattgcgtgtatttcatatatacttattgattcaatttgaatttattcaatattttaaactagtatttttggatcggatcggatccatccaatattttaggtccaatatgtattggattagactggatccatccaatccaagaaaaaaagagtaaaattttaatgttaatttttatgtat

SEQ ID NO: 391375 - DNA, 2148 bp, Cannabis indica
ctctacgaaggccaaaaaggacaaaaaaaaagtaaaaaaaaaatccctctatagaaactcattatatctagggataattgcagcaaaagtctcaaaaaacttagagttgatgcagattaatcttcaacctcaaaaattggcgataatagtccttaaggtcaccattttcgttagtctgttagttcctaacttaattgattcgttaatttattttaaaaatgttatgtgttaaaatattatttgtctaaatcataattttaattaaaaataatttaaaaataaaaaatagtattaaaattaaaaacattattttttattttcatttttcatttttttcctatttcttgtatcgtcttcctcatccccccacccccgaccttcaccccacccaatcctcatcctcccacccccacacagtggtcaaatatacaagagaccacataaagctcacgagtacaaaaactccaacccataaaaccttaaccccacctgtttctttctcattttcttcttcttcgtcttcttcaacgaagcccttgtacaaaaccactcaacgatagaccatgatctctccaattcaaacccatatttctaaaagccataacataattgttcgacttctcttactaaagcatcatctacattgcctcaacgtaatctccagtgaaaccccaatccctcgaagcccgaagattgcccaagaagaacttgttctataaatcgatcttgatcatatctaattaatgattgttgaataaatgaatccaaaaaaagagagagaaaagaaagagggcaaatcgttagccttagtggtgtgccttcgtccacacagttccctttgcagctctgcctacgcttcaccgatctcttccacggtgcaacctctcatccaacaggaagcctcctccatagcagcttaagaaatcgcagcttaagaaaaacctcgtccatctccattgagcgattgcaaaccaaatctctgaagatagaatcccaccgttccagatctcgacacctcccatctgctatttcttcagctacgattaagttaatgagatctgatcccacaatgggattcaacttctcaaaaactcttgaaaccttcactgatatcatccagttgagaagtcgatgaatcccaggagaaaggtcgatgaacatatcatgggtggagggtggtggaggtggtggatttttggtaactagttgagcagtcacgatatgggcattaagcaagaagaagaataagaagaaaaaaagaaagaaaaaatatatttttttaatttttaaataatatttatgatgtggatcaataaacttttaacacatggtaaatttaaaaataagaaacgattaattgggtacttacggacttatgaaaaattgtaatcttgaagactattactgttaatttttaaagttaaaggcttatctgtatcaatgatgagtttttagagagttatacgacaattatctcttatatctatacatatacttatatttgacaaaaaaaaagttgttgatcattctcaacaccactttacattacatggcatatacataaagtttaactacaagaaaaaggaacattaatgatgacaaatttcgttggtaaaaattcctgttttcgtcagtattgcgcatcaatgaggacatttcgttggtaaaaagtcgttgggaatactccgttggtaaaaacgattatattaaaattattaaattaaataattaatttaaatttaatttttttaattatttatttatttaattaattaatatataaaattattgaattaattaagatatgaaatcatttaactaaaaaaaaatatttagagtcactaatattacaataaaaagtgagtcatagacattatagtactgcatacctaaatataaattagtgttcataaaatattaacaaacatattagaccgatagttcgtaaaattaaaatagatattctaaaagaagtttgtagtagcattgtcctcatcactagcatctccaggaacatccggcatctgtgggtagtatggcggcatttgtagtagcttgtcatcatctgagatgtctgttgcccatgtagtgtcggcatcatttgagatgtctgctgcccttgttgtgtcggcaacatctgagatgtct

SEQ ID NO: 391376 - DNA, 721 bp, Cannabis indica
aaaacctaataaataataaaataatatataaaatattaaatatataaaattataaatattaaatatgattggatggatattggatgatattggattggattggatcggttatccattggatcggatgtctcatccaatatccgatccgatccaattggattttaaaaatttgcatccgatccgatccaattatgattaaatatccgattccattggatcggttggaattggatcggtcggttggaattggattggatgactttctgcacacccctaatctcatccataaatctagttggataattgacacaggtgctactcaccatgtgtgttctaatactaattggttttattccattcaaaagaacactaaattaacacgtcagattaccaaatgataccaatattaagattgcttttatcgggactgtcaggttactcaatttgacacttgaaaatgtcctttgtgtacacgattttaaacacaatcttatttctgcttgtgccttatctgattcttccaattaatcattcctttttctccctaataaatgtgttattcaggatatcaccaagaatcaagtgattgggatgggtgagagagttggaaatcttttctatccgtctgaaagtgtcattcctgttgtgaattctttttctggtttaaaaataaacagtgatactttgtggcattataggcttggtcatgcctcttgtgtaa

SEQ ID NO: 391377 - DNA, 854 bp, Cannabis indica
tgctggtaaaagtgtcatttcttgtagtgtcactatataatatgtacttgagtatattttattgatatttatattttactatcacaatgtataacaaaatattaataataaaaaaaaatcaaaagcaaattaattgccaccaacaaaatcgagaagtacaatattttttctttaattttcgtgaaagtacgatagaaaatataaagtactagtaatgaaaaaaaaaagagagatatcgaagattctaggacaatatattaattaataaatacatgtcatattatataattatatatagtattcaacaccatgttataatattatattagtgtgatcaaattaatatgagtcttaattaaaattaaactagttattattttttgctttgagtggttggtggattaagcacgattaattttgttgtcctaatattattagccatgaattgtttgaggctagcttgaaataagatttgggaagaaggaatattaaatattgttcttaatttgaaaggcaaatagatgtataaagttttaataattgtaataaatagagttaagattaaattttttcatgattttctcattttaaaaaagaaaaaactactaaagaaaactcaaattggtttgttagttgagagctctcaactaatttgtaacacttttttgaacaatacaactttttcatttatcaaaaaaaatattattagccatatggttgtacattggtcggtttgaacggtttatcctatatatttttttaacctaatttaaagttcgggttgctaaaatttaagtgcaacccgcccatttttttttaaaaaatctataattaaaccgaccaacggtttgggc

SEQ ID NO: 391378 - DNA, 1091 bp, Cannabis indica
ctgccaacgaaaggaagaattgggttatgtatgggagatcaattgttgtgtcgtttctgtcagtcttgcgaggagactactttgcatcttttctttaagtgccatgtggttaggagtatttggtttagaagcatgtgggggttgaggagtgatggactcaattggaattctttaaaagactgtggagattggtggtgtggtctgatggaggacaagttgatcttgtttgctgcgtgtgtttgggacacggtgtggaaatggtgcaatgacatagttcacagtgagaggctctgcagtgttgaagatatctacggtgattgtatgagacggtttagtgagttccaatagactcactactcagctggtgtagatatctcgtctgagttgggcaatgagaaaccccaccaacagatgaaattggatggatgctgtttttgagtggatgcatctgtggttgaggactttgctggttttgttgcggtctgtacctcgggggttcattcggatgaggctgtctctgcaatgcctctgaatgaccttatttttgctgttaacaatggtcaggtcttcagcgttttggaaggggagttacagggaatcaagttagccttactaatggctaaggattttggaactggctcagtgagcattgaaaccgactcaatggctgtagctaatgcttttaagtcgggtcgcatgcctttttgttgggatgtttatcctctgttctgtgagtgtcttaggctttgtaaaagttttcgtagttttgcagtgtcgcatattcctcgtgaggaaaacatgttagctgataagctggccaattgggcaaggaattgttctatggtttgtaagggtcgaattggggattttgttccctctgtgagttctagtttgttgtagtttctttctgtttcttcaataaaattttcacttatcaaaaataaaaaatactacttttctaagataatgactaagtctgaaaagaaagtagtaaataaaggagatatttatttcttgattccaaaagtgttctaccatcttatatgacatatgatgatcccactgcctctgttgtcttgtcacaaccgaag

SEQ ID NO: 391379 - DNA, 1150 bp, Cannabis indica
tatgatgctaattagtattaattcaaataattaagagtgataagcgctaattacgacatatttctcaaattctacttctgaaaatacatgctgaaatattttttttatttattttttatttttttggtccatggcggttcattataattgcaatatcattactataaattgtttaaattttcttttgaatagtttgctgtgttaatttttttttttgatatctcagtttacgtattgtgttcaaaatactccaaatctattttctaaagtgtaaattattagaaatttttaaaaaatttataaaaataatattgtaactataacgaatattctatttcttcttttttttaaaaaaaataaaaataaagagatcatttcattaacaagaacaatcaactaacaaaagaacaaagaagtaacaatttagagggaccactgtccactcttatactaccatcaaaaagataacaagaagcacaagcaagacaacgatcaacccttgttagctaatcgatttatgtatataaaaaaaaatagaaaagaaaaattcacatacatgtatgtaatattcacaattatattatattttaattacgatatataaagttatcatatataatgtttaaataaataaatagcgtcatagataattaaaaaatgttttattttacactttgccataattgtatttcaattaaaaataaataatttactaaaatttttcaaacccttcatcatatctgtaatatccactattacaaaaattattattctcatcgttagttctcgaaacacttttttttttcaaagatcgtcgctaataaaattaaatgtgtaaaaccgttgactataattaaaattattgagagttttaaagacttctatgatattcgcaactgttaaaactcgttgtgtacaaaaaaaaattaatattgtaatttaaagagtatagtcgatacttatggaccattggctatagcgtaggggtgagcaacggtcggttttgtcggttttttacacaaaaaaaaaatccaaaattcggtttttgatttttatagttctaattcgaaaaccgaccgttttaatccacggtttggtcggtttaaacccaccaaaccgtacttcattttttttttaaaaaattaagttt

SEQ ID NO: 391380 - DNA, 1674 bp, Cannabis indica
cttgttaattttcttgtcacatgacatacatttagatcgatccaaatgtaaggcaaccacaaagccacctaaacataaatttcatttcaaaaaaaaaacatttgctaaaaatgatattattatttttaaaacaatattgtgcggcgcaaaggaaagcaacgagccccattcttttttatttacaatggtccaaaaaaacataaaaaattatggaactatttccaaaagagtattgaaaagtggggtacggcaggaaagaaatttagataactatacttactattttgaaaatctataaaaagcaaattgccaacagtgtccgaaaattgcaatttggaatcttctgccgtcccatatataacattcttttgtcactaaaataataataataataaatagctttcaaaaaaatatatttatataataaaacaaggcttatctcttaaaaacaagaacttttttatgatgtaaaataacaagtataaaaataaaaatgttacaatcttttcataaaacaaaatactaaatatgacatttcacttttcacaaaaacaatcttaattaagcttagctagctaaaagggacaatatacaaaagttaattataagttaacagaaagagatttaccttgtaatcaaatacgatggcatgttacaactccttttaaaagcagagacaaaagctatacgatgctccgaagaagctttctggtcatcgaaatgagattggatggcctgcatcagtgctgccgttttagcccatgcaagccgctcatcggccctatccggttcgaaaatactggccgcagcaagaaaataggccaagaggaggttccttctgctcactccataattttccaacttacaatctcggtaccatctgtatccacgtacatagtagtaattaatttcatgcaacttacgaatacgtacttaactatatatattatatatacatgccaacataaattaacttataaaaaaatttgaacgtactttagcaaattgtgccactcaatcgaatgcaaagcttggcaaatgttgtaatcaagttttgctaactctagatattcgtcattgttaacttttcgcattctgagagttcaaaaataccatagtggtcaccccacgtgattaagaaaataattaaatatacaaaataataatgatatatagaaataaccaaaacctgtagagtgtcttgccaatccaaacatcattttgtccaccatactgttcaatgtagaatctggtctctactcgaggtaagtttgcattccatggaacctccaatgcgaaacccacctgtgtgtgtactcattattagaaatcttcctttggaatttcttttccacttttatttattttgataacgtggtcattaatattaacataattaataaagttcaaataaaacgcacatgcatgagagataaaaagtaatagagtatgatgtaattaactcgtgaactgacatataaatataaataatttctttaataatgatgaccagtcgcacgctgtatatatatatatcatctatgtaaatgttgcagactactacagtagaatctctatttaagaatagtctattcaagaataacctctaatttgttataaaaaaatcaagtcccgatttcggctagttataaataagaataacctctaaattgt

SEQ ID NO: 391381 - DNA, 527 bp, Cannabis indica
aaaaaaaaaatgaaaatttatgaaaacagaacatttacaaaagtaggactatagtatccaaataattaacaaaactcacagaaacaactagaacggctacttcaacactaagtgttctagttaagaacagtaaaaattagcaaatccttaacctcattattattatgaaaagttaggaacttagccaactcccacaaagagccgaaatcaatttgctcttaaaaattgtcattcttcttcaagcaaatcacccactcccagcatattggtattattattaccacacaattacataggagaatagtactggtaattaggacaaaggaagaattaacaaaaagctcttttagagggccctctcctctcttctattttttgaaaaaggagaagagatccttatgtctttggcaggatcctccccgatatatattaaaagcctcccttatggtggaagaaaaccatagttacaaataataacaaaacaaaaattctaaggcaaggtattcccccactttgcctcagaagaa

SEQ ID NO: 391382 - DNA, 898 bp, Cannabis indica
tttacaagactctaatataatgcttagatatcattaatggcagcacaggtacgaacaaagagtcataaaaaaagatctatttttcgggggtatagttggaaagatgaaaattgctacaatgggtgtgtggagactcttttgccaactcataagtttcaaataaggaccatgacatgtcccgtcttttcggccatagctctaatatttaacgaactagacccagcacataaatgaagttaacaagagccccacgtaagtcctaattgtgatgtaatgtaactagataattcttaatattttttcggaaatgtaactagatatcttactaacaacccatacccatagattcctaaattatatatgttttctaacctttttaaaaatcgattataaaataaatgcctaagaaagaaataaattggggaagaaataaaagaataaaatttagtatacaaatcaatattaccagagaagcttcaaagtatttgtacagtgtttttgccctaatgatttttttaaccctttgcatgaaaagtgatgttttatttactaccagaaatgttacttttgccagcgtaattcgttattctgctgtcaaaagtcacttttacaagtgtatctcgtgaactgcattggtaaaaaagttaaagttttaccaatatacaattatgctagcaaaacctatttttaccagcacaactcatatttgtgttagcatagtaagtcgtgtaaacattatccctttgatatttttaccaatgcaaaagtgcgtaaaaaatgactattcccagcacaaatgtgtaataccttgacagaagtcacttttactagtgtatctcgcaaactgcactaataaaagtcatagttttacataaataattttaatatatatattttt

SEQ ID NO: 391383 - DNA, 908 bp, Cannabis indica
ttacatctattttggaggaaatcatgttacctggaagtctcaaaagcagattacaattagcagatcctccacataagttgaattcaaaagcttgacaaatgttgtgtttgaaatatcatggcttcagtatcttcttacaaaacttggcattcctcaacctattattccttccatctggtgtgacaactaaagtagtgttcttcttgcagtaatgcatgctcgcacaaagcatattaaaattaacctgtattttgttcgagacaaggtactgcaacatcaaattcatgtgaagcatgttcctgcatctgctcagcttgttgactgcttgacaaaacccatctccagctctcgaatatttaatgattttagagacaaactgtgtgtagtttccaaagctacactcagtttgaaggggactatcaaggatactaacaatttgttagttatccaactgctagttaggtgttatttctattgttacatattggttactgctgttatgcttcttgtatatatacctctttctttgtaatcaacattttaataaataacacaatcaattcttttcaatctctctttcactctgtttttctcctctctctctttctgttattattgttacacttagggcaagtttaatgcagcaactatgcttgggcttacctttttattttatatactaaaaaaaaattcaattagccaattaaaagcaaagaaaagaaaaaataataaaataatgagtaagagtatgctcctaagcaaggatactattgttgagctttgaaaaatcaatcatttaagaatacattggcccattttgcagcacccacactagcatttatcgttgaagaagccctaactaaaatagttgtccattggggtttttatactacatattgaaattttaa

SEQ ID NO: 391384 - DNA, 1346 bp, Cannabis indica
ggattctcaaggtgaaagagggattcaatgagaataaacctgtgaggttcaaagccaggttagtttctaagggtttactcaagtggaaggtctagactatactgaaatcttttcaactgtggtaaatataaaacaataaggttgatgttgtctttagctgctcaaatggacttagaggttgaacagtttgattacaagactgcctttctgaatggattcttggatgaaaagatctacatgaagcaaccacctgggtttcaggtggaaggaaaagcaattgaattagtgtgcaagcttaatggatccttttatggtttgaaacactccacaaggtaatggaataccatattcgatatgtatatacatcaaatcaggttcaaatgatcggcatacgatcactgcttaaatttcaagaatgtggatcaatctacggtcgtgatcttattgctctatgtagatgatatactcatcatgagcaaagatatattcgcgataaaaagtatcaaagccaagctcaaaagataatttgagatgaaagagcttggaccaattcaaaagatacttggtatcaaagtctcacgaaactataaggaagggactgttagcttaaagcagtccagatacatcaagaaaattatttagaagttcaacacaaaagatgcaaagagtacatctggagggttaattttttttgtcaaaggaacaatgtcctaatagtactaaagagaaagaagagataaaggatgtaccctgtgcagttgttctaggatgcctaatgtacgtaatggtgagcacgagacctgacatagatcatgctctaagcatcctaagtcggttcatgtctaatcttggcatggaatattggaaagcccttaaatggttattgagatatttgaaaggtacttgggattatggtctgacctatgtgaaagcaaaaggagacttaaagttgaaagggttcgtggatgcagattacacatcgaatagagatataaaaaaaataaccacttcctatgtgttcttgacaaacctaaattgtatatgctagaacgcccagttacagtctgtggttgctctttcaaccacgaattacgaatttatggtgactacaaaagctcttaaggaagcgttagtggtttgcagaaagctttatgagctgaaacaaatcaaagggggagtgattgtgtatttcgatggccagttatccatccatttatgtaatagtttatcatgaaaagagccaagatataggtataagacttgttgggttttatgccctaaataaaactcatttcaatataatcagatctacttattaatatagatcagaaataacatttaatgtt

SEQ ID NO: 391385 - DNA, 633 bp, Cannabis indica
aaaattacataaaattaacaggagaataacatttaaaaaatattaaaacgacaacaaaaataacataccaataataaaaaaattaataatagtataacataaaaatgcattaaaaaatcatatttttcataaataaaattataaaaaatataaaaatatctaaaatttcatacaaccatatttttgtaatcttttttttaatttttttgtaaaataatctcactattgttttggtcctcgttttgtctccacctattctttagcatggaatacaagacgggaattctcatctagagacaataacagagagctgtttattaaggatattttctataataaactaaaaatggaacaaatttacatttatgacctaaaaaagggaaataaacaaaaatagaaactaaaaattgttaattacaaaagtaccagccaaggaaaacggaagcctccatcttcttcgtgacccagccgacgaaccccaacaacccattctcaaccattttccttccaaaaccaggaaaatcagatctaaaaaaaaaagtagatccaaggaaaaacaacttaaatcccgaaaatccaaatacaaaaacggaaagaaaaaaaaatcatccaacctccattactgtacaaaaa

SEQ ID NO: 391386 - DNA, 910 bp, Cannabis indica
taaattcactaatatatatttaactactgaatcctaatcctaatagagttcacatgaatcaattaaattaaaattttgaatttaaattatgtaaaattgggatattaaatcattttcaaactaaccgacctttattatctatatataaataccctactcgtgagacatcaaatgcatcaacatttttcattttttttagttcctttcctaaacatttgaataaccctaattttgattaatcattacctttttacccaaatttcacagctttttttttttctttgatttcaaaattaatcatttctactagtgattaattatgagttctccacaagtcattgggaatccctattactctataacgcccaatcattttgaaccaaatccaattgaacaagaaccacataatgcccatttttttaccattaacttaaatgccaagttcattcttgctccaccatttgctatggaagacgaagaatttctattcgatgatgacgacacaggaaacccaactgcttttgtagaaaatgttgcgcgaatttcatacgacacattgatgaagagcaacgacactcaagctcaagttgccattcaagacatgcttgctgcggtctttcttccttctctgtcttttcttgctgatgaaatcgttgattgtggtagaacgatgatgaacaacaaaagttattatagttcaaatgaagaagtcggcgttgatgtttctattagagtttttgttgatgaattacctcaacttgattcggattacgatgatgatgacaacgacgatgatgactatgatatgaatgatgttccaattcgttttgtggcggcgagtgaaaagtcaattgaaaaattagaaaaagtgcaggtaaaagataatccaattttttgttcgatttgtttg

SEQ ID NO: 391387 - DNA, 1443 bp, Cannabis indica
aattgatacattggccagataagctctcatacctctcccgaacttctttgatcgccttacactcctccatagcagcatcgagaaagacaaggctatcatctgcaaagaataggtgggaaagcctgtgatccaagcttccaaagcgtaaaccgtgtattttcccagccctttctgcttcttgaataagacatgaaagaccttcagaacaaaggagaaataagaaaggagaaagggggtctccttgtcttaagcctctacccggttgaaagagaccttttatcgacccatttaatataactgagaaggagaccgatcttacacagttcataactttcttaatccattcatcctcataatccagacactccatcatcgcttccaagaaatcccattctactcgatcatacgccttagacgtatcaagttttaaagccatcttgcccctatttccaaaacgacctttcctcatgcaatgaagactttcaaatccaagaatggcattatcttgaatgatccttccaccaataaaggcactttggttttctgagattgctgaattcatacttagtttcatacgattggcgaggcatttagataccaccttataaaccacattacaaaggctaataggacggaacttcgacatcttagtaggttgcttcacctttggaatgaggcaaataagagtctcatttattttcctgcaatccgaattgtggttcaaaatatcaaggcaggaagcagtgaattcagactcaattaagtcccaatttttgtggaaaaaaagacccggtaacccatcctttcccggggccgttagagggtgaacttggaataaagtggacttaatttcttcacatgtaaatggctccagtaatgcacagtttttagtagcactaatccggcaaggaattcttcctcgaagaatagctttgacatcaatacaaccatttgatttcgagaataaagtctgaaactaattaattgcaacagcagctagatcatcatcagaggtgcaccacttcccacgatcatcaaacagccccgaaattgtattctttttccatctagcagaagctttgaagtggaaaaatttagtatttcgatcgccatgttttaaccaaagagcacgactttctttgtctccaatacatctcccttttttcttccacaccattaagatccttttccaatttttgacgggctatctaatctgtcacatttgaagacttggaaagccaatcaatctttccttttaactccttggatctagcaaagatggcattcttttgattgatattccactcatgtaatctccttccacagttggagattagatgagtaagagtatcaataggcctccttttctctttaactccccaaacttcattaataattttgaggcaatcttcattatcggcccaagcatgctcatagtggaat

SEQ ID NO: 391388 - DNA, 506 bp, Cannabis indica
ctgatggtatatagattgtagtacgatgataaaaagatggatgagttaaagatttttttagagcctatgcaacagatgcattatccggtggtcgcttgaaaaacataaggtaccaaacagtggttttctttgaagcctagataattatttaaatgaaattttcagttttgttttggtatgatcgatgattatttatttttttaattcatttttattttccataatgcttggggtgtctaccaatatataccacatgaaatttcattacaatcatgtggtatattattttctttaaataatataccacatgtatattatttttatttttttatgtgcttaatttaattgcagaaatagcttgagagttgctaaagagaacaacactcgatatgttgtgtatcttgctacatcaaccaagatttttattacatgtcgtgtgatttatgtaataagaaacttatgttctacaacgacaatgaaaaaacagattgtgagaatccaaaatg

SEQ ID NO: 391389 - DNA, 894 bp, Cannabis indica
agaagtatgtaaacaaatcatttcaatacgaaaagattcgatatcaagtgttgtaccatatggaacacgggcaatgttagaaactataaaagcaaaggcgtaatacaaaagagaaagaaactcaccccgaatcaggcaacaaagtcgtgtaccataagtgatcaatcaaatcacccaagtgaataaatcattcgctcgccaaagtctttgccaacaacacattagtatctaagcaactgactatccaagtcaccccttttcctcaaaccaaaacttgctataaatcctacacaaatgacacataagagtgaaatcgcaattgttatagtctttcgattcctttatagctcacaatgaatataacaaaccttgtacttcatataagttcctctcgtcccaatcaacaagttattgatatctccataactagaccagtttcacgggtagtgagatgtggaagaaggcctttaatgctattttgaagaagcgaaagactcgtgttgtcgtttttgaggcttgagcatatgatattgacaatgggtttaaacaaaattcgggccagttgggatgaagaagaaaaagggaatggtggaagagtaaaattaatttaggaatttagggttttttttttaagatctgaaatcgggtcgggtcaggtcggacccgaaataatatatactgggccgggctaggagcccgataaaagcccaaataatttgggccaaagtcaccccgtcgggccaagggccggacctggcccacgaaaatggccctaatttccatcccgacttgtgaggaatatccctaggaggagattggtttctcgcattatttgaatttcttcaaataattatggttggtcctatcagctgcatgtggtgaacctgtaggcct

SEQ ID NO: 391390 - DNA, 2791 bp, Cannabis indica
aaatactaaaatgtgattttattgaccaaacgccgcgttctattgttgtcgggcacaaaacatgaaaaatatgaaatttcatatatagcataaataatacacccggaattcaaataaatctccatataatgataattcataattaatattctgatttcataattaagccttaattatctgctaatttcaaattaaagttaagcggtctttacaattatcccccgttaaaaggattttatccttgaaatctaacttgaataactctggatattgagccctcatgtctgactaactcccaggtgactttctccaccttactatttttccaaagcaccttgaccaaagttatggttttgtttcgaagaactctatcttttctgtctaagatctaaattggttgttctttgtacaataaatcttactaaagttcaagattcttgaaaagccctataaacctagggcataacttgccccttcgtctgaagtgtctaatccccttcatcggagacacccataggaacatatgatctcctacctgaaattctacatttctacgctttggatctgcataactcttttgcctactctgagaggcaagcattctggccttaatcttttctatggcttcattagtccattacactgtttccgaacctaagtatttcttttcttttgtttcatcctaatgaataggagatctacacttcttgccatacaacatttcgtagggaaccatttctatagtactctgataactgttgttgtaagaaaattctatcactggcatgtacttattccaagagccttcgaaatccatcacatagatttgatggcatctctgtgcaactctatgtatacctcactgacgccctgatgtgctaatctgatggctatagatttgcctaacatatatttgttagtatcttggtacaactctatgtacaccccactgataccctgatatgttattctgacggtaactaacatgtacgctaaacatgtatacatacatggaaccattatactaatcttacctcacttttaaatttaggtatgtcggccaacctgagtggaacagctgctcgatgatttacaggcccccaaatcacattattcgtaaaactggtgaataactcgctacatcactttcaggacttaaacctgaaactaaaagttttcctatcgatggataacaaggaaataccctaaatattgcaaaaatgggaaaaactagggttcccaaaaataccacaaccggtagaccagttccccaatcaaaattccaattctgtggggtttcttggggaccaaccagtcgaccagttcttacaggttcccttgaactggaattccagttcagtgcaggaagcacacgaaaccttctacacacctcaatttaaaaccaaaacttacaataacttccaaaatacctaattacatcataataaacataatacatgcaacaaaaccaaccaaaacatccagaatcacaatccaccattagagagcaagaactcaaaccttgctcaaacaccacaacaaccatcaaaaacaactaagaacagcttaaataacctcaatatatcatcagaacataaaatcaaactactcctaaaaccacagaatcctaaacctaaagtcatgcaagaaaactaactttgagctaaaaaaatgacaaagagtagagctagggatttaaccttgaattggatacactaacaacttgctaaaacactcagaatcaagctaaaaactccacaaacctttgctggtttcttcaaggttcgagagaaagggagtgagttgaagagagaggttaattgtgttaatctccaattttgaataaaagaataaacctaagtatatgtctactaataacactcaaaataatcagattttactaacgtactaatattccatttaagacaaaattaacttagggcaaaagactattttgcccccattattactaaaaagtctctaaacctcctaggtgtatttttgtcatttctaaaacctcgaatattcctgacattccctatatctaactaggtcgctccgctattactaaaacactaaaatgtgattttattggccaaataccgcgttccaatgttgtcgagcacaaaatatgaaaaacataaaatttcatatataacataaataatacaccatgaattcaaataaatctccatataatgataattcataattaatattctaatttcataactaagtcctaattatttgctaatttcaaattaaagttaagcggtctttagattttgattgttatcaaccattgaatatggatagatttttgtttttaaggagggatttttctgagttatatcagtagggctctcaatgaaagtaccaaactgttaatgcagatttttcgttaaccaaaattaaatagccttttagaaataaatattcaagagaaattaataaataataaaagattctctgattttggttaaaatctacatactctacgagcccttcttattagggatatttatttgtgtactgaatacactctctgattttgaataataaagagtctctctcaattttttgtcatcccctttttccatggattctgtccttatttataggagtataggttgacaattattcttttgggatagatttaaatataattgttcaaacgtggataatccccacgtttcatttaaattacatgtgagataatactaaataactatctaactgttatttacttttatcctttagatggttattgctgacgtagaaggttatatct

SEQ ID NO: 391391 - DNA, 861 bp, Cannabis indica
tagaaataacagtaagctaataccatgctttgtgtttgggtctttttggtagaaactgtttgttggagattattttattctatagatgatttcattgctaaaggtggtattccacaatgttctttttcttcttaagaggctactgagtgtagaatattatatatctagtaaggcgttggagaaaaaaaatgattaaataaatataagcctttaactcaataaatatccattggttgtagctgtttgaaacgagacattgcatacatcatgaatgaagtcaatgaactctatgatgtttaagaaattctatatgatgccttccctaagcatgttgataagattgaagaaaatgaaaaacctacttataaaactattttctcatagtttttgactcgcaacattctttgggaacatgttaaaaaaaaaaaaaatgtttcatcattcaaatggttctaaaataatggatctctggactgaggccaaaaaagttgggtactgttgtccaactttgttctagaaagtaagatggaagggtataatgagaaacaatggcttctatcacaaacacttcttatgcataataaactatgggctcgtttaatacgtcacattgtgttggattgtattgtattagtattatttaatacaatattaggttcggtattgacttgtattaatagattgtgtaaagttataatatattttcaatacacacgaccccaacaccaactacggatcgagtcttgggtccgggtttgggtttaggtccagcgtccgggtctggggtttgaggtttaggcctgcgttccgagtgtgggttcaggtttggactcgagttcgggtctggatccaggtcctggg

SEQ ID NO: 391392 - DNA, 877 bp, Cannabis indica
attagacttcttaaccaaagtttgacaaagtactataattagctacatttatttatttattttctggaaagaaactatacctagctagtttctatctaaaatttataatatttttcctaatttagtatacttaatttattgtataattcatgaacattaaagagaagaagggaataagtctttcttcttaaaaaaactaaaaagaataaaaatgggaatagtcatctaaaagacattcggaccttactgtattgtgaattatttaaaatttctcaaatttagaaaatattttaaataattataatatataattattgtataaataaagtattaatgctcaataaaaatacaatgaattatgggtgagtaggagagaaaatacataatttttagtgtttctccaatgtacccaaaaaagagtaacaatgcatctctactgttttggcatggagaaaaagatttagttagtttttttttcgttgtgtatgttatacttatttaagataggataaatagcggtataaatacctaaagttttgagtttgtaagcggcataaacccaataattttttttgtggcataagtacctaatgtttgtaaaactgtaatttttctctattttcgtcagtccaagctctgttttaaatttattaaaaaaagatttggaagtaactaatactacatatttttcatccagaccaaataataggggtgagcaacggtcggtttggtcggttttttacacaaaaaaatccgaaattcggtttttggttttcatggttataatccgaaaatcgaccgaccattatacaaatgtaaaaaaaccgactgttttaatccacagtttggtcggtttaaccgaccaaaccgaacttca

SEQ ID NO: 391393 - DNA, 2280 bp, Cannabis indica
tattggaggagaaaacattaaatctcaatgtctattaaagtaaaaatatgatcattaataattttattaaggtacattgtagttttttttaaaaaattatggctttagcttgtggaagattgtgagttattgggttgccgtgttggccagatttgtgatcagtattggtgatcgaatctgaataataaggtaaaaatataatctttaataattttgttataaattcttttagattcgaataattttttgattagtgaatgtgtttatgttaaactattagttttgttataaatgtatatatatttttcttaataaatctgttaaatattgtgattaaaagaggaaaatatagattgagaataagatatgagtgtattaaataaaagtttagaaagtttctaaaaaaatatattagtgagatatatattaataagttattttttttaactagatgtaaaaggtataatttcaatataagatgagaaaaaaattaactctttttagctattttttttatgtgcatataaaatttaattcaatttttttttcctttttatctatttttttatttttatttcatgagttattattttttttagtagctaataactagttactaagtggtttctagttagtaattactaactaattactaatttttattttattcaatttgcaaggattcaactcatttggtgttgatcagtttctagctagcttgaggtttacattcactaatttttaaatttttaatcgtagtaaagtaagttcaatgatatatatattgtactgtactcggatgtgtgaaataatatgcatgttagatgagtttgaatatcataaatattcatccgtaatgaagtaggttctgcaaataagtatactgcggtcggatgggtgataaatttattattgttaaatgttgttgtaattgttttatcttattttatcttatttttgattatttttttattgttagtagtaactttaaattttttgggaacgttcaattatagttgttatgttaccaaaattttggtagaaataggactagttacttgttagttatttagtatactataatgatttactagtattgagatttatgtcctaaaagcaagtaaccactactataaaatgcccaatttgtgttggtcaacgcatttcaccaaaatggttgatcgaggaaaaaaataggcaaagattttatgcttcagtggataactgaagctaaaaaaacaattagtgtcagctactacagtgacgctaaaagaggaatcgagaaaaaaaagcaaaaaaaattataattgtctttacattttgcttcggtgaaaacaagatgcaaatttatttggcttcagttgtaaatagagattaaaaattttaaactgttattcaccgaagtaaaaagatttaatttttgtttatatataatatacaatgggcttcgggccctattaaaaaaccataacttaaaagttagtaacttaacctaaatatcacacacaaccgcaccaacctctcgctctctctctcgaacccagtcacaccatggcaactttctctcttctttctttctcgacgaagcctagccatgccctagccctagcttaacgctagaggggagacaacatcgctagttgcatagcctaaggacgatagcaaagagaaaagtaaaaattatgttacgttatcgacgattgtaagtacgactatctctctttctttttgttctcacgttcttctcgtcagttgcttctctctcacgtcagtcgtacgttgtctctttttctctcatttttattttttttacaggtttaatctctttggtggtcccgtcctcctcagatttatatcaacttccccttatatataatttatagtaatttgtatatgtaaaatttatatacaataggatatgatttttgaaatgtatttgtatcattttttattattttaatatatctggatttgaaatagatgttttcagtttgtattattgcagttagagttgccgttaaaaaaattaatttcttgtataaacatggtggtggtggtggtggtgtggtggttgttcaatttttttttacttcaattcataatcgaattaaaaaactaattagcaaaaaaaatttggcgttgattctaaaatgaagccaaaaatatgactatttgtgtcttcagttattgcgttggtcactccaaccgacagtggcggacccagaatttaatttgagggtgggcgtaaattttttttatatataaaaatattccaaaaaa

SEQ ID NO: 391394 - DNA, 1463 bp, Cannabis indica
gctatggcccattccaccgtgcttgcagatgtgtcagtaccagctgtgaacatattctgcaatcattttgtaaaagtgtaattagatttctaatacctgctaactactaaattacacacaaaatgtgacataaacttgcatgataattcattttgaatcttaaatagagatagttggttgaaaagtgtctcaaattttgtgtggtcataatattaggactagcaataacaaaattatactaaacaaatacattccataaaaataattattttacatgattttgtaaagttgtatccatgagaggttttaaacgaaataaaagttaaaaccacaaaaattaacttctaaattgacagtataacgcacacccatttacctcgctgaaataaagtcatatatatgtataaataatgtgtatatatactttaagtgtgtccatttattaaatgtttatttaagagagagtatacgtaccaaaagaagtgctttgatttcagtatccgtaagcttttcactttcatcttcaccattttcatttgaggaaatcaaagtagtcaacaagtcatgagtttgttgtttattttgagcaattttggtcttatgttcctcaataatggcccccaagaaagtgtcaaatctcttatggagcttcttcatcttagcagccacaccttgcaagtcaagccactccaatgctggcacaaattctcctatattaaatattccagcaagtaccatcagttccatcaccatggccttaaattcatcagctcttgcatcgctcttcccgcttccatcaccgaaaactcgataccctagcatcactcgccctaaggcgttcactgtacacaaatttagcaatttccctaaatttactttgcttcttgattctactagtgctcttactaacattgctacttcttcctgcacacattattcacaattgctagaattagtacacgaaaattctaattaaaaaagaaactgcatgtatctttttgacagaatatcatatcctaattaataggataatattaggaaaaaatgtaataattttctcttttttttttcccttaaaaaaggcgtttatataaataaagtaaagttacaactcataaataaaaatgtcattgttttcaaacttcatacaaattgccttaaaaaagaaaacgttggtaaaattgcagctaaatactaatgtttgcattacaacatttttattgacaagtattttaaaattttgaaagcaaagtttaaaacttatttgaaacagagtgtagagagaaaaaaaaaatgtgggtgcttattaaataatagaagtatccgtttagttaaatacaatgttatcattgtattaaaataaaccttttttttttgacacaaaaaaaaaaatggtttatttttatacaatgatattttatttttaataagtacacttgtcacctcttttttttttttttttt

SEQ ID NO: 391395 - DNA, 575 bp, Cannabis indica
gtttcttattcttatttgtgcacgcatgtggcaaacatcaaatttgttgaccctactgtcggttgatcaattttcaaggtcaacagtttggccctttcattgagagtgcggataccgtgatctgatcaaatgccttggtgaacacaagaagaactcatgtcactccatctgcatcttcaggtctccctcagcacccacagattgtagatccacactcgggtcccagtcacaattaggatccccatgaatactgcatatgtggtgaatcccgtcaccataacaggcacaataagtctggccaccacagctggctagcctgatgcgagcatcccggtggatccaagtggtagacccacacctccagcagctgattcaccattggcacctcccattgaaggaaggacccacgggcaacaacctcctggaacaataatcggacctcaaatccgattctacgctggagaaacatgacttggagtggggagccaacaattggcgagcctcacctggacctaggagaagacctcaagttggctagacttagggaagctgtatgttggatatttattttacca

SEQ ID NO: 391396 - DNA, 578 bp, Cannabis indica
tatatatatatatattatgttaaacatttgattatacatttaattatcaatacaattggtttgtgaattgcgttgattttgcaatgacacaaatactaagtcatattttgttaactaagacataaaatcttttttgaggtagtggtaattaggtcttggtttgctaatttatttttaagtttctcaaggtctaaaaacatttcttaagaagctaaaagtagaaagcaagtctcagccaaacaaagccttaatcatgaaagttggatagaccacaaactaaatgttctaaatagcttaatatattattttatttatttgtaggaatataaatagcttaattagtaccacaagtaaatcaaattgaaattatattattttatttatttgtataggaatataaagggtaaatatcattttggaccctgtgttttgcaaaacttacagattggaccctgtgttttgttaaatgacaaaatagaccctgtattttctaaaatagtaaaaataggaccctgagtttaatttttgacaacttttttttaatacaaccaacttgaagacaatgcttaatacgaaca

SEQ ID NO: 391397 - DNA, 836 bp, Cannabis indica
aaaaaaaaaaaaaaagtacattcctgattcaaccaaaaaatacaattctaaaaatttctataaaatatatcaacaacagataataataataaagaaatatatataaaagaatctcggagctccatcattgagcactcgagatggtccggcgaagagagaggttgagaaggaccacgactttggctccatcgtcagccacggatttagctccggtgaagagagaagacgagaagggccatggcttcaacttcggcttcagatctcgataggcgaagagagagagataggcagacattcagttcgtggagaaaagccgcggggctcgagagatgcggttgttcagcccatcggggctggaggaggatgcggtggagaacgcagtagtggtggagggcttcagagctggtaaagagagaagaaaaagagagaagagaaagagagatatggctgtcaaaatatggtgcggcttgtcgtagaagagatgtaatatatgttagggttttcaatttctcttaaatgggtagtgaaaactaattatttaataaataataaaataagttttattttttggctgaaaagaataataaaataagttacaattaaggaaattaaaaatgtacctgtattggtccttgaaatgtggacatgtacgagtgaagagtgaagaaagttggttatttttttttttttaaatgtgattatgagtatatttcaaaaaaaaaaaatgtagattataagtatagggtgattctacaatgcacccccttcaaagggatgtattgatgcacccttaacttgtttcgacatctagaagaatttttttagtctaatttttt

SEQ ID NO: 391398 - DNA, 987 bp, Cannabis indica
gtgatgatggcttcatcatgcttgtttttgatattgatgatgatctcatatccaccaattattattattattattattattattattattaattatattattattattaatcttaccaccttgtgataatgatgatgaagcttgaatattattggtatgaggctttgggcatgagtttgtgattatttcttctattggcttcaccacaatttcctatattaatttcatcacaacaaaaagtaaaattttattaattaacaaattattaagaattgaataattagggcaaacaaaaacaacacaaaacaaaagatatttagttgtttttttccttaataataacagaaaagacaatggaaaagagaaaagaaaagaaaagaaattgaaaaaggagatttactctttgttttttaaacactacataagcaaaagataaagattaaagttttttttttttttgtaaaaactgataaaaactaaatccaaattcaaggtggggacttaatttcttccactatacatacatatatgaacataataatctcttttctcagaagaaaaaaaatataaaaacacacccttttctttaaatatattatgttaaaaatcccataaaaaagatcatatttttaactgaaaaatattataaaaaactaaactttataattgtaatacacataattgatctatatatatatatacctgtggccagtgagctgtatccatgaatgaaactgaagaagaagaagaagaagaacaacaagaagagagattgttatctttaaagattgagagaaaaaaaaaagttcactttttttagagagagaaacagaagtgttgtaaaagaatgtttctaagagagagagagagagaatttgctttggagtttctatgtgttagtatgacccttgctttatgtgttgtgagtatgagagagagagagagagagagagagagagagagagagagagagacgtacgtacttac

SEQ ID NO: 391399 - DNA, 887 bp, Cannabis indica
tagaaaatcaaatttcccaatccaatttcctctcttcttttagagaaaagagaaagctcaaatagtttgttgggttgggttttatttgagcctaaacaagcatggaaggttgttattttaagcccaaaatagtttcttgggcttttattttagtgaaaagagaacgcctaaatagtttgttgggttgggttttatccaaacatgcaagaaaggttgtccattaaaattaaaatgaacaaatcaaatctttttcttaaaaaaaggtaaacaaatcaaagtaccaatagtgttcaatttatcatttcatactcatttttttctactcttttttttttttaatgagtcatatattagaatcacttattaacttcacttttctccaaaaaataaataataaaagatgaaaagaaagaaagttggagctgatatataagaattgattagtttggaccacaatgaccttgtctatttttattggtctacttaattggagagagacctatttaaacagatacaacatgatcaaactaagttgaaggtttcccctttcaaaagaaaaaaaactaagttgaagggtttaatatttactttgaacgacaatgggaaaaagaaatatttatttatgaagtgtcacattaattaatagaaatttttacattaaaaatacaaaatattaattttattaccaaaaaaccactacacggttacccaaacatttataccattttcttttaattttttacatttgtaccacatgcacacacaataaatgctttcttgattgacacatgagattgatgtaccacatcaatctttttatatatcatttctctctttttttttctctttttttttctttttatttttcatttcttttcagttttttt

SEQ ID NO: 391400 - DNA, 1926 bp, Cannabis indica
tataggatacagtgaatgtcatcccagtcaattgcttcaaactcaacaaagtcaattttagttctcgtagtgtcattattactcttgcactaccatgatggttttttttttccaataaaattgatagtatagtcaaataatgttcaaaatagtaatttcttacaagtgattatctaaaatctatttttaccaaatagttaatgtgaaattttaagttgaggttggaaatacatattcatctatcatttaacatttttgacatacaattatgaattatgataaaaagttgaggagagcatatgtactccccgagcatgatctggctcctgtcaatgaatatgaaatatgatatggatctgtaactcaagtaggacctcctttctttctcaatgtagtgcccaaatcctgatttcaacaatccagaacatagatggagaatggtacagaggtcattggtagaagctatagtggaactccttgtaccaaatgggaaggtaatattacttttggaatccacattggaaaaaaaaaaaattattcatgtgacacctaaagaaactcaattttaggacctcattttccatggtttttagtgttgaaatttcacaatcgaatccatgttaaatatatggtattgatttgttctttatgtttctcatttctttcacctttatttggggataaatttttgtattttccaggtctttttgcaatctgacatagaagctgtttcactgagaatgaaagaagagtttctgaaatatggcaaaggtagactagttgtgcatgaaggaggcaatgccataacaagtgaagggtggctcaaggagaatccatttggaattcggtcagattgggaacgacatgtcttagatcgcggtgatcctatgtacagattaatgctatctaaattaaccaatgttgaaatgtgaagctattctgagggtatgatgtgtgaaaccatcatcaccatatgtgtagtgattgtctgattgatcatcttgaatagttcatttgtatggctaggtggttagccagttttgaatcaccaccctttgttttgagacactcttttttctgagctatatagtaaaaaacataatttccaactgggtttctcaatttacatatagtttcagcaacaatgtagggacagtgcttagcaaatagctatgctaagaggaattttaagagaatgctcaactaagccttttgacttctgcaattcaatatacatacaggtgtgataatacaactgatttctagaaatataacaattaactaaagccagctaatatacaaccaagacacagctggaaccaaactaattctgttagactaaactaactcaagaaactaattgggctctatttcctctatcctaacactccctttaaattggaaggagcatcatctacattcagcttgaattgaagatagaggaattgagcttcgcttaacggtttggtgattgtatcaacaacctattatcgagttggtacatattgaacttcaaggagctaaccagaaatcttctctcgaataaaatgaacatcgagtttgatatgcttagtacgtgcgtggaacgcaggattagaggccaaagctcaagcacttaagttgtcacaccataagatcagagattgagaactgccaaaggaaatttgtaattcctgaaacgaaaattgcaactacaaaatctcagtggcagcttgaacaagtgcatgatattccaattctgtgctagaacgagcaacaacatgttgctttttggcactccaagcaatgagattaccacctagaaggatgcagttacctgtagtagaacgacgatcatccaaacaacttgcccaatcaacatctacataaccttgaagaccaaactgttagaatatattttactaggacttagatttactaacaagt

SEQ ID NO: 391401 - DNA, 1407 bp, Cannabis indica
ttgagtctcattatccagcattaccttgtaaaaaactttgtatcctcttcactcaacaaaattacatagcttgggtcctcttgtaagaatgactcctctgaattcccataacacctgctccaaccataagcaatgtgttcaataacaatttgaaatacgatgaacagttcagtttgaagcatcaaataatcagtagtttattgtatactagattaccttagttctctccttctgttaggtgaataccatttttttcaatctcactttcccttgtctactaataagaagtgaatctggaatacaagcaagaatataaaatattacagccaatgaaatgaaaaccttttgtgcatgtcaatttatctgttaagtcatatcaaattactgaataaaaaaaagcaacagctacaaaacagaacccatcattaagtaatttccatataaattcaaaccaaatcagacattttcaacgtcccactatctcaatcacacatatatgtcactgtgggaatttagcaattatacaattgaatctaaaaggctttgaattgtagaatttaacatttaaacctagaaaaaagatgatcaaactctttatgctctcgttccaactccaacctaaaaacattaactccagaaattcataaatgtattcactatattcggtatcccctccctattaaaaaaattctcaacatcaaaagagaaattaattacaaagtatcaatacctgaactgtatgagactgaatactgagaactcgacccatctccgaagtgagagctgatgaaagaatcggatccccaattccacctaaaatttaaaatgacatattttctacatcatagtatgaatttacatacaaataagtaaatcattctaacataatttcaaatcaagcctagattttagacccaataaatacaacatggagggtggtgatcatatcagaaagttctaaacaaaaaatttattgggtatgatttgatgagacagaatggggataaataaaatttaatactaacgaaagtaaatgttgctttttaaatttttttaaggtaaatggcctttttaaattttactacctaaaatatctttcagagtatattattatttttacatgacatttctactcaaaaactcaattatcataaaccaaaccaaagcctctagtgtacatgaaggatttttattttttttttctttttttcaactttcctccaaatcactgtgattgtttccaaaaagtcattaaaacttccattctcatcaatttttttttaattaatttaccaaatttcttcaactagttcctcctaatttcttccaaataaggcaacaatagtcatttcttccaaaccaaattaatgtgcaccaaacaaaagcaacataactggtttcttcaaa

SEQ ID NO: 391402 - DNA, 1111 bp, Cannabis indica
tcacaacaaaaattataactaaagtaaaaaatattgtaaccaaaagttttaattagaatattttttttgtgattaaaagatgcttgactaatacttgttatgatgttattacaattagtcacaacaatcctttagcaacaacttatttatttatttttttgtttgtcactaatatatatttagcgacaacaatatttcttcagtcagaacaaaaatttataactaatttttcttcagttacaacaaaaatttattactaatgcttctctagtcgcaacaaaaatttattatagctactcattatcaatacaaaaaaatagctcgtggaattattactcttatatatatgcttttatataaatgtaaagatccaaatcagttacaatatttttttgtttacaaaatcaagtctttaaagttaaaagttgcaatataaaaaaacattacattgacatatcaattcttgatgagaatacatttgtgcttgaaaggtagagaatcatatgattatatgtgaatgaattgtcaactattccttcgttttttcataatttggaactccaagcatataacaatcacccacttgtcttctctaatcaggagtacaattgatgtcctctgagaatagattataggaattcattttttctcgccaaaatcatatcttggaattaaatagaaagaagaacaagggaatcaccaaatcgaaagccaattatctttagagtcaattaattactcttttatcttttttacctgacaagctaacttggtgcctttcaaacttgtaagtaggagagaattttatgagtgcctcacgcatcccttggaaaaatttattagctttcatctctgccctcagttgatccttttctttgagccaatcaaagcatcaaacaaaatcaaaaagtctttctaagcttgtagtgttagggttaagtaaaggtagttgaaatgatcatttaggctttaattcctataccataagcttctccaatcatgttacccaaaagaaatttttcacacagtcccaattcccattttctaattacatgagagaattttttttcttttttttttttcaacaagattgcaacaactttatatttat

SEQ ID NO: 391403 - DNA, 2077 bp, Cannabis indica
attatgaattttaccatttacacctaaaacaaataaaaaacaattgtaattttgcacaaaatgaatataatcaattgaaacatacttctaagatactttataaaattcacctaaaactagcctatcattaggatgctcttaatataataccattaattgtttaatttctcttctactttatcattctattttaattattaaatttattactactaataaaaataagaaaaaatattacgaaaagcttatattttaaaagtaaaaaaataatattcaatattatgttatactagagattcattaaaaaatatatattttcatagtttaaattttttaagtttttaactcaatagacataaaaatttagaatggttcttggaaatgccccaggttgaaaatatgttaacctgggcgttgggtgcacactagggttgacttgggtgctagatgcctaggtgcctcaaacgcgaaatgtttcaattttgattcagatgcctcagcatgcttataacagatcttattcatgtctaagtacaaagtttaagccatttgtactaagaaagatccaaaaattgaaaccctagcctgtgatgtcaaccaggcctcgggtaaaatcgtaggctcccaggttgacttctaggaggttgctttgacactttttagttcataggctttagacttggattcttcttgaatttttggttcgtaatactaaaggatggtgagttagaaataactttggaggatccaaaaacccattcagaaggttacaaagtcaacttgggcacaatgctaggaaccatttcgcagagttgttgtctatcacttagggcaatttaatttgcgagtgttcttcttcttgccatcactattagaaaaatggatttcagtgacccatgttgagtgactctaatacaataatatataaattacttttttttcggaattaaaattactaatacaataatctgaattacatgttcaaatgaatcaacaaacacaatataaaaaaattaaactgaaatgtatattacacaaacataatactcaggacaatttgaaacacataaaaaatgtatacaaaacctaaaaataaatagaacacattttgaaaaataaaacctaaaaaaaaaaaatcagattcttgtactacgaacttcaagcccgtcaaaccacgaacttcacgccccaaaaataaaacctaaacaaaaaaaatcatattcttgaagcgatagagatcctctggtcctggagcatgtttaagtttggtgccagtaatcgggtgtaccggtcaaaatacagcaactgcttcaagagaagtgcaaattcccttggaaattttaatccatatgattcactcacccgcacctatcgatcaagtaaacaagtcgtttagcttacgataaaatgagcacatcaattacttcaaataataagaatattaattctaccattttcaaattgtttcttgataaaaccccttagtggccaaattttagcaccaatcccgtctaacccaaagccagtcgaacaatacccagctcgtcaaacccagaacatcaatatcaaacaccaatcgccacccatcttctaatctgactccttacattaataatatcaatctgaaatccaacaataaaaacccagaaattaaaaaaatatatatatatatatgataaagaaatggagatatgtagaaagaggattaaagaaatggatggtgaagaagcttatcttgtttccatgctagagaagctcattccaaactctttggtcgacggagcaaacatcggagacaagagagagaacggaggagtcgggattttgggacttagaggttttgagattttctttgtctggcgatgaacccattcgaaggttgagagggtagctgtgatggtaatgtgcacattgtgcagaacgcgtacagtagagagaaaaggggaggagagagagaggcggcagagagatagatagggaagaaattacggttttctttatcacatttatatatttagttaatcatatttttttttattttttttatttttttgctgagataacttttttatttaaa

SEQ ID NO: 391404 - DNA, 1286 bp, Cannabis indica
aaaaaaaaaaaaaactatgtgaatacttactaatttatataaattaagtagatattaaatatattattttattttaatggagaataattttattacttatttagataaaaaaaaaataatgcaaaatgaatgagatgcatgattattgtcgactttcaataacagaatatgtgggggttaattgttgtaaaaatcatatttttatgtacgtacgtacctacatcaaacaaaaattacaaatacatttaaaaattttatttaatttgacaatgacttaattaatatgaaatataatattgtgatgaggcctttttttttaattatctaaacaattaaaatcaaatcaaatttttgaagtatatatatataatttatttttgcttatatagcccaatacgtgagttcgtccctaattatacatgttacttagaaggatggaataatgatgatatacatatataatgaatgtaaataatagaatgagatgaacacaggtaataatgtttggaagaaataaatgtatttgctgtagcacaaattcttatttagttcactttgttctacttaaatttatttaaattttttttttggagaaaattcttatagttcattttgttgcacttaaatcattatataattttagaggcaaactttttttatataattcatatttgacagcaaaaatatctaccattacacatttaatacaatattagtccttgaattggtaacaataagagattaatattgtaacaaaatgactacgtatagattttttttttttgagtgaaactacgtatagaaatttaagtataacaaaatgaattacataagaatttttgctaccaaaaaatttatatacgtatttataagtgcaacaaaatgaattacatagaaatttttgtagcaaatttttaaataaataaattgaaggaactaattttgacaaataataatttccaaatattataaaagacacttaaacattgaacaattatattttgaaattattcataggttgcaaataaaagctggaatatttaattatatattttactaaaattcattactcctacaataaatcaccaataaattatttatttttttatacattatataattaaaaaagtatttatttatttaatatttttattcaaatacaaaaataatattaatcattaaattagaagtgtcataaataaatcaatacgggctcgtttggaacgcgtattaagtcgtattgtattgtattatattgaattgtattttatgcaatatttttatgt

SEQ ID NO: 391405 - DNA, 1760 bp, Cannabis indica
ttttagttgccgcttgggacgtttggagtgagtgcacacagattgttcatggtcgagagctattttcgcccacggttgttgtctcacgaattcataagcttcatgaggaatttagtaaaagtcgaaaaaatattaacattcagcaagggaataagtgcacttctacctctagttgggttactcctcctatgggataatttaaagtcaatgttgatgcatcaattgataagcatactaatactataggtattggtgctataattcgcaacaacacagacggagtggtggcttgtctttcaaaatctttattcggtcagtactcctttcttttggaattaattttgctgctaaacttttatatgtaatcttattactattttatcactttcattgaatgagtaattttaggttcaatatgtttaagtattaatatttttagtagttgctgaggtaaaagctcaaaagattattttgaacagagatcatttcctcagcctttgggctgagtaaataatagtattactaggattctttcaaccttaatctatcactctgtaaaattttattgtcagtaataatatgatagttttggtattaatagtttattttattattattaatttattttaaaagaataattttttagtataatgcccttattagatgtttttttatggtttttgtagggacttttgcagtcatggaagcagaagctgtaactttaatggtggctttagattggactcttactatcgggctacctattagtttgtttgaatctgattgcttagcgttgatttcagcttttttttaaaagatcttctttctgtaatgaacttggctctattttagatgatattgctagtttactatctaattttcctgagacatctctaattcatgttcgtcgctcggctaatatggctgcacatgagttagcagttcatacactcagagtgaatgacaaattagtttggatggatgattttcttctatttctctttgatgtactaaactctaattatattcaatgaaaagtcattgtcaaaaaaaaaaatgtcttttaataaaaatacgaggggtgaaagaggcatctaactaaagctcctaatagcttgaaatactccaaacattatatttcaatgtcacattaactaacaaaaatggacctctaaataattaataagaaaactcattattgtaaggcattcctttgccaagtctattttcttttatataattttgtggtccttttggctctacctctactctatctctatatgtatatgcaatatgtaatgtattcccaaattaattgatctatctatttctttaatgatttggcatgcaaagtgctatggaccctatatattgtgtgcatttttacactttttagataaataaaataaatataaataaaaattatttaaatgtgtggctcatttcatatttcatgtcacgattacaccataaattatttgagacaatatatgtcacttccaaacagcaaaactactatataaatatataattacaaaatttatgattctttttttactttttaattaggtaacctatttttttttttttaaatcatatcattaccatgataatctcgtgattgaaaagttaaactgtctgattttttttaatggatagtccagtttttttttttaaataaatttacattaaattaagataaaattacagtcactatgaaattttaaaagttatttacttaaatatggtacttttaagtt

SEQ ID NO: 391406 - DNA, 1042 bp, Cannabis indica
aaaaaacataccatcataggcaatcgaaccccaccttaagacaacaaacaccgaaaccaacattaataaaaaaaattgatctcaatgaagaactagaaaatagtattggcttcagataattacaaaaagataaaataaatataacaaattcacaatatcaaatcaattcaagtattgtatagttggatggaggagggtagttttgtaacttgtctttcttcttctttattttcaaagtcaccatcagcagcatcaatgcatcatcaattcacatggttgacagtcccaaaacaagtttagagataaaagttgataaacatcagataaaagacactacaagaaatcacaatataattttttttttttaactaaatgtgacttttatttacaataaaaaattatacgtatgactaaaacataatatttagatacaattgtcactaatttagttttagtcacaacaagtattgtgagtaaaaacaaattatgatttttgtaactaatatttttaaccacgaactttttaatcacaacataagaattattatttataattagtcgcaactttttttacttttagtcacaaattttgttgtgactaaaaatgagatgttttatagtgagatgtttttatatcgatctagtaatctaaatatctatccaaggagcaatgtcctatgtactactcaagaagagataaaatccatgagaagaatcctcgatttcccgagacgtcaaatagtccacttaaaatcatttatgataaagacaataaatttatttattgaatatgctattttggattttttccctctgaactatgacttatgcataattgtgcccctgaatttttcagcttgttaaaaatggtccataagctattcataatgttgtaaagtggtccttttgtctgattttattacatgtggcaaacagaataatgatgtgaccgtttagactactaatgtcatgtcagcactatggaattaatttgaaaaaaataatttatgttttcttaatttacttttacttattttttttt

SEQ ID NO: 391407 - DNA, 931 bp, Cannabis indica
aaaaataattagaaaatagtcaatcatcatggattattatattatttcacttattaagtataaatattaatagctacctaaaatatgaaatttttaaataaaaaaaaaaacataaattaaattttatatttcaatgattataacgaccgcgctaggcacatgatatttaaaacaatcgcgcgactgcacaaccaatttcatatggtacttatcattttaattattgcaaaacagtaagacaaataaatatttaattatagaaataattagtcatatgaatcatgaccttcttttacatcattataatttaaggtataaatttcactttcacaaaatttattaaaatcacctctaatctaaacatttcatgtagaaaattttgtccctaacattttttatataattcctcaatttttagtttttgaaaacaggtaatgttgtgacgactccttttgtagctgttatactacattcatctttgtggagaagacattttaacaacactaacaaaaaaaaaaaatataaaaactttaataaatagtagttaaattatttatttttattaaacaaaaaaagtctaaatagacttttaaaataactacattattagtcacaacatcagttaattaaacgcagaaatggttaactttttcattttttttattataaaaacacatgtaattttttaatgaaataattacataaggcaccattttttgtaaaatatttacatttttacgttcaaaaaatatttgtttttacatttttacggttttctaaaaaataacacgaaaacaacataaaatcaacaagaaaacaacataaaagtaacatgaaaataacatcaaaagaacaataaaaaaaacaacaaaaaataacatacatataacaaaaaattaacaacaaataaacaaaatttcaacataaaaag

SEQ ID NO: 391408 - DNA, 802 bp, Cannabis indica
ttttacttttgagtactgaaaaagtgctggtaagtacatatatatatgtaatatttcaaaaaaaagtacatatatgtaaataatatattattaagaggtattttggcaaaaatatagccttttcttgttatatatattttgcatattatataatattgaaaaatttatggtgtagttatatttgttatctgttcggtattctttattatgtagatatcttgtttgtgtacataaattgtttatataatttaatatattggataaatttcacatattttaaattagtaattaatattaaattcattcataaaaacattattaattaatggttaggattgttatacaatagttataattaatatatatttaaattgcgtacacacttatgacacaatgatgtgtaatgtaattattatgttgttattatttgacaatatataatatagttataagtttatatttgatgtggttgtgatgattagaaactggaaagcaaagaaagatgaaatgtttcccagaatcaaaaaaaggtgggaaaaaggacaaggtgatgaactatgaagcaaaggttgatattccaaaggattttggtgatgttggtgctgttattattgaaaatgatttcgaaagagagatttacatgaaaactatttcactccattaccactcttccgaccataagcttgttaatttctcctgcgaatcatgggttcaatccaagcgcgatgtcccccgcgatcaacaattgaggctctttttctccgacaaggtactaattattgaaaaaaattatgagcacgtt

SEQ ID NO: 391409 - DNA, 944 bp, Cannabis indica
tatatatatatatgttaatttttactgttataattgactccaattttaaccaattattattaaagtactttttaaaaaaataaaaataaaacacaattaaatttatggaaggatataacaattggccaagactgtgcatgccctataattgtacagtatatatattatcatatgattaattaagggaggctagctagagtaatgttaattaatgcaaaaaccaaaaagataaaatgtagatcaagttctatatatgtttggaccgagtatggaagacagggtttacatctaatgctacatatcactttgattatcaatccaaatcactggacagttaactaaaaggtgcatataattcattaagtaataagatacctgtcatttgacttcagcagttgcatttgctaaaactctaaattcgctttatgtgcttgacctatagcaacaacgtgttgctttcttatagaccaagacataatgtttcctcccaagaatagaacatagccacttgtaaattgtctgtcatctatacaacttgcccaatcagcatccgaataggtggacaaagtgagagatgaagtaggttttagatgtaagccttctaatatagtgcccttaacatacttgagtagcctttgcaagcttctaagtgaatggttattggatccttaatgagctgactgagcttgttgataaaagttatatctgatcttataagagtgagatattgcaaggctcctaatgtgcttttatacagtgtctaatcaggaaaaggctctccctctgtaagagacagttttgttgctgcactaacagacttaatttgcacattccatgtgcaacttcattagaagatatgttatgtacttggtttgagacaagtacatgtcagtgttaggttttatgccctaaataaaactccatttcaatgtaatctattttat

SEQ ID NO: 391410 - DNA, 1141 bp, Cannabis indica
acattatgggcgataaaattacaattcctactaattttaaaaaaatacaactaacaaaataaggagaggatctaaaacaaaatgagacgtagttctcaatctcccatcgggaaacctccctattgagagcgttaataactaccctcaaatcactctcaacaataataaactttaaaccttgatgcttcgcaacatccagagcaagataacaagccaccgcttctccacataaagcatcaacaaactccaacttagaagtatggatccagatcaccctacccagatgatcccttgcaatgaccgcagtacacatgttgtccaattccactttaacattacaatttagctttaacaagtcctgagggggagggcaccaggcatccaacatacgcggaggcacgcaagggaacaaagaagcatggtgaactacaaaagaagaacgaataatgtcaatacatttaataacatcaaccagcccattattatgtaccttttcatttcggatccgccagatagtgtccacggttaacgaggcataaaggaaaatctcatcttcattaatttaatactcttatttttaaggtcccaaataaattagacccagcccataaacgaataccagtaccccaaattggataaataccccaagaagaggaccgctacaagtgaaaagccacattataggaaagaaaaagatgttcaatagattcattctctatcccacaaaggggacaagtaacatcctcaataagaaaccttttacagatctcagctcgcatacggattgccttggacaggagacaccaccaaagggtgttcatcctttctgggattttacaattctacagcttattccaaagcgaaggagcaacgtcacagggaggagccctttcaacagcttggcccaggtaggtcgacttgcacgtcaatttaccattattttctaaagtccaaatccatctatcaccgtccaggtcaaacgagatgaccttagtagataggtattaatcctattggaataaaaaattgtcccaccttcccaagaaaaaaaagggaaaaaatagaaaaaggaaaaaaaaattacaaaaatactatgggccggcccattaaatatttatacagtccacatacaaatatttac

SEQ ID NO: 391411 - DNA, 3101 bp, Cannabis indica
ctttatcggtagctttattgaatatcagtgtgagttcttatattaaatattaatttcagtatttcttttggtttacaaatatatgttttcttagaaagtagttattattttggtggagataaaagatttttataacattggaactcttgcaggagattcatcagtcaacgttgaagacaccgaggaagatcgacgtgcaagctttgtagattcactattgaatgctgatggttctaggtcaattgttaccactgatagttcaattaatattcctcaagagaaatctcaacaatcccctactgaagaaagtgaaagttcagctgcaaccgttgttgattcagctgttgaaagtatgctccttcatttcttttttgggtgctttgtaaacaaaaattgtatctgactttcaattttataagtacttgctgctaattgattattactccttacttttgtatgcaaatatatttttttcctttgttattttatgcttctttcttcacaggacaaggcaaggataacttttaggtgtaagattgtgtatgtggtcttcatttaattataaatatatatatatatatatatgtatatatatttgtgtatccaaatgcagaagaggtatcttaatacaaagcaaaactaaaattacataatacataaaatagggcccaatccctgactagataagagcataaaacacctttattctctttgacattatattactatatatctacccaatgtcgtatttacagggaaaaaagcttgacggtgggctgatgaataattttacatggaaactttagatttgtatttgaagtgaaaaaagaagaagaagcaaagagagtgttttatatgctgcttctgtgttctttctcccaacttctcattgacattgttatattacaggagtgaatcatcagaaagaagtggaaagcgcttatttgagaaaagagcaggagaataaaatgaagctgcgcaagtacagggttggtatttttgttctttgctgacatagagatatgtgttccagataaattgttatgcatttactgatgtacatgtttccctgtttcaggacatgttaaaaactagagcttcacttcctattgctcagctaaaaggtgatatattgcagctactgaaagataacaatgttcttgttgtttgtggggaaactggctctgggaagacaactcaggtatatgtttgttttctaaatgattctaaacaattaatggtgattctgagtaatcctttactggcagtcccttgattctaaagtgcacttacatgctcttctttcatttaaacattgtcacttatatgttatgtaggttccacaatttatcttggacgacatgattaactctgaacgcggtgggcattgtaatatcatttgcacacaacccagaagaatagcggtgggtacatataaaatctttacttatatatgtaagatacatctatgggcagtaaatccttgcaagctaaacttttccctgaatttggagcaattttttttctctctatacctatccttgataaatattctcttcatgatccaaattgtttaaatcttttacttaataggaaacttagtctaagtttgtctgtattgtacctattggttgaaaggtgcaaatttgggcattgacagaaacaaagtatgttttctgctttatgctcacataaggcttccttgttcgatacatttctttttgagtgtagataatgtgattgtatgaagtcactaatactaactaataaccacaatggagcaagttaatacattcttgtggccatctgcggcaaaattaagatactattttctttctgtttaattaaatttatatatacatttaaaatgttattaatatataatattaaaatgggtgctttctgaacgacacttttgtgttttgctgttattatattataggctatttctgtagctgaaagagtagccgatgagcgttgtgaatcttcacctggatcaaatgattccttggttggttatcaagttcgtcttgatagtgcaaggtgcttaaattactttttccccttaatggttatgaagtccaaacacatgaggaaatttcataaaatcgcttcataaattccttattatcgtcttgtaacagtttcggagagagtttgccattaacatttgcacttataatttatttgttaaatcacacaggaatgaaaaaacaaagcttttattttgtacaacgggtatccttttgaggaaaattgcggtgagccctttatcttctatacttgtaattgatattaaagttgccttacccccgttctccacacagaaaactatctaaaattactaatttgttcaattttcagggagacaaaaacttaactgggattacgcatgtcatagttgatgaagtgcatgaacgctctcttttggtgagttggtttattttaaatggttttgctagaaacattgaatgttgtgactacacttgatttgcacactattcaaagttaaagtcaaccaaactcatgaactatttctcttaaaagaagcatctttgcagtttcagcttaggcatttgctgcataactactacaaactaatattcatataaattgatgcctctcgatacttgttacgattgggttgttaataggacaacctaaatccttaggcaatttatctgattgtgaagataaacttactggtgtttttttttttggggtttaacagggtgactttctacttattgttctgaagaatctgattcagaagcaatcggctcagaaatctccaaaactgaaagttattcttatgtaagccttacaatctaaattttcttctaagcttgttaattttgtagtttatttatttattgtgttctctttgttcaggtctgcaactgttgattcagatttattttcaagatactttgatcactgccctgtgattactgcacaaggcagaacacatcccgtgacaacttactttctggaggatatatatgaaagtattaattatcggttggcttcagattctccagcatctgtaagatatggagcatctggaaaaagagaaggtatttcatcttttggatccttga

SEQ ID NO: 391412 - DNA, 1137 bp, Cannabis indica
ttttttttttttattagttttgttttatgtacgtgcatagattctttattagtgaattaagaccatatatgcatctatatattagatgatgcatgctaatcaactattgatggattgtaagaagaggtgtttaaaactaattactatgcactcactcaaacatgaggaacttaattgttgtctacatatatttttagtaagtggcctggcatcacccacgtacttttgctttctggtcaaatacagattaaatatataataatattcatgaatcctttgttattttgctattactattactattaatatacacagagtaatatggtcattcattcccttaatggaagtaaatattacaccaatatgacaagaatacaagccaatgaagtagagtggtaattccatgcaaaagaaaagttcatttcagttaatatctccatcaaatcaattaattgtctatattaatttgtttttatcacataactttttcatagaaaaactgtttatattatgtcactacaaaaaaccactacttttagtgataatcttttagtcacaatataatttttgtgtgattaaatgtgactattagtcataacaaaaagttacttgtgactaaagtatagtatttagttacaagttatcactaattgaaatttagtctcaacaaattgtaatttttgtgaaaatatattaatataaatataaagataaaggagtttctcatgccaacttgctcaactggagcaatttgagcaatactagtggtagactagtagtacacttctatgcataaagcaactcactcaactcgggggcaacaatccctatataagtcaaatatcatatatatatataacacacttttcattatattacttttaaaacaaataaaaaaaaaaaaacaaaaaccggtttctaaatacattataaattttaacaaacagttttcaaaatgatattacctgttaaaaataaacaaatatacatgtaacgccctaagatttaggcacgctacccaatatgattaagaaaccctaatcccctaaacgggattggttttaaaataagcgcggaaattaaaactttaaacgaaaacggaatgaaaataaacttgtaataattttaaccttacaa

SEQ ID NO: 391413 - DNA, 1445 bp, Cannabis indica
ccctgtggaaggcaggctggccgcccacggcctactcctgtgagagagctagtttatcacttgatgcctatttgagtgtcggggtctccgttttcttaggtactaaattggcattcttattgattagttgtactgccacgtcgcactgattttatccatgtaagcatgccatgtcaagaggacaagaatccagataacaaagtttttggaaaattgtcttctaacacaaaatttataggaaaatggggagattgaattcattgatataaaataaaaaaaaatgatgaatataattaatgttaggaagagaagggataattaacgtaaaatgtaagagtattgagaaaaataaatatttgtttagatggaaaagtattgaaaaaagtaagataaaaataatttaggaatgtttatttaggtgagaaagattgggagaagtaaaggagtttttatgtgcaaagtgttggagaaaaatatgtattttttgtatttgtgagtgtaatttttgaatagaatttaacaaaataatacctctattttcttcctcttaatttttcttcttaccaggggacacatggttcaggttggttgcatagggggctaacgggcgatggcatgatctggttcgttggtggaagaagctgatgtcgatggttgggaccacaaggagacaagtagcgagctgggtgcttccttcggggatcccacgcagtgttggcatgcagtagaaagggcagtgcaacctgcttttgtcaaggtgtgctacacgcacacatgggagccgcacgtcagatgacagactacccagatggatgccttccattgtgcataagtgggccttgttttgcgccgatctgattttcttctgaaatttacatttttggctactttcttcaatatttctctacataatcctaattttctccaccaaatacacctaaaaattcataaaagtaaaataaaattaaaaataaataacacacaacatattataacaaaataattatagaaacacacaaaaattataaaattacaataaaactaataacttcaaaaataattaaaaactcactaaatcaattaaaaactcaagaactaaactaatttagcttaataaaaatgttataaaataactctactcaataatgacaagagatcaagtttgagattgttctaaatatatgcttaatgaaggcaacctaaggcttactcaagtatatacattcttatcatgatatcttttacaagtttattggattggtacttgagttgtcatgcttaaggtaccaatgatgtgttagccatcaacaaactaacattttgacatataatatttggtttagtgatatggattggacaggctgcatgaatgataacgtttatttttaatcatttatatcaagattctaagaggaactattttgtaattaagtgtcatatgaaca

SEQ ID NO: 391414 - DNA, 724 bp, Cannabis indica
tcttcttcatcaaatggagctaaactagctagccatggtagttggataatttcaggctcttcttatacaagaatcaaatctaagatcaataatttggttgtttcattgagaggattgtcaatttatctaatctaacaccatggttaacactaagagaactttggatacaacttcaacctcatcgggtcttcgtcaagaccttatgagtgttgatcttgatgttcgtgttcgagccacaacttgaatctccacaaattagacatatgtggccaaccctgccaacccaacagacaccacaaacttggccaccataactggtcaggttgacactactaatctggtcgatctcaatggccaacctttaccgcccagggaagacctttcactgacaccttgtactgaaggaatggccaacatggagcaaccttcgagcaccataaatggatctggtcctcgatattatgctggagagacgggaccaagaattggcaagcctcatgtagacttgggagaagatctcgagttggctagacttagagaggtcgtctaccaagtcggccaaattgaagaaccacacgttgttggttgtgatgcattcgctcaatagacacaaatttttgagatggatggatgaccagaagtacatcctctgatctcaccaagcaaaactagattgttgtaacagagaagctaatgacttgataaggcagttcaatgaaagaac

SEQ ID NO: 391415 - DNA, 990 bp, Cannabis indica
atatctctgaagatctttactcgttgtatgcttctgtcaggagaatgacacttgattggcatgcctagactgcatggagtagtgcgaggcttggggcatgcccgaatggtaaatactaaaggtccagacttaactattttgggtctgacttgatcttgacaaaactataagtgggtatacttcatccagatttgaatatgtatagcacgtatcatcctgttgagtgctacaccaccttgtgcacaatttgagataacaacgtgttcgtggttttgagttttaatttattactttttggataaatttgaagaaaataattaatagtttcgaaataaaaaagaaagaggaagagagaaagagattgggagataatttttaaaatgttttaattaattatttagttttttaaacttaatatgagatgaacaaataataatatgacatgtggcatcctaataagtccagtcaccacttaacagaatagtagtaacgaaaaatagaaaaaatgtaacatatggtatttatgtcgttgaaaaaaagtaagtatttaagtgtataaattcaaaaacatatgatatttatgccgcaaatattctttcataaaaattgcttagtgcaagtgtttactgagattttcgaaaactaattatgaaagagttagtaaattaaattaagtagtagaaagtagagacgaagatttttacgcggttcgagtgttaataaaccctagtccgatagtcaatcgtatttgtctaaatagtcttgatgtattacaatgttcttggcaagcttaagaaccataatttcttgatatagtgtttacaccatgaattttcaaccctttttatgagggtataacgtagtatttataggctaaaatctaggtacgggcatacccgtgactctctagggtttgcatgtaagcttgacccactaattgggtaaatacataaaatacactgatttttggcccacggactgaggcccgac

SEQ ID NO: 391416 - DNA, 435 bp, Cannabis indica
tttatatataaggtaagatataaagaaaaagtataaagaggtgatgtagattaattaactaaaataatttaaccacaactttttcaatattttttaaatataaaaatataatcagcgtatacaaaactacatataatcaaataataacttaaattattctttttacaaaaaaaaaaaataataactcaaattcaaataataataataataaattaataaatataatcaccattaaccaatcattacataataatagtcttaaacttaaaaatatacattgtatacacacgcgcacaattctttctatctctctcagacttggtgtctgtgtctgtctttgccatcttccttctcaaatttcaattttaattaatcttcatcattatcaaccaaaccaattatgggtaaggtaaagctttttgttttttgtttttt

SEQ ID NO: 391417 - DNA, 2256 bp, Cannabis indica
ctccaaaatatcatcagatgctagtcaaatttaggcttgatgttttagctttattttttttttctctattttatagttcatcattttgtgagattattttatcttttttctattcctttgatattttctaatctccttctatttaaatctactaaaataaaagataaaaagaataaaattgctccaaacaagagtagaactaaatttaaaacacactaaaaattaacttaaaaataatactaaaaacaacctaacagtgattgatctaactttagactcaattagctgagtctcgaattggaaaattgggttttgaggtaatttaaacctgcgctcttttagaggcatgatgctgaaatctaactcacctagaaaaaaaaatgcaacggtaacctggggtaaaaacataagccttgctagaggatacttaattaaactagggagttctggccatgcctaatctcgcaaagagcgatgcttgccatcgaggatctcgtcttaaaaccatttatagcgagccaaaacatcctttcaatcaagttttttatgaaatcacctaattttctcatcatttatttctagtattatttttagttgtttaggctacaagttgaagggtaaggcaaataattttaggtattctcattctagaaactctagaaatttcagttctgaatcagacagaggcattctttgtcacaaataagaaatgtcttaaggaatctgaaattatggaaagaatttaatttagaggggggaaagggaatgcttaaaagacctaaaaataattggcttactacttcaaatcaaaatcgtgcaaagccaaaacaagaaaaatagcaaaagaaacaaaaagaaaaaagagagaaaggggttaaaaatggaaactcatcgaattcttggttgttcaaacaacgttgatgatttctgatttagaacttttggtaccaagggtcgaggatgtaacatgattgaggttggaaaaaatggtcgcaacaaatgaagaaaatagcaaagagacaaagagggcatatgcagaaaattaaaaaaaaaaaaggaattttgatttgggaaatttgataaaccatgctaaaaaattagtcatggtgtttaattaaacctaaatataatacataggaaagatattgtaatctttcaatatcttttcaaaattacccctcttttcaactcccccattctctctaactccattctctctcctccttccctttccattcgaacccagaaccgaaggtccccctagaactgttgaactcgagcccaccccctccattcaaaccaggaccctctcgactccagcgacctagcgaccctctcaacaattagcgaaaccagcgaccctctcgagctaatcgaccccatcgacccacgagaccgacgagacccacttgaaccccaaccactcacgaaacccactcaaaccaatcttcaatcaccgtccctgtcaccgtccaccattgacgagacccactcgaacccaggtgccttgttttttttggatttttctttaatttctcctttaaatatgaaatttgtgattaaattgaaattgttgatgattaaacatatcgatttctaattttttgtgtttgcaaaagaatttgagtttcaggatatagcttttttggagttttgtatgtttttgtgacattaggcaatctatatgtgattttgtgcgtgtaataactccaagttacaatggtttctatgttcatatttttttgcaatttttgggcgacatgtgcaatttcatgcgtttgaccagcatgattttgtgttggtgttattgagcgattttgggcgacattgtgcgattttatgcgactgaccatcatagattttgtcctagtgttattgagtgatatttgggtgactttgtgcaattttatacgactctctagcatagattttgtgttggtgttattgagcagtatttgggcaatatttgtgaaatttttgtgcgatatacatttgatattatttttaaatgattttaacaaacatgtgtgcgatctgtgtgcaatttatatgtgttgttttgcaattttatgtaatttattcgtgctatttcgcgagtttgtttgatttatatttcaattaataatcatcttttgtttgtaaatgcagatggctccagaactcattctcccattatttgagcattttccaagtgtatcatttatagatgggacgggtactttgcttcaataaaggctaagttcgaagccttaagtt

SEQ ID NO: 391418 - DNA, 488 bp, Cannabis indica
attgtgctaagactatttttattgttacttttatttttttatttttactatttttatatttatttaaacttcttagtttctttttttttcctctcttcttttctactttttttttctcttctatctctcttattcttttttttttctcactattcttttttattttcatatataataaataccattagcttaaattttccaatttattgtaattataaaaataaactactttcttattttatttcttgtagattaaggaaaactattttttttatgtaattactcctataattagtaatttaatctcgctattcaaggaaacaaaagaattcaaagagaaaacactcaagagtgaaaactcgatctgagagtaaattgcttagagatcattgtaagaactttcgagagagatcaaagcattcttgctcactcttttcacaagtcaatacaacaaaaaagaaagtaggctattaccaactataaggggt

SEQ ID NO: 391419 - DNA, 833 bp, Cannabis indica
tctagagccacttatcatatttgctcttttatgcaaatacttgatttgccatgggagctggctgatagagagctgaccatatggtttgggaatagagcacaagtatcgactaaaagtgttggccaagtccggttgaactttaaaaataagtttttattgttgaacaatatttttttcattcctaattgtaccaagaatattattatttatcgtttttacatgaacaatcttttaacattgaatttattaataatgagattattatttctaagtttagaatggcaatttattcttcaaaataaagaaatggactttatgtgctcagatcaagtgagcaattaattttgaataatgaattatttagagtagctttgcctcaacaaaataggaggcaaaatgttccaaatggtgatgaaacgtatctatgacatctacgtttaggccacattggctagacacaattaactggttaataaatgatggtcctttgagagaaataaaagtcagaactcttccggtatgcaaaaggcaatagagccaaataacgacttgagcttattcacaccgatgtgtgcaaaccaattaatattcaaacttgaggtggttacgaatattttgtcacttttattgacaattattctagatacgatcatactttcctaatggttaagaggtctgaaacttttgaaaagttcgaagatttcaaagccatgggccatgactgaaaagcaatgaggtaagtcattaaagaaacttcgatcagattgtgatggcaagtatttagattccaaattcaaagactatttgcttgaagaagggatcttatcccaact

SEQ ID NO: 391420 - DNA, 1425 bp, Cannabis indica
gtataagagccattcattccgtgggtgtaaggacctaatggaggcttgaagcggggccgttacacattattcaatatatatatatatatatatgatcttattaagaataagatcacttagaaaaattaattaaaaaataaaaatggcttagtatattactattataccatatgtatacatattatatacgacacttttgtaaaatgaggccaatttagtatgtacacatatacgttatatgtgctcatgtgtgcatattaattaaacaaaagtaatgaacccaaaagaatgtcccacactaaaatagccatgtgatgcagttacttttaaagcttaaaaagcttctattcatcacttactatcacttaattatcattattatatatgtgtaatgtgttttttttttggaaaacttttcttttcttttctcgaacccaattaaagaagtagtagctgttttttgttttaaattaaatgtgtaataaaactagatagaagttattgtatatgttcatataattaaatctaataaatgactactaaacagcataaaaacaaacaaataaacataaatgggtgtctctacttaattaattaatataacaactagctacctagtatatatatatatatataactatttaataataataataaaaagagaataagagaatgttagagatattattcatgaaaaatataatacatatgtacaaatcaatagaagaatgaagctagctagcgcacatgcaagaacactgccaattttggatcagttgatcatctctactctatcccacttgatcccagataatatatatacagttatatatatatataaacataacaaaaggaatgaaataataaaaatataaagtctgatttgtatagaatatggatatttgtaactggtaacgtaataataatatatatatttatggagagagagagagacgttatgaaagtatggtaactaaaataaatgcgcatgaaggtcgggtcaaaaggaacacaggtttgtgatagccacgttctttcttttcttttctttttcctaataataataataataataataataataataattaatttgatttatttagatatatacaaatgggcgtaggcatataggaatggcattactaatagtattgaccgacaacaaggacgaacacagccgtctattaaccaactctcttctgataaagcctgttcttcttgtctccccctctctctcgaattttaaatatacacacaacaaaatgttttattataaactagtatttatgtagttatgttattcaacattcttaattatagtgcttacatgtcttataaataattagtaaatatcaagtattggttgggaggaatgaaaatataggaataggaatgggaatgggaataggaatggaatggaat

SEQ ID NO: 391421 - DNA, 797 bp, Cannabis indica
tttggtgtggagttcttatagtgtaaagtttataattaatacaaagcaaactatattttatactattatctaatatatgaattacaaaaaaatagtgttctttagattaataatattaattaactgtttatgttttatatttatgtatatataatatgtattaaaatgactttgtgaatttaagtacacatttaaatatattctgtatttggagttttttttttttataacatattctgtatttggagttatgatggtataatttcgttcgtcatagattatgtcaattatttaccgtggttattaaatatatttatgtatgattgattagaggcttattcatatttagtgacactcaaatacattgtttatgaatattaaagtttgattagtctatttttcttcagatgaaaaaaccatctacaatcgattcattctttaaaaggaagagcactgaagttccaatatctaatgactcatccaatcaattagtagatcttgataacttgcattcagaatattgtactgaaaagtctatagaagttcaaattatagaagggtttgatatcaattcaatagagcgagatccaagattacgaccacaaatatgggagtatccaattgagaagcaagatgagttcgcagagcgtacattaaagctggtccatatcaatgtatactttctaagtaccgtagaaataaagagacgcataagcgttgttttcagtcatcatggtttaacttgtttccatcttaatgaaacattctcctagtgaggatgtgttggaaattatttt

SEQ ID NO: 391422 - DNA, 1773 bp, Cannabis indica
gaggtagatttggttaattgatatataaaagaggtattaaatataccccttttatttttgacaacctagtctaaatatctaaaattaaattggctcctatatggatctaagacaaatacaaaaacataaaggctcacataaatattgatttcgacggaccctatcatgttactaggttttgacacagatgaaaaaaaatacaaaatttctaataacaaattatttatttgatttattgacaattaactatgattaattaggatcatttgatccatcaacaacttaatcatagccatctaagtaaaaaagatattaggtttgttaaaaaaaaattaaatttaaataaaaaaacaaacaaaattaaggatggctggttaaaggatttattcattttataaaaaaaataaataataaacccattttaaaaaaatagggtcgttgctgtttacaaagttttcgccaattaaatatttttagagcttaagtaagtaataattgcatgaataatgaaataactaacaagagatttttacgtggttcaggcgttaattatccttagtccacgagtctattttattaggctcaacggtcggtgactgtatataaaaatacaaatacaatagactttttctcctttccaccgtgttcctcttgaagaatagaaagcttagtaggaatattctagagttaatagcagggttacagaaatgtgtttgtttaggatgatgaagattaagtcttccatccgaaggtctcgatccccccttttgtgccttttacgaggtatttataggccaactctcttgcatgggctgtcttggatgggtctccgtagggatgtaacctcactgttgattggtaagtggcatatttctcatgtggcttttaagggtgttagatcgtactggctgcacttgctgggcctcggacgcgtgtcacctcagggttgttcttatttgaattccccatattcctagtcgttggattatttagctctgtacacaaggacacgcatgctctacacgattgtgtatcgtgggggacaacgtttgacatcgtacatgaaatagtctggtcactgggtccctggcacacgtgggctgagcctttgcgggccaagggcgtaccctagactagtgtatccctgaaatgctttggcctaatggaggatttctacattcatttccagaacaaatagtctaagcttctggaaatggaatgagactctagttcacagatacccttcgggtggccaacagtcagggagacttctttcacggaggcctttcccgcaggttagtgcctttattctcccaaagcactaagtgagttgtttagggggcttaattactccttgggcctctttaattaacatccatgtgcttacaaaaatgtggataacatttacccccaagcttcagggacttaccatggtccgggagcttgcagtatattcttctgaaagtttttccgcacgtgggacttatgataggttctttaatgcactacgtcatcagccgccaatttgaagtgtcattattcgggaggcataattttctctatcttcttgtcaggattttaaatgctgacatctgggttttgcacgagtgatgggcacgtgtttcatgggatgctcaaaacagcgatgattggattactttccattttccaagcgtattctacgattcatgtaatgatataagctgactgttgggaagtgagatatgttaggctttatgccttaaataaaacgcatttcaatataatcagatt

SEQ ID NO: 391423 - DNA, 705 bp, Cannabis indica
ttattattattattgttattactattaatttgatatatcataaaaagtacatatcgagaaagatatgggttgggcaactccaaatcttaagatatgggtctaccctccactcgatcagactatgttataatgtgataagaataagaaaaataaaaaatagtaatgtataaaacaattaatataatataatatatacaaaaatacaatttgtcacgtcaaataattgaacgaccttagcttatggagctccaatattaatattacttataacttcattattggccgacgtaccaatcgaatatatacagacacaaaattaattgaatgtacgtacctatgttttttcttttctcttttcataatttttgatacaccatttatctattttagcatttaatagaattagtctaatatgtttttttaattgtgtacgttttaattagggttacatgaaaattttataaaaaatttcaaataattttatcttatttatttattttgtggctaaatttgtcaaactatatttttgtttacaaattttattttctattcaacaacctcagttatgtgctatatactaaattgctcacatctatactcatatacgcatgacacatttatattagtcaatgtaattttttttaaaaaataaattgatttaaaatttaaaagataaataaaaaaattaaaactctctctctctct

SEQ ID NO: 391424 - DNA, 550 bp, Cannabis indica
aaaaaaaaaaagaaaaaagaggaaataattgtatgggtaagttaggcaagatcataagactttaaagagagtggacgaagaagtcattttcatctggtaaccttaaggtacaatacaaatttaataatgccttatcttcttagctttgaacatatcgaaagcagctagtcacaaggcccttttcaccagaaagaaatattttttaaaattatatttaattatttcagactagacttgttgaaattagaccacagatataaatattaaaacaaataaatatcttttattctaaagaaagtatctcttttattataaatatagggatatcattttgtcacgtgatgtacttttacggaatgtattccgtgatacattagatgagtctcagtgtacattaaatgagtgttagggtacgtttctactttttaaccctaactatccctagatcaatctcagccgtcagatcaaataactccctcatctgacggctgccgtacatcacggattacaatctgtgaatgtgaaagtacaataacagaacaaaatcata

SEQ ID NO: 391425 - DNA, 1559 bp, Cannabis indica
agaaacccaaatagaaatgacacaatcctgtgtaccaattaaagaagataatggtcaagatgtacaacacatgcaaaacatgaatttggtggtgtccacactcattgcaggtataacatttcaagcagccataaccatgcctggtgctgcacaatacaaaactaaaaaaggccttaaagctttcaaagacttcatggaaatggattctttggcttttggtttctcggcgggctctttgttaatccacttcatatttgcaatgttttccatgatctcgaaaaggaaattcaggtatcctactatggtgacaatattgttcatctttctttccattttttattttgtgtttgcctttatcataggtacaaacgcattgttgtacgagaagaaagagctgaatagtctgcttataactaaaaaaggtgctttgttttttagtgttcctggtaattatgcactcgcagcattctatctcactataggttatgtcttcttcatcattcgttacctcaagaaataatttttttgtttttttaatagtgtagtattcagtgggggtagaagagaaggtcttgttgtttgatttttattctagttttcataaattggaattaaaaacaaatgttgttgtattcaagaaacctgcagttatttatttaatttgtaacaacttattttttttagcctataatagaaattttatcatgatgtatcttatttgatgaaaaataggaaaataataataaaaaaattctataaatataataaaaggtaaatgagaaaaaagtttttcacttttacaatttaaatgagttttttttttcacttttataaaattttatataacaaccaacgaatcaatctaaatctcaatcaaaattcatatagtaactcacatagaaccacataaaaacaccggagtaacccaaatagtaaatttgaaaaaaaaaattaaaaataatatatgataaaaataatatatgaggtaattcattaaaacaaatgactggagaagagaaaattaatcatatacaatttaaagaggcaagttgtaatataaacggtataaagaaaatgaaggaagacctcgatatatgcaaagtcgtcccagtatatcattaagattagagaaaaagattatatatagttttaattaatacgttaaaataaccacttgaggctagttcaagtagtcataagaaagtgaatgtgtgttggaatttcttcgagtcttaagttatgcaatataatatataaatatttaaatgaaaaaaattatgttgaatttaaacaatttctttattactagtcaatacaaagaagaggaagcaaacctctttaatatctctttcaaaatgatatgtaaatgtgtttacattcgttttagataataaatcattgaattgtgagaggaacaagggtttggtgaggaggtcaacaaggttgagcttggtggagacatggagtagtttgagtatcccagcttggagcttcttgcggattatgtggcaatcgatttcaacgtacttggtacgtttgtggaattaatactggatttt

SEQ ID NO: 391426 - DNA, 1793 bp, Cannabis indica
tcaaagtcatagccacaaaataagaacaaactttaattggtatatatattgttaattcatccaaaacttaattaacatccacaactatataaaataattaaaaatactaataatatatttttatagcaatctttcattagaccatcatataactaattttcaaaataagtttaaaaaatatatgaatattttaatataaattcagttttcaagagtcaggtatctttaaattaaagtgctataacatttttttaatccaatttacttttatttaaataattttgaagaaaatatatatatatatatacgtaatattagattcaacatgttctgtggctcttttagcttggctagcaaaaaattaagggtcttgggtgttgtcttcaacctgtgtctcatcaacacccatctcaaacaggacctttgtatgtgatggtccgggcatacgcctcttcatccgggcaggatgtagccccttcatgactactaatgtctgtttaacaaaataaatgcaaaataagtgttaataataattaaaaagtcattttttttcaaatcttcaaaaattatcaacattctgtcgataagatatcgacaaactcacgacacttaaataaataaacacaaagagattatcgagaatgcatcgacatatcgatatcatatcgacacacataaaatcaagcataaaaacaaacacaaagcaattatcgacaatacatcgacatcctatcgatatcatatcgacaaacataaaatcaagcataaaaacaaacaaacataaaataattagtaacagtgtaaggagtatcgacgacctgtcgacaaactcacagtacttaaacataaagaaatgatcgacaatgcattgacaacctatcgatatcatatcgaaaaacataaaacaaaccaacaaaaaataatcagcaacagtttaagtagttatcgacaacctgtcgataaaatgtcgataacctatcgacaaactcacgatattaaaaatattaaacacaaaagcacatcatcgaaaaggcatcgacattatgttgatatcatgtcaaaaaaacaaacaaaaaaaaataaacataacaattcaaaaaaaaattaaatgatcatacccgttttgaaaataataaacagatttccttctttcaatgtcagccctgctggtccagcttagaatcctgggaaaatgaattccctgacacgaaccatacttctttcacacctctagaatggcctcataggcccaatattgtaatgcatgtgtgaaaccgtaagcattgtatttgcattcatgctgaacatccatcttcagctttttctcataatttgccttctgtttcaacatgtctttttggagagtgtgcatcagtctggcaaatgagtagttcccccatggaatcttgaagaaaagtcgagatcttcaacatattttagtatgtcagttgtaatacatgcatttccctctcagcccagtaagacagtctccaacaagcaaaccctagcttgtacgcgtctttcgagacctcgtaggctaggaacttattctgaaatagttctatcttcacattatctaaccagttgaaatagatatttatcaaccggtcagaccctgacatgacttctttctcatcgtctgttggcccctttgtgaagttgaggcctgtaattagcacaaactcgaccacaccaaatttcatctcgttccgtgcaatgtaaaactgcatttcgtcatccttctcagcattcacaatcattttatgcagtatcagttggtagaatagtactaa

SEQ ID NO: 391427 - DNA, 1404 bp, Cannabis indica
tagtcttttactaatgtagtatattggatgcttgatactgtcttcctctcttattaggactacactcacatcatattctacgacagctaggtatatgctagtttctcattgtctagaggtttttataggacaggacgttgagccaattgtttcgttagctcttggagtgctctttcacaatcttctgttcactaattattttcctctaagtatgttgaagaaaggaacacacttgtctgtggatttggacacgaatttgcttaaatctgcaatacatctcgttaggctttgtacgtctttgatttttgtgggtgacaagggcttggatcttgttcgagtttgcttctattcccctaacattgattatgaagccaaggaatttgcctaagcctactttgaatgaacacttgagggggttgagcttcatgctgtactctaggaggatcttgaagcattcatttagattcgccacatgccccaacctttttggacttgtcaagcatgtcttacatacacttccatgttacagccaatgagatctttaaacattttattcactagtctctgataagtggaccctgcatgttttagcccaaaggtcattattatataacaatacatgcctaagtctgtcataaaaattgtatgttcttggtctggttggtgcatactgatttggttgtaacctgaattggcacccatgaagcttaggatcttatgaccggttgtatgatctactagctggttgattttcaaaagcaagaagcagtcctttagacataccttattcaggtttgtgaaatctatgcttaccctccacttgttgttcggcttgggtaccaacacggggttggatacccaaagcagatagaatgctttagtatgaagtcattggctctctgcctttcaactttgtcttttagagcttgggtgataactctatggtatagagttattttctgtgcttttaaactgaaattattgtgagaagagtagtgaaagtgtgtttgtttgcttaattttaactagtttttatctttattttctatttattaagccttgtaaagattattattttagttgtgtttatttaattaaattttgcttgtttgctgttgagaaagtaaaattacattgttaggaaaaagaaaaggatgcgaggacaaagtggacataaaagttgaaactgggctgaatttctgaagcattgctgcaacgaatttaacatcctgggcagtgatgtggaaagagttgtagcaagaatttcattcgtccacattagcacgtacatattagccattcaaagttacgccagctggctgttgtggaggaaggagactgaacctagtgagccaagatcggaaaggattgggcttctatttttagggtattactttgtaccct

SEQ ID NO: 391428 - DNA, 957 bp, Cannabis indica
ttgttgatccttgtattatattacaatatagttataatatcttgattttctatgttgcccatgatttctcccaaagtacgtggcaagttaaaggttggccacatggcactgagactgatgtttttggaataattatggaaaatctttctaaaactacaagggaaatcattagccacgactaggaagtcccactaggagaacaagctacactatcccagctccgagagtcaagttaaaaaatggaatgggtctagattctgtgagtccagaccaaagtcacaatagacacattaaatgtagtatggagaaacgtctgcaaattgccttgaaaagacatgttagaggtttaaacctgtccttctccgattgcgacggatgcataatgaataatcaaatcatcaagagaagctaaaggtctatctcactaaacacctagagcaaatctacgaattatacaaaataggcaggcatgccatattgtctaaatttgggaaattgtgcaagtaatactcatacaattacgacaatggtggccatttcaccatcttgatgaggctataaataccccaactacatttagttgaggggtcgaaaaaaaagagtgagaaactctctgtaaaaaacggttgcattaataacagtgactaatggactaaggctcattaattccccaaccacgtaaaaatcctttctattaaatttcttcattaatagttgtcaaaaatctcaatcaatattttggtgcatgctttcattaagagctgaatgaagctttccaaagaaggaaaatcacaaatagattcatggtacgatggtgttgataagaaacaactcacaacgaccacattcgcctgaagatcctatgggtgtggatggagaggaaatggctttgagggtagacgttgaagaacaagatgaaacccaatatcctgagtacgaggaaaaccaagaagagta

SEQ ID NO: 391429 - DNA, 1239 bp, Cannabis indica
ttgtactctttcttctcactttgttcggtcctttccatttatttacttattttattaatatttctaagcatgtagtgtcaccacctgggtcagaacgactattatttattacgtgcgggcaagagtaagtgatgtcatatttattggtgtaattaaatattagatttcatataattaaatataatgggctcgtttggtacgccgtattgtaatatattgtattgtgttgaattgtgttatattgtattgtattgtattagtattatttaataccatacaatgtttggtattggcttgtattaattgattgtgtttggtattgacttgtattaattgattgtgttaagttataatatatttctaatacactcgatcctaacaccaactacgggtcagggtcccaagtcccgggtacaggattcgggtctgggttcgggtctacgtccgggtccgggtctgggttcagggtccgggtcggggtctgggtccgggttcgcagtctgggtttagattcgggtctgggtcggggttcgggtgtgggtcggtgtctgggtccgggtcgcgggctccaggtctgggtccgtgttcaggtccggggtctgggtccgtgtccggatatgggctcgagtctagatccgagtccggagtccaagtccgggtttggatccgggttgaagattggtgttgatccaaaatcctttgtaaatattataatacaagctaatacaaaccatttattatgtattaaataatacaacatacattgtattaaaaaatttggtcataataattaatacaatacattgcttaatccaaacatagtgttatttattatttaatacaatacgacccttatacggcataccaaacgagcccaataattcttatataataactaactataaagtaccacctctagattgtacaagatattactagtagtacctaacaacaatgctcgtgtataaaaaaatttaattgttatgtatattgatcgagttatggtatatttttactaatctaatataaatactaaactgtaattgtaaattttttaattgtaactcgtccaattaaaaattaaaaaaaaacttaactcgtttaatgactttattaatttagtcaagttaactcgtccaaaccgatcttaatatttattataattattattagtagcttttagtatttaaataattagatgactaattagaatttttacttcctgaactttgacatgta

SEQ ID NO: 391430 - DNA, 1013 bp, Cannabis indica
ttcaggttagaggaagaagaaaatctaaaatctaagaaccctaatcctaactatgactaagagaagaagaagagaatttgaaacccatgagaaccctagccttgtttcaacagcaagaggaagaagaatatagaaaacccataaaaccctaaccctaatttttggtgttgctgttagaagagaagtatttttgagaaattttgaatttcttgatgtcgtgaatggagaagatggactaaaggggtggacggagcacttgggtttcgagctcggcgagagtcagagttggtgctgggttttggattagctttttggggtggtgtaggcagcgataagaagaagaaaaagataaaagaaaaaaaaattgtttagtattttttttgtcattttaaattaaaaatataatttgaactaataaaaaattgacacgtaatattttatttgagtttaacggatatgttaattagaagagagaccaacaaacttatagaattattactaccaatttttaagattggagactaatttgtatcgactttaaaattttaagaacttttgcaacaattttccttaagttaagaaaagtgttctggaaagaaatagataatattaatggtgccgcgttatttaaaataggacagaattatgattcaattaaaatggtatcagaatttaatggataataaattagcatttatgtaaagaatgtagtcaagtacatatttcaagccatttacaaaaaacaaaaaagtacatatatcaagtgcacgtgtagtgcacacgaggaagaattaataattaggtggtatgtcaatttgctgtttgcgtatcttttcgttgtttctttttttttcttcaaactaacacattattttcttcttccatttatagttccttctctcctttcaaagaaacaatatatattaaggtgccgtttggtaactatttttgttttcttaattttttaatcacaaaatgaaagtaaaatttttgtttttaaaaattttactttt

SEQ ID NO: 391431 - DNA, 1750 bp, Cannabis indica
tttttcacactaactttttttttgtggagactatacaatcttattagtgtctccgtattaaatcacttatattatttcattatttctgtaatataaactgagtactcgcactaatcatagggcgcaccaggtaattattgtcaatgacaattgagtttttagttggaaatattatgaaaaatgttaagaggcacaataaagttgtcctgcactgtaaaaaaaaatgtaatttaatttaataaataataaaagaaattgctaattatttacaatacaaaacatgagatggtattgatcagtttaaaatgctaataacaataataaaatattatccaggacatgcctaaatattggactgcgccaatattgtccaaaacctatattttgaggccccaattatatcatttctaatagaagttttttttagggtgtaaaataaaaaaatatatataatattaaagtcataaagtgtgcattcccaaaatgcttatattttggtaaaaaatctcaataataattttatttgtatgtatgtatattaaaaagtgaagccaataattaagatttatttcatgtaaactcttattcattacaaattttggctgtattctatcgatgactatttattaatattaatctttgctctgtgtaggttgggtgagagactgtgtacgtataatcttcaaaatatcaaacagaatgttttccatccacatgactaaaatattgtttattttctttttccaaaaatcgaaaataaaaatagagaagatgactgcatatatataatataggcagtaggtacaacggtgaaaacgatagaattaatgtaatataaatccactaaaatccgatcctagccggacgtacattatcattttatatatggaccaaataaaactacgattcaaagatatcttcaacttcaattgtataactgaaattacgatgatgctaagaggcaccaatattactatgataaaaattatgtagttaataaattaattttcatgcacaaattttaaattcagcatcctgcttattaattatgactaaaaatttaagagaaaattacaatttatggtaaaacatataagaaaaaaaaacctaaattcggctagttcatgaacttaatatgtacatgaaagaagaagagaaatgataagaaaatatttgaatgatgatcatactcatctatatatagagcattgttagttatagctaggcagcatcttgccattagtttacaatattctataaaataagttaatacatatttaattgtacaaataatgttatgtcacgatggtgggtatcagtgtacattttagcatttctcataaatgtattatagggttcatgtactagagatcaaaagtctatgatatagagaaatatagtattgtaaaggacctataatgtcaacattactattggcaaaaagcaaaaaaaaatatccttatttaattaaaagtggaatcaaaattaaactcctcttaaaagtatacaaagaaaatactccttaagataatcttaactctagagtgtaatttaagaattataaaatatttatcaacatagatatcgtcaactccaacatcatcgcccactttaagctttgactccctataacttgactcttagctcttggttgcgcttgcttcttttctaatcaagttttataaaaccgtgacagtctattctccgatgtctcaatttttcaccaaaaaaaaaaacacttgacattata

SEQ ID NO: 391432 - DNA, 1318 bp, Cannabis indica
ttttttttaaaaaaaataaacattctagcaatcttaaaaactaaattagatattattttttttaagaaaatagttatatattttaataaacaatagtaaaaatacaaattatggtattttaagaaaataatttaaagtattttgttaaaaaaaatttgagcttaggtggggtcttgagcgtgggctcctgctgccctcaccccttgagccgaccatggctagaacatgttagttgtattaaaataaaaatttaatgaaaatgtagtttaatgtatattattttgaaaaatataaaatttaatttatcatttaacaaaatagaaaatctaatagatattacaaaatataatgtccaaaacaataaaggtaataattatttttgacatgtgatcaattacaagtctcttttttacttagactagatatttaaaaacaaattttaaaataaaaattaactatttttttttaaaaaaaaataagcatacaagaataggataggatatataggacctaatgacaaaatgtagtattaattaagagtttacatatataatatttatatgtatatcaagatcaagataagaggtgtatcaatgtataaatatatatataaatgttaattaaattaattaataggtatgagtgtctagctacttttttgttagatactcaatctctttctcatcctaacataacatacattaacatatgtatgcaccctaaagcttacatactccatagccccacttcatcaacacccttgtcccatatatatataaacaatatatgtgttgtacatattcggtgtatatgaataacacaattctaataattaatgtttatttatggtaagaattaaagaataaaaacattaattatttttacaagtttaactaatttttgttaattatttaattttgtgatcagaaactctaataattaactacaatttatataaataaaaagcatcggtttgtgttgtctttctactttgattaatttttttttgtaatttatacgaaagccactttactttctatgtttatggccggctctatgttaatttaggcttaggcaaaaataaaaattggggccagctctatattaatttgggccttaagcaaaaataaaaattggagcccaatgaaaaagtaagactattgggatttgaactctcagtctcttagttgttaaactaatcaaattaccactaggttgcaacacatatttagaatttaaagtatgattatttattttattactaactatattttattttattttattttttttgaaatggagccctgagcggtggggg

SEQ ID NO: 391433 - DNA, 560 bp, Cannabis indica
ttttttttaaaaaaaaaagtttcgaaatatcatactgagtgtaaatttttcatctttaattttaggtaactctttttcatgttgtcctattataatataatattagcctcctttttgaataattgatgagttttattgattttttctatctgacttttataagttacattgagccaaaatatatatatataataaaaaaattaaaaaaaaaaaaacattatacagtgtgaaagtgtgtgtaattaagccaaacagaaccttgcactcttattagttggatgtattgtattacttacttaggtagctttttgctaatctcggttggagttaggcatggttaataagatccattaagacaatctttttttttagggtatccattatttaagacaatctcaataatgcatatatacttgattaacataaatattgccagctcttaaaacaaattaatgatgaatatttggaatgaagacagatcccatttaatttactttatacattactagggaattaatccgcgcttcgcgcggtattacccaacatttgtaatcttttta

SEQ ID NO: 391434 - DNA, 844 bp, Cannabis indica
caaaattagataattatttttatttataaatgttagttttaatttaaattatacgtttattaattattcatactttataacaaatttattagttatattatctaaaatatttaaacttatttacttattttattgtttatagtaaaattagttagatacattttttaataataaatttaaaattagattaaatttatatatattaaacaatataattgaattgtattagatttaattttattattatagcattatttaaattaataattagataatatcaactctaatacagctctaagcaaacacacattgcatgttactaatacctaataaatatatacatctaccttattttatttacacttttaaattataattatataaattatatattttttttaaaaaaaaattgatattgatcacattattattttcgagaagacgtcaactatcagtgttgggacctcttcaaaccagtataactcattgtctagcctaagggtatatatgtttagccaaactatgggccgcaatgttatcttttcgagacacatatataggacaaaactgttttcggaaatttagacaataaagctatgatatcctcgaacaacacactcatctcatttgcgaacacttttctgttattaatagccattattactgagagagaatcagatttaagcgcttttacgagaattccattactactgagagagaattagatttatattttaataataaataaaataaataattgaattggatatttaaagtgaaataattaataaatttattcaaaaactaattaatttattaatttatttatttaactaactgttaa

SEQ ID NO: 391435 - DNA, 1824 bp, Cannabis indica
aaataaaataaacctaatttcttttaataacaattaaactcccacataataaaatttttgtatccgtcactaaatatatttaatggtaagtttcattttattttatcagtttttgttttgtatgaaagaaaatcttttcggtgaaaaagaatttaaatcaaggtgttgtaagagtattatttagaaacaatgtgtcattttttttttttgaaaagatacaatgtgtcattaacttatacgttagacagagaatgtggtaggctttttggacacaggatccgagtccaatttcagattgcacagtaatataatagaattatttcacaaatacacaaaataaacaaaaaaaaaaaaattacaaaaatatgattttaattttaaacatttttataatttttttgattttattttcagaaaatatagtctttttatgttgtactattattaattttttgttgattttttattatctgcatattattttttgttgttacttagatgttattttcatattatgtagttttcttgttgtttttgtgttatttttatggaaaaccgtaaaaagataaaaaaaatttataaacgtaaaaatgtaatttttttacaaaaaaaaaaaaatagtaatctcgtgtaattatcctaatataatgttataccattaattaaaatagtgtggttagccaaagagtcatttatataagtttttgcagataaagcaattttttgtgttaaataaagattaaagagaatgcacaaattagttgcttctgcgtgatatttaagcagaagaatcaagaaaaagaatagtaaaagaatagtttatagtgcatgtgatttgtcaaacgactccaaagattcgtatagtatattagtaagtgcttcgcgataagtttaataaataattatgaaaggtgaatttggccactttgttcttataagttgatttgtgtatctttttggaaaaatatatttgattctcttttgatggaaaacgtagctgctaaaacaaatcttcgcagccttaaagcttggaaagaccattcagtttgtttgctattagacatcactaaaatttgttagacatttcatatgaatagatgaaacatatgaactgtgtatatgtaatgtggaattaaacgaacatgtacactatataattataggatcgaaatatttccagctattaattctttgagcttcaatctcacacgagttttggatcggcaaaagaaaaggaaaatgattagtgtcagtaattgggtttccaagctctctctaccctctttaaatggatttattgtattttatagaatgagcaaattcgaagactcagatcctatatttatataggtgaaaccttccatcaaggtctcttccacaattaattgttagaatattttgacaattaattctaaaaaataaattagataacagaaatatttggaaattgaatctgaccataattagaacattttaattaattatattttataaatcaaataaaatatttgatttgttactatataaaaattattctaatattctctaacttggtcaatatttaaattattttaacacttaaaacccaacgtttctcattacataataaacatataaattatagcgatatgtccacattatatgtcgagtattatcttccatgtattacgatatattcattatataacaatgtacttaatgtgacaatgtactttagcaaaccatccataaaccttatgtttattctagacctcttacgataattttctcagataaaattaaggtgcacacaaatatgagaaaatatcgaaattagagtttcat

SEQ ID NO: 391436 - DNA, 1504 bp, Cannabis indica
acttcatttctttccattcccattaggaagcagcagtgattaatagttacctcagaaggaatttgaatctgtttcggagggtgaagggaaagcttcttaagagccaaggatcttcattaattcgaatacgacgaccatctccaacacaccatctggagccctgcattaagagatctctgccccatagaataccgctccaaaccgatgatccataatgtcccagtttagcttcaaagaagctttccagcgggaagtagagggcttttaaaatttttgcaagcaaacagtccagattattaatgagcttccagccttgtttagccaaaagcgattgattaaaatcttccaaatcacggaaccccatttccccattctcttttaatttgcaaagtttcttccaattaccccaatgcaacttatgtttatccttcgtcgatccccaccaaaaacgagctatcaaaccttcaatctcatggagaatccctttagtaattcgaaaacaactcatgacatagcaaagtaaggcttggattaccgctttaattaagatctctttcccggcttgagaaaagagacccatcttccaaccttggagcttggcttcaactttctctcttatctttctaaaaacttgcttcttatttttaccaacaaaagtaggcatacccaaatacttggtatgagtcttaactaaagtaacacccaagttggaatctaaataattcgccatagaatcatgaactttgcatcccacacacatctctgttttctcaaaatttatgcattgaccagacatctttgcatacgttccaagcacctcttttaaggcattgctatcatccaggtttgcatcaaggaaaacaaggtcgtccgcaaagaggagatgagacaacctttgttccatagttccaaatctcagcccatgaattttaccagccctttcagcttcaaagattaagcaggaaagaccttcagagcataaaagaaagaggaatggagataggggatcaccttgccgcaacccatgttcaggaagaaagaaacctttgattgagccatttattagaactgagagggaaattgatctcacacagttcataatctttgtaatccactgataatcataccccaaatgaaacatcattgcttctaaaaagttccattcaaccctgtcatacgctttcgacatatctaacttttgccattttttttccattttcaaaccgacctttcttcatacaatggagactttcaaaaccaatgatcgcattatcctggatgattctaccaccaataaaaacactttgattatctgaaatcactgaatttaaactttgtttcattcgattcaaaagaaatttagacaccaccttataaaccacattgcaaaggctgatagggaaaaattcggacaattttgtaggctttttaaccttcggtataaggcagatcattgtttcattcaacagtcggcagtcgacattattattcagcacttcaaggc

SEQ ID NO: 391437 - DNA, 2531 bp, Cannabis indica
ttaactgatccaaaactggtaaaaattagagattaggttttagctgatcaagctaaagattttaggatgtcaagtagtgggatgctaatgtatagatacagagtttgtgtttcaagtagtgcagaagttagaaaataaattctcgtggaagctcataccactccttattcattgtatcctggcactaccaaaatgtatcaggatttaacacccttccactggtggtgaaggatgaagaaaaatgtggtataatttgtatcctgatgtttaacttgtcagcagattaaagctaaacatcagagacctgcgggttattgtagccactgacacaacctgagtggaagttggaagatatcaccatggacttcgtggttgggttacctagaacacatgaatgtacgattctatttgggttgtggtagatcaatttacgaattttggacattttctactggtgaaaataacctttatagtggatcagtacgcagagttatacgtgaaagaaatagtaagattaaatggggctccgaagtccattatatcagatagagatccgaagttccccttaaaattttggtagagtctataacgggccatgggtaccaaactaaagttcagtacaactttccatcctcagactgatggacagtctgaaaggacaatctagatactagaagatatgttacgtggttgtgtgttggattttgaaggctcttggagcaagtatctaccactgatagagttctcatacagcaatagttattagatactctagggatggctccccacgagatgttgtattgcaggaagtgcagatctccaattcactaggatgaaactggagaaatagaatacctaggtttggaatcggtgcaacagaccaacaaggctatagaaaagattaaggccagaatgcttgcctctcagggtaggcaaaagagttacgcagatctgaagcgtagaaatgtagaattttaggtaggagacatgtattcctatgtgtgtctccgatgaaggtgataaaaaattttgggaaaaagggcaagttatgccctaggtttacagggcctttcaaaattctcgagaaggttggactggtagcatattacctagttgtgcctccaacactttcagtagttcacaatgtgtttcatatctctattttatggaaatacgtttcagatcccactcatgtgctaaattatgagaactttgaactttagccagatttatcgtatgaagaacaaccacttcagattttaaaaaaaaaagataaagtctttttgaacaagactttagctttgttcatggtgctctggagaaacagtaagttggaggaagccaccgggagttggactccgacatgagagttcaatatccagagttgtttaggttaaattttgaggacaaaatccttttaaccggagaataattgtaaagactgctttattttaatatgagaattagcatataattagggcttatttatgaagctagattattaattatgatttatgaatttatggagacttatttgaattcagggtgtattatttatgatatatatgaaaatttatgtttttcttgttttgtacccagcaacattggaacgcggcgattgaccaatagaatcacattttagtattttagtaatagtggggtgacttagtaagacattgagaatgttaggattattcaaggatttaaaaatgaccaaaatacccctaggtgttatgtttgctttttagtgtatgtgagggcacatgggtctttttgccatttagggatatttgtcttttagtgatttatttaaattagtgaatcttattttatgttagtaatagttagatagtgctttaggttgattcagcaatttagagaatttctagcatcattgttgaggttccattcctatgtaagctacctagctcatccatttatgattccttaagtttcaagttagcttttgcttgatattcaaaaaaaaaaagttagctttccttgcattttttagaattagggttctgtgatgctatatatgttgggaatattttaccatgatctagatttactaacaactatgttgaattaacatcctaaatatgaatatctctaaaacaatgaaattaaacacataagagtttagaaaaccttacattggttgcagcggaatatattgattccttctgctcagatctctaacccttgttccttttcgtcacaaaatattatcaagatctgagcctggatctctttctctccttcgagtttagttacacccgtcttactcactatgattgagtacttgacttgctatgtgtgggcatggcactcaaggttcgaatatggtcaagaacaatgaagaatgtgaaatcactatagaaggtgtctctcatctactagttgtcagggaatgaaaactagatttggtaggttgaatagtcaagttgacaagagaatgagatgagagcatcatgttccttatatagtgtttcaactaggacttagggctgaattatatggattaaaaa

SEQ ID NO: 391438 - DNA, 866 bp, Cannabis indica
gggaggcaactatacccgtacaaggcataggtctattacaagctcgattactaaaacagggaaaatattcattttaaaaagataacaaagcacgattagtttgggattaaaggctactcggccagctagttgtcttaaaacaaaatgaagtataaccaagtttaaaggtcgcttggtcgaccatattgtattggaaaaattcccatgggccgaactaaaaaaaaggtttcacacggtcagagtccttggctctttgtgcggatcagcttggtcattagtggctggagcatcagtgttttggtcagtcggagttgtgcgattggctgccttgaggtcttccttatctttttgggccgtacaataactaagatatgcttccttggtttcattgaggtaatcaaagttcctgtccgggttggccttccagtattcatagaaaatctccagggcggtcgtctccaaatttttgacctccttctgaagcacttgctctttttttttacctggatttgacgtcctcttccaagtctgtcttctcctgggttaacttggcaagaagagtctggaggacttccctctcgtccttcaaagcattgaccttgccggacagagcctgaacatccacttcaagttgggtggtagatgacatatcctgaatctctcacttcagctcctcaacttgtttgtttgtggccaaaagtttcttattgacctcacctagctttgcccttgtttcctcagcctcctttttggctacatccacctctttctgcaagttgtcggtggtggttattgaaagtgcaacttgtagattttaatgattcaaattaccaagttgtctatctttagattgattgatttcaaga

SEQ ID NO: 391439 - DNA, 928 bp, Cannabis indica
taaccaatcacaaaacgacacgtcttaaggtgctaggcagtactggtacccaatagtaatgctagcatatcacacaatataattattataaatatgaatgagctgtcattattataatttatatatataccaatctgttagacttataattaatacgatctaaatgtaaacgcaagatccaaagttataataatagaaaatatttatgcatgcacaacaaacataattaatgctaataatgttggtcctgctccaatttgttgggctgcaagttcattttaggttttttattttttaaattgccaaaatacatttgctattggagaacattgtgagtaacaatagtcaccatcttgaaggaagatattaggaaacattgtcttacatagattaaatgtaaaagtattcagacatatataagaacttgagttacttcactcatcgcaaaatggttttaagatggaacccatgattctcaacatgcccaaacctactcaacctacccctagaattggccctgccgaaaaccaacttcatcgaaactggagatcaacatgaaataaggaatcctaacaaaatttagcatgatcaatcaacctaatcaaaaagtcataccacgataggtattgtggacaatgtcccacatggaataaatggtagagaattgagccatatataagaacatgggctactccactcattgccaaattggttttgagatgaaaccctatgattctcaacatggtatcagagccatatcccttgcgggctacactacaagaattatgggcaataccaacgccttaaagtcctcattaaaaatgaaggtatcaataacgacattttaatgtcgttgggaaagcaattcaattttttttttttaaaaaatatttattaaaaacgaatctttttttcaataacgacaatg

SEQ ID NO: 391440 - DNA, 511 bp, Cannabis indica
aacaaaacagaattaactgtacatcagagttagttattaacagtgtaatatttcaatggttgagaaaggagagaattgaagccaagttattgaggttaagatttctcaggcggctcaaaagagagaggtctccaaagaaaaatccctccctaggtcttttaatttatatagacctaaggtttaacttttccttccatcacgactcaggaaaattatcacaaacattgattatttacttgtataaaggtaataaattacatttaaaagaactatcccaaaatatcctggaataagaaattaaatgtctttagaagtttctcttttaagataagtgggtgtgagagagaatcgcaggtgggagagaaagtggcagaggacggagacacacggggttgggaccgtcaacctggactgaggaccgtcgggctggggctgagagagagagagagagagagagagagagagagagagagagagagagagacgagagtagagagagagaagtagagag

SEQ ID NO: 391441 - DNA, 1194 bp, Cannabis indica
agtatttatgccgcaaatttcccgtatatataatcgggtagtttgggtatgtatatatatctatacatataagaacatataaatgggtataaataggtagtgtttggtgtagtggtttggggtgagagaggtaaaggttagttgttgcttgttttggttttaaggtatcactactacaaaaaagagttttagaggcggttttttagggcatttggcgtcaattttgggcaaaaaagggatcattgctgttcaaggcaacgctgtaggtgggtcttatcaaccgacgatataaggagtacctatggcgtcagtcattataaaataactgatggcataggggaggcctagtggaaattagagactatatggcatcattttttgctaataaccgacgccgtagtcagttatgccacagttattaagaaaaaattgacgtcatattgtttttgatttttaaagaaaatctatttattttttcattttaaaacctaatataatttcaaaaatttaatttatttaaattaaatattaattaatttaaattaaatattatttaaattaatatcatataactaaaaaataaattaaccatataattaaatgtatttattttaactaaatatattacacaaatattttaatattagtccaagtattaacaagttaagatatctaattaaacataaaagaaataatagaaaaaaaaacttacatgttaacataaaaaaataaggaagaaaaattctttcaacatcatttcaggccttcatgaatcaccgccagcaactgttctatccactgtcgctgtaacggtaacaaattagtttttgcatcgtatgtttttttttcccaaaccataaaaaatgtaaatattaatttagtatgtatattagattttttattaatacaataaataagataattaataattaaaacttacaactttttgatcggttaagtaactgttacgatttgcatgtgcaacgatgtcactgatatatttcaatacataaaaatcacattcttaattttcaggttgttttggacaattcactatcgatattcttggatacacctcaataaatgcatttgatctccttaaaatcccgtatacatgttttgaaaattatattaatatttcaattaattaacatatatatatatagaacacggaatacttcttaatgggtatta

SEQ ID NO: 391442 - DNA, 1302 bp, Cannabis indica
aaggaaagaggaggaaggaatataggggatcttttctttgatgagaaggaagacaagaagtttgttcttaaaaagaggccatggttggtaaatgggaccttactgaatataccagattggtcgaaggatggcgtatggcaagatgtgaacatggcggtggctaggtattgggtggaggctcacggactccctactccttacctgacgtggaaaatactgatattgtggccaaaaaagttggggtctatattgacttcgatcatgcaccacaggccactattgcgagaaggggttttcttaagttccaggtggatctacgaattgatcaacaaatagtggatggcttccatcttaatatctctagagataggaaagaatggattcagtttaaatatcataaacttcctataattttgttttaattcttgctatgtggctcatacttatacaaagtgcgagaaaccgacttatacaaagtgcgagaaaccgactgagtttacctaccctctcattggaagagagatgcctttgtatggtgcttagttgaaggcgggagtcccaattaggaactgatttgatcctagcttacctctaatgagaagaagaagaccagaaaacttgccgagaaggagtgttccaattacacctcaagatggtaagagcaagaaggtaatttctagtaacaatgattacccttccatgagtccaggacataggacagtaaggaagaataacgttggtgatggaagtaggggtctgggaggaaatccctctttcgggtatggacagagggagcagaggagggtgggaaaccaactatggatggttcctcctctttgggaaataatagtacattgctcgatagacctttgggtaatacaattcataaccatccaatgactcccatcgaaaatggaaggagagatgagggggtgataatgagttttatggctgatattggacccactagagatcaaatggtagagattcctcgtgaggaagtgtgcaagtctaggaggtctcataattttcaggggaaattttaacaagttttccttactcttacactcgttagttatctgttaaaatctcaacctacatatatcaaaaaaatcgtgaaattttatagagacgaagccaaaaccattgtgttggaagttattttatcaggatctagatttactaacatgtatgttgattataattctataatctaacatcctaaacatgaattcctaaaacaatgaaagtaaacatatataaagtttagaaaatctttcattgatggcagtggaatataat

SEQ ID NO: 391443 - DNA, 802 bp, Cannabis indica
aacccaacccgtgaacagccctaatgacagattagttgtccgggaacatacttttgagagacagataatttttcaagaataacttttagagacatttttatttggataggaactatactacaagctcaatcatttttccttaatcaaattttagtttccaataatcttcatcacttttgattaattaatataatttttttttgtaaggaattaatatataagttaaatcaagttaaaagttccttaatatttttaagcaataaatgagaaatgcaaatttcacatagaatattgtgtatatataagtgtgtatattagtgttgggcctaatgtcttattatgaaagagtctgatttaattggttgttaagtggacatttatatattgatgatcaccttctttgttttattagtaataacatactctatctagtacctttttcaatacccttgttcattaattcttgtagtaatttctttcttctctctgtgttgtttaggtatatgaaatgtacttgtaatcttaagtaacaagaaaagaagatgtggtggtgaaaaaatttatgagagatttatttgttcacattccactctaaaccccgaaacaattagaacatatcaacttaatttttttctttgttcacattccatcaaagggatttatttgaaaaaatctttagatagggatgtgatggggaagtagaatggatggagaggatgacaccgatcgctaatttcgatcgagcccattattagcaaatagaaaaataacttaataatttcatgttagacttttatttggg

SEQ ID NO: 391444 - DNA, 2050 bp, Cannabis indica
gttacctgcttggaaggtctatgtagatggtgcgtctaatgaaaaggggccagatctagggtgatcttaatctccccacaagggcaccagcatcaaagtgctctgggctttgggttatgtgcctcaaacaatgaagcagagcatgaggccaagtcggtagggctgaagttagcaaaggaagtaggggcccaacaggtggatatttacagtgattctcagctggtggtgaatcaaatctctagtgaatatcagacgaaaggtgaacgaatggcttcttattgcaaggattcaagatttacaatatatgtaagattctgagagaacaaaagtcattcgcagacatattggctaagttggcaacaaatcctgagatcatcgaacacagaacagtccatgttgaccattagaagaagtctaacatttaagtccagggggtaaatgcgatagtggataactctcaatcctagatggcacctatttacaaattcatgattacgagggagcttcccgcagatagggccacttccaagaagattcaatatcaagctccccgctacgtgatcatggataggaagttataacgcagggggttgtcaatgccataactgaggtgtattgtcgagatagaaattagcgcggtagtccatgaggtccacagaggtttctgcggtgatcacacttctaggcccaacctttccaagaaaatcctttgacagaggtatttttggcccacaatgaagaaggattgcatgaaatatgtgaggaagtatgatatgccaaagtcccaagagcactgcccaccgagatcacgcttatgaggaacctatggccattcgcaatttggggaattaatttagtacgatccctccccatgggtaaaggaggagttaagtacgcgattttcgcggttggctacttcaccaaatgggttgaggccgaacccatgaacactgtcacctccgaaaaaggctttggattttgtcatcaaaaacatcgtgtgtaggtacggactcccgtataaaattgtttaggacaatgggaaacagttcgacagtgagcacttcaccgacttctatgcctagcaaggaatcgtgaaaagattttcggctgtagcccagccataggccaatgggcaggtggaggtcgtcagcaaaatcctaaaaaggacattgaaaaagaaactccaagcttgcaaggatcactggccaaatgagcttccacgagttctttgggcctatcagatgatagaaagaacttcaacaggacacacgccgtatgcaatggcctatgggtgcgaagtagtgatcccattagaaaccacaatctcctttcatcgacgagatacttatgacccttaccgcaaccattccttactccaagagtcactggacttaatcgaagagctttgggaatagtcacaagtccaactcaagatgtaccaaggccaaattgctcgacactttaattcgaatgtgaaaagtggtacggttgatgttggtgatcttgtcttgagaagagtattcccagcttcgctggaaccgggggttggggtacttagcccaaactgggaaagcccctacaaaatactcgagaaggtgggccaaggtacttttcaactgaagaggatttatggatcaagagtccctcatgcctagaatttagaccacttacgtcgatactaccaataggcggaggaaaccagactttgatgaaatcctaaaagttttgtgtaaagattaatgtaattaacttttgtatgagtagccctcgggggtaatgaaatgaggacaaaaacaatttacatttgagtttacactttacatttttaggtcacaagctatattttaaacaagtggataggaagttggagacgtccacacttctcagctcagttgggggggtatcgtgcctagccgttaggggtgttcgcggtgcggttggtgcggtttttgactattttttcaaaccaacccgcacatgcagtttttcaaatttcccaaaccgcacccgcaccgcgaaattaaaacccgcaaaaactgcaccgcaaaaa

SEQ ID NO: 391445 - DNA, 756 bp, Cannabis indica
ggtttgggtctgggatcggggtcgaggttggggtttggggtccgagttagggttgcggtccgagttcgactttggggtctgggttggggtatggggtccaggtcggagtccgggttctgaattcgagtccgggtctaggttcggggtttgggatcgagtctgggttcgggttcaggtctgagtccagggtctgggtctgggtccgagttaggttcggggtccgaatttgggttccggtccaaggttcgggtccagggtctggggccagggctggggttgaccttataaccttagtaaatattataatacaagctaatacgggttatcttctatgtattaaataatacaactcatattgtattaaaatttatggtcgtaataattaatacaatataatattttatccaaacaggcatattgttaattattttttaatacaatatatataaactcttatacgacttgtcaaacgagccctaatactatgttttgccactaattattactttttgcaaaagtaggatgaagttttataatattatattctccatattttaaattgtgttcaagcaatgatagttcgacatgggaaatatttaattttcttttaatattttgactattttttttgctcaactaattctatttaatttttatgggcaatttaaaattattttgtacagttaaattcacttgtttattctcacaaaaaaaaaaatcttacttttagtcccaacaaaacttgtgactaaaagt

SEQ ID NO: 391446 - DNA, 589 bp, Cannabis indica
agagagagagagagttatgttttagcttgattttctaacttgaaaaaatgaaaataacctaagttaattgttttattcttttaattaaaatcagccaagatattattagaataaaacctaattcaaactaatggactaaaccaaccaataggaagaattactattttacccttacttaccccttaaaaatctttaggcttaagggtaaaatggtcaaaatttacaaccctgcctaaacccaatatctcaaatatcaatactacttgccctgctaaataaagattctaaaccaaacccatgtgactcaatggccaaaccgtcgcatttctaccattaccgagcaataatcaccaaaatattaaacttcactcttatcaaatataatagaactagagtttaataaaatttatagaattgaaaaattataactcaaatgcctatttattgaaaataggatccacatcatataatatattaattaattaagggaaatttgacattttatgctaaaaaaatgcacgtggtgttattttatacacagaaaatatacatttgataattattcttaactttcaattttgttccaaaa

SEQ ID NO: 391447 - DNA, 1587 bp, Cannabis indica
ctctcatttatatatatattgataattaagttaaagaaagttttatttgtactcaacaaactctacaaaattataagtatacttgaatattaaaaaataaaattaaaaaataactcttaaccttttttaatgttttttacattatttaatgttaatttaatttattacattaaattttatatatatatatttttaaattatgtataatttttttaaaattttatctagtaaaattttacataattttttattttacttttttatcataatatttaaaatatattttaattttatttaatatgtatatttttttaataatttgacaagaaagaaaatatttaaaaaaaaaactatgttgatgcaatttttcgtcaactgatttaagaaaattgtatataaagaatgattagactcaaactaaatgatttttgaaaataaacgtgtttaaataagaaatataatcagacacaatatttttatagtggttcaccctttgatgtggcagtaattgactagtccacttgttattttattgattaatgctcaaacacactagaattgtattctcaagaatatgtttgagtgattataacgggcgagatccttaatgtatatctctttagtgtgtctttgtaagtgatttcttaagaatcgctaacaaactctattctgatgagtaaggacaagggatttttgaaaaattgtgaggagaatacttttctcaatgtcgttgtcaatgagtatgtgaaatgggatgtcaaaagatgattctcttgataataggagagtcaaagagtcgatccctttcctaggtctaaataatatgcctataggtgtaaggttttctacccattccccacaatccgggagattgattacaattattctgcactttacatttaataataataaaagatcacataaaaaataaatatcttcttctagaagtagataatctttgaaagtcttctagaagcttccatcgtcgagagataagttaagaatatgttgaaggggcctctccccttggaaagaactcaccatgggcgagtattgaaactgagagagtgtcactactcatgtggcatgttggtgggtgaatagtgacaatctgatactaattaggtgtcagtactcgtgcacatcttcattgttggacatctttatttatcttgaacaagtccgtgaaggttagcagacatctcttagagttttgaacttaaaatcacccaagaatctcttcttcattgaattacatgagtaggggtgttcataaaatagtcgatccaatccaatccaatcagcaaagtgcggatatccgcacttgtgcggattagattggagtggaaaatttaaaatccgtacttgtacgaattggatgttgattgacatgtaaaagtaaccgatccaatccaatccacacatatttataaaaaaaaaaataaaaattaatatatataaattacatttaatgtaaagaaaatagtaattaaaagtactaatacatatataatacacttaaatttactaaaacttaataaatacaaatagtgtattctgttcttaaattttttttactttacatac

SEQ ID NO: 391448 - DNA, 1260 bp, Cannabis indica
ataagtcaattagtagcaaaccaatacatgtttcacaaattaacaataacactatgtgtaatatttgtaggaacaataaggttggggacatatggaggatctagacaaatgcttcaaaatcctttgtagctataacatggagctcaaacccagaaaagatccaagcccttttggacatgaagtcacccgcaaccatcaagaaagtacaaagacaaataggatgcattgttgtactaagcaaatttgtgttcaaatctacagacaaatgtgtacccttcttcaacattctcagaggaaataaaaattttgagtgagcaaaggaatgtgaaactgcattccagagctaaagaaacaattggctcagtcacctgtgttgcccgaacccctagacaaagaagagctaggcatgtacctagcagtcacagaacatgttgtgagtgttgtcctcacaagagaagaaaaaagagtacaacaccctttatactacatcaataagagactaatcgatgctgaaattcggtacccactcatggagaagctgaccgtcgacttactcttggcttcaagaaagctaaggccatacctccagtcttacccaatagaggtgtacactaaggccacctgccagccaagcatgggcaacaaaggccaagctctcaccagcttcatggctaatcatagaagcatatctccccaaatctctcaaagtttggcagaaaagtaggagccaaagaagaagggagagcaagagcaaaacaactcaacccaagaggttcattgaccacctgcccgatgcaagcatggcccccagggcacctgggagggcaattgatgcacgaggcaacaaggtcagttttaaagcttctaacaacgaggctaaacatgaagctccaaatgttggcctcaggctagcacacaaaatgcgggctgaccacctagacatacaacatgactctcaactagtcgtaagttataccctacgtgaatatataactcaacacaagaagatgatgacctacctgagttgttaagtcagctcaaaggctgtactaaaaggcaagccccaaaagacaacacaacagccgatgcactcgatcgactacctagttatgccttgacaatcaaggcaaacttggtatccattcagtacttcaaagaactaagcctccttatttcaaaagaaatagacttgcttaacaatcaacatggatacacctacagcaacatacctccaaaaaaaaatcttgccagaaagtaggg

SEQ ID NO: 391449 - DNA, 2479 bp, Cannabis indica
tatatatatatatatatatcaagccaacaaacacaagtcacccacccttcatcaaacacaagtcacctacccttcaaaaccttcaacttttgagctcaggtcctagctatttgttattttctataatgcaagtacatttgaatatgatacattcaatttttatatttgatcataatttattttccaatgtcattttggatatcttgcagctctaattctagcaccaagaactataattggacttttatttcttattggtcttattatctataaatggaaaagacgacatttgtcaatatacaaaggcattgaggaatatctccaacgacaaaacaatctcctgcctataagatattcatatttagatattctaaatatgacaaaatgcttcaagattaaattaggtgaaggaggatttagctctgtgtataaaggtaaacttcgcagtggtcattatgtagctgtcaaaatgttaagtaaatccaaaactagtggggaggactttattaatgaagttgctacaattggaaggattcatcatgttaatgtggttcgactagttggtttttgtgttgaaggttcaaagcgtgctctagtatatgaatttatgcctaatggatctttaaatagccatatttttattggatgcaaagagagaaataattccataagcgatgagaaaatatttgatatctcacttggaattgctcgcggtatcgagtatcttcaccaaggatgtgatatgcaaattttacatttcgatattaaacctcacaatattcttttggatgaaaattttactcccaaggtttcagactttggtctagcaagattatgtcctttagagaataatatagtcctaactgtagtgagaggaacggttggttatatagctccagaattattctacaaaaatataggaggagtctctcacaaagctgatgtgtatagttttggaatgttgttgatggaaatggctagtcgaaggagaaatttgaacacacaaatagatcattctagtcaaatatactttccattatgggtgtatgaccatgtagacaatgtagggagcattgaattggaacacaccatgaatggggacaaagaagacaaaaaaacaaaaaagatgcttatagtagcattatggtgtatacaaatgaagccttgtgatcgtccttcaataagcaaagtcatagagatgttagagagccatgttgagtctctagaaatgcctccaaagcccttcttgtatccacaagattcttataatatcgtagctgatactactaagaagacactaaatacaacatgctcatcatcgctttcatacaacactaattaaattttaatggtgattcaaatagttactttttaattgatgttgtattactttatttatcaatctatatagttgttattgtactcaaatgttataaaatatcatttttcttataactaaaaggatttgtatcataaattatgtaaaacaatttgttttcttttgattataagtcatcaataatttatcttggatcattaagaactaaaagtgaaggattagaaaaagagacaaagaaataaataaattgaaggattattgtaaaaatgctaaaataccaacaaacaaaagactatatgtgtttgtatgagaagtgaatccgcctacccaatggatttcatgtcacccactcatctagaatatagtgataagtctctatttcacttataaatattgtcaatttatgtgttaatatacttaaattgaatatttatattattaattagtgtaatttttatttttaaggctattttgaagaataatcattcatttggagtcgtttgaaaaggttttaacacatttatgtggaaaatagaagaagttcgggagctcggtttgactaaatagaatgtacttttaaattttgatagctttaaatgcagaactgcacttggagctccacatcaaagttgtagatctcgttcttaggttttcaaaacattttaaatcgtctaattctgagttatattgaaggagttatgaaaaaaaatattgatctgagtacatgacacgaatttcctaggaacctatgcccaacacttaagcaccactgggacagccagaggacgtatgacatcggtacaagttgtggaaaacaatttttttaattagatttaaatggatttttagggttatatgaatatggcttttagactttattttaagggagtttttattgaatttttgagagaaaacttataaaaatggatgaagagaaagattacatcatcaattctttatcaatgtagttattttattctcctatatctttactttttaattatgattacgattgtgattacgatgattagtatgcagtagtttctttgagtaatttgcggcataaccttcttaagtgaccagagttttgtaactaacccccaattctaaaatttttggtggtaaaacttcctaaaccca

SEQ ID NO: 391450 - DNA, 1768 bp, Cannabis indica
gagctcttggaatacctagagtcaattccaggtcaaattttacactcaaacacattcacatagctcaattttccttcatttttctttcttagatgtaattatttcgtgtatggtttcggtgcagatgaagatatcgagaatatgttaagccgcggtagaaaagtgaggtgcttatgggtttatgctcccgactcgtctccatgttcagccatggaagcgattttgtgggaacttcaaagaaaagtaaggcagtttcaccactcaactgaaaccttctggcttcacaatggaacttttacaaatagggatttggtcaaattttcggattggaaatctccattgcctttgccttaaaattttcatttcaggtggtgctcttcttctatatttcaccctctgcatatttttgtagatcattatgctatttattttttttttcatttatttagttgcatcaatatcctctctcttcctccaataattttgtagtttatgtatgagaaatatactataatgggttcacctcaaatctaaaaaaatagaaaggaaaaggaaaaaggacaaaaggactcgaagttgaaacttgtatcaatatgcaacatttagtgtaatatgacttaatgagttaccaaaaaagtgtattttgttatgttttactcttttttttttacactactatcctaaacaactttttttcttagaaaataaaataaagaaattgataaaagaaaaattacgtttctaaaataacttttaagactgtatactacatgataaatttttaatatgaaatagtaataatatgtatacatcaggataaagcatgggggaattataattcatttttggttcatcaaatagaaaattaactaaattatatttttgaaattgttataggtatttaaccgtttttagttattacccacgtattaattttttattggtatatttaaattaatttttaataaaaaataaaaatttaataatttagatcaagtgtctgcaatgtggtcatttacttcacacttaatgattaggtaactataaaaaagttaaacttaaatatttatgtgagaaattactcataaaataataactaaaatttacttttacttgggattatgctgacactataaaaaagatgatgatttaggaggaatggatggttgaattttgctcctcttgaaatgattgttccaatcataccttctctggccttgaaatggccagagttggttggaaattgcaatcaaattcatgcctttggcgacttcgatagacatgtctattcatgtccaacaacttttgttgacggtgattggcaagtgtattgattttgtgagagtgtcaacaatgcaacctattgtgtcttgctctaggagtccttgttaatattttctatgaaatttagccaattaggatttaaagaaaaaataaaccaagcattgtggcccactgttagcaatgaagcttgtctctttttgttaaaaatggtatctaagcaaggtagatcttgagattggatggacctaaggaaaaagaaaaattattgggctctttatttaaaaaatataaagtattttcgaaaattattaaaatattttatgtataattttaaatagaaaatatatttttgggccattgggttgggtggacccaaggtacgagcctagtcccggctcgaccctgcatctaaggactctacttgacggagtatattagaaaatactttttttatttatcaattaatcaaatttatctctaattt

SEQ ID NO: 391451 - DNA, 596 bp, Cannabis indica
ctaatcttcctcctttttatattatctattttaaaaataatattcaaacataacgtatctttttagattgtcctattatgtgagattgtttttaattatgcagatatattaagcatataggcagattttaagtatggagtgtgtggaaagttatgatttaaatagaattggatataaattagatataagtacacaatttgatatgtttgtggggattataattaaacataattatattttgtaattattaaatataatattatttttttatatcattactaattattttctcaaacattaacaattcatatataattactacatcaattcatatataattactacattatatttatctcgtcttacacagtaacttttaaatacactccaaatatatattaaaaattatttaagatttttatccttcaaactatgacctatgtataattatactcgtaaacttttcagcttgttaaaaatactctctgaattattcacaatgttgtaaattgatcattttgtcaagttttatcacacatagcaaacaaaactaatgacatagataattagacaattgtcatttaccactatcaaca

SEQ ID NO: 391452 - DNA, 826 bp, Cannabis indica
atattaggaattctactagtaaattattagaaatttttcaaaaatttacaaaaaataatattataactatacggaatagtgttatgaaatgaacatctttgagtcaaaactaagatctcaacatcatcagattaaagttaaatgtaatcaaagataactaataagctgagcttttaatacaaattcaaaggccacaatttcaattgttcaacagagtttttcatcataattctcaattcaaaaacattgtggagaaccccatttaggtatttaatcaaatcttataaaaaaacaattaagggcaaacaattaacacaaattcacaatctaacccactaaccctaacaaactaaaaatcgattctttggtccattaactcaaaatcccaaaatcaaatcggagaattcaaatatattaaaaaaaaaagacattaccttggtgagaacgcagtcgcgcaaagaattcaaaagacggatgcatttgtgttgatcgtaaggagattgagtaacgcaattgagaagatcaagagcttcctgagcacatacgggctgagcatcagaagctggagaaagttccattggattttcggaattagggtttcgttttctagagccttcttgataaaacctcgcttaaatctttgatggattattttctattttgcggattgtttggttctcgggaaaaaaaaaaaacgtgtcaagaccactttcagttacttttacccaaacaaccggcaaagcacatcgttttccttaataaaaataaataaattttataatgaaaatttaaatatataaaaatatttaacttttttttttttttt

SEQ ID NO: 391453 - DNA, 982 bp, Cannabis indica
agctaggcatactgcacaaactcacagcgatcaaccgtccaatcaagggccacaagtccaaactgtgggcaaaaaggtagatggccagatcctgctagatcgtcctttaggaggaattccgcattccaacaacttcactactactaacgtctcaggcctacctatcggccaaataagtcagacaccaaggtaacctggtacttacgtttttgataggttgggtagcgcacatgacctcagaactgatctaaatcacaaaaggggtccactgactgtccaactaggtattcatacccaagatccagttcaaagtgatcctaatgtgacaaaggctagttaacaagctgaataagttcatccacttgtgcaagcacaaatatatcaacataaaaatatggtacaaggtctgactggcccaaaactcactgatctcgaactcgaccgagcatgcggatcacttttgttgcctgaaattgaagttcttgagctacccccaaagttcaaaatcccaacttggaaaatgtagacaggaaaagaagatcctttatcatacctaaaatattttgagatgcagatggatctgcaatgggtaaggggtgatgtacggtccaaaatcttttctaccacacttgtagaggctgcccaacaatggtatttcaaactggctccaagaaggtttaactcatggaatgccttctcgtcagagttccatgcacagttttcctcctcctttcagcttccctcacacttggaaggtctactagaagtaaagtgaatgccaagagaacccttaagagcttttatcagtaggtttatgaccgaagccacaaaggttaaggggctggctgaagaaggaagactagctccaatattggaaggcattgagcctcttggagagttgtggaaggacatttaaacactaactgtgggatcaatggcttaatttttagaccagtcagatggatttattaagctcgaagaa

SEQ ID NO: 391454 - DNA, 763 bp, Cannabis indica
gggtagtatgtacttttttgctcaaaatgtgagctctgccatgtccaaatggcaattttcagttgtgcatgtactcggacccctcaaggtaatttttgaattttttatggtgaaccatatttttggggtcccgggaccccaaaacctaattttgacgtctaaaaccctaattggagaccactgtcaccaattggtgccaaaaggtggcagtggttggccatggcttatgggaagccttggatggtatttcttgcttattttagtcatatggacgctaaaaaatcactgtggtcacattggttcttggccaattggtgaagagagcaccgccatctttttggccaaaaagatgacaatggttacctataagggttgtacacccttgggtgatttttctcacttttatttgatacattgatgttagaaatacactttccaaagaaactcctcattcttagatgtggataacctctgccactttttatgccacaaagatggcagtggtcaactaagtggtttctatacaacttggtggtttttctctcttgattttgacatgttgatgatgaaaaagtacttttggcaagaaatcatatccccatttgatgtggccgacctgtgccatttatttgtgcacaaagatggcacaggttggctaggcttgttccttggtgggaaatggtttctttcacctatgttgtactcttgggtgttgagggaacacattttgacaagtctcctttggtattttgagagtagagag

SEQ ID NO: 391455 - DNA, 688 bp, Cannabis indica
taaccctaaaagaaatacacactttaatcggttaaggctcaaatgattataattaattaagatttttatgcgtatgcttgaagtttttcgttatttgaaaaaaatatacaatgatttatattatgagtttttcttttattaataaagacttaaaactaataacaattactctttaagggttgatttcggcactacaagctaaagttacaaaatttgattatcacagcaaaatcacacccaaaatctaataaaaataaaataaaatgctataaaagtaaataaaaaaccacactataaatttgaacttaaaaggcaccccaatccttactaaagccaccaataacgagccccatatacccatccatcggcaacaaaagagaaatgtccccttcgcatttggatctaacctttcgagcaccaaccatcaaagcacccaaaaagccctaaaaactcaggccatcacccaccaatgtagcggctctgagcaacaacgaaagcacaaaacaacaccttcggtggagaagatgatgaagtccccaatgatgggttaccaaaaaattagaaaaatttacaataatatatattttttattactaatgtgcacgtcagctaaatttgatgttttttttaattattatcttcttatatttttaaaataatttttagttactaatagtattgataaaaa

SEQ ID NO: 391456 - DNA, 1038 bp, Cannabis indica
aatattttattggatattaaatattaaatcagtaattaagttgatttaattcaatatacttaattaattaattttatgttaatacatttaattaaatagaaaattatatttaagttaaaaatttattaattttagatcaacttaaattagaataattttcaaaatatatgttatttttatttcaaaagacattttttttaaaaaatgttagaatttcaaaaattaaaagtttgaaaattaaattaaggttaaacattaatttcttaattaattttggatcaacttaaattaagtaatttttattaatgattaattaaaataaatagattaaaatatattgtaatcagaaaaccaacacttagtttatgaaataaattatagataattaatttctaagcaaactattttgtattttttctatatataattgaataacaattaatatttaagttgatttaattcaagatacttaaatattaaataaatttgtatcatttagttaaataagagaattatatttattgttgacctcaaatttgattaactaacagtgaagccttatttataactgacaatcaccacgtgtaaatagtaaaagcaaataaagaaattgacacaacaatttatggaggttcggctcccttattttatgagtaatgacctactcctcttttagttttatttatttgagagataacatcacacagattacaggcttttaccttgtaatttctagctatggctctctttgaatgttgcaatggtgagaactgaatgtatgatagattctgaacaagtgagatgagaaaatagacttagtgtctagtaaatgaaggtggtgcgtcagattggagaagcaagagtgctctaaggctttgaggattagaatttaggtccttttcactaggcctaatgccttttatatagcttagggcattaggcagaatatctatatttaaataagttaatatccctaaataaataggagatattactcttttatcatataattaagttacaaaaataactaactaatat

SEQ ID NO: 391457 - DNA, 1774 bp, Cannabis indica
gcagcagcaaatgaagcccttactcgaccttacacagccattgaagtctttgatgctctctcttcaatgaagtcggatggcagcccaggactagatggaatgtcggtgatgtttataccaactattggcatattgttagtgtatcttttggactaaatctgtcctgcatattactgaatgaagggggtgatccatcttgttttaacctaaacattaataaccttgattcctaaggttaaaaaaccaacaactgtgactcaattgaggccaataagtctatgtaatgttctatataagctagtgtcaaagacgattgtactccgactcaaaccacacctatctcatgtcatatcaagttcctcgagtgctttcattcaatcccgtctcatcactgataatgttttggttgcttttgagttgttgcactctctcaagcatttaaagagaggcaaagaaggttatgctgccatgaagcttgacatgagtaaagctttcgatagagtcgaatggaattttcttgtgcgagttatgtgtgctatgggttttcatatagttgtggtgtcactcatattacgctacattcagagtgtttcttattcttttttaatcaatggctctgttcaaggacatatttatccaagtcgtgggatttgacgaatggatcttctttccccatactttttcattatctgtgcagaaggccttcccagattattccaacatgaagaactttgtggtcatttacaaggcttaaaagttgctcgtggtgctctaactgtctctcacctcttctttgtagatgatagcttagtcctctgtcgtgccaatccaagatctgccaatgcggttaaacagtctcttgattactattgtcgtccctcaggtcggaaactaaacttagaaaagtgtgttttgtcattctcaccaaacactttgccttcgatccaagcaaatcttcaacaacttttacttatgccaattcaaccttgccatgagcgttacttgggtcttccatcttattcgggaaaagataaaaaagttctcatcggtgagattaaagacaaactttggaagttacttttggcctggcaagaacagttactttccattggtgacaaagagattcttctgaaagatgtggctcaatcgatgccgacctatgctatgaactgtttttgcctctctaaatctataattaaccaaattgaagttatgatgaataaaatttggtggggttcaaattctttaggcacgggtataaattggaagacatggaaggccctatgccaatccaaggttgaaggtggtatgggatttaaaagttttattcactataaccaggcttggaggattttttccaacccaggatcactactgacccgaattcttaaggctagatatttcaagaattcttcttttttggatgttggtcatggttcttacccttcactcacatggcaagggatcatttggggtaaagaacttttatccaaagacttaagatggaaagttggtgatggacaaaatatactttgtgcaaatgattcatggctaccaagtatttctaatttcaagccattaatctttaatggcattgacagaagcttaaagactcctttgtcaaagactattcattgagtctgatgtagaaaaaatacaaagtatccccttgaccttgtactctcacccagatcatcaaatttggaaccatgaatcaaatggcatatatgttggataatttattttaccaagatcttagatctactcacaagta

SEQ ID NO: 391458 - DNA, 1266 bp, Cannabis indica
ggatcaactccatgtcattgatttgatgaaagggaatggggaatgagatgaagagtttgttagagctgtcttcaatccaacagatgctgagttaattcttcaaatggccacttcggaatgtgatattgaagacaagatcctatggcattatagcaaggatggggaatattcagttcgtagtggctatcgtatggcggcggctttacaggtcagagacatccaatccgatacagaggctactgagaggtggtggagacaactttggaagctcaaaattccaccaaaggtgaagcattttgtatggaagatggcccatttttggataccaaccaattcggcccttgctcatcggaaaattcaggttgagccttattgtactcagtgttctagtggtgcatatgaaaatgtttttcatggattatagggttgtagagtgaactgtgatgtttggaaaacaaccgggttctctggcaaaatcaatagacaaggcaaagaggatgttgttacctttttgatgagaatgtcagttagtttggcgaatgaggactttgagttttttctagtcttgtcttggaatctttggtatattcgaaattcgattaaccatgggagacacaaacctaaggctgctgctattgttgaatggtgcagcaagttttttgctgaatttcgagatggaactgccccgaagaaggatggatcaaagaggtctgctgctcgttggattgcaccagtgcggggttcttttaaaattaatgttgatgctggggtcaaagggggggaaggattagcgagtgttagctcgtttgttcgagaccatgatgggcgtgtgagtggggctgttgtctgggtagtgaggaaagaattaactcctcttcatgctgaacttactactattgcaggtgggcttaaggtcgggttgcatcagaggctgccatcttttactgtggaaaccaattgcttgcaggctgttaatctggtgttgaaagatgaagggggttgtagagatgttgatggactcattacacatattagaagtcttttgcaagatgtaagggttcatgggatctcttttgtttataggaaagcaaatcaagttgctcatgtattagccaatgaatctttgattaacaaagctagtgccatgtgggttggggttgttcccccttgtgcgagacaagcggttcagcttgactcgcctaatcctgtgtaatgtttgtttgaatgaatgaaatctgtttccaaaaaaaaaaaaaagtcatatag

SEQ ID NO: 391459 - DNA, 693 bp, Cannabis indica
aaaaaaaaatagaatgtaagcgaaaattctgagacccaaaattcagataatcgttgcattggctacattaagttggctaaaagatttttcaccatcagcagaactctactataaagagtgcgaaagagtaaagaaagggatcggaatctctttctaaattcaagctttattcttcttgtgctttctctctctaagctagaatctttatttctcacttaagccttagagaatcttctgcaagaagaccctctgaagcttccatcaatctaagaagaggatcactagagaaggaaatagttgaaaatgtaggggaagacttgtaggaatccacagtatactggaaaatattaattcccaaaaatagaaaatattttcctgggcaaatattggcataagtagtcaaagttttaactttataagcggcataaacccaatgtttattattaccggcataagtgttgggattttttatgccctaaataaaacacatttcaatctaatctggtttgttatcaatgaaacattagaagtcatttatgtttacatgtagttttcatgtttatggtttaatatatacaaaatctgttatgtccagaacatatagtcattcaaaattatagtgatctcaacacagtggaatgtgattgtgattatatgcttcaaaagaaaaagtccctgattcatcagtgcaat

SEQ ID NO: 391460 - DNA, 620 bp, Cannabis indica
caatatccctaatatatatagtaagagcaatgcttcatgacttgaaaaattgtcatgaattatcattttaaatgatgtgagaatatatttttaaaaaaataatacaaaaaagtaaaatataaattaataaagtaaaaaattataacataccatatcatttataataggtttttatgatacattttcatgatatataacatttttcatatagtcatagccataagttataattagctacaatatatttcatttattatatcatgtgtacaattttcgacgaaacaaagtttcatttttcttcattttttttaaacaaaattgaaaaataaaatactataaaaaaataactatttaatttagtcacaatataaattttttgactaatcataacttttaatcacaacaaaaaattacttgtaactaaaacataaatttttattaaatgttctcactaacaaaatagagagtctaattcataacttttacaaaacacaaagtccaaaatagtatttatcctaaaattaataaatttcacaacataaataaataaataaataaaatggccgcatagagtacaggtgggtagggctgtacataaatttttgtaaaccgcctaaccc

SEQ ID NO: 391461 - DNA, 967 bp, Cannabis indica
tacaatttagagtgaagctagcagtaggatgagagtgggaatgagagtgtaccgtaatctgatgcatgtgatgggagaattccaggatagcagctttcattgaaaataacattgcgtgctataaagatccgtccttgagcattttcacatagatagcctttgtgataagaagaatagccaaggaatagacattgtccagacctgaaatccattttatgatagtgatacggcctaagatgtggaaaacattcacaactaaatggcttcataatactgtagtcaggttgtatgccaaagagacattcaaaaggactaatgttgttgagaacaactgtaggcaacctattaatagtgaatgtggcatattgaaaggcatgccaccagtaggtaaaatcaaatttacttttagcaagtagagtaaggccagtttccacaatatgtctatgtttccttttagccctcccatgttgctcatgagtatgagggcaagggtgagaaaataagataccttgatcatttaggaatcttttaaaaggtttgtattcaccaccaccatctgcttggacagcctttataggaaggccaaattgtttttctgccatgcctttaaatttaagaaacatctcaagagcttgggatttgagaaccagaggataaatccaagtgaaacggctgcagtcattaataaaatggatataatacttgaaatcatctttggactgtatatgggagggaccccataggtcagtatgaacaagttcaaggggttttgtggctcgatatgtggaaattgggaagggtaatttgtggcttttaccttgttgacaagcatgaaaaaactgaagtgtttttaaggaacccgtgtggggtatatgagataatattttgcacaaggtggaagtagagtgtaatgcccggaattaagaaaaagattagcaaaaccctaattagataattatgagttaat

SEQ ID NO: 391462 - DNA, 1404 bp, Cannabis indica
ataagatgagtattcctaaacataaatttattttctcgcaagtagttaatactaagttgcttactagagaccacttgaacgagattggcatacatttggagagcttactttgtccggtttgtggtgttgatgagaagaatcacgagcatctcttttttaattgctctttttctccgttggtgatccagggttgaaacgtgagatcaaagattgaagctatttcggctgtcatagtagtagtcacttactatatatggaataataaaaatactgattgtatttttatttgtgattaatgaagattcattctttcttgataaaaaaataataattaaataatggttaaataattaaattttcttaatataaggttctcgagaaagatatgcaaggaccttaagagcatgtccaagacacgacaaaactttatatatgccgtgattttcttccaaggagacagtatttctgccagcattttaaagttttgtctagtgcatgacatatatgttgtgcactgtagtcacgacatatatatattttttttatataatttaattaatatttatatatttatattattatatttataaaattaagaattattttttagaaaattttgcaatgcacatttttaaaagtaatgtacgaatctactcttatttattttggcacccgatcgatttttttagtctatttttttatatagtaaggtatattatagttattttaaatatttttcaaaattttaaaaattttaaaaaaatctaatacgccaaaaagtgcacttctttaaaagtagtgcattcgagatacttatttagtctttttttttatggttgtgtacattagttatttaggacatcttgtaaaattttaaaaaatttaacacgccgaaaataaaattcaaactttctattgcgtgacttttttaaatataactattgtggtaatttttattaattaatatggtattatttttttattttattaaaaaattaatataataataaaaaatattttttagtataatttttaatattgtaattagagtgaaaatactttttgacgccaaatttaataatagtataacactaaatttagtgtatccttggaaatgctcttagagacgaaagaggggaccaaagtatgaaagtgagactcacacttttatggaagatgacgctaagataccccctaggcgaccctttggtccttaccatccaaatagccaaagcactgagtgaagaggtgcttgaaaagattaagctcactgtcaaggaggggtgttcatccgatccaatccgcactttttggtcaaacaacatccaatccgcactaagtgcggatttcatattttggatccaatccgatccgcataagagtttaaatccaatccaatccaat

SEQ ID NO: 391463 - DNA, 696 bp, Cannabis indica
aaaaaaaaaaaaaacccttaccaatgacaacgtattatatgaagttactctatcgacaacatgtgaaacaataactttgatccccaacctcctttaaagtttcattttatccttaagactttctttatttttgatgctcgtgcctaaaactaacatatttgtgttacaattaattatttattattgactacaatgtaaagtattactaaaattaataactttattaagtaccttttatttgttagtgttatagtaagcattgcaatctttccaaacctctcagttactctgttcggatgtaacatgtctatcctctcttgtccaagcgatccttaatattttcgatccattttttcttacaatcggaccgccaatcacacaaaccctttgagtatatctcgtactcatgagttaccatagtccacaaatgcaagaatatttcgcgtgagcactaactttgcctgtaaaaaagttacacatgcacattagtacatcaataattagaaatttaagaataatacatgaaattataaatttaaaaataaattacctcaaatctatcccattatgcattgatttcatctctggaaacatcttcccatttgaatttatttatggggatggacatgcggaccatctatttacacatgttatttgattttttttttttttatttttgctgactaaggtgcccgt

SEQ ID NO: 391464 - DNA, 1346 bp, Cannabis indica
tattttaattttttttttaaaaaaataacaataaagtaagcagctttagaatatctatttgtgatatcaaagtaattgaaattctccgcgcttaaacatttaaccattatagtttagctacttaaaatgatatactacatacatacacttaccacaacataattgagccaagccaaaatattggaagtaatcgagagtccccaatcaagaagacttctcagggcatatttgatacatccaaaagaagtatccccactagaattcgcgtatatactaaaggaatctatcaataacagagtcttgaggaccaatgatccagcatacattaaacaagtcaatgagagaggaaacaccaaagcttgccactgtttcacaaacacaaaatttcaattttagcaagcaattacactcttcaagtgacataatactacaataacaagactacccctatcacgaaaaagagtgttccaatttgaaaattccttgaatcgtaaagaatgataaaaatgggcaatgagatactcacaatatgatccattcgaatgcccagaacgccaagaaaatatgagatttccctgcttctcatctggctttacacagtgagaaaaatgtaagcgtaattctaaaaataatagatatttcaaaagaatcccatcatagataacaaaaatagaaagcaaaagagcttgaaatctaaagcttttaagacacaattttcccacctcaaaattaatggcaaagaagtgaaaatatgaaatacagtagagaagcttacgggaagaattagataacagaagacgacagatacaagagacgaagtagcggcacatatgaaccgtcggatcatgaagtctttgtagagcggcggaggcggaagacgaaggactaaagtgggagcatagaggatggcaacgtaggataaggccattgcggcgcaagccaccgccgccagtggtttcgaaagggctccttcctccattaatatgggtatactgaagtgaagaagaagcttctgaaattgaaaacccaaaagagaagtgaaatggattatggaagacaaagaaagatggtttatacttttgttgacttttctctgacgttcttacctgcaaacttcatcttcgaatctcttgtctgcctatatcttgggccgataataatgggcttctaactattgggcctctaggcctaatttgataggaatttaacataattataagtaattataagaaagacttataaagcaagtttaaaaataccacttttattaatcaattgatcaaatttacctttaatcttatatttaaatgaaacatacctctttttatatgtattgtacctaaaat

SEQ ID NO: 391465 - DNA, 1312 bp, Cannabis indica
ttgtgttttatttataatcatttttagaagttcatattttaggatgtttaaacacatactgtgagtagatctaagattactgggtaaaataaatttccaacagatatattatataatttttttttaataatattatatttattttatttttagttttttactgtaggtatatacgttttcttgtatggtatatggtttttgttgtctattgtatattatttatttaagatgagattttattatatataatttttttggtgtgtactcatattttaatagtggtatatataattttgttatatatattttctgagtattaatttagtattgttataatttctttgtggcatataattttattactacagtatattaatttttagtaatacgatatatcaaatactactgtatatatttaataatttaatatatttattcatttttgttacaatattataatatataacttaattttattatatatatatatatttaaaaaatatgtgataaatgtatttttataattcttatttgctaatttattatatttgacaattttcttaatttttttaaaaaggggacatttactaacttagtttccaaatttatggtcattttgcatcccagtcattcttaaaaaatatacttattaaatcaaattaaattatattttaaatattatgataaaaaattatatgaaattttattagaaaaaaataaaaaatatatacattagttagaaaaattatgaaaataaaattaaaataagtattgaaattaacataaaataatgttagaaaagttttttttaaaaaagatttaagagtaatttttaaaaattatttaagtttatatttttttttaataatgtggtgtatttataattttatggggtgaaaaaaaaaactattaaaattgataaaaagggcttaacattttgacattaccgcatcttagtagaattatgagcgaggtatttttgaaagttaggcaaaaattgggtcatttttgagagaggggagttttatttgtacccacgagtataatgttatttttttttctaataagatttatatatatttttatttttttctaataaattatattttaaatattataacaaaaaattaaaataaggatatacattttatataaaatagaaaatatttgaaagggatatatttataagttttttgggtgcaaataaaactctttttttgagagtcaaaatgttgtcattttttaagggaaatttgactaaatatgcctacataaccttaaaattttttccctaaacttataattaccaata

SEQ ID NO: 391466 - DNA, 902 bp, Cannabis indica
ctaaacaaaggaaacttccttttgtctctaatcataatttcagcaagcattgtttaaatttaaccatatagatatttagaagcatttccataccatgacacatgaaggatataggtcttttcttaccatagttgatgattgttctagatacgcatgcatacacttactcaaacacaaatctgaagccaaaatagttattcatgtcttcataaatcttgttcaaaaccattacaatgcgaaaattaagggatttaggtctaataatgtcaaagaacttcaactcatagagttgtttaagtcccttggcgtaatacaccatcactcttgtgttcaaagacctcaccaaaactcaatggtagagaggaaacaccaacatttgcttaatgttgctagatcccttctatttcaatcatacattcctttagtctattggggagaatgcattagtattgccacatatggctcatacgtgtaggcctagcccacacatgtaggatgacatataaaggctcgtattaattttgtttaattattttattagttaaaataatttaaattaaattaattaattatctttatattattaattaaatatattatgagataatttatttaatttaaaatataataataaaataaaataattttaattgatttctattaatcagctattagatatttatatttaaatttgaattctgagttcaaatcaaattagatattttcttttattttaaaagaattaattaaatggtttattgataacattatatataggatatatacatcataataaacaaaacaaacgataaggaggtagataaacaaagagaaaataggaattgaatttttcactccctctctctctccatgcacgctctctctctctctctctcctcact

SEQ ID NO: 391467 - DNA, 668 bp, Cannabis indica
ttttttttcttttgaaaaacttactccacttttccatataagaaaagtgggctgggcttaatgtttgggttggcctagttgataatttatggtttattctatcttagaactgcaggtagcaagtgggctgggcttaatgttcgggcccagttgataacttatggtttattctacaagtccacaaagcgaattatgttgaaaaatacctcttttatttatcaattaactaaatctacctctcactttatatttagttgaaacatacctctttttatatgtattgtacccaaaataccctgacataaaggagctacatggagagtatattgaggtgacagaggtaaaattggtaaaatatttaaaaaaagaggtaaaaatggtaggttttaaaaaagagggtaaaaatgaaagaggacaatataaaaagggtatagagtctaatttcctcaattatagcagcaaagaaagagaaagtgaaagaggttgatttagttggtggactagaacaagaacccaataagtctactatactttctctttaaaaatggtttagtgaaacataactaatggacctggcccattggatgatctaacttttaggggtaagatgaaaaatatcacttttattaatcaattaataaaatctacctctatttttatatttaatt

SEQ ID NO: 391468 - DNA, 575 bp, Cannabis indica
cataggctgcttgcctttggcagaagtagaagctttagctgcagaagatgcacgaggagatgctggagcagatttggtcaatggtagctcgagatcaatatcagcttcctcactttcagaggagacaccaaaatcgtctagaagctcattttcagagggaatagacaagaatttggtctcaaaatcatcagaggggacctccattggttcttcttcttcagaacttaaagaagtcgaaggaggatgcaatttcaacttcttggcaagagggacttgtctgtcatggcttcgtttagtgcgcagttccttctccagagatgcttgctggggatgggtgcgagaggaggggcctgttggagtttatgtagcaatacccttacctgatgtagcaggaggtgatgcggtggcacgaggaggagaccccttcgacgataaggacgatgaagtgcaaaatttgtggggtcgtacaaatttcctagccacttatttgggaattcgtttgtgcttgggcttcatagtctgagattcacgctaaggaagcgatgaatctcctgggtttgatgcagttgcagcag

SEQ ID NO: 391469 - DNA, 1781 bp, Cannabis indica
tttccctagtttttacttgtattcaagattattagtctttgatatttagagttctagttcatacatgagattaaaagagtgttacaatatcaaactaattcataaaatgactagctaatcatatcttataaaagatattaataaattgatatgtttcatgattctttttaagagttttattcatagaactaattaatgtaactggtcatcttcaacatatttgaatatctagactctagactttgaagaagaaatagaagcactattggattattgtaattagcttcctttacagtaaagagcttacacttcaaaacttagctagtaatgtaccaaaatagcgtcaaattaaccataatgattatatttattatgatataatataaaaaaaaatattaaggatcattgtcattattaataaacatacaaagttacctattacccaagtctaatctgaaattagatatacaaaaatgtaggtaataaactcttagctaaaaactttcacaatcacattccactaactaagctctcttccttaaaatcaatggaagatttttgtgtatatttagatatcacatcattaagcacagccttttccctgacctttagcctcttggctgatcctgaaatggcttcttttgttttcacaacctgttttttctttgaagctttttctcctttagcttttgcaactgttagcacagtagttggagttcatcatttagtggtaatcatttaccttgttcatttttcgtacaattgagagggatttcataagcatgatccaattaatatctgtgtgcattttatctcattgtatttattttagcagaaaatttagcttaattactaaccatatacttaactctccttttctgagtttataaaattgagaataatataaagaggtaattataagattacttttttttcgaacaatataagactatactttaaaacgggtagttgtcaacttagccttctattcgaggccctaacccatctgctccttttgccaattcaagtagaaacagacatggttgaagagaaagaaggaaccaacttactgggttctccaactttcaaaattctcgataatggccggttcaagtgtgttgagacaggtcatgaagttttggacaaagacaaggactcctactctaacagcaaacggtgtcgtttagggctcatcgactatgccgtctcccacaagaagcctcctcttaacgttttcaagcaagaccctctttcacggtatttgattcttctttgcccaattcataaagttcactttctttttcttttctttttttaatttatttgagaaaccatgaagctatttcactttattttgtttggaactttcttagttcgaagctggtatgcaatataactggagatacagttaataagtccgaggaacatatctggaaacatataaatgggaaacgtttcctgaataaactaggtttgtgattatccttttgtttgtatttattgcaatattcttgaaattcagagttttggagaatttttattgatgcccttttgatatttgtgtgtgaattgtgtataaaatcctattttcatggtgcctaaaatgtctatagttaagatatttgctatgaattttgtatcaacagaggaaatggaaacacaaaagctaaatcccaatggcatggttgaggaagtttcaccagaaggatctaatcatgccaaaaaatgttgagaaaaaaaagaacaagaagaagaagaagaagaagacgaaaaagaagaag

SEQ ID NO: 391470 - DNA, 993 bp, Cannabis indica
atcttcactaagaaattttattccaattgtcaggtacggtcaatcatacgctgtttcataaacattaataatatgctattatgtaattgtccaaattgtaaaacctttatccacacctatactaattatattgatacaactgggtcaggtggttggctctgccgaagaaacaagcagactattgctttgtgaagcaacagccatagtgatgagaaaatgcttttatttgctcggaattgagccggtttacaagatttgatacgttaaatttgttcgggacaattttttctaatactcatctgaaatatgtacacctcatttgagtgaaaagaaagttttgccctcgtggttatatttctcacagcgcgaactgtggaggtgggcatgttttcccctccttttttttctgagttttatatttcagagctggtgatggctagtgctagtgtcaacccacaattatccgccgaaaatgttctaatatattacatagctgctcaatatcaaacccttgattctctcatgtaatgatgtttaacaagtttttagtgtcgtggttatttgaaatttgaattactgcactgaactactaaagtaatattgttcaaacggcatttccagctgtacttgatgagtttcaaccgtaaagaaaatgttaatgaatggaaagagagctctttaaatgtaaattaatgagttttctttttctatttattcaaaaaattttaaaatatttatattttttataaaaaaaagtaaaattgtggtactttcatacttctcctcataaagaggaagttctaaagttccaagttcaaatctctgtctcaactcaatataaaaaaaaaatatatattttcctgctacatttacatttttttgtaattactacagctggactctgatctcataacccctacgcacaggaatttagttatgtagtgactattactcaatttttcttttaaatggccctagttgcaatgcaaactt

SEQ ID NO: 391471 - DNA, 1258 bp, Cannabis indica
  modified_base (1232)..(1232): a, c, t, g, unknown or other
actcaatacattggggtcgtggctaacaagcttagttcttggattaaaaatattcaccaccgccacaagaaggccattattaataagaagaaagaactttctctagttgatgccaatcttactcaaactaattgttgggagcttataaaaattgagaaggggcttgatgttcttaatgagaaagatgaaaagtattgggcttctcatggcaaatgttcttggctcaagcttagggacaaaaattcagccactttcacaagtatgcttctggcaagaaagctaagaatgatattttatctatcttggattctaatgggatgttaaaggaagataaggaagacattgctcttgtttgttgcaattatttcttaaatctttttacctctgattgtccttctgagcttgactatgagagagttttggcttctattgaaacaaaattaatggtacaatgaatgctaaacttttaagtcctttctttgatactgatattaagaatgttttatttcaaatggacccatctaaaagtcctagtgaagaggagtatgggtgatggcttctatcaaaaagattaggatcttgttgggcatgatgtgtctaaagctgctctagcctttctcaatggcgagacttctcttaaaggtattaatcgcactctcatttgtttaattcttaagattgaaaatccttctgatttcaaacctattagcttatgcaatgttctttacaagattattaccaaagtcatgactattaggatgaggaaagtgttaggattgattattgctgaagagcagagagcttttcttcgtgggtgtttaattactgataatgctcttattgagtttgaatgtattaattcttttaaaaagaagaagaccagtaaagtgggtttttgtgctcttaaacttgacatgtcaaacactactacaaaatctacaatatgcgtcgatcaaggcgtcacaccaaaatggttgaccgaggtaaaaaataggcatagattttatgcattagtggacaaccgaagctaaaagaaaataattagcgtcagctactacaatgacgctaaaagaggaaacttcggttgtaaactgaggttaaaaagtttgcgactattttccaccgaagcaaaataatttaatttttatctatgggcttcaggcccattaaaaaaccctaacttaaacattatttaacctaaacacacacacacagccgcccaaccccccccnccccctctctctctctcttcacgcag

SEQ ID NO: 391472 - DNA, 830 bp, Cannabis indica
acatccttaacctctccaagccttcccatgggacactcatccacaattttctgaatcacaccttcactcttccccgaaaagaacaactctgtcgcgattggccccggtgccacgcagttggctgtgatcccagtccccttcagttccttcgcaagtatcttgatcattgtctccacggctgccttcgacgctgtgtaaccgccataacctggcctcagagcacccaccagcgacgaagatatcgatatgacccgacccccgccccctcgcttcaacctatttgctgcctctcttaggcacaagaaagcccctcttgtattcacgctgacaattattcaaaccgtttgtcaccatataagagatattataacaaatctagttttagtctcttggtacacaatatttttatgcgtgatattaattgtatgtacaattagatatacaatattttatataaattaaaatttaatatgatattatttagaattatgatatacaaataattttatataaaaaaatttacacaaaatacttaaaattattttttatatatttactaattatttttttatttttacaaattttattttttataagtttcacttattattttattttgaaaaaaaaaaataatttttaaaatacattgttattttttttttcttgtctttgtgtgtcgaagaagctctttaatttttattttgacgatttttgtgtttctgataaagagttaatcatgactttggtgacaaatgcacattttttttaactaagtgtaacaaattcaacacaaaaaaattactggaaatacatatatattaatattttta

SEQ ID NO: 391473 - DNA, 913 bp, Cannabis indica
cagccataactagttttaagctttgcatggattattcttatgaaagaatcaatgaaccccacctaaacaaatggttagctttgatagttgtgatgaaagtcaaggaattagatctttatctaaagaaggggaagaattaccatggtgatatgtactactatcctttacctaaaacactcatagtccatgcaagatatttgactattttgaagttgaattcagtggagttggattctcattactcgtttagttttccatctttgaaaacattgtcattatcttatgttaggcttgtagttaatgatgttttagataatctattgatgggttccccttcccttgagaaattacaattgtataattgttgtttatctaatgatcatcatgatcagctcctcatcaacatacaacaaagtttaagcctcaagtttttgaaaattagtctcattaaggatttggtggagcaaatcaaagttataagtcttgaatctttgtacctattaggtgtttcctttgacaaaatagaactctctacatgtaagggaattcgaattctccaattaacttgttgttggggtgtggaagactcgtcatcattcgaaaatctcatttctaaccttcctcttcttgagcaattgacattgtgcaacgggcctaagcggaagttaaagcgcgttaaaatctcgaatcaacacttggaaagactctttgtgataaatcgttatgaagatgaaatgactgttataattaaatcagcttcgaatttaagaattttttcttgtgtaggtaatatcaaatttggtttataaatttgttgatttttcttttgaatctcaagtgttcttggagaagcatagacattcatgttgagtcaaatgagtgtcttatttgattctttggttacttggctgac

SEQ ID NO: 391474 - DNA, 951 bp, Cannabis indica
gaatattgaatttgtggtgtgtcaagatgataatggaaaggtccatgcatttcacaacgtttgccctcatcatgcctcaattcttgcatatggaactgtaattaatgtatgtatgtcactgttgttttgtttgcccttatcatgtatgtacatgtcactgtaattaatttcaatttaattatgaatttttatttttgttattttaaaaaaaataattatacaaaaagaaagggatcctgtcatttttccctccaacttgagtcaattacaattttaatctttaatcttatgccatatcagcaaataaacggggactgttaaaaaacccaaccgaaggggtacaatcatatactggttatatattagagagattttttaacagcccttatattttaggggtcacaattcggtagtaacataagttcagggagcaaatttactaattattctaaaaagtactaaataatcattattaaaaacataaagtactacatttatttctttggtaaagtataagatacttgccctaaaagaattatcaatttccttttcttaacaaaaaaagaaaagaactatgaatttaatgttttacgtaagagatagcaaaagtcaaaaaacatatatacgcatacgcttacgcatttgcttacgtaatagttgagaagtattattttgccacaattgatgttgagtttaattcttttttttttttccaaaattcttttatattagtattaaaataagattttaattagaatttttgttccctgaactttgacatgtatcaaatcatgaacttttaaggtcgttaaaaatgtccattaacctatttagattattggaatatttaaggactttttccaattaattaattgtgctattaaaaataggtctaattattagaattttgccccctgaactttgacatataccaaattataccccctgaac

SEQ ID NO: 391475 - DNA, 1242 bp, Cannabis indica
aatatatatatatatatatatatatatatatatatgtctgttgtttttttcaaataagaaacacaatttattaagataaataattgtaacatccgttcatacacactcttttatactaataagaggttgttagtatcgacaacaccatttgcaaaccgtgaaataacattgtaagaactactaccaacaacaactaataaaaaattaatatctaataaatagactgaaaaataaaatttgagtgaggactattaatccaactaatagccacagtagaatcattattaataatgaaaatactgaaactgaattgatgagcaagagtcaactccattctaattgaaagtagctccgccacattaactaaaaagtcacttaaaacattagatgaccaaaccagccaaaccacacccgcagcttcccgtatcactccacccaaccgaacaaaacccctcacaggaaccgctgaagcattagtcgcaagagcaaatgactcaggaggtggtggcagccaccgagtaggtggctggctaatttagtttgaatagcacagtcccaactgaagacatcgccgaacatgatctttgaattcaataggtaattatgggctaattctagaacaatatatattcttgactgtatattaccaaacaacattgagtttcgatcataacaaagccaccataaggtaaccatcattaattcaaacatctcacaagataacttttcaaagagaaagaggagaatttccagcagtggtccatggatacatcggcgaagcactgaccagacccccaaacggtgccatattggaattaagccaacacaggaaaataaaacatgttctggagtttcagattcttcttcgcattgtgaacaacaaagaggtacctgactgaaccttttgggagataagttgtgtagctacaagtaatgccaaacggaacatatgccaaataaaaactttaactgttggtagcatagcaagattccatacatccttcttgtcacaccccgatttcccgagatgtcacacaggatagtccgtataaaataatttaataagataaagacaataaaatacttctttattgaaaaatatctaaacatgagatctcacttatatttttagtaccgtaaacttaaataagaactagttaaatcaaaataacggatccacaatatttaacatttaaaaacattaaaagtaaaatactgcgccagccccctaacatgcagtcc

SEQ ID NO: 391476 - DNA, 1441 bp, Cannabis indica
tcaacggttaaaaaaaaagttccttaccataatattaccccctatatattttatgtaaaattaatattattaaaatagatttcactaataaatttttagggtatagataaaaaatttctttcaaaaataatattttatttcttacccggttactcttgataattttttttttattctaaaagctaaaaacaacataaaataaacttacgagaaacaggacggccataaagtaaactgagctgatcagatactattcaggaaatacttcaagaaaacttaatttatgttttgatattttattttctcttatatatacgtaaaaagataacaaataaaagttttatgtatgtagttgtgttgtgtgtgttctttaatttaaaaagaaagtctatcttctattattggctattgtattcccataataatacgtaccgtatataataattttagagattaatttaattattattgtgtcgtgtggctttagcattacaagttacaatacaaccacccaaatttgtgacttatatccaatttatacatttgtgatgcttacagggccacgtcttccatgtacattcacacttcatcatttctttctctctaattgtgttaaatatttatgtctcatgattctcatgacccaatatatccaaaagtaaaaaattacatatacatttatgtatttttcaaataaaaaagatgaatgattaagcctcctaccggcttcaggaaggaatggtatgtagggcagttcctctcattgattgagctaataaagaaatgttataattttatattatatgatttctcaacttaaattataaactaaattgacatgtttcttccaaaaaatatgatatatttttaatattaatttcctgttcaagtttttcttttaattgagaaataccataatatttctttgcttatatatatatatataaaagttatttacacccaaaaatttcaaagacatttatttgataatttattttatataaaatttatatttttaattgtactataattttttttaacttttttctttcaattcatattcttaaaaaatatacctatcaagcaaaaataaagtgtattttaaatattatgacaaaaaattaaaataaaaattatgtgaatttttttagaaaaaataaaaaaaaatacacatgagttagaaaaaattatgaaaatgaaatcaaaataagtattgaaattaacataaaataatgtgaagaaaaaattttaaaaaaatattaagagtaatttttaaaaattatttaagtttatatttttttataataatggggtgtatttataagtttaaggggtgcaaatagaactccccaatagtatttaccctacttttttccttttcaaaaaattattttataattattttattaatatatatatttttaaaagaaattaatgttat

SEQ ID NO: 391477 - DNA, 1625 bp, Cannabis indica
atcacagaatacattccatgaaaatacatcgtagataaaatcatatccctatatatatatataaaattaaaatgttaaaatgtgtcattttatcgcgtttgtatcacattttatgtgatttgtttttatatttcgtattaaaaataattttctcaactttaatctgacggtaaaaaattgtattatatttatgttgacccgttttgacctattttattattatacaataatattattatttattttttattttaatttatttaaaaagttgtattaaacaagtcgtgtcgtgtcgatccgcgtttaatttcttaaccttaacccataaaattcatattgtgtctgtgtgctatgttaaattccgttttgccgccccttgatctttaaaataatgataaaaagtgctacttccaaagccaaatgggttcagaaatggtggtaaaaagaaggagccttcaaaaaatcacagcccaccgttttatgggcaagttgcacagttgcttttggctctttttgattttgagtcagtgagtgagtgagctcacttaattgggtccaattttgtaacgtcagaattcaatccataacaaagtttagaaacatgggttatgacacaatgacagtgacaatgttatccaaaatcaaatccaatgaatggtgggacatttttattattacaaactctataattttctttttcctatcttagaagaaagaatctttgtgtgtgttttttttcatttcttaaatcatatgtatagatttcgaatacaaattcctacaaaggcattagaaagaacatagcaatagcaaagacttttgttcattcattcacaatgcctctcttcttcatcatcatatgaggccataaaatcaatcacccaacgaaaaaatatatatattatatataaaagaaagaagaaaaggtaaaaaaaaaagaggaaaattgtgaaactttggtgaaaatggattgacttggccattttatgattaaggaggtggtttggttactcttctgatcaaataaaccaggtcttgggctttctctgcttcaatgtcgaagatattgacgatttttcaaattcacaaactttggggggactgagtgtgtgcgacgatgatggtagatttgatcagttttgttcattattatgtcttgaaaatacttgtgtagagtctactactgttctcgggtcgtgctttctcttactactgcgtcgttttgatctgggcgatcgagtctttgttgaggaggagtgtttcgctgcctgttgttggttccgcattgcaagattttcggtggaaggaagctcgggaggggcatcgggccatggtgttcttttggagggtacagtcacttccaaaggaggatcaattatccatctgtcataacaatattacaatgttatcatcatgaatagtttcttaagaaaaaaaaactaaacatagctgaaaatgttgaagtgatctaataaatttgtgtatgtttgatatgaatacacacaagattagataatttaactcaattataagctttatttttctatcaaaatataaaatatggcagactaacaaaaaaatccaatgcgaaaaaaagcatgttgggtctttgaaacaattcaaat

SEQ ID NO: 391478 - DNA, 890 bp, Cannabis indica
gtcacacaagcgggtcttaggtcctggacgtgatgatgagcagtggcaaccacctccaatatcttatggtgctctactaagttggttctatccctcctcacggaaataaggtgcctttggcaaagcttagtcatcaagaaaattattctcttttcaaaaatatatatgtatttcaaaatttaataaaaatctctaatactttaaaaatttatattgaaataataaaatcaatacacaaaaataagaggaaattacacataataagagctttttatatgttttttaagatatgtggcagtgttatgttttcccattttttatggatttgggcatctatttcatcttttatgttatttagttactatattttttttattctaagtttctaatacaataatttacctttttgttctgcctcaaccataattttataattttgtttctctctgctacctttcttcccatccgagtgctcctgcccatgtcatttctagccaccataaatagtggctactggttcgtggtttgctccgcctctcctctctcattttctttctcttagctcatttctcgccagcgaccgctgctagctctggcaaagctattattgccatttacagatgacccagaacgcggcccatgctcagtccttctccaatactgccaatgttgtcactggtgtacgaaacttccctcgttatagtggaacgatagtttgtatcattaaggttcttgtaacttgagtattttatttctttggctccgtctgtatttgtttctttagaagatttttgcttttttttttttgttgggagaaccagttaagtgaatttattgtattatatttttactccaattttctattggaataaaaaaggtcttcatttgct

SEQ ID NO: 391479 - DNA, 663 bp, Cannabis indica
tttttttatattattttttatgtaataatgtgttaagttttaattagtttatattaaaacattctatatttatatacattatataatattatataaaaatttaatataaatcacaatgtaatatacactatacaataccaaacagacccccaatgactaatattagtccacacaatataaaatcattttattattaattattaacatggaacatattattaatatacatgaaattaattaggtttgatggagtttatgcctactgtttttcctaacaaattatctaggcctcaattttttttatatgatattttctttagtaaaatcttaaattttgaaagatctttttaaattcaaactcataaatatcaaatatatatatttgcttatatatatttgttttggaaaatttaatgataaggacatcacttattatttcctacccatagggagtgtagacatccttagagaaaactaaattttttatatatgactattgataattacattaattgtagttataatattgaaaataaaatttaaacattcagctatatgtacaattttattgtgaacttcgtttggttgggaggaatgaaaatataagaataagaataagaatgggaatgagaataggaataagaatggaataaaatttaaaat

SEQ ID NO: 391480 - DNA, 948 bp, Cannabis indica
acttgcttaagcctctgcctagaaaacgattctaaatcttgtactgacaaatcattcatttataaaaataatttaatattctctaaaaattattacattaaattatataaaatcttatatttatctgcactactaataatatgaccctaaaaaatactaacactaataataacttttagcatttctttttaatagaaactaaactagctagggacaaggctacaatagtagatacttatttatgatacttattaaaaagataaatactcatataattaattacttttatagaatagtgttaaatgtttaaaatagtaaaaaagagcattgattatttatttttatattttggttatgactcacgtgattttgaaccattttattctttcattcttcaattattcatatttgtatatcccattgcaaaaatcaggacacataattagacataatataatatatacatagttttttaaaaaataaaaaataaaaaataaaaattaagaagagatgttttttttgttgcaaaaaattaagagagttatgtattaaaatgttgacaaaaatagtaacgaagaattatttttcccaataatgcagctcagatcgtgcaatatagtcttattaaaattagtatataaatatttatatataaaaaatagtatataaatagaaaaatactaaattaccattagtgaactgttttttcttatgggaagtgagaagtgattgatagagtaatctggtctctcacaacaaataaataaagtatgagattattcaataaataaataaataaataaataaagtttgagaagtgacttttctatcatattagagttggctgtgatgtgatttccacatgtttatatatcaaaagggaaatttgaattattatgattgttttaatacaaaattggtttggagaacatttagtgtaggtaattt

SEQ ID NO: 391481 - DNA, 437 bp, Cannabis indica
tcaactcaaatctttaataatataatataaaacgtcccaactagtacgaatagacaatcaaaataaattgtggggttttattttatttttatgcctaataagcttgtttgttttggctcattatttggttgtttttatgcctttttaagcatagtttttggacgttttgatacctaaacagctcccttcgtgtaatatgctttttgaataaattcaatcctttcaaataatgattaaaaaataaaagtagtgaagttaaatattatattgatttttttttgcggctaaaccctctcaactaggggtgtgcataaatcgatccaatccaatgacaaccgaccgatccaatcacaaccgaccgtcaaacattggatatccaattgtgatcggatcggattggatgttatttttgaatatccgattagatcggatcggat

SEQ ID NO: 391482 - DNA, 503 bp, Cannabis indica
tttacttttttattgggatttttattttttttactttactttatttaatgaaacatatttttttattagtaaatatacaaaaattttagtgaataactaattttttgctgcaaaaaaatgtcattatataactatcaattagttgtttttcaaatctctctaaaaaaaaagtcatttttaatttagttttttttttttaatttttacatttaaaaccatttttttttttgctacggaggaactcacggagcaacctaaatcacaatccaaattcacattgcaactcacgcaacaaccaccaaagcaatctaaaccataaaaatgaaaaataaatggtatatggagtgatttcccttttaattatcatttaaaccttttattatttcttactttttggggatcattttatttattatatcaatttaaatatttcttaatattaaataaaccacaaaatagtaagtacaacccaatatataaaaaaattagggaaaaaaacaaaa

SEQ ID NO: 391483 - DNA, 1379 bp, Cannabis indica
ttcctcctcagccttagaaggaccattaggacaaaccttgccttgatcctccatttcttggactttagcatccccaattatgtgttcctcctcaatagtaggccgggcctgctctgcactcgacattgtggcaagtcgagctatgtgagggtcagtcagagaagatattcgcattgtttgtttggtgcgtgccatcatcatattcctggacggagcttgattggtatgtctagcaatggttacaacaaaagtggctatggatgtacctacaactgtagggtccggacagcctacaagtaaggtattgattgtatatggtcagacaatatatgtccagttggacggtaagtattgcctccactccttcttgagctcccagataaaacatccgttgcctccaccttcgatctggcaagggtaaaaattgtgttgcacctcgggttttggagaaggtgtatgctcgttgcttatctcccagtcttcaaagcttgagttggagagaccgtcaattgatgaggacggactggcacagagacgagggtaatcctcgtacaaaagttgaagaagatcctggtggatatgatgttcgcctccccaaaactcaccaggattcatctacaaaaggtaggacacaagatgagtatttggccaggataacgaacataaatagattggttataccgaccaggtccgatcgaagaattaaaaataagaattttgcatgatattaaggtttacaatctagactttaaaaacttcgaattaagggttaattttcactaaaccccgaatgaacaagtgaaactgaatatcgtggagtcaaaatcaaagcacagttataatcaagccacatggtaaaacatagtcaaaatctcacattcctaaacttaaattttctacggttttcctagaacaagttcaagaactatcaattttcctatagtggaaactcagaaaatcaaatattcaagcataaaagaggaaagaaatgaagaacttactcactttttaaagctttagggttgctcagatgacagtgatcagtgtttccttgggattcttcgaagaatttgagaggaaaaaatttcttactctgaattcttcaagaatgaaaaatgctaaaagtagtttattaaggattttttccctatttataagctaattagtgaggcaaataataattttaaaatttgaatatctcgatttccctccaaaagtgaacattatgcacttaagtacttgaagagtaatcgtcaaacatgatattttttgggtgtaattcgaggtatatgtcagtcaacattaatgagctaaaaactgaaaaagaccattggtcaatgtcacatcagatcaccaacagacgctttgaacacgtgcca

SEQ ID NO: 391484 - DNA, 775 bp, Cannabis indica
tgttgaacaactgttttcactcagagttaccatcacgtttgcatttggaatcaaggtgagactagtataatagttgtatatatgtatacatgtttagtgtgcatgttagttgccgttaaaataatatattagggcatcagtgaggtgtacatagagttgtagcgagatgccaacatatatatgttaggcaaattagtagccaacagatttgcatatcatggtatgagtgaggtatacatagagttgtacaaagattccaacatatatatgctacacttttagatagtatgaattaactactaccacattagtataactagagtattgagtataggctagatttgtagtaagtcatactttatcgagaacgtccctgacccaattattagatcgtgagtaggtgtatgggtacctagttacagtctggatatatgtttatgattatacttttcttactgagtttgttgacttacaattattgcgtgtatgtgttggtaagagctaaaactaaattgggatgagtctaaagctagtggtgaagactgtacatatcaagacagttagccctagagtgttcaagattttcaagacaatttaggctcaccttttttatagttgtatgaagacaacttttgtgatgcaactattttgcaaacttatgttaattttaaggggatcccaaacttacataaattatgtttattattaaagtttaagttatttaagaaaattttaattagccatgttttttaataaaccctttgattatcaaagg

SEQ ID NO: 391485 - DNA, 1084 bp, Cannabis indica
tggcatcataagatttttctaatatgttttatcattagaaaaaaaccacaagatatataatcacaagatataaattttttagataaaaaaaccaaatataattataaaaacaattttgggttgctaggtttaattggatcgattggacctattttcgacccgcctaattaataaattgggcgttatcattttgtgatgttttttcaatttgtatttttggttgagtttttcaatttgaacggtgtatgaaaatttatgtataactctaatttcaagtatgggatgtaatggattgattcccaaaagaaaagaaaaaaaaaaagagagtgacaaattttcacttacaaaatttaaatttttgtttccaaaacacatttttaaaaaacacaatttttgaatcacaaaccaatcgtaagtgaaaatttgtttttaaatatgtgattggttgtagtgtggtttaatgtttttgagttttaaaaaagtgaatatgtgattggtggggaatctcaaaataaaaaagtaagagaataattagagagtttttggattcaatgatttgaaaacacaaaaaacataaaaatggtgttttcattttttagcctaaaactcaaaatagtattcaaattttgtttttaaaaacactcaaccaatcaagaattcttatgtggacccccaccattttaattttcaaaaacataaaatagttttcaaatcctaaaccaatcacaccctaaaacacctgtttctaagttttcccgctctttcttcaatttggagggaaaaacattcattcctacctatgtgttgacagctttcccactctttcttcaatttggattttggagggaaaagcattcatttcctagctataaaaactatgtgttaacacgtgacttgcacatgccatgttattagctacttaaaacaaaacacaagcaaaagcactattcagtagtttgttaaaaaaaaaggcaccatccaataattaggagtgttggcggtgcgggtggtgcggtttttaactattttttcaaaccaacccgcacatgcagtttttcaagttttccaaaccgcacccgcaccg

SEQ ID NO: 391486 - DNA, 1119 bp, Cannabis indica
aaaaaaaacacataaaaacaatatgaaaatacctataaaacaactataaaacacttaaacaacaacatataaacaactataaaataacaaaaagacagttataaatcaatagaaaaataacaagacatcaaccttgttaaaatatgcaaatcattcataaactaactcccaataaactataaaacattcgaaaaaatactcttattaatcatgtaaaagagaggaagatataggaggagtgctcttaatttttttttttaagatagagaaagagtagttaaaaaaatatgaagaaaaagtgtgaaaagtaaaaaaaacatattttagtaaaggttaaaagatattaattaagattatttttttataaaatgtgactaattaaagaaaaatagtatgaaatagtttgagtgtgaaaagtaagaaaatataaaaaagaaaaagaaatataataagtgtgtattttttttttaaaataataaaatacaattttttgagagactgaaaaagtattaaaaaaaatatatataattatttaggatcactttaatttttaagaaatttcgaatagtttacaatatcaaaattaaaattcacatattttattatttttcttatacgtttggttaacaactgtttaaactttattttttggtattgtaaactattcagactttttatgaaaatttacaagtagaccttaaataactacaacgtacacgatacaaaaaaaaattagacttaaattttttttttctgaatactggaacccgtagggggtctatcaaaatgaccctttaggggagtctactacagaatttcctatagtttaatattaaaatagactaaaagttattagaaatttttgtagtagaccctcctaaaggatcgttcatgaccgtgtacgttgtaggtatttatgattacttgtaaatctttaaaaaattcttaatagtccacaatgttgaaaataatgtttaaacagttactaaccacacatataagaaaaaataacaaaatatgtgaattttatttttggtattgtaaactatttgaatttttttaaaaatttactggcagtcctaaataaatattacatacacaatcatgaaaaaaaaatta

SEQ ID NO: 391487 - DNA, 1358 bp, Cannabis indica
tgtagtgtagtgtagtgtagctaagttaaggattagcaaaatcccaacccaaatgaagaacccttattactcctttatttgggtttcggcctcccttgcaatcctcctcctagctctttctctatcttacttctccaaatctcaatggacctcctctcccatgcccatcaccgccgatttcattctcaccaatgccctcatattcaccagcgacgataccattcctttcgctgattccatggctatccgccgcggaacacttctccgtgttggcaactactcctctctaaaggttactatattgattctgaattagaatgtcaattaactacatagaaatgtactaatttctatgtatttataggcggtggtgggttctggtacaaaagagttgaatctaaatggaaaaattgtggtgcctgggtttattgattcccacgtgcacttaatttcgggtggactacaggttacctctcctcaacctccatttcatagttgaattctattccaaactatatatatacatacattatgccttctagattaaagttctcttactgtgtggtttcaaatttcaattactgttttttttggacaaacagttgagttgatattgcttgtcatgagctttagttgacattcttttccagatggagtgacatctagtgtgattactttttgtttagattcttgtcggtcagagtttacacgaattttctccattctatgttagtttggatgttaaattcactaggggctactttgttacgcactattgtattatactgtattatatttgaatttaattatatatatatcatttttttttatatatataatactatgtaaaatttcaatttatactagatattatatattttaggtactcattaaagtaaatacacatatagtttttacataaaaaaatattacaaaaaattattgtatgtaatacaacgtactaaatgaaacctaattatttacttggttaaacagatgtgtttgatagtgttgaaaaatatgagtatttatttttcagattctacaataccaaaataatggttaattgtctggattgttgttacaaagcttcaattttatgtgattttgataaattgttaagtgttgtcatgtaacaactaatatttatatatatatatatatatatatatatatatatttgatggggctaaatgtaagaattaatatttgattttactatatatacggttttttgtaatgcagtttgatgctaaattcaaattccgaggtgtaaataaaaaggtacgagtttgtgaggagaatcgcagaagcagtcaaaagtaagttcaattcaattttggtagttgtctgattgc

SEQ ID NO: 391488 - DNA, 748 bp, Cannabis indica
ttgtgaatgtaaaatatttatgtatattatagacaaaacttttatagatggaagaaaattctccacttattacgtaaccttgttaactttgttattttaaccggtatcggtttctctaacaaatatatatatatattatatatatatctatatgaaagttgtctcaaatttggaatgtctctcaagaaatgggttgggttatatagagtgaaagtctgttcagcccataaccaatccataattatatggcctatcactcttcagcctaatgagttctggcctactcttaacataacactttactataaaaaaaaatgagttcggttggtcaggggttaaatggtttggtcgggggtcaaagtgcatgcaagtaaaagcgaaaaaagaaacttaatatagggagaactttgataaaagaaatggtcaacaacaaaaagataaaacaattgtcaagtgtgagcttataaaagacttaagagagagagagaccaacctttatagcatcttggaacctggctgacaagtctagcctcaaattttgcccctctgttgacacccttttgcattcatcctgttcaattgtcagcatagtcttacataatcagtcggagaaacaaaacaaaaacaaacaaacaaaaagtagaaaaagatggaagtaactgtgtaattactaggtagggtaattactaaggtggtaattacatagtctagtaattacacaatattttaaaatgcaaggtgtgtttgg

SEQ ID NO: 391489 - DNA, 1381 bp, Cannabis indica
tctctattcatttatggttcaggaaaccaactaatcattttgatggtatatgttgatgactttcttatcacacgccctaatttgactcacatcaacaagttcatctctgacctacaccaatcattttcccttaaagatcttggtaatgtccactacttcgtaggagtagaaatattcagagatcccactgggatgtacctatctcaaactaaatacatcactgaccttcttgtcaagttgaaaatggagggggcaaaaccttgtttgtatcccaccagtgccagcacaaactgtacctttcagatggtgaaccccttgaagacaaaactttcaatagaagtacacttgttgcactacagtatctcactctcacaagacctgatgtttcttacatcatcaacaaacttactcaattaattcatgctcccacttcaacacattgggaagcttgcaaaagacttatgagatacctcaaaggaacaatttcacatggcttgcatttaactcctgcaacttctttcacaatttaagggtattttgatgtagattgagcatcatgtattgatgatagaaacagcacaggtagatatgtcatgtttttttggagggaacattctatcatggtctgccaagaagcaacatgttttggctcgatctagctttgaaagtgaattcagggcacttgctaatgctgttgctgagataaaatggctagtttccttgctatatgagttgcacatttagcaacctcattgtccttaattatgggttgacaatcaaagtgcagctgctattgcagctaatccagtctttcatgctagatcaaagcatatagaaattgactcgcatgtttttcgagacctcattcttgccaaagaactatctgtttcatatgtgcccacccttaatcaaattgttgatgctttaacaaagcctctttccactagtaggttcaactatatgatagccaaactcaagatatctcctacacattttcgtttgagggagaatgttaacaaacttcttagtgatgtcacctaataactacctatttgttatctgttatgttagttatgatttgtttgtttttctgttattgatctcttgatcttggttgtactgaacttctgttataaataatatgatggccttctcagttgagaagaaggtttccttttctttactctatttttttctggctatttagcattccatcttttatagtctaaaactaattaaaattaattttcaactcaaatttaatttctaataaatatatctaactaaattcaaaattcaatgtatttaaaaataaatacatttttgaaatttataaaaaaaataataaaaattattctaatttatgttaatctaaaattaa

SEQ ID NO: 391490 - DNA, 425 bp, Cannabis indica
ggtaaaataatctttgataatatgtaaatcaataaaaaaaattgaaaggaaaatcaactcagttatgctgacaagaaacatggttaatattacttgccaaaacaaaagttagctaaacaccagccaatacgtttaagttatttctgggtaatgtaaaatccaaataaaatgaaaaaaaaagaaagagtaatttgcggtataaatacttaagtttaactctcagttgtaaataaatacctaagtttaatttttggcggtaataatatctaagttatatttttagaactctctaggtacctaaacgttaaggatttgttatggcgagcaacttcggattgttaacggtcttaataataggtaatggaagttatttctgggtaaggtatgaaattcaaataaagggaatttacaaaaatactggaatt

SEQ ID NO: 391491 - DNA, 1899 bp, Cannabis indica
tttctctctcaaactctaaatctcatccctatttcgtgtctcagtctcaccttaaaatgataagtgaaggttgtatttataggatcaagaacctaaagtcgtggctacaagaagcgaggttgataagttagctagaataaccaacttaactaactcctctttgagcgagtttccacgttagcttaagtatcagagcctccaggtacatatacgtgcttctagactcacagaccaaggacactcgctgaagacgcttccggataggataaagtctattgtagtcgactatctgaatctaccattctaggagagacaactagccagttgaaactcttttttcaaggaagggctagttatccaaagactgaacccgaagtggacataatagtcattcaggaactcccatccagactcgacaatcattccacaagactccttctaggatggacaagttagccatccaggaacaaggtctgggagacacctaacttttcagagacaactttccaggaatgatattagagatatttttatttggaagaactataccacaaggtataaatagaaaatagataaaaaaaaaaatgtgagtaaaactctgctgctctaatgattattgtagatagcttttgagaattgttatttgtcatttgaaggtgttcaatactacataaatatagtattttataattgattaacgatgctaattccctatattgttcagagtgtgggactcgatattaaaatacaataataatagtatccagttggataacagaagttcggttaatatcctgttcaaggctgcatttcaagcaatcgagttaactgaggctaatttatcaccttgtacgatctagctccaatgcttcaatggagattccctactgcctatgggaaagatccaactacaagttacgctgaacaggagaacaactagaaacaatgcttctactacttacactattttgctcatagtacatacgatccacaccgagtgcagattttatattttagatccaatccaatccaattcgatttatattagtacggattggattagttactttaaattaattactttttaatattaaattatttaatatttattaaaatataaattatttttacataatcaacaacaaaataaaacatgctattattgttctttgtttccaacaacaaattaacataaataaataacaaattttaagaaagacaaaaaaaatgatatgtagaaagaagagttttgtttattctagattatatttttcatatgcatatatatatatatttgatatgttacattttcaaatatataccatatatgtatatgtattagttttataaaatataaaaatacatttataacattttaaatatatagatgcaaattaaatttgataagttatatttacatgtaaattaatattaggtctgcaaaagtgtggattttagagttcataatcccacacaagtaaatatttttattttgcgaattggattagattgaattgtttagattgtattgaaagattaaattaatcttttttgagttgattgcggcataatcctcaatacttttgctggcacttaactcccaaaactcaaattttagcgataaaattcctaaaattaagaaactgttagcaatttaaagtttctatctattttaggtgttaagttccacgttagactatccatatgtacatctacgtgaacacggtgtacacatagcataattttattagtccacgtaagaaatatttaaaaaaattgtaattaaaaaattgaaaaaataaaaatctgaaaaaatatttttctttcttttcctcggccttcttcttaagccatttttaccctaattcccaaaccatttttaccctccctctctctctc

SEQ ID NO: 391492 - DNA, 1505 bp, Cannabis indica
tatgaacatgatatcttcctccacgttgcgcctcgacaaatcctgaactactataaacacttggagagcaattgttagtgtaagaagagtgagactcgacatcatttacctcaattctcagctgagctcagcttcgcgggttacctcacgtaggatattattcctgcggtacctcctttctaacgcggttggtggtacgagtgaccggttctcttttaggcaaagaattatgtgtaggctggttcaagtcgagaccttcctactcatcttcttgttccctgcgaacacgagtgttattaatatgttcagtttgccgcctagtagttgttacttggattgtttaaacgcgtgttaggaactcgaggtggacgtcgagtcctgactcttccatcaactttggcctgcaaggcccgcattttctcctgcaaggctgtatactgggccgtagttaattggataatttctttagacaccaaggctggtgtgataggtgggaagtgtcctatggtggccgctggtgttgaagtttcttcggcacgactggcggttttcggaaacaggttcaggggagtgacagtagttcatcccacacccctatttattgtgtcaacgggattcgctccattgcctaggagtggaacaatcattgttccaacgttgaaagaacttgtgttgttgtttctgttcgtctagtttccagccattttgattttcctccgaaatcaacagtaaaaatcgtttccacagacggtgccaaatgttgttagaggaatttagacaacactaaatatacactaaaaatataattatttaataaaaaagcgcgagtacttaacctataatggcaagttttcaaagagtaggcacacagacaaactggaaaactaataaacacaatgaacacaagagaactatagtggttcagtcagatcactgtctacttagtccactgttgcaaggattttttgtcttctttttttcatgttggatcactcctttatatacaaagcaagtgttttttggattacatagaagttaattgattatcaaacaattttacattgaatatcagtattaaattaagaaaaatgtaaaatgaaataaatgaagaataattaaatctattttactaaatacagcaatgtatgcaacttttatagtgcaagctgtctattcatctgctcgcacaagctcacaagctaagggtgcattcttgttaaaacgagactaatgagtctcgtacttaagtatttgcatcctaatcgagtcgcgtatgtggatactgttagattttgtgccctaaataaaactcatttcaatataatcagatttactaattaataaaagatcagaaattgaattttattttgcatggttcacataatttatttcatgattaaatttaatgtataaattctattaagtccagaacatatataaatatatatatatatatatttattcatgattatagtgtcgttagcacagtggaatataatcatgat

SEQ ID NO: 391493 - DNA, 1600 bp, Cannabis indica
gatgcaaattctatctaatggacgatttaagagtgtgttgcatcgtgcagttgtgaacaatacacatcatcgaatttcagtggcaaatttctatggcccaccaaatgatgtgaaactatcgccgttgattcaacttggtaatcttgatcatcttcctttgtatcgttctgtgacatggaaagaatatcttaagattaaagcaaaacacaataccaaagcacttgagtttatcaagaattgaacttgttacatataccaaggcactagttctcatatctttggtctttctctcatgttcttataaaccttaataataataataataataataataataaaatttctgatattttgctttgtcaattttttcttgtgagtggtacaaattgaaatgatttaattgtgggatttttgtgttaacactttgtgttctaaatgattgtagttttgagtgtttgccaatcatctttgttattgaataacatttccctgaaaacaagttgtccaaacaaacccgtatttgcctagaatctgctaccttcatggagttgctcataagcatataattattcaagagttgaatgcacaatctagtaactagttttatcctagtaatggtaagtgaaaattatatatttgatgagttttcataccatgtgtaaaaaaaatttcaacaaaatcattttataagaaaaatttaaaaagaatagtaataaatatggaaagaataattaataatttctaaacttttgtatttataaaaatttagtctttacgttaggtgatttatttttataaattagcaattttatttcctaaactctaactactatcaaatcgtattcctctaaataaaaattagaaagattcataatttttgggtaaaatttaaaaaattaatttagatcttaaaaaaaatatattttgaatgactaagaaaattaaagaagaaatttaaattttatattaaataaaaaataaaaaaataatttttttttattaaaaagtccatttagacataaaaaaaatatattgaaaattcatttttgtacaaactaaattttatgggaacaagtttgagtatatttttttctctaaaaatctaaacataacattttttttagattaatttctatttttttaaaagtatttcatatttttattaaatttctaattacttttcttcaatttttaagatttgtgtttgtaaatatttttttttaaacaagattcatttacactggataagataagtcacttagtataacatgacttacacaactccaatccacatagcactaactttgttatctaaagtataattagctaaattatgggccacattatacaaaagataatcatattacgaaagataatctaataacttatgtgtttgtaaatataaataagtttgatgttacctttacaaaatcttagtttgtttaaattagttattagattttcgataattttagttaaattttttatgatatgtatttaaaaataaattaaagtttaaaaatatttttctacaaataatttaggttgttcaagtaaacttaatattttgcttttctaaaaaaaaataataacttaatat

SEQ ID NO: 391494 - DNA, 626 bp, Cannabis indica
aaatgaagactgattcaatctcttttatgtatctgatatgatactgtaccatgtcaaatctcatccatatagttatattgataactccataaaggcattagagtttttttcttttctgttaactcaatattcttcttctcaatactatttatttatttatttagtttgcatatcctctaaaatcagatagaaaaataaaacaaaatttatggaaaccagtagttatgtaataatgtatattagttgtcttagtagcattgattttagtttatctagtgtgtagtttcttaagaataatttttagtttggtattagagcatctccattgattgatgcttggaagagtgcttaatgaaatgaaggctatctgtggcaacgatgctataaaaaataaaaaataaaatcaacatttatttcattgctattgttgatttttcaccataattatttatttgtcacactattttatacattgttctacaattcatctattcttaaataatattttttctatcgaaattctcaaattctctacatataaactcccaaaatttgaatttttactaggggtgggcatccgatccaatccaacctttttttcctcatccgatctaatccaattagta

SEQ ID NO: 391495 - DNA, 732 bp, Cannabis indica
tgcaaaaattaatttagttatatcccaaagttgatcctatatattgtattcattatgtctgcacttgcttcttgttattaggatttcttgattaaatcaagataatagcacgaatttatcagagaagatctaggaagggtttgggccaagtgggctaggaaatttgtctataacagatgtatgccctgattttctctttcgctaaatatgacctttgtttgtgttattagttttaaatgatcttaataaattcgtaatgactaatttgattatcttaagaagcttgttttgcccaatggctccattctcaagtgtaactactatgctctccccactcgtgactctctctttgaggatcctcttcacgatggcaaaactatgctcaaaatttggaacctcaacaaggtaattagttaattgatgataaccaaaattaaccaaaacccaatttctatctaatatgggattcttttactaatagttattttttatttttattttcttagttttgttacagtacactggggttcttggatcattcaatttccaaagaggaggttgctgcagaaagactaggtgtaaccaatgtgcttctcaatgttgccattgtggtgacctaagttcaatgccaatgacaagaagtggaaaaatggaaagaatccaattttcattgatggggttggaattactttactgaagtaattgcatcatgatatgttctttttattatgt

SEQ ID NO: 391496 - DNA, 553 bp, Cannabis indica
gaccaagagcacacaagcttttggacagatagggtgtttattgttatctagtgatgcccttcgaatttaagaatcaatgatctgttcatttttagggttcatatcagagtcacaatggaagagaataaaatcgaatctaattaaaaatatttgttgaacctgatatgagccttaaaccccagatctcaacacaataatacataatacaaacctagctaattagtatagagatttatctcttgttgcctatcagggtttccttgcaaatttttctaaaatcaaaatgaacatcaaatccagtaatagaactcgttgaagacttcatactagtttctttcagatcagcctcaacactcagaaaggagtgggcttttaaatttaccaagatgaaaataattttctaatcatagtgtattctcaactcatgagacactgtgattgagattggaaaaacacacacaccactcctcgagagagagtagcgtgaagagaagtatagagagatagtaggcgtgaagggctttagagagagagcgttgaaaaaagtaatact

SEQ ID NO: 391497 - DNA, 805 bp, Cannabis indica
gcaataacgaatacctaccgtaagaaaaaaattttaaaaaaaatattctgacattgtgttttcgagcatagaagtttgactaagagattgtaacgggaggttatatattagagataggtattagatatagtttgtagttagagagttggcgtttgggctgtgagtggagagagtttttctgcaaatctttctggccacacccaaaatatcggttgagccaactttcaacttttcttcccttttcatttttcaattttcaccgtccttttattcattcattcatatatatatagatattagatatagtccgtacattaaatcgttttcattttctagaattttaaaacagagaaagcttcactctctctctcttgctcttgctgttgctcttgctcgtggatttggagaactgttcatcgacgatctacattctttcattcggtttatctcttaatctcttcttttattatttttaatttattgattttttattttattatttggatattcttgttcttgttctggattttgcgtcttgaattttgatttcggtgtttgattattgttatagcttatttgattacgatgaaatgaaaggaaatgaaatgtctgttcttcattgttgttcttgttctgttttgtgtgtgagctcgtttttgttttgtttctttatcgtattgtatcttgattttgcgtcttgaattttgttttcggtgtttgattatatttttagctttgtttatttgattatgatgaaatgaaatgtctgttcttcgttgttgtgacatttcgatttagttataat

SEQ ID NO: 391498 - DNA, 590 bp, Cannabis indica
cctggtttcgatggactttctcggagtactagaacagttactcgaaaataaaattccttttactacacacttggcctcaccaaacttcaaattgttttgctatgtataaagtaaattagaaagaataaagaatgtggtagaaagtgatagttaacgcactaaataataatatttggcctcccatgattattgaaagtggcaaaggaaccctccacatgtgggtggatttcatacgtgttttgattatgcatggttcgtcctcaacctcctaaattaataataataataataactcaatgaacgtgaccgtttatcggataaactttactttatttcttcattttcactctaaaagtaaatataaagcctacgcgccctttacgcgtctttccaataaaattataaatatattgtgatatcgtaccttaataaaataatatttaaatattgatatttaatcttggattaccaaataattccaaatctcaattataaacttacctacttgaaaaataaattttttgtatttaaattttttaatcaaaaaattaaaagtaaaatttttgtttttaaaattttattttgaaaaa

SEQ ID NO: 391499 - DNA, 576 bp, Cannabis indica
atcacagttgctagccctacatcttcattctttcaagaggcaaagaacctgagttatcccatcgacatccaacataaaccaacaattttgatttatccccacctgtagtgttatcgaggatagcttctagaaagtcaaacacaacaccagaattaataattgaagaaaagataagaaatgtacgttcctgaaaaccaaacttttcatgtgtaaggacattctttgaaaagatgaagattatagattcaatgcaatcccttgtgatagagggcacattctttatcattgaggaaaataagtcgttcctttgtgcgcaaagcttcctccagaactctccacaacaccatactaatgagaatgtgaaatgttaggttcccaaatatcatgtgcttgtgcaagtaatttaaacaaacaaaaaatatatagttataagcatatccagcaatgagtagagttctcatttatcaattaaaatatatatatatatgtgaaaatggaaagaaataccataaaaaataaaaataattaaccacatatatataaaatggaaacaactcacactaaaaataaaaacaa

SEQ ID NO: 391500 - DNA, 1306 bp, Cannabis indica
gctaaggggtggacatttttttctctatgtcgacttttttttttttacatttatttgctttttggaaaacttttggatccctctcagttgtgtgtggcctttccaaagttgtggccacctagccacctacaagcagtgtaaggcttcgggtctaagagcatgcaccacagtcccatcttcagccggcaaagtagatagtactagtaaatgcatactaggagctcaagagtgacctaatcctgagggaggttttacggtaccctgtcgtccaggtataagcatctttctggaaataacccctatctagtgtacaaaaaagaaactcgaacatgtcacctcaaatagttatagaagcttggggataaatattatttgtgtttctacacaggtgacacatggcatgagaagaaagagataatctcataacctcactaattaaaacccctcaacaaggcctagtcatggagaagcttcacgaaactcagaacaagtcaagactaagagataggaggaagtctctctcaaacttatcttagcttcccagacacagaagacatattatcactccgggatccagagtggtccaaactcagagtctgcccaactaatacccagatgggttctcgaaaggcctatcacggacgctaaccgcctaagagtgttacggacgtctaccttggatgcaacctagagcgcccaatgacatttatactttttttttcttgacacagaatcagatcttgtctcttgtgtccagacatggtagtgcgcgcacaggcctctacttttaaaggttgaactttttggcaacatacgtccactacatacaatagtccccaattgttcagctgctactacgcacgagcacaattctttacaaggagcccattagttagctctatttttacatgtaatttaccatattagtgagctttttgcagaaaccctaagtgggtcatgggcatgtccatatccgctcttagcctataaatacccttctatttccatacgaaggggggatcagaacctaaatagtcgaagctttgtaaatattattctaagctttcctcttcttcaagagaaactaagaatacagagttagaatttcctgcaaaaattgtaaacacatcaaatacacccttataggctaatagattgactcatgaactaaggttaattaacacttgaatcaagtaaaaatccccatctcatttatttttgcattttattatttccttagttcttaaatatttagtttttaaaatttcaataaacgcttattattaaggtggacaatgaaacctag

SEQ ID NO: 391501 - DNA, 1449 bp, Cannabis indica
atcatatgtgaaaccatttattgttcgtttagactttagagtgtaaaagaatactctctatatcacaaatccatgtgcctttgctaattattattcccccgttatctttttattgttttcccactaattcaactatttatttattttaacataattttggggtaagaaccttctcgaactttttatcatctaactaaaaatattctttatgaaattgtagactactgaattcttattatgagccatatgaaataaaattatttttaaaaatttagacaataaaattataacattttcaaataacacacatagtttattaaaatacaacttcctactattatctatcgccaaagctagaatttttttttttaaaaaaaaaaaatcgcaccacaaaaataaaattatattaaaatagcagtctttaaaccaaaaaaataatatacaaactcagaatttaacacaactcatatcagtagctcaaaattactaaacaaagctaaaagccaaaaaaaaatcttatagcacttaccatagcttctctactctattatttaatatacatcattaaattttcattttttttactttagctcaaacttttacattacatcatacaacatattctttatttttcttctaaatattatttaaataatatatttataaatgaaatattatatatatgggtaaagtgtgtatatgatgtgattagaaaagttaaaataatattaaaaaaggtttaaagaaccactatttatatagctaaatgtggagaaaattttagctcaaaatcttatgaggtaaaataaaaatgagctttaaatttttttacattttagctattataaaacaccaattgaaagtgcttttagtaaaactacttaaaggtgttatcctttagttaaaggtaacttattagctctccactaattcaaaataaataccccatgcactatatcttaatttttttaaatagcacctaaatatatgtaaaatgaaaataaatagaatctaaacatctttcagtattcgccaaatacaaaacatcaacaatggttacttaaaataaacaatcaatacatataaagttaaatttatgagcaaaatttttataatggaagactctcaggcctacaaaataacaataaatacaattctattaccacacatgttagagattttattactgtaacgccctaatattaaggcacgctacaatacctttttcaattacagtgctatttttgctaatcaaaattttttctcgaaaaatgtgtcaaattaaaactttttataataaatattaaactttataatttacataatgatttacaaacacagggatcccgtttctaaacttttatacaaaatgtaccaaaatataatatccaggtcgctcagcgactacaaaatataaccccagatgtcccgagaccgaacactccaggt

SEQ ID NO: 391502 - DNA, 1101 bp, Cannabis indica
agtctagcccacgaaggagatgacctgctgactaggcaaattagatgcagttgaatgagtcaaaatcgtgtcctataattgtgggcaattaattatgaattaattacttgatcttaatttaagtagtcttccattttagcttgagaggatcttctgtcaagatttgaggagcatttatttcctaattttgtgtgctggaataaaaagaaaaattggactagtattccaagaacacgtacctgaccttccaacgttacggtactggagctgcttccgaatacgggtcgtcgttggcagaagaccatacaatcacgaagctaaggtatgttcctagaagtcctatgtaacttgggcttggcccaaattgtcttccttaggacctactggtgagcctttcatgttgatcaggatttcacatgtcacttgtcggaagcacgaataataaactttaaatgctttttctttttaccacaactaatttattttttataattaaatgctagttttaatttaataatcaccaaattaaataagaatatagtttaaatatttttattaacttgacaacaaagtctcatgactaataaaattacccttttatttatttttcttcttctacttctttattttctccaagtgtaaaaattattataattaacaaagtcaataatgtgaatgctaattgattaataataaatcaattattgagattcacaacttaatatttatcccggatattgctggaatcatgggccacaaaatctaggctctcaataagatagatctaaaatttaacaaataaattttatagcttactaattgctcatgactccattataaactaaaaatttcactcctgatctcactgaacgctctatatacctaatatagtcatagtattagttatccattatttttatctaataatcaatgatcatctataaatggtttacacagagtaagaactaaggtggcgtttggttggaggtaatgaaatggaatggaatggaaaggaaacaattttcattctattcatttgtttggttgcattttaaagtattgaaatggtattccaatagaatgttatttccaccattttgg

SEQ ID NO: 391503 - DNA, 1011 bp, Cannabis indica
ggcttctctcttcattttttttttccatttttcaaaccttatatttttatcattcacttttgtcaaacctaattatttttatcattcactcttccatctctttctctcactctacctattattaattttctcaatttcataacacttttgtatagaaaattattttctcacatctatatcattttattttcaatgcaatcaaatttagttttatttacacatcatcatattaacaattgatgatgttttcatgctctattagtttgtgttaataatatatcaatttgtgtttataatgtagatttttgaagtatgacatttaggcttatccgtgaagtcaatctcgatctgattcaatgcactaagtagtggccatactctttaaagatatggatgaagattctatctttaattatttcgagcaacaagatttcacgacaagtgaactcaccctcttttgatttctactgatataaagaagtaattctaatctaaatggattgctatcatggtaagatgagatcgtttctaataattataataaataatttacaattgtatattttctatagttataaatatatattatttttcttttgaaaacctgtataattatatatttctatagttataactatttttttttttgaaaacctgtatattataaatatctatatataacgactatttttctatgcttttgtatattaattaattagtttacaatatgaataattaatatgtatttggatttttttttgtttattttagaaaattcaattgctattatgaatcacaaatcgtttacaataacacaaaattttaaattttttcttattttattctaaaaaaaatatgaatttactaatctatctatctatctatctatctatctatataaagaagaagtatgaggcggtgatatgacgctctaaaatttctctaaaactatttttctttttttttccttaattctctcaattttttaatattttattagagcataaattt

SEQ ID NO: 391504 - DNA, 1063 bp, Cannabis indica
acacgtaagatttaactacaaacgccactttatctcatttcatgaaattcctctcaaagtactacaattccctcactctttctctctttaaagttctaacagaattaagagaatgcaatcaacaatttacaaataaaagaatttacatgaaatcaattcttagcagctcaggggtaaagatttctatttatagaagcttaactactaactaccaaaacagaattgggaacctctctaacaccctagctgactttttccaatatagaccaataggaataggacttgatgactggaccaactaagtgacaaaccaaaactcataattcttttttaacatgttaatatataaaaaaaaaaaaaaaaaaaaaaaaaataaccaagactttgaggctagtggttggaaaaacttgtataggatctttattatttttcatgtaaataattatttagcataacaattatttcatataacatgttaatctaaaatctagaattatatatcagttttataacactttaagtgggtggcacacgaaatgtgactcctcttatttaatgatctaactcgtattcatttctgtcgcagagtattagcaattattgaatctgaattttcaattgaacatgaatgaaaactctagttttgcacaaagaatgtatcaaatagaatagtgtgggttattttctcaatatgcaattaaaaaattctaaaaaatgagagaagagaaatatggaagactacattataaattttagaccacaaaattcttctttttttttttttttaaaatcaccacaaacttctttttgaatgggtaagttcaatggttaaagtttttttctttttttttgaaagtgagttaaatggttaaagttaaaaataaaaaagaagaaagaagagacaaacttctttttaagaccacaaaatacaaggtataagagcaagtccaaggacacgacaaaattttatatatgccgttattttgttccaaggagactgcaattgtgccaccattttcaagttttgtctacagtgcacggcataaatgccgtgcactgtaga

SEQ ID NO: 391505 - DNA, 711 bp, Cannabis indica
ttttcttatgtcgaactactctgctcagaagactcaacatttttgaataatcaagatccttgtggacaattatgtacaagttctgctcggatgatccctattgaagatgtaaccatgacagttttaatttgagagttctttggccgggccataaaagtactatcactagtctaaatttgtaagtgttttttcacgtatcatcatgttagatgccacatcattctctacaaaatttagaataacataaaaatataccacctcttatagtacttgataccttagagtattctttaatattattccttttcgaaatagatcacttttgtcgcaaatctctctttttttagtagtgttttatattataggtatgttagtttttttttctttctaatttaatcaactcttatttccaaataaaaatcaatactaaatgggacccaacccaagataatatatatggaggttatacctgaaatattggtgtagttgacaacaatccttctcaataatgaactcatgagttacaaaaaggaagcaaaaagaagaaaaacgatgaggaaagagagaaagaatatattttggctaaacacaatatataattataagttattaatatatttattattagaaaaatatacttaatattttttttttcatgtgttgaatataatttaagatcgaatctcatgtaatttaatggttaattagtaa

SEQ ID NO: 391506 - DNA, 786 bp, Cannabis indica
atagagttatattttatactgatatatgtagctatatatataaacactaagcatatacaatcaattatgtatactgtcttattatttatagtaattatttttaatatgtagatatatagtatagcactaatatattatataattacaaaataatttttttattagatctcaaactatttctcatttctttatcttttatcatttaaaatttgacaaattaccatttcttggtgatcaacaaaagatttgtcaaatttgaatgactttgtatattcaaagaaaaaactgttgttgactaaatttatttatttccactattactatttattccaatattattcttattatttcttcttcataaataatttgtgttatataatatggatggtgagaaaatcatgctcatacaaatctttttccgaactaaaactttacataatgatagctctagctagggctatattattccacacaacacatttcaaaggtgtagtctttcaagtctttttctctcttttttcctttcctattcaaattaaaggaatccactaaggagggtcattataagaactatatcaataaatatatatatatatatatatatatatgtgtaaatatatactatactatgttagacttttatttgggcttacattaaattttattggttttattaaaacttgggttgattggatagttctttgctgtgttagcccatgttgttggtgatcaattgttaatgggcttagcatctgtgagtaaagtctaggtgaagcagaagtgtgg

SEQ ID NO: 391507 - DNA, 647 bp, Cannabis indica
gagagagagagagagaggtaataggtgtgtctgggtcatagggtacttcaagggtgtgcaaagtctgggcattccgtcatggaatttttctgggcagcggatggttggaggcgacttgatatgggcgtatggagtgtttgttcacaaatgagatgtgtatttttttctttatctcatgtctgatgatgaatttaaatttgtgactttttcatttatgtgggtattaaatttgaaaatataaaaaagggtattattaatttttagggattaagtattttgtatgttggagtatttattcttgatgactgtaagattttcactaaaagatttttttaggtttattttgatcccaaatataaattgtataactgatttgagctcttacatatacacatatattttgaatttgtccgaagcaatttgtatttaacttgagatccaacaatgttccgtttaggtgaaagtcaaagttattcttattttataaacatcttcattgtttcatattgtaaacacttagtctaagttttcatctttggatgtacaactagatgttgcatttacaaatatttatctgtcgaaatccaacactattctattgtttaacggatgacattcatttgagatttgttctattaaaaataaca

SEQ ID NO: 391508 - DNA, 754 bp, Cannabis indica
ttgtgtatttgtaaaataatcctctttttaaaaaatttacataatatactaaaaattaaaaaaaaaatacgtctatatagaaattttttcatttttatgttttaaatttttttatttgcaaaaatacctctttaataaaaataataaactatttttttagctgttttatagtttatttataattgtattatagttatcgttaggttgttttatagtttatttatagttgatttatagttgttgtgaggttgaaatgtgtttgttttatagttaatatttttgttattttagaattttactaacgtaattttctaaataaaaattttagatagtaaaattagaaataaaataaaaaaaatgacatttttgaaaattcatcttatttttttatgtaaaggagaaacttaacacataaatcatttacaaagaatctaaattaataatgacaagcacaaagtgcaggctaattaaatatatatacattaattgggttgattaatgaataatctggaccttaaacattaatatccaagtattactggcaagaacatgccacccaccaaagaccaaactgccgaaagggtagtaaaggaaaagggttatttacataaatatgggaaaatatactatagtttacatatatatggcaagaaaacttaatgccactaaatatggcattcaaaacaaaaaagttaacaaatatgggaaatgacatgtctaataccataaaaaaatattaaaaatcaaatcagat

SEQ ID NO: 391509 - DNA, 1110 bp, Cannabis indica
gctaaattgaactttatagactggtatattaatgctcaaaagaatactgtccctactcatagagttatgattcggctgatgagtttttagagcattggacccctcccccattttccctacaattaaagttaatgttgatggagcaatctttacaaatgaaaaggcattttggtattggtttggtagtaagaacggcggttggggtaggtcttacaagccaagagatcgattaaagtgggtattttgcagccacatgttgtgaaagtcattggcatcaatgagactttaagttggattaaataaatggttggacaaatgttgtggtggagtcggattgcttgagagtcattagagatttacaattaaaagtttaaatatatggcttctccttatggccatattatctcggattgtatgactatgtggtcggatattgttgatgttttttttaattttgtaaaacgatctgctaataaggttgcgcatgcccttgcgcgatcttctcttcttgagactgattataattatactagggatgtgttacctatagtttatgcatccttagtttcagatgatttgatttaataaaatttcatcattattccaaaaaaaataaattgagaaaagctacatatatagcttattaagaaattaatgacatgcaaaataagtgcaacttatttatatgctactaattatgtgcaaacgaaacttgcatgttggtacatggtttgtatcgacagttatcatcaacgcatctgaacttcccggaattgagatgtcaatggcatgattttgcaccctgtaagccatttgatagtgtaatgtggatcctagggaatcaggatcttggtctatgcccacaatttgcagctgaactttcaaggcatctagcaaccgtttatcccgtaaggacatgcagaaattggggtagaatgtgacaatgactgtgcctgcattgagtgttgcttctagagtgccgatggaggcatgctggaacttcctcattctcgtgtcaagcaatgttattcttgcacaaactggtaagccttttcttccgtgatgggttagggcaagtcttactgctccgaaatggatatgagttagacc

SEQ ID NO: 391510 - DNA, 1786 bp, Cannabis indica
aatctacgttgttctatagcagttctacaacagttaatctttaaatttttgtatcttttcttccttgagtgtaccaatggatccttttgttaataaaatgaaatctgctatctccctaactgaaaataaaagtacagttcttgtcattgctgatgatggttctgagtttgaagagtcttatgaattcattccagtggctcgtattcttactaataagaaagtgtggctaagtacatttcaaagacaaatggccgagcattgggatggtcgtttcaaggtgaatatcaaagaacatcattctggtttgttcctcctttactttggttgtgaaggtgatcaatttagggctttagacaaggagccacgggattttcaaaatcaccatattgttctcgtacaaccaactttgttgcaaaatgttactcttgaaactatgatttactctccattctgggtacaagcatatcaattgccttttttgagtaaatctaaaactttagcaagatctttggcatctatccttggtgaattggtggctgttcatgaagattctttgaatgaaggatgggatccttttctacagtttagagttcgaattgacattacgaagcctcttctgcgaggaagaatgattactctgctcaaagtcaatgataaattttgggttgaattctgatatgaacgtctccccgattattgtatggaatgtggaataaacggccacctctatcagaaatgccctatttttttggaaaaattggacaaaggtgttgaaccagaattggcttacgaccctgcattgaagggttcaaaacctccaacaccatcctgcgatcgttacagaacaaacttctttaacggcaatgcttgacctttacttacaatactagcacttaaatcattaactgctacattgcctaaattgcagacacaattacagcctcaaccacctactcttcttgttggggaatcttcaaaccaggaacatcgtaatcacaatgcaaatttgtaaagacaacctagtcttaaattggaaattaacagataattaggctttaattatgaaagtcatttattagtattgaattaattatttatgatgatttatttgaattcagaatgcatttttatgtcacatatagaaattttataattttacatattttgtgtccgggaacattgaaacacggcgtatggctattagaatcacatcttagtatttttagtatagagggacaatagtttagacattgggaatgtcgggaatagtcgggattttataatttcccaaaataccccctagtgccattttatgacttttagtgtgggaggggcaaaatggtcattttgcctcattagtctttttgtctttagtgaattaaatttattattaatgatctgatttcttattagttattttagctgaaattgattttagtaaagctaaattttatttcatttatctcaaaaaaaaaaaaaaactaaagaaagactctcttccaaccctctctccttctctctctcgaaatccctagagcaagctagggtttggtgttctttttgaaattcaagctagtttgagcaagaatttggtggttccaagttctaggtaagcttttcgtaacttctcctttagtttcttgaagtgtaggagaatagttcatgcatgattttgtggttttgttgctgtagctactgttagggttatagttttcagaggttgatatatgtttagaaatgttgttttgatcatgattaagggctgttagtaagtttaatcaagttt

SEQ ID NO: 391511 - DNA, 766 bp, Cannabis indica
ttgcttgtatatatactttcatatcaatagaatcaagtgagcttcttttgctattttctctgtgtttattttcttccttgctttctttctctacatggtattagaagtctttgactcaagactatgtcttcgtctacctccgatcctcaggcccctgccatgactcctgcaactcaagctccttaggcacctgcctcacaacccactgctactggatcttggaatccattctccaattctttgtcttcgtcacttacaatcaaactcgaccgtgtcaaacttcctttcttggaagtctcaagtcattcccaccgtaattggacatgatctcgatgagatcttgttcactggagtccctcctcccaccacactgctcaatggtaactcaaaccctgaatatctccaaaatgaagatgcaaggattagttacttctatcttggttacgttcatctatgtcagaaaccattcttgcatctgttgcaaactatgacacatcgttttctgtttggtgcgctcttgaacagaagtttgcttctcaaactaaagctagacgacttcagcttaagggacaattctcacacgggcataaaggaaatcttcctatttctgaattcattgacaaagttcaatcgattgctaattctttggtgattgcagggtccccgattgatgatcaagacttaattcttcaagttctaaatggtctaggaccagagtttgattcagtggtttcaggaataacatcaagaagtgacaccttgtcta

SEQ ID NO: 391512 - DNA, 749 bp, Cannabis indica
taaaattccataaaatcgtatttatgtaatattttgttgtttttgtgtatttgtgaaataatctcataaataaagtaactaaaatctcatacatatatttttttttgtatataattgttttatttttatttatttttttattgagataactattttatttatttttccaagtttttttttaaagtactatcaagttcaaacgtaaatgtaagattctaagtgtgtattttttatttattttttgaaaaatcattcattaattttattaacaataatcattcaagattacattactaaagtgagaacaaacatcgttacttctgctaatatgataagcaacaaaataagatgctctagccaaataatgagcaacactatccacaaatcccctaataaaaagaatagaaacatcattcaactcctctaataaggatttacattcagcaataacactcctaaagtaagataacattgagagagggctatgaattgattgctcaacaatgagattatctgtaatatcctaagattaagaaaacggattagtgaaaccctaactagttaaaatgtatatttattatggaattattatataatttattatatgtgaattactttgataaatgacatgttaagacccatttttgtaattttgacccgagaaaggtaaaactgtaaatttaattgtgtgcttatggattatattattatatagtatatttattttgtccttctgcaggtattttctg

SEQ ID NO: 391513 - DNA, 1706 bp, Cannabis indica
ggtttataaaatagctgcataaattatattaatgttaaggtatcttatgttgtagtaaaacttttcctttcttttttagggtttcatccctatctctacccgtgagttctttctttgactttctaaccagagctccgtcagcctttcttgggctttggtgtggctctagtcgggtgtgggtgtttgtatttgtgtttgtacgcacaaggacctcttggtcctttctcgagatgccatggccttttttttttcttttcaaccgtttgttgcctttctttgacaggttgtgtgactatcaaagattcgatgacctttcagaagttttgtatttccaattgagggtggcgttgtcagaattgcagtggtgttgtaaagatcgcttaattttgttatggaaattagcagataattagggcttaattatgaaactagaatattaattttgatttattattttatgtatatttatttgaattcagggtgtattattcatggcatatatggaattttatatttttacatattttgtgatcgacaacattagaacgcgacgtttagccaatagaatcgcattttagtattttagtagtagcggggcaatttagttagacattgggaatgtcaggaattatttgaggtttagaaatgatcaaaatacccctaagtgataagtgtgcttgttggtgcgtgtaaaggcaaaatgatctttttagccttttaatacttttgtcctttagtgagttagataaaaccttaatctgattcattttgatgttattattagttagataatacaatttattaattcatttattcaaatgagagaaaaaaaaaaataccaaaaaatccaacaccttctctctctttctctcgagctctctttgaaaccagcaggacctaggattttaacagtttgattcagaggatcttagctagttcttggtgtatccattgaaggtaagagccttagcacttttccctttggttttcttatgttcgtaattgagtattttgcatgattttgtgagttggggttctgtagctttcaatagtgttggtttttgtttttttggggttaaattatggataattagaatgatttgagctagatatatgggttgtggtgttgtttaagcaaggtttaagttcatgaactcaagctttgctctctaatggtggtttgtgattctagatgtcttggggtgttttattgcatggattaggttcattatcgtgtatttagcaggtttggaaagtttggtgtgatttggggttgatatgaggttgtggggtgattttgtgtgtttcctgcactaaactaaaatttcggttcaggaggacctgtaagaaccggtcgaccggttggtccccaagaaaccccacaaaaccgaaattctggttggggcattttagggaaccctaatttttcctatttttacgatgtctagggtattaccatattatccatagataggaaaacttttagtttcaagtttaagtccctgaaaagtgatttagcgtatcactcatccgttttgcgaataatgtgatttaggggcctgtaaatcgtcaagcaattattccattcaggttggctggcacacctgaactcggaaacgaggtaagattagtataatgatatgcatatgtgcttactgttgggattttataccctaaataaaatccatttcaatataatctgattt

SEQ ID NO: 391514 - DNA, 3213 bp, Cannabis indica
ttttttaatttttatttttggtggtagttaaaacttgagaagagagatttctagtcccaacacattctttttttaaatataaatcatatatatataaatgttttgttgatataatgaaacttaaatctcaatccatactcttgattgacagctgctaattctaaacaagttaactcgtacatgcatgcatattatgaagggtataaattctacgggtggtgtagtttctctaaatggaaatgtcttcaaaagatgtctcgtggaaagttagatgtcgtccgtataagagttccagaagtctagcttctccactccgaaagttgttctttatggaaaggtagatatcatctggaagggcgttcttggaagtctaacttgtccatccagaaagagtctctaaaagctagtcttccttcggaaaagagtttccagatggctagttctctcctcttggaattgagttttggatggctagatgttccctcctggaaaggagtttcagatagtcgactccagttatcgctactcctatccgggaagttccttcaacgtacgcttcggtttatcttccaagaaatgtacgtctcatttggaagcgcttttaacttaagttgacgtggagatattgtttcggggagtttgttaagttcgttaagtcgtaactaattaacttagaaacttaacttttgacaaccactaattttgggattcatattctatctataaatatcaccaacacttatcttttagaaacaagtgtgattaacagacgagtttcgagaggcaattttgaagggaaagattgagtggtagagagagaggtacagaaaaacagagagattgggtttatgatttgtataaaataatttctgtatatgaagaagatttttagagtaagagtatgaaagataaatactttgagagagtccaacagagaattgatctcgaatgtattgtaccctgttcttgctcaatcaataaagaagatttcgatggtgctctaggactgaagtagagccataaattacattcatttataggacttgaataaatataaatcttgttgttgattttatggttttattgctttatcgtttctagattttagatactttgttcgtccctgtttttatctctaacttttatttgtgaattgtttatcttgtcatttttaattgtttgttgattaagttttagttaatttgatgttattagttataattttccataaatcaaaacttggtaatcgaccaagaatgtagaatcaagattctttccgctgcatttctttaataaacaattaatgtcgtcaatggtaagatttgaattggaaaaattcaacagaacaatagactttgcactatggagagaaagtatgaaagagatccctagtgcaccagaaagtcttcaaatttcttagagatgagaaattattgactcacaagaaactagatgaaatagttaaaatggaggagatgacttattacatgatcatcatatacatgtccaacattgtgaggagaaagcttgtcgcataaaaaacggccaaaatgaatttggaacaagctcgaagaattctatatgaagtcatcgattgctagcaagattaatttgctacaaatgttatatggttttagaatatttttttttcctttctttagatgataatattgacaagtttaataatgagattattatagaattgactaatataaatcataaggttgaagaaagttaggccatcattttgttaagatcgctcccaatcatgtatcaagaagtcaaagctgacatcaagtagatgtgattgcgtcaaaagatgttcttgccgcactcaagtccaaggattttgaatacaattggagaggaatccaagaaggaagaagtgtatttagcaagagggatatcacctaagaaagtaagttcgaagagtaaacagcatcactctcaatcaagatcgaagtctagagaaaaggaaactcaaaagtgttacttatgtagaaggtccggacacttgcaaagattttgcaagaagtaaaaagagcagtaaagttcaaaacatttcacaatagagataggaaggacaaccagtatcattaccacaagaaagattcaattgctatcgcagaggatagagatgacttctcaacaaatgaagaattgtttttcatcttggaatcctcaatgaataggtaatggattcttgactccggatacacttatcacatgtattcaagtcgagaattattttttaattataaatcagttgatggaggtatagtgatcattcatgcagggtcattagaaccgaaaaggttgccatcaaacaatataatggttgaatcaaagtgttgacgaacataaggcatattctggagctgagacaaaatctcacatcccttggtacgcttgaatatgaaggatacatatacaagtctatgcacgaaagcatgaggatcaccaaaagtttactgatagtgatgaaaggtgaaaagatcaatggtttatatattctccaaggagaaactattccagtataagtagcaagtttggcgtaagagctagaatcagatatgcagctgtggcatcacaaacttaagcatattagtgaacaaggcctcaaagaactacacaaataatgtatgattgaaaatttaaattcttgtgccttaccattttgtgaagcttgtgtattaggagaacaacataagctgaatttcactccaacaaggcatacaactaagaagatacttgaatatgtgcatgttgatctttggggccatacaaagtgcctactcactcagtaagcgatattttctttctattaaagatgattatagtagatgtgtttggacctatttactagaaactgagaatgagtgcctagaacaatttagaatttgaaaaactcgggtggaaaattaaacagatcttaaagttaagaaccttaggactagggctgtacaaaaaaatttgtaaaccgcctaaaccgaataacccgcccaaaccgaaccgaaaaaaccgataaaaattacaaaccgaaataacccgaaaaaattacaaaccgcccaatctgttaattgggcgggttgaaaataggtccaacccgcccaattaaaccgaccaacccgaccaacccaattttgcactttattttttttttaaaacttttagtttttattatatataatataaatgattaaatatataata

SEQ ID NO: 391515 - DNA, 718 bp, Cannabis indica
tgtggttgtggttgtggttgtgtgataagttaaattgattgtaactgtaaaataatatagaataatttgtgctaaacttttttatattttttattttaatactgttaatctttaggagttttatttgcatttcttaaatttgaattaattttaaaaaagttacttctaatatatcttttacattgtttttctttagtgagaaatggttgtaattttaataagttagatactcgttgcaagtagagtctagtcattcaatccactatatatcaaaaatattgtaccttcaatatttgttttccctaaatatatagtaaatatacataattaccaatattgtaggaggggaaaggaataataccacttggtttaaaagcataatcaaaaatcaaccatttagtttgtggaaatttgatatttgaaaatcccaaaaaatgaaaatatttctataattgggtgtttttctaataaaaatttcattgtaaaactgagaaagctttagtgttgctgactcttgctgaaaaatgccagagaaaaatgaagatatgttaatttcactgttgaatcttgctgcttgattagcatgaaagtttatgcttattgaggttccattattattcagttcatatcaatagtagaattagtggctcatccagcaacaaaaaattgcaaaaatcacatgaatttgtgtgcttattccttgtgattcttgcattta

SEQ ID NO: 391516 - DNA, 1179 bp, Cannabis indica
tcatgaaaacctagcctccactcattttttatgtcaaaaatagtcaacagtcgcgaccttcgatagagagtcgtggctctaggaatttttacataatgcaattattcaattttttccaaagggtctttcccatggctcttgctcaattttacagaattgataccattttgaaatcctactgcaacgactgatggtattttagtcataactctctctatataactcagaattggataattcaagatattttaaaaagctaaaagagaggtctagaactttcattcagaaagtttttcttgaaactgaacagattatagctggagaatgttgaacatccaaaacttagaatttttcacacattatatcttgaaactccaaaatttatgctaaatccataaaattcatcttatttagcatgtttcctctcaattcaatccatatgatgtattttaccattaaaacctaaaataagaataaaataagcataaacctgaacaataaaatataaaaatactaaaaatacacactaaaatggactctaaaaatacataaaaataaacctaacaaattttttcaaactcatcctttactcatgctcgagtaaatatcaagttaaactaacgaaacaaacacaatttaacaagctaaaccaccatttccatctacattgttttgccactactcatgaattctcaattgcattatcaacgagaacttcaatctaaccactttgaaaattaaccttaaagctcaaattagggaatttaataatataattcaccaatgatcacaataattggattctatagtatatgctcaactcaaatcaaacaagtccacaagccaatttttaatatacttgcatcatttaactttctccaataatgtcaataacacatattctgaaatcaaaagaactttcacgagctataatgttaggcttaggcaaggtagatgaaattgtaatttaggctcagaattaccgtaagcatataaactttacaaactaacaataaaccaaataatgcatccaagaaataaccatttgtgtcacttgttttcaatattgagaaaacattattttatacgaccatataataattatttttttttcaaactacattcccccaaacttatttttatcgatgcataacaagagtgtagctatttttttttttt

SEQ ID NO: 391517 - DNA, 792 bp, Cannabis indica
ataccaatcaactagccaaaaattttagttctggtatttaaaaaatttgggcagcaccttacttgtattttcctctttcctcaaattaacttttacagcagaaactcaattccaaaaaaaatttctaccactaaaaacaaccaatatccagtctccacacacaataataatccaatatcacacaattcacaatcaattactcttaaaacaccaaactttagtgaagagaaaaacacttacttgaagaatagaagctttgttgcaccaaggattccccaaagatgatgaacaccatgaatattggggtttagggtttttttttttctgaaaatttgggttgatttagagtaatgtaggtggtttttgatgaaattggtggttgggttatgtttataggtgataacggtggagagtagtggaaggaattggtggtagaatggagaaaaatggtgaaattagtggtctaagagagggttggtcgtggctgtttgcgtttggaaaaggaaaaaaaattagaaaaaaaaaactggggacaaaagctcttttacccttggttatgcttagcatatcgcgacagtttaaatgcagggttgagcatgccgcgacccgcgtctcccctttaggtctcttctgagtcgagcatgtcgcggcccgtgttctccatgtcgcggcccgtgtctcttctccattgctcacatagtataactcttagttttgacctgcaagattagagattaaagaattgttcctagacactaaaaaattattaaattgactagttttcacgatttc

SEQ ID NO: 391518 - DNA, 1231 bp, Cannabis indica
ctttaataaagtaagtaaacgtaaggaaatctaccttgccattataaaaatatatttaagaaaaataattgcaatgagatacaatagtatccctaaacataatttacaaagaaactatttattcatatacacataagatagacggccttaatcaacttcgtgagcatacatcaaattgaaagcattttgattgttcgagctacagcaaacgtgtctaaagtaaaatttacatgtcactccagctatcgtcgtcatcttcaccatcatcactcccaacagcctggaaatttatcactcgtcaatttaagtgggtaagaaaagaagtagaaatggaaaaacaaggaaaagaggatatgtgaaacctggcgaattgcatttgctttctccaaaattgcagtgactttgttatttgcagcaggtgcgggtgcaggtgttgtagtagttggctttgctgtcacggtgcgtctcagattgaatgactgaaaccacataaacagtaatatgagtacaattcagctaagttgaactctacatcatctacagaatccttagtctctagttaatttattgatttattgactaggttaattgtaatgttcgatacaaaaatttattttgcaagatctcataacataaacatcttatttatcatgggatgattattagaaaagaagagcaatcttctttctgataacaaggtagtttgaaagttacataaacacaaaaatgaatgctagcagagattattgatccagaaaacttgtttcaattatcttttaaaagtgtgcaacatctagtatgagacaaagcaaaatgagaaaacataaaaaagagcaactgtgtttatcgtatacactcaatttaaagaaatctgaaggctctgtttcttttttctttgttcatgttatctgcagtctcatgtcattaatttgaaataaaattacagccaaaatatgtaactaagtcctgtttaaatatcttagggattttggaaaataaaaatcacaatgagaatcctgaaaatattactcacctttgttctgatttgttgtaagaagtcctccctttcatcgactccattgctatttggggcttgcttaatttctttctggctgtttaacttctgctggtcctgccgaacagaattattccatagttggaaagtttcactttagaattccagttatccaatttttatagctatttttttaattaaaaaaaaaaacgaaaa

SEQ ID NO: 391519 - DNA, 1030 bp, Cannabis indica
taaaacttgaaaaatcaggtagaattaagcattctaccatagatatatatatgactcgttaacaaaatatgtgtagaacaaaaatgtaaagacaacggaaaaattattgagaaatgactaactcattgtaaaacaaaacaagcaataagaaaagcaatgaattttctaaacaacagttaatgcaaaacataagagtaatatgaaagccctcacatctcatagctaaaaatgatcactaacaatataaccaacgacttttcatcaaggccaatccacatcttcaataaccttgtaaaagagagagagagagagagagagagagcaactgagattggaagaagaagaagagggacaacgatgatgataaaaatagtgaggcaaaaaagatgtggaggcatataatgaaagagaaatgttaaaaggcactactggtgcctagcaccctccttagtgtcatatcgctattggtgcaagtatcaagtcccatatcacttaagataataacttttagggagtatcgttaaccaagaacgccacctcaaggtgatgctaggcaccacttgtgcctaatatcaatgctcataatgaaatgccatggaattgtttacaaaattgagtttttccatcacagggcaaaggaaaactatcatttgagaaatccacaaagcatggaaaagggaaaaaaatagtaagaccaattttacagattatattgttacttacgaatcatagatcaactacagtttgacataaaatatggtgagtgttttgtaattagtataagaacgaagaccaaagacaggtatagagtactgacccagagtatgatttacatttgcaatcaaccactgatatgatttacatttgcaatcaaccactgatgaaacgaagacacagtacagaagtaagaaaagtaacccatcaaaatgtattattattagaaagccctcagatctcatagctacattggatcattaacaatattaaccacagatttttcatcagtccatttacatcttcaaaaacctca

SEQ ID NO: 391520 - DNA, 992 bp, Cannabis indica
ctctgaccacagagctattgctgttgtgattgtagtacaaaatgattcagtgcagcagtccaaaagacggagttgtttccgctttgaaaagctttggttagctgatgctgagagtagggacatcatttcttaatgctggttagatcagtcttcccataatccgattgacaatgtgcttaataatcttgaagcttgtgccactaacttgcaaaaatggcacattggaaaatatggccgtatgaagaaaacgatcgctgaggctaaaacccgtgtcactgaactcaataacaatttggttcgatctaacaacatcatggaagagcttaaaacctctgaatcaattcttgatgatttattagaacacgaagagatatattggcaacaacgctcccatgaagattagatgaatttaggagatcgtaacaccaagttctttcatgcgaaagcttcagctcgacaatccaacaacagaattaaatttctcatcaataatgctggacacaaagtacactcccgcttggacctggtcattgtaattgaagattatttttagaatatttttcaaacttcccccatggatgatgcagcgatgtcctctgttcttgaaaccattcctgcaatagtcactactgatatgaaccatgatcttacaaagccttttactagagtcgaggttgatgaagcgctaaaaagtatgtgtcctgataaaagcccaagaatcaacggtatgtctgcgatgttctatcaacaacattgggatttagtgggggatttagtctccaagcctgtgctgggagttctcaatgaaggtgctgacccaactccattgaaccgtaccattattaccttgattcaaaaaattaaaagccactgttcatgaaagattaccgaccgaacaacctttgcaatgtcatttcaaagctcattaccaaggttcttgttgcaagatttaaggttgttctccacatgtcatttcggaaactcaaagtgcc

SEQ ID NO: 391521 - DNA, 1072 bp, Cannabis indica
ggcaacttaaaacaactcataacataagtaaggatcgacaggacaaccacttttaaaagaacttctttcccaccaatagaaaaaagtttatcattctaagagttcataaatttccagatgcgttcttcaatgtcactaaacagttgtttcttttctctttcagagtaagctggcaatcctaagtatttttcatggcactcactaataggcattccaagaatattctgaaaagagctttggacagtggcgggtgtattgggtgaaaaagacataaccgatttgtctaagttgagctctgtccagaagcacgatgatagatgtctaaggcacgtttaataaccccacaagatcgatcatcagcttgacaaaagaggaggctatcatccgcaaagaacaaatgagatatcattggggctcttctagagacaacatatccttttagacgaccaatattttcctcatattgtaataagcgtgataaaccttctgaacaaatgagaaagagatatggggaaagtggatcaccttggcgaagaccacgctgaggagtaatggaacctaccaccgaaccattgatattgaaagaaaatgaggttgtgtgcagacatctcatgataagggaaatccatcgaatattgaaacccatttacccattaccgcaaccaaaaaagaccattcgacacggtcaaaggctctgctcatgtctaacttgatagtagcatagcccttagaacccttcttgcgatgtttgagtgaatgaatcatttcaaaagcaattagaacattatctgtgatcaaacgattttgaagaaaagcactctgcgttttggagaggacatgggggagaacatccttaaatctgaaaacaatcattttagagatgagcttgtatacaacattgcagagactaatagggcgaaagtccttcatagagttcggctttttgacttttgggataaaagtgagaagagttttgttgaagacagtaggatctccattttcattaagaagatgtagtaccaccgaagagacaaggtccccaacaatatgccaatgatgatggtaaaacata

SEQ ID NO: 391522 - DNA, 1983 bp, Cannabis indica
caatatcaaaaagaagattatccatcctatatttttaaatctctatctcaattttgaataactcaatgtaaataaatttctcttcctaccccttacataatgtaccttaaataatgggaactaaagacaatgtgatatcaaagccatgttaatcaaagtaaaccaaatgaccataaataaattcatgtttaatcaaaacccagttgagaatctcataagaaattttagattgaatggtattttatctagcttaaatatcaatccacaacaaggttattctatgataattataagaacctttgaagaactataatgttagaaatttgctgaatcaagaaataaatccccaccatgaaatttcttatatgaaatggtaaatactaaaatctaaaaataagatcttgtaggggctatgaacaagatcaaagcattttcacgaaccaaaacataatagatccaaaactccaccgataccgacaaaccccaccgaattacattttctcaaggatcactatcactatcacattcacataccttagtattaatatatatacacacacatataatttatggtggtgatcaaagtaataataataataaaaaaaaaaagagatgggtattgatttaccagaagcaaagcctctgttgaagacagagattcttaggtatgaagcagcccttgaagcccataacatccttgaagccatttttgattcagatttctaccaaaagaggaaaaaaaatatagaagaagaaaaaaaagagtgtttttatagagtggtagtgctaagctaatcttctctataaacttcactaggtttataatatatattttagtaggttggttgccataattttgttttattttccattttctaattcataattataatactttttattattttttatttattttttataaaagtaccttttatattattccaagaaacttgaattgtttttttttagtaaagttggatcccacaactacaaaaaaatggtgcttttctatggtgcactcatagtgagatatttaaattgttataatttttttttttatatgatagtgtatattatagttatttaatatattttataaaattttaaaataatttataatatataaaaaataggttttttatagtatattttacacatataacataaaagagacacttaatttactttttgaatcttatttttgatatattaattttttcttataaaaaatgatattaaatttttaatttttttttaaaatttgtaaaatgttttaaataattacaatgtgtatttctatataaaaaataaattaaaattatttaaatgtgaaaaataaaattttccagtttttttatagacattacaaaatttataagtgttatttttgttatttttaatgttggagatttctagtaaatattatattgcaaacattatataatatccaatatttttattatcatctaaaataaaattttaaaaaaatatatgtgtaattaaaagaatagtaaggacaaaaaaagttggcataatctattttcttaaggtaatgggtcaatttgtcaacaaacccattgagcaaagagttggtgggagagtgagaaagtgacacgagtagggctaatatggtaatttcagatcatcatggtcttcctcgtcacgtgacacgtgatggtttcgactgtatcatctcattttatattattttaatgtaattacagtttcttcctaattaatatgtttttttgcatgcttccccttagggtcttatcccgtttgataataccggcactcgttgttgggattgggttaaatttctttgtaatctcggtagtaaggggtttgatattgatgaggtatttttatatacatttattattgtagatcagggccggccctgaaacaaagtgggtcatagggaaaaaagaatttgggcccttatgttagaaaaatatagtatttttcaaaattggtaaa

SEQ ID NO: 391523 - DNA, 1713 bp, Cannabis indica
agagagagagagaaagagttaaatgatgtgtttgttgttagaaaggtaaattttgtatgatttataaagggtaaataccattttggatcttgtgttttattaaagttattaattggatcctttgttttgttaaatgataaaatagatcctatattttccaaaatggtataaatatgaccctaagctcaatttttaacaattttattttttaatataaccaactttaagataatttccagcatgaatagatacgaaaaatgtaatcagttttgtcataatatctatagatcagattattataaagttttattttgacaaaaaatcaatccaagatcctatttgtacaattttagaaaatacaagatttattttgtcatttaacaatatagagggtcctattagtaacttttacaaaacacaacttccaaaataatattatccatttataaaacttaagtatctatttatattaatgggatcgttttaatgtatgaatattaaatttttctttaaataattgaataagtattattttagtgtgattaaatttataaaaagaagtttatattacagtcactcactcacaccgattattttgctttatgaattataatctactgatcatatttagggctcgtttggtatgacacattgtattgtattaatattatttaatataatataatgtttggtattgagttgtattaataaattgtgtaaggttataaatattttcaatacacttgatcccaacaccaactacgggtctgggtcccaggtgcgagtcctgggtcccgagtccggctcctaggtccgggtccaagtctcggtctggggcccgggtctacgtccgagtttcgggtttcgagtccaagtctgtcctagattcgtgtccgggtcttgatctcgggttcgggattcggggttcgagtctgggtctcgggtccagggtccaagttcgggtctcgggtttgggtttgggtccgggttggagattggtgttgacccgaatcctttgtaaatattataatataagctaatacgaactatttgttatgcattaaaatttttggtcgtaataattaatacaatacattgatttatccatacataatattatttattattaatacaatgcaatccttatacagcgtatcaaataagccattagtaaataataaacctacattggtattttaataattataatatgacactctaaatctaaattgatacttttagcattttttttttttattattttaaagtactacaaaataattttgagctcaatgtctatctatttttttattttaatataatcaaaagccccattcgttaatttcatgatatatagtatttttaatttatactattttttaaattatatgaattatcaaatagcaaaaataaaaataaaatctataatttttataaaacataaatctaaaaataatatctatttattattaggaagcattgaagcatgtatttacttgttatatcaaatgcgttttgtggtgcctggtggaccccaaaaactcggaaaattcttcttcagaaaaggcgagtcaaacttccaactctcccagtcccaccaactctgcttctgtgcacctttcattctgaacaacttattcttcttttctacacaactaccactttgttatatttattagtcgttcatatatatatatatatatatactaataa

SEQ ID NO: 391524 - DNA, 1434 bp, Cannabis indica
taaaaattcaataggactctcacgtgcatgatgttttgtgcaagaagatcactgggttgtgtcacatcttaaccctctatcccataagttgaaggactgtttggagtctgtcttactcttccattgatgtctatcttcctttgatttattccttagaaagtctaagcttgaatttttatgcatcgaagcttactacataaaaatttagcaggactcttccgtgcatgatgtttttcgtgcaataaagatcactgggggtgtggcacatcttcaacccccctttcccaaaattaaaggactacttgaagtctatcatactccctgtgatcctttcttcttttgatatttttcaagttaagtctgagcctgaatttttattcaacttcagcctttttttcttggaagccaaagggttctacataaaaaatcaatacgactctcgtgtgcatgtggtttttcaagcaagaaagatcacttggggtgtggcatgtcttcaaccctcttttcccagaatgaaaggactgcttgaactctatcttactcctcatgatgcattctcctttgatcttttcaagcgaggtttgagcttgaatttttacacaacttcagccttccttcctggaagttgaagctagttacaagaaaaatcaaaaggactctcatgtgcaagtggtttttcttgaaagaaacattactaggagtgtgacacgtctttaaccctcctttcctacaatggaagcactgcttgagttctgtcgtacgccccgtgatcctttctcctttgatcttttcaagcaaagtctaagcttgaattttttagcaacttcagccttcattcctagaagccaaagcttgctacaaaaaaaatcaacaagactcttgtgtgcatgttattttttgtgcaagaaatatcgatgggggtatggcacgtctttaacgctccttcccagaatgtaagtgtaacgcactgtacaatagggacaccacatgtgtgtgcttttataaaattcttattttatacactatataattatatcgaaagtgtgggtaattaaaatcttataactaaaacaaacccatataactttttttttttataaaagataagtaatatttacaaactagtttaatagtgcttttacaacataaaatttgcatttccaaaatacattcaaaatagagcctcctgctcattgggccgtgccactgcgactaatatgtacattgctgctatgacctcaaactcatggctgctcaacctttgccttccctttacctgcaccataaatcactcgtgagtcacagagactcagcaagaacagtgaataaaataacaattagtataatattcagcaattcaactatagaagcattttctttctaatggcaatctatagaagcttcttgacttctaggcatagattttatttatct

SEQ ID NO: 391525 - DNA, 678 bp, Cannabis indica
ttttgaagttaaccatcaataatctcattggaggggaaaagatttcagctaatattggttagtttttaactaactaaaggtatacatttgttgactttttatttaaatttaataagaatatatatatatatatatatatttgatgagtttgaatattttaaatatttatctgtaatgaaatagattatgtaaataaatgtactgtgatcagatggatggaatatatatgcatattagaagagtttgaatatcttaaatatttatctgtagtagagtaagttttgcaaatacatgtactatggtcagataagtataaataacttttttttttattattgttctcgttatatgtgtttaattgtgttctattttttttgaaacgtctgatttatagtcgttatgttgctgaaattttagtagaattatgatatttttttatttaagttattttaaacttacttgttaggattttgttttaaatttgtggtatagataaattgcgaatgcataaaaggagataaacaccgtaattttgtgatgggttcaacaaattaattcaatgatattgtgaaagctctaatggcacgtttactatacagtatttagaatcggaataaattaatagagaaatctaacaaaataaatgaaaaataatcggaatcaatatttgtaatatgt

SEQ ID NO: 391526 - DNA, 1362 bp, Cannabis indica
aaaaacttggaaaaattcgattacttcaaaattaaacaaattctgagagaataaaattctaacgttgattcattggccaatctaacgtcgcaatctgaattcaacaacctcaacttagttcccattgaaaagttataggaactaagtatttataagatggaagaggcagacttaaaaatgattgatgcgagtctgacttggatgacaccaatcatgaattatctactaaaagacgaactcccatcagacaaaaatgaagcgatagaactcatgtacaagatacctaaatgcacaattattgaaaaaaaggttatattgaagaggatactatatgcctttattacttagatgtatattacgagcagaagatgagagtatcataaaagaaatccacgaaggcttttgcagggaccaaaaaggttggcagagttcggcaaattaaataatctgtcaaggatgttaattactggccaacatcaataaagatgcacattattttgtaagggaatgcgacaaatgtcagagattcttgcacaatccaataattccaccgacagagctttgcatgacgacctcgccttatccattcaccatttggggaatagatttaattaggtcatcacccacagagcagggaggagcgaagtatgcaattgtagcagtcaatttcttcactatggatcgaggctgagccattagtcatggtcacctcgaaaaaagtcttagactttgaggtgaaaaatataatgtttcgcttcggtattcgcgttaagatagtgtttataatgggacacaatttgacagtgacttttttactaaattttgcgagagaagaaaaatcattaagagtttttcatcaatctcgcagcctcaagctaatggacaatttggagtaatcaacaagatccttaaagatacaataaagaagaaattaaacgcactaaaataaaggtaggtagatgagttaccacggggactttgggctccatcgaaccactaaaaaaatggcaacatgtcatactcctttctcacaagcttttggctcagaaccaatgtttccattcaaagttaacatttcatcacataggcgagagttttataatcaagataagaaccaagaattacttgaagaattcatggacttgctagatgaaatgagagatgaatctcaagtgagaaatgttgcataccaacaaaggatcacaagacacttcaataaaagagtaaggtcaaggctcttcaacattggtgatttagttttaagacgagtatttacaaatacaagagatcctagtcatgtatctattttggtatctaaaataattttttagttaatttttttttcatggtcatgtatgttat

SEQ ID NO: 391527 - DNA, 997 bp, Cannabis indica
gagatggaacagattgaggaaccacatttggaagacctccatgacttcagttcagatgatgataattcagaagaagaaggtggctattgcacagaagaagaggaagaaaattatgaagacatcatagatgatatcaaggagctttggcaagaagatggaaggcccaaaaaaggctcggagtccattgagcaagtcgaagaattaccagcggtggaagtagacaaatcagaggagagaaggaatctgacgctatctgaaattgatatcgttagttccatggccgaaatgggcatgcagctaatacttaatgggaatgaagagaaacaaaagagtccgagttccaagggtggaaggaagagaaatagagaactaaaaaatttggcttttaacatcaattatgacaaaagccagaaaaaagagggacctccaaaagaatcattatgagaatcttgacctggaatgttagaggaagtggagacaagatgaagaggaaagcgatcaaagctacaattagtaaggtcaatccggatatggtaatattacaagaagtgaagaaatcatccgtagacaggatgttcattggcagtatttggagatctcgattcaaagcttggatcttgattccagctattggaaggtcagggggtacgctattagtttgggatactagaagcattactgtattggaatctatggtcggtgaattttccatttcagttcttatagaagcagaaggtcaaaggccatggtggttctctggggtatacggtccatgttcatatagagaaagattagaattctgggacgagatggctgggttaagcgcaatctgtggcgagatgtggtgtttaggaggggactttaatgtggttaggagggtacaagagaaactaaacagcatttcttggaccaagagtatgaagatgttcgatcaactgatatgtgaattgaagcttatggatccaaaactgaacaatggaaaatacacgtggtcgaa

SEQ ID NO: 391528 - DNA, 1748 bp, Cannabis indica
gctttccgcagttgcgatttctagagaataataagtctttatgttaaatttattttgtattttttttatattatatatatagaaagaaatgttgttccagctcgttcaacaccataaaaatgtgttctttcttgattacagggattgcagaagaagataaatgtggttttatagtgtcaattgctctgaatagattatgattaacaaattcttctttacttgacgaattactttttcacttaatgatttaatattattatttttacacagaatttatcacttatgcattctttatattaaattttttgataaacttatcaagaaatattgtaagtagactcttgattttaagttattataaattagtatttaaattaatgtgaatttttttccaactatgttaaaaaaaatctttttgttatttcggataaactgcacttttttttttaaaaaaaaaaatctttattttaaactaggcaattccgctcttcgcgcggctattattttaaattattagtaaaataataatagaaaattaaaatttattgcatataaataataactaataagttaagaaaatattttccaatgtataataatattgaaattacattatataattgcatattttattattattattatttattattattattataaaaaaataaaatccacaaaataagaaagtctattatttaagtctatttaccatattattaattttaattttaatgataattattctatttttttattattttcattgttaggttgttggtaaaattcttttcccatttctattactttctttattgatatgtttttttatttttttatcatacttatttatatagtattagtttaaaatttatatgatagcgtatagtaaattttaaaattttctgttaaataaataaatttttaatataaaaatattgtataatttagaaaagcattagttacttaataaaaaataatattaaatcgaataaatatatatggggtagtgaagagaatgattagagtattcgatcttatggccgtttctcgcttatatatatagttttcatccaaataaaatgaatttaattatcactccatttaaattaatatcaagtccatagttttttaaggaaagaagattcaatgaaactaaaagaatggagtaatataaaaaagaataaaagatacaattatgaatagatgtacattagaatttcaataccaatttcataacataccttgaaacgatatttaaatattagaagttgaaagttttttaattatatagaactaatagaaacaaactaatatttctaaatggaaaaaaataacatgataataaataataaaaaaagcatgttagacttgaaaaaaaaaatgtaattccaaataagtgaaagtttaaaagtatatactttaccaaaaataaaataataagagaattgcatatagagtcatagactatcacattctacttagtgtatccatgtatcattattattataatatataaaccacatatatatgcataaaaaaagttagagaaagaatagaacatacttgaaagcttgaagatgtgtgtagaaaattatgagaagctattaatgtttgatgaagagaattggctcatgaatagtgcgaacagaagagaataaataagtatattggttagggacagggccggccctaggcataggcggactaggcccgtgcctagggcccacactttccgggggcctgaa

SEQ ID NO: 391529 - DNA, 1214 bp, Cannabis indica
catcttgttttgaccttcatgcagacactttctatttcgaggttttcatcaccttatctagccctttagatcactgactgtcactcaaattttacgggaaaaaaaaacaaataaagataaggtggaaaaaaaaatatacatgtctgtcatataggtttctaatttagggttccaaatagtgactagttcagcaacaatagtagatgagctgagatagccagctagccctggactggatatggcctcatctgccaagtgttttcttttgcttaaaatttgagtaaagtctattaggaaaaaaaaaaaaaaagttagtgctacacaccactgtcataatttttataatatttattagttttttttatggataatagttattaaattaaaattaaagttattaatgtatattttgtacagccggcagaagattggatatttaataatgggaatggaagatcagataaaaagagtagaaatattaagatgaattctatatattagtactatacttcattattaattgccctcttttactgtcagccactaacacagatgtaacatgcatgtcatctttcctttcaataatttgagaggcatatctctttaggttttagggcttagactctactcaaaattaatttcacttatttttttttttaaattttttccttttatcttttttttcgtctttattcgtctatcaaatcatgagcttttaatgttctgactaaaatggaattcaaatatttattgcatgcatgggccggggtcctatgtataaaagagggtgaaacattgtatttataagcttagtaattctattatatgtgatgcgaagtcgaacaatattgtcgacaagacggatgggattttgatcttttttgtaagagttgacatagtcaaaactccatataaaacacaaacatattaattatctacagctatggctagctaggtataacatttggaccccaaattttgaacgactatgacccccatttagatccgtacacaaaaagataaatcattagccggtagtaataactgattcccacgccatgtcaacgatgtcattatgtgcttctagaaacacttattaatgttaatatttcataagcaatgacgacatggaaaatcttagttacttttacaaaatttataagatactctatgttatgttattgagtgattaattaataattgttttttttttt

SEQ ID NO: 391530 - DNA, 923 bp, Cannabis indica
gtttttagatagctggtcaaccattgccaattctgttgaaagatcacttcgtgcagatcttttcaatttgtatgggattgcattgcagtaaggcatgtagggaaaaaggagtggttgtgcttcagaattcaattttgcatcttgcacaaatatctgagagtgaacgagacacactcataaagaaacatatggtatgcacctacttctatttagttattattaatattattattttattttcttaaaaaatgatgaagttactttaatggagtcattgtcaaaatttaagttaattaccacttagcaaacttgatatcttgtttttttttcccatataatttctgtttcttgacagaaagtaaaacaaagagcataattattgatctccattacttatgcaacttaagttctgagtaaattcactttgtagtagttaaggtccttaaggatgccagcataatgctttaatgacttggtgtggaatacaaatttgagagagattgaatgatctggaaaactgtgactgatttataagctaatttatggataagaaatcgcgaaagacaacacctacaagtaggcttgaactaaggagtagactttgcttcttttaaatttgaaatacaaaaaatattcaaactcttaatttaagtatgacctatgttacgtaaggaaacatttcagatagatattttgaattatttagaaagtattcagataattcaacaaaatgaaaacctgatgttgtcatgttgatcagttatcttcttttacaatttgctttgtgtattccattttgaagttgcaaggatcaagtagtaattagtctaatccaaggagttgaaaactagggtggcgtttggtaacacttttttaatcagttttctgtttttaaaagtagaaaagtaaaaatatttttcaaa

SEQ ID NO: 391531 - DNA, 1170 bp, Cannabis indica
tgttttgcgaaaagagctttattttatacaaaaagatcacaaaaacatactgccattagattgtgccaacaaaatattttccaagtacaccagtgcattttcggttggattttatgccctaaatacaatttaatattatttaaatcaataaaactcataaatcatattttgactttatcaatcacatagttcacatgtttattacatggttatatattcaacatatagattctattaaatctcgaacatatagtgacatcatcatagtggaaaataattgtgattatatgcttcaaacttatttaaacttgagatttattagtgcactagatttatactgacgtgataatcagtaatatgtacgtgatctacttactgttggaatatattttaccaagatctagatttactaacaagtatgtttattaacatcctaaacataaattctctaaaatagtagaatttaaacacatataaagttaagaaaccttacattaattgcagcagaataatatgtttcctcccactcagatctctaacccttgtcatttctgtcgcaaagtattatcaagatctgagctcgattctctttcaagtgttggattcttcatagtcttacacactataatttagtacttgacttgctatgggtggacatgcactctttcactataggttcgaattatgaagagggagagagaggattttgaataggagaaggaatggaggctcaaaaactctagttatctgacagaatgtaaactaggctataagagttggatgagaatgagaccatcctatttcttttatactatttcacctagggttaggatttaaattatatggaataaaaaatgataaaataatagcaaattaaacactaagtggtcgaccgtatagatgggcccccactagttataattttacaatttttttaactatttatcttttatttccctaatgccatatttttaattttaatcctataaatgccaaacctatttatataataattataattaattatgaaataaaattatcatttatcttatttatttaaaaaaaactttacaaagtttttaataacaaataaacctaaacattttcttcacattaaatcattgcttagtgaaaattcataataagacatggtctaattttagaattata

SEQ ID NO: 391532 - DNA, 1066 bp, Cannabis indica
agatgaactttcattttttccctcgaaaaagaactcttcaacataaggagaagcaatcttttcaagcaaaaaatcaaaagaagccgagagaacagcaccaatcacaagctcagccatcggtaacaagctcggttactacacacaatagtcaaagattcaaagaggaagctataaaatgagagcagaacagtagaatgaggtaatggcaaagatggaatcagcaaggttaacacatgcttacttcttctgatttgaatgttataatattttattgccatataagttatggtatcatattagcacatgcttacttcttttcatagtactattattaattcatccaactatttaatttgacaatatttgtaaaactcttacatctcaactatataatattaataatctctttgatttaaggtatacaagcctgtgtttatttgtcttatattgttactattttatgcaaagctacattggtattttaaattcgtattaaaattttagcatgttatatataataacactattttactgcctctgaaaaatggtcccaattaatgtttgtttttatctttaattaagtccattacactcatagttctaacaataatgaatgaaagtaataaattttaagccttgtttaattttataatattttagaaaaaacttgggccatgcatgcgtgaaaagctggatcctttattgatttgatcaatatgaataacaatgcttggaattattattagagttgttggagattcaaagttcaatctcacacaccaagagagtccaatacacatccaagaacactccacaaagcacttaacccgaaaccagaagttaataccaaaaatcaaacttaagaacttagaactgaataaaaaaatagtctttcttttttttgatgtattttatctgaacttacaagtaaaggaattaaattctacacattacaattacatggtatttataggagcttacaattgcttctatctaaaccgacatgtgtaacggtttaactaactaatcaagttagttaaaacagttgcttatgtggcatattaca

SEQ ID NO: 391533 - DNA, 1052 bp, Cannabis indica
tttattttgaatgccgatcgatctttgtaccagtccattaaaaatcaaattgtgaaataattgaattttggatccacatacttggtggaacgaaaggcgttgaagagtcacaatataaaattaaatatgtttatgatgaattttattatatggatgtagattaggaaataaaaaaaatacaatgctagaaatattgaaaggagataaacatctctccccatcatcttcatctataaatgtatttgcttgcttaaaaaatgaccttgacccaataataagaaaatcccatagttattttttttattattattattatttgattgtgcaagggaccaaactctactctaggagtcaaactcaaaactacatgattgataaatcctcatctttcctttgcaggtccagcacttgtgcactaattcataatgccatcaattttcatttatgatcaaaataacgaaatataacaaaaagagctttaagggttactttttttgtccgtaaataataatctaaaaggtattaggagcaacatgtattaacttaaagtgtcgcccctaatactatttctttactaaagtgtcacccttaatatttcatccctaataaggacaatagttattataaatgatatattaattaattatataatttttcaaatataataattttaaaattataacaaaatcaaaataatactaagtattcatcctgtttgacctaatatatttatttataattaaaaagattatttgaggaggcctttttggagaagagcatctttcataagtttgagcgattcaacaatatcatcacacaatcgatgaggatcaggaatggtggcttcgtccacagacagaacaatagtcatcttattcacgtagctttggaaattcaccatcaattcctgtttaaatttaaaataaataggttattaattagagcactccaaataccatttttttttttctttcctttcaattttttttttaaatatatcactaaaatttcatttttttttatttttatttttattacatatatataaaata

SEQ ID NO: 391534 - DNA, 692 bp, Cannabis indica
tttgatcctattcagggtttgggaatttacgtagatggtacgtaaccccttaatgaattagaaaagtagagttaaataaataatttgcatgtcacttaacaaagtggctcaacaattacgtatactctaattagctatatagtgtacgacgtggtaattatccaaagttaataagcatctctaaattattataggtttgttgatcaccaaaagacagtactataaaacttaatatttggactaactcctccattagtactaaacaataaaattgtcaattaagtagctagatactccttaaaactaagcatacattgtcatggagttgttaattatatattatatgtactagtttgcaaataaatatgcatatatattatggcaactgctctctttttttcttataattattttttaaaaaaattaacatattctaatctcaaatatatgttaagtaatctaccgttttcatatcctcgtcagcaattgttcaatcatacaaagtcttttataagtattatataaatatatatagagtaatttgcggcataacttctttaagtggtcgaatttttgcaactaacctttaattttaaaattttgacggtaaaaccccctaaactcgtgttctgttagcagtttaacatttccatccatttttaattgttaactgtcatggtggaatgtccacg

SEQ ID NO: 391535 - DNA, 512 bp, Cannabis indica
gtcattatgcaaatttttggtgacttaatttggacataattttgaactagtgaatatgtaaatttttacatatttggatagtatatgcttttagatgtttggacatgtccaaataagtgtatttagcatacctaaaggtttttttttattgaaatatgctttgaataaaattttagtatgttatttgcttatttttaactttttaaggccatagtgggtgaaatttgcctaaatgtcatatcttcgagaaaattattattttgaaagtttctacatgtgtaaatactcgtatataaactgtgtcaaaaaatttttttcaaaaataattctcaaatcttgattttagtattatcttgtataattttaactttttaaggcctaaaagagtatatttaccaaacttgctcaattttcaatatttttttaattctgtaaattcttacacctcacatctaacattcttgaactattagaaaaataatttttttgatttggttgcatagaactcattt

SEQ ID NO: 391536 - DNA, 1667 bp, Cannabis indica
ttttcattaaaaaagaattggtaaagtagaaataataatgactcgtgaagtatgtaaattttaactacaaaattacataaaaattcctaagtgttctatatatatatatatatttattaattataagcattaattatttatttacaaggctttatttattattgacaaaaattcgagttagcagtttggtactttcattgagagccttataaaaaaaaaccctcgaaaaacacatcttctaattgttccgtcacaacatggaaaatactcaaaatgatgaaccagtcatggaggaatagacaacacatcgactacgaaaggagccctacggggaaaaactcaaagcaaccaaggaagaggtcctactgggaggaactataatatcgacaactccatcaaaggctcacagaatccaatcaaagaaatgaggaattggaacgagccatggctgccgccaaaggaactcaaaacgatgtaccgccaatgcaggaagaacagcctacacgacgattgtgagggaggccccatgtaaaccagaagggaacaaggatccaacatcaaagaacaagaaccaaacaaccccactcaccccaggagcaacaaccatgggagacaagggagattcctgttgatgggcaaggatcccaaaatcagggagccacaactttgtagcaaacaggagcaaggggacatcaaacatctcaaagaaataatgaggatacaaacgatcaatcacctagccggtctagtcatcctccatgtccaccacaaggacataggagagaagaaagagatagtatatatacatacttaaatagaggcagattcaccaacttatttgaaaggcagagacctgctcaagagtcaccacaagaaccagaggctaatacagcccagagtagatcaaggagtcgggggcaaacttgatccttgagatctcgcacattagaaaacccactgcgtggggagagaacacctcaatatgaatatcgaggcgagaaagaaagtgtgagtagcatgcgtgatcaacctaatttacgagaccatataatcgaaggcgtcctaatttatgtgagcagataaacagaaatacaccaaatctcatagagagattgaataggaatgcttagggaactaatgaacaaactaatcaactcactgataactccatccagcaatggataattcattctgaggatcaatttagaaaatattaggatggagaatatgaaaagcttccacgctacgattcaaacgatgacctagaaccttttcaccctaatattttaaagttgcaatttctgaaaagatttaagaatcctcatttcacacaatacaacagattcataaacctgattgtacatttgaataactcaaatactataatgcgagctgttgggattttgtgccctaaataaaactcatttcaatctaatctgatttgttatcaatgaaatattagaagtcatttatgtttacatgttgttttcatgtttatggtttaatatatacaaaatatgtaagtctcgaacatatagtcattcacaattacagtaatgtcaacacagtggaatgtgattgtgattatatgcttcaaaagacaaagtccttgattcatcagtgcattggatttacactgatgtgataatcagcgatgaagtgtactt

SEQ ID NO: 391537 - DNA, 747 bp, Cannabis indica
taaatatcctgcatctgtgtagctaataagttgtgacccacgattattagaatataacaatcatttattaatagtcttaattaaatgatcaaagatagaggacaagtaaatgaattgtctaattgagtgagagcattaaatgtactgggagtatatttaaaagatcatccaagatttgaatccattaataatgagttattataatttaaaattaaagagataataagtttaagaatatatatatatgtattacaacatcatttgtgaaacgagaaataaataatcttattagttatgtaatcttaaataatggaatcacttaagtgtgttagtgatttaaaacgagaaatgatgtgaaatgaaatgttcattctaatatttgacttgattagtcatgtgatcttttaaattcattaattatcataaacaataaaataaataagatgtgactaatggagggttctagattaatcaatttcaaaacaactgttttgaacagataaatatttaatattaagaatatgagatgattaatcaaacagaatgaacctaaaggaaataaaagaatgaataaactaaatatacgagaattgaaattctatatatttgtccaatgatgatgtggtggtctccgagatttggaactacattatgtggagggtctcgatcccatgacttagtttgaatagtcgaatgagaaataatgtaacgccctaatgctaaggcacgctacagtgctttttcaat

SEQ ID NO: 391538 - DNA, 1692 bp, Cannabis indica
gtggcaatgtacttaagcgaataaaccctaacccttatgtttattcaggtcctcttacgataattttctcagatgaaattaaggtgcacataaatatgagaaaatatcgaaattagagtttcattgaataatttttggttgtacaaataaaaaactgcatatgggttaactgaatcccatatttactttatgatcctatatttgcttcatattttattgacataaaaggaatttccacgtggtttattctgtcagtatgttttttatcctctgaatccaaatgctgttttagagtagccactcatcacttcaaacaaaaaccaaaaaaaatgtaccctacagctacaaagtagtaaaaaatataggaaattagaataattaattacatgtcaaacttaatttattattataatagcatactactagtggtttaagatcttattataagtgtatcaatatatatgcattttttggataactaatctatatacattttgttttactataaatcttattttgatctatataatttaggcaaattaatattttcgccacttaattttaacatataccaaatcatgtctttcgtatttttccaagttgttaaatattttttcgaactatattgagattgttgaattcaaggagttctgtccaattttattaattcagtgataatccatgaactaaattgtagctccaaactttgatatctatcaaatatttgtgccctcaaattttaacatatattaaattatacctcatgaacttttattcatggtgggcttccattagtaaaattaggcaaaagtccttgagtctaataatctcaatagttcgaagagaatttttaactgtctaaaacattcacacaatatggtttattaatacatatcaaaattaaaaagtaaaaattctaattaatctttaatttattaacacttggtaaattctattccataatttttcaaatgaaatatttattatgttataatgagtaatgatatattacaattctcacaccttatatgagaaagtacaataagttacaaaaaaattaaataatcacttttaaatcattataaaaaaaaatattagtaaaaacacacaaattataacacattaattcaaatatgacaatttaattaatggagagggtaatgtccatgttttagtagaaatcgtcttttactagctagtggtaaaggtattcataggttatgtaagcacaagagtatgggtggaatgaaatttcagaatatttaggattttaatctagaaatattgggaaacaagccaattactcactagacatgattttcttttccacgaaacttttaaaagcaaggtatatttcttaaatagacgttatctcaatgcccaattaggtaatgatcctaattttgtttggtatagtatttgagaggcacaagagatagtaagaagtggtgttagatggtacgttggtaggagtagtaagataaatgtctttggggaagcatggtttcaggataacatcgatcaatcctttaggcactacatttaatcctggtcttcaaaatgctactactgttgttaacttgatgatggtaggtggagaaagtttggattggaaaattgtatatagctgatatgtttaataaagtgaaaattacatgaaatatgggatttcataacaaagttagaaaaata

SEQ ID NO: 391539 - DNA, 768 bp, Cannabis indica
atgagttcacaagtattgttatgatcagatcttgacgccaataggtatatatcgagcaaccttgtggccaccacctgcaacccaaaatagagagggaaagtgagagtgaatgagagatagaaatggaggaaagggagagttgtgagagaaagataggccaacctaagcaagaaagaatttgacaatcactttgaagccatcatccaatgcgtcgacgcttcaagagaagggaaatgatgcattttttcgttgatcgtacgaagaggaagagagagtgaggtgtaaacagtggtggagctttggtcgatctacattggaagtggcggctagctagggttgagccgattggagaggtgaacagagaaggagaaaggaccctccttccttcgtttcatttttttgataaaacaaagaaaaaatttaaatatgttatttggaaataattataacaacaatatggcataataaatatcataaaaagtaataaaaaaatgcctaatcccacaaaaaggtgctatttgtaataaagttttaaaaatttatatttaatgtaatttttacttgaaacaacttcggaatcatgcttaagcttttgtagcagctctaaaatccagcctcacataccatcattctagtgcaaaagatagattacttcttaagatctaagtccaatattattgtaaaactattgtatgagaaacctttaataatttatgaatctactgacatcacctaattttgatatattatatatattgttggaaatta

SEQ ID NO: 391540 - DNA, 976 bp, Cannabis indica
aaaaaaatattaaacgctactatactcttgtataaatataatttataatgtcagaattactcataactcatcatttcttagttttattaaagtacttaatattaacacggcgaagtaataaactagtaacaatgtgaacaacaataataaagtacaagtatggttcagactattaattttaacatattaggtttctcactagcaaattagaatatctcttccctatctaaaaagttctcatattggaagaatcttgaatatatactttgtctctaaaatatgctccatttaaagtttttttttggacagatcattattcaaaacatttaaattaatataacacttttcaatgactaataaataaatttaattataaatattaattttaaaatattaaatcattaaattttagtccgataataaataataaaaaaaaaaattaaaaatctatacttaatttaactacttaattaaaaaaattaaaaaattaaaaaaattcctcttttacactatatcaaaaatatatttatataaaaatatttaagtcaaactccattttttttattatttttttaccggaaaacttatttttattattatttttcagttgataaaacaatctcagcccatattatgtaaaaatgagaaaattttctaattaaataaaaaaattaatcataaaatctcaaaattttttaatactaccctatgggtaatacccattaagagtatactcgtatttatatataggtaatagataggatccaatccaatctaattgaaccgaactgatccaattcttttaaaattagatatttaattacaattaaattaaattgaatgttaaaagttagattttaatcgaattgaattggttattaaatgtcaatctcaagattttagtaaacagcgatccaatcaattacatttaatatatattaaaatattattatatttatttatatataaaataaaa

SEQ ID NO: 391541 - DNA, 1177 bp, Cannabis indica
aagaatctacttcaaccgatatggtcgcgactgttcccatgaagcaaatgtgtaaccttccagttatagaaagtcatagattctcatgtgcttacacctagaggtcatgctctagtctagtagttgactcttaagtgcctactactacactgcactacactcggctctacacatttatagagataacccctggcagagctaagggactttagtccttattcattatccccatcttcaccaggctaacaggaccttacttattcagggggagagtggagcctctagaagcactattaagaggaagatccttgacccctcttcattctctacatggttccaaaagtttcttcaacataggtgacaacaagcagggtagagatggaagagatcaaactccggaataagaagcaagctcgccttcctttttgttcattttgatagaggaggatggagaaagtggacaaaacagactcgcatttctcatctaacaaataagggaaaagaatcctattgaaaatattcctaatccaccaaccccttccttcatagagtcatgtattgtaagtgatctgaacctaccgggagtgagtctcccatagaggcaagtgaatttggtgagtcgtatgatgggcaactatctcctgcacttatagctgatcccttcattcactaagtcggcaacgagatagataaacaaagtcggcttgttaactcgacctcgctcctcggctcataatggaaataaagctgctacgtactctaaaaacctttggacagagaagaattagtaatgcaccttgcagtcagtgaatacgctgtaagcgacgcgctgataagagaagagaacaatgtctagcattgtaacgccctaataaaaggcatgttatcatgagcaaaaaaattaaactttaaatcaattaaagagtgaaagtataacttgtaggtatttaattttacaaatattccaaaagattacacatgtttctggatcccgtaaaaacctttgcaaaacattacaagttctttttacatgccgacctaaacagcaaaaactgagaatacaagatacatcaactattagacccaatccgcgtagtttagtgtggcccgaacatgtaccatacacttattgggttttatgccctaaataaaactcattacaatctgattagttatc

SEQ ID NO: 391542 - DNA, 1006 bp, Cannabis indica
agttgggtgaccatggagcagttactctccaccattaagctcacttgtgaaaagaaaatggcgaatgaatcagtcgactaagaaatatacaacttttatctcaagtataaataacttacaacattgacttgggtcctcaaagaatctgccaaaaaaataggatccccactcgttatcatggcaaacgtattagccccatgtttgcagctcgtggtgacactctgatccagcaagtttgccaagaacagagccaagtatatgttccaaccctacggtgaagcctctctgtcatttcaaccctatttataaagtcaggaaagggtttgtccaacttgtcataatcagcaaactcgacattttgtctacaacaaaactactagccaattttctcatctcatcatatttgctgctacgcctcttctgataaaattactccataacctccagatatgtctcgccttcctttgtcattgagataggcttgatgggaagattgaaatgtggaggatgcaatggaggccaagccatttctccctagacagttgtgtggcggtagcagaaataactttaggcgctgggggtggcaaaggtggatcctagttgtctttggaagatctagtacaccttctaggtggtcttccaccatcaaaagaatcaaatcctttctggtatgggcttctgcagcctgcctccacgaagctaccagctgtaagaccttttccttggtctttatcctcgcctttttatttgctctgccatctgaggagcgagactgctttttattgatcacgaccgacccatcgcaatcagaactgtcccctccagtgttctataaaagaacatgctgcaaaggttccatgatcagaatggttcagtcagatcgataacggaagtggacaattcttatgttcttggagccttagaaacagcctttggattcgaagccagaggtgttggctgctaagatccactcctagaagtttggcctttcttgcccttgtccttg

SEQ ID NO: 391543 - DNA, 1327 bp, Cannabis indica
aactccaccttgattactttgccagctttgccccccaaaagctttccattttcaacagagaagtaatcccttgggaggttatggatttgcatccatattctagtcgagtcaaaggaacccgacagagatttcttagggccccaagctttaagaatgaaggagtagccccggacacaccacggtccattgtcactagcccaggctcggtcttccgcacgagcaaagccaagctcaaaacagttagggatattagtagtccctagaatagcattagaaatattcctatatttatcatctataaaatatttgaaaaattgtacttaatctccatatttttttaactgttctagggattgagtgctagatatatatatttttacaaatttgtatgcatgtcataatatttggttttgttgaaattacaacctttatgctgtcgaattttctaaaataatatagaatatatattttttttgttattcttgtttgtttgcttttgattatattaatgagaaccatgtttatcatatttttgcatattaggtggattatgtgtgcactcctataggtgtaagacctaggacatgtacctaggacctagtctcttgtaattatttgctacctttctattttgattatacatgatcatgataatgattagatgcttttatttaaaaagctaactttgtagacatttttgttgaactggtgatgctttgatatttattattttttactaagttttataaattcactccctatatttgtccttcctgaaatgcaattcggtgtacttctaaatgttggagaaatattgatcgagaataatatgattagactactgatatcttagttattaaattattttgtttaagattgtttatataagtatggtgactattccatggttacatttttattgtaactatcatggttacatttttttacctgtaataacagcttacgaatagataaaaattctatttttagaattaattaattataactaattattttttaaataattaaataaatattaaacaagaccctttttagcaattaaaatctataaataatttttttatttatatataaatccttattataattattttaacagttaaattatttaattataatatttataattttttttatttacataatttaaacttatttttatataaattaaaattctgtcttaataataaatttttaaataattaatttttttttttataattacgagagtaagaggagggaagttaatttttaaataataattttttacaattacaattacaattctgtcgtgtttcaaattttt

SEQ ID NO: 391544 - DNA, 692 bp, Cannabis indica
tctctctctctctctctcccccacacatacacacacattccaaactccctctcaaagaacttgcgtgctttgcttctggtgtttcgtgttatccttttttaaggtaaagaggtttgttgtatttatagattgaggatatgaatcccaaaagcgatgactttaaacaactaagtagttaattcagttaagacttaaccgatttaacttgctccttgcaatgagacctctaagtcagctcttgacatcaaactctcttcgaacattcctaaacatttgtcctaaactgatgaagcgcaatctggaaggaagttctggctaggcacaaaacctactagaacaaactattcggaatctcttcctagagggaacaactaatttcacaagaaatctttcggatggacaaactagcctttctcgaactccttatatacacaaatctccaatctcacagggttgtacaaaaaaattcgtaaaccgcccaaaccgaataatctgcccaaaccaaactgaaaaatcgataaaaattacaaactgaaataatcagaaaaaattacaaaccgctcaatcttttaattgggtgggttgaaaattgctaacctggccaattaaattgaatgacccgaccaacctgactttagactttaaatttttttttgttttactttttagtttttattatatataacataaat

SEQ ID NO: 391545 - DNA, 980 bp, Cannabis indica
aatgttaataaattaaattttggataacttacggttaaagttgttaatacgtcgttgtactcaattatacttgtaactcaagctatataagtacatattttaaaaaaataagtaaaatgtaattggatgggaatatttacaacattttgtatagtttgagggagtttttgtaacaaaacaaaaatttaaggaacaaaactccacaaaagttataattttaggagcaaaaattttaattatacatatttttataatgaaattttggtttatagagaaaatttgagcttataggagaaatgttaatggggaacaaatagtcaaatactactacgagatgttataatattattaattttattagctattgtatcaagttgtatatactttaatttgattattatgatataaaataattatctatttgaaaagtatcatattatgatattattgttgaataccattgatacttattattctctttttctttttgttttaccataaacttattattcaaaacacgaatatattagcatatgttgcatttatttagagggaatatcttttaaatagatacatattgtatacatacaattaactcaaaatatactaaatattgctattaggtcttaatgatgtatgatactataatatggtagcattttacgagtgagtacttattttttattataattataaaattaaaatatgtaaaagcgcgaaactagatataaaattaatcaccttagcaataccttttaatgtttggttctgtttgcaaattcaaagtgtcgtccaaacagtatccactaaatgccaagttggaataacatatgaacacgtgtcatattttgattgatctcatttatttaattatttaaatatttaaaaattaaaaaatattaatagatatcagtagtgcctagtatatttctatgttgaaattccgtattttaatattcccagtttgattatttaattaa

SEQ ID NO: 391546 - DNA, 487 bp, Cannabis indica
acacttaccagttagctattaatgtgacttagggctttcgatcgccaagcaaagttccactcaaattgaccagcacacctaaatcaaaaattaaggtaagaaaactattcagatgcacatatgcacatgtttattatacatgtatatatttccatgtacctagcatatcagagatagcagtataactgtacatagagttgcactaaggtattgatatctaatatattaggtaatattgaatagtatgtattaatgctaccaataccagtaaaactagagtactgagaagtggttggtaccatggttaatcatactataggtatgacattcggatctcactacccgcattagacacagtaaatagacttatggtaattgggtgtatgggtgcttagttacaggtcaagtatgtatgtcgtattatgatttttcttttcttactgagtatttcgactcacaggtatgttgctattgttgggttttatgc

SEQ ID NO: 391547 - DNA, 934 bp, Cannabis indica
ttggtagggtgcttggcttgtggttgttgttctttttagcagttgcatctgctggtttcttgtttgtatttgtttgtcttttgaataaagcttctctttttttttttttttttttttaaaaaaattactaggtaaaatatcttatctttgctctcctaaatggtcctatttatagattcaaaataactcacaaaatttgtattttcgtgtactactttagtgggtttagtggctcaaaaagctgaggaaagtgaaacacttcttgtatatttatgccagtttggttggagagaaagcaccagctgagacacttggcagccggagagaggctcatgtcaaatggaggggactgcttatgtaaaacggagtggagaagtggtagacattcaggcatcaaccgctgaagaaaggagagaaataggtagctatgtggcagctgacaatcacttgcggagtggatgtttgatttgttgaatatcatttcatttatctcttgctcttgaaatttaaatttactttagcttcagttattgacgtggcccaatatagatggtttcctattggaggaaattatattgtatacttactttactttatttgttttaatttttacctttatttatattctttaaaatatactcactattatagatgatgttcccattagacctcttatgacatgtttactaaaggggaatgtgaatcaattgtataggattcattcccattcatttgtttactaaattttggaatgggagaaattagtgggccccacacaaattaaggagaaaacaaagggaaaggttctccccctattttcataaggaatacctttccctttccttaacttactttatattaattatatttttattaattaaaataaaaaagacaaatatgccttcaaaatatataaataaaaataaactacatg

SEQ ID NO: 391548 - DNA, 806 bp, Cannabis indica
aacattttggtgttgaggtatagcatggtcaggtacaataggtaatataggggcagtagtggttgtattgcatttaggtgaggggattctgtttggtatattggcatcaggtgagatatgttaggtagggagacatatcagcaaatgacgcgtgtcaaccctggagaatacgaatcagcaaatataattgcgatgatattaaaagatattaaatggaacaactcattaaatgcatagttaataaagcatatctataactcgctgactatatagtctttagcgagacaaagatgtacaaactattgattcacatattgacgagaaactatttcgcgataatacatagcgaggcattaaccttgctatgtgtaaaaaggtgttaacgagatgtgttggctgttaggacacttagcgtattatatacattatactagctaagtataacagctcgaaggacctgaataacagttagcgagacatcatctcgttataggaagacatactcctggtatcgtcactaatcagcccagatatctttcaatgagatccactagtacgtcgcgtcagctctctcagaaagaagctgacgttcaaatgatgttggctattgaagttcaccttgtcaccaagaactacaatatgaagcgtaatgtcttcacatgcagaaacaacgagatttacattatcaacctcggaaagatatgggaaaagctccagcttgctgccagggttattgattgtgtgttcatgtacctagcgagatgccccgaggagatacactttgcagcgtatctaaatccacatca

SEQ ID NO: 391549 - DNA, 765 bp, Cannabis indica
caaccggagatttgatacggaaaatcatagcaataccctaaaattaaatgggaagtagacttttataaagattaatcgtactttgacgtaaatttgtttttatttttcttcctttgacccctctgatctctcccaacatttatgatatgcgtgtaaaattctatacatatatatacacatggagggtttttgattaaaaagattagaagggacaatgaataatttaacaagtatgttggtcatggtgaggctgctcgagttgggcatggatatagaaccactcataattttatgatctgaatagaattgcaattaaaaatattgtaatgatcagtgtttcaaattcttctatcgttttattgtttttggtagaaaggtatatatcttgtgcctactctacctctgcttattgtttgtgtaaagaattttgtgtacaattatcttttttctcagaattaatatatatacaattatctttcttccatttgcaaaatgggccagcaaagcctcggcgatataagtatttttctcgatgagatcgacaaaaggtgttattctcggcaagataatagaaatcggacaccgagattgtaaagaccgcttagtttaatttggaaattaacagttaattatgtttaattatggaaaattatttatatatatttaaataattatttatgctgttatttttgaattctgaaatgcattctatatcatataatgattttcataatcttgcattttcggtgcccggtaacatggaac

SEQ ID NO: 391550 - DNA, 962 bp, Cannabis indica
tccattatattactattattactactattataattattcttggtggttttgaccaaacttcagttttcctgctggtatactttcttcaatggttgaattatggttcttagtttaattttaaaaaaataattttgaagtctttataatacattcctattttttttatctgaaatatagtacattcatatatatggagccacatatatactaacttatatatatatttataaattcatatatatatatagaaaaatattaaaaaaaatacctacaatacttataatattttgtaaaatattaatattagtgtaatttaacatcaagattcatttattttattttaataaaaattaaatcgctatctaaatataaaaggttacgataataaatactcgcgtactgcctagtaatgtttatacaacgtccggcctaagtttgcattttaaagggcccaaataaacaattatcttttaaaaatatatatttttttaataatttttaaaaataatatttattaaaggtttattttttttttttcctatagcctatttaaattcaagaccggccctatccttatatatacgtgacaaaaccgatttattttctatctaattggtcaaaactacacgtgtttgcaagaactcttttgctttcttatctagagtatttgtttttgaacaattatctattttatattaatattcacattgaattcatgtacaccctcgctttgtctccgtttttttttttttggtaaatgttctttgtctcctagtttgtatatatgttactgtatatattctgtgtacgtacgtatatgcatgcgtgtacatcgtgtgcaaaagtttacttcttgatcattttcacggggctgcttaaaagattttcttcttacatttcttggcaggcatgttttgaaatatatgcatgttatgttttggtcaaatatatataaatatata

SEQ ID NO: 391551 - DNA, 911 bp, Cannabis indica
tcatttgcggttgccttggcttataccctttggaatgcccgtaataaagcctttcatgatggcttccttccctctgttgattctattttgcatactactatgactttagtgcaggaaattcagattgatgggaacttggtgctgaaccatgttgggggaaccccccctattccgtcggcagttgatctgttgggggagtttaatgttttcgttgatgctgctgtcaaggacaacatggcctttcttgcggttctgtctttggataaacaaggagaggttattgaggccttttctgtgaagacttgggtgaagtctcctttggaagcggaaacgatggctatttgccatgcaatctcgaggtgtcaagagcatggttggatgaatgcctgcattttctcggactgcaaggttgcagtggaggcggcggctgcccgtaaagtcccctgttggaagagcacagcttggtttcttcaactgttcaatcgtcttgaggtggcagtgaatactaaggtggtttggataccccgttcactgaattccaatgctcatttgcttgcgaaatgggctgcgtcccataatttcagtaattgcttttccctttctgttttgaggtcaattttggccttgaactaagcctggttgtggggtttcggctgccctggtgtgtttgttttttttttctggttttgctttggtttaatgaatcggccttttatcaaaaaaagaaaaaaagtgagtaggttggcaaactttttctagttcaattgtacatcttgctaggtggcactacaaaaaactgttatttttgtgataattttttagtgacaatatatttttttgcgactaaatgtaatttttagtcacaacaaaatattagttgtgactaagacatagtatttagatataagttg

SEQ ID NO: 391552 - DNA, 860 bp, Cannabis indica
acatgactggaattgaccgtgacaccatttgccatggcttgaacattggagaggatgtaacactagtccactgaaaagaagacccttggatgttgtaagagcagaagtggtgaaggcagaagtggataagttgaccaccaatgacttcctttgggaagcattgtaccctgtttggctcgtgaaccttgtcttggttccaaaacccaacgacacgtggaggatgtgcatcgactttactatcttgataaggcctgtcaaaagattgtttttcactttcgcagatagatcaaatggtaaacatcacgtttaggtacaagttgctcaactttatggatgcctactccaggtacaaccaaatgaagatgcatgttgcagatgaggaacacaccagcttccaaactgacaaaggtgtatattgttataaggtaatatcgtttggacttaagaatgccagagccacttatcagtagatggtcaattgaatgtttaagaatcaattggggaggaacatggaggtatatgacgatatgttggttaagtccaaaacctctaaggagtatggccttgatctcaaagaagccttcgtggtaattagaaagtacaggatgaagctaaaccccaaaaagtgcacctttggggtttcctctaagaaattattgggtttcattgttagcacttatggaatcgaagcgaacccagaaaaaatctaggcctttcaaaatctggtcaacttaagttactggtcaaaaaatcaagggtttagggtttcctcccaagaagcacaaagatgttcaaacttttactggtcgaattggcgcagttagcaggttcatttcaaaatctacagttaagtgtattct

SEQ ID NO: 391553 - DNA, 927 bp, Cannabis indica
cttctatttttataagtttgtagtcaaatagtttgtatttgttgtaaccctagagaagaatataggatacatacagattctagggttttttatttatatatttaaaatattgttattattatatacatttttgtctttttctttcttttctttctcttcttgcactaatgtctatttctaaatctagatcgtagatattcttgcttttggttagaaatagtaaaattgttttgttttttttttttttttgaagagagtaaaattgttctactactcgaatatccacttgaataataataataataagttgaatattgtcatatatatatatatatatatatttatatataaaaattttatttcgtttactaaattttataaagattaataaataatattatgtttagatataaaatattgtattgtaatattaattattacgaaaataaattttaatatattaatgcgaatcatattagttattcaattctttggtctctccaatgcggtgtagttcctggattcgagtctaagctgaggtcaggtttgaggtcgaattattgtaaaaatattataattttacacaacctattagtacaagtcaataccaaacataatattgtattaaataatactaatactaatactatgcaatacacaatattttacaatacaatactagttgttattttactattataaatagagttttttttacggctaaaccctctcaactattattctatttgtatttaattctccaagttcaaattttagtggtaaaattctctaaactactgaattgttaacaaattttaggtgtcatctatttttcacagtaaggtgcaaacatatattgcttacgtgtacacttctatgtacatgtgacgcgtttatattagtatatttaatattattatttaaaaa

SEQ ID NO: 391554 - DNA, 539 bp, Cannabis indica
aaaaaattaaaaatttctgtacgtgtaaaaacatcgtaccataaatttatgataaactatttcttcaaaattattttgaattttagcttaatttttataaaattttgtaaaatatcctctaatacccaaaaactcctgttgagattttcaagaatggactcttaacaaaatatattttgatccatatcataaataattatgtgcttttcattttggttttggtgggcatgaaggattatggagtttcagtgatgttatttagctctcattacttggtggacattgaagaggagaagataggaagagtattaaaacttggttctttgaaaaatgcaaaaatatggaaccaaatggatgttctcatcttcaacacttggctttggtggtaccgaaatgattcttatcgcccgtacgtaccatttttaacaatttttcttataattaaatacaacatgcagacactgctctgggctaaggcgaactaggctcgtgcctatacatatgtatgcaatctatggaaagaaaaaaaaatgttattt

SEQ ID NO: 391555 - DNA, 2016 bp, Cannabis indica
aaacagtgccttcccacaagccaatgttctctccacaaaggtcacactgcccgtgtacgaaaatttgaccttaaggttgtgcaagtaaaactcgtagttaggttttgaggacaaattgatgtaatcctctttaatggcctgctggccgtcaaaagcctcctgtaacttcttcatgtgatcctcaagataagtttgcaacctacagaagagggcaacacatgtggtgttctcagtattcttggcttggtattcctggcactaagtataatcgccaatccaaaaaccattctctgcctttctaagaaggacctcgctcaaagttgtctttgtcctttgcggcaagggaagcttccaaaaccttcacacgctcctgaaaatcatttcaagaccctctagagccatcacaggtcgagctcagcttcattagggcttgaaaacaaaacaaaacaacatcagtggcaaacattaaaactttgggcggacagtcccctccttagactgctatggttggccagacccctatataagttcccacggctagctacccacatgcaagaagtaccatggctggccagccaatacaataccaagaagatgaacataactgaaagcataactcacaagagaaaggtctctaagtccggcgtagtatatcctgtcaggtcctctgtcacctaactccttcaaagtctcatccgagaaagagatagccctctctatgcgccgagtggatgattcagtagccttcgaccataagctaaccccactcctctactaggccaacgtgtaccttggctacaaagccgaatcacaggctatccgactagtgcagggggaggtagtgatggtctgcaagcatctacaccacgggaggtcctggccaccttggtcctcacccttcttctaggctcatccaaaggcccacctgcaagacctcttagcctggaagacatgtctgcataaagaaagtagcaaagtgagaatgcattcataaatattcaatccaaaaataaagcatgggtttattaactatcaaataccaacatcgtcagaagaggagctatcagagctcacgactacggccttgcccttgcccctagatgtacgcacaggacgtgtaagtctatcaaaatttttgcctctaggtatgatatggagggaggcatcacctactagactaccacaggctgggcgcctacggagagctctctctctcctctctaaattttgttgaatacgagacaaagctacttcttcatcatccgaatcaggccaagcctcatcagcagtcgacactcttgcaactcagggagagggaggacacaagccatacatccggaagttgtccatactggccaaccgaataatgtttctctgctcagttgataaagaaaggatatcattcgctctatcccttattctcaaagtagggatagaacaattgaaaaagcagcacaaactaaaatttggggtgctcaattccacgacgacctcatgcaataaaataattttttggcatacctgcaaaacctttgagatggttgcgcagttggtgtcgcctagcaattggtgactaagctggctgaaataaaaataactagttatcctctgctttggcatagacttcaactcaaagtagtacccaatctcgtaaggagtagacagaggccaacctagctccctgtacaagacaaacattgatgacaaatactttatgctctttggcatgtgctatgttgggtgttacgaaaattattaaataatacgcaagtgcacgcaatcaagtagtaactcacgcaagtgaggtcgaaccacaaggaattggattaattactactaaattatacttatgattctatttggaaaatcaatactttttatgattcaaaaagaatgaaagtaattcaataaaacaagtgaaaattgattaagatgagataatagggaggagaatcctgttgtttgtttacctaatagttaatgcctaattgctatccttttcttgaagtgaatgac

SEQ ID NO: 391556 - DNA, 623 bp, Cannabis indica
aaaagtgaaatatcacttaagtacagctattagtaattaatgaattggtattattaccaaaaatagaaaaaaaattggtacttaactgcaattctaaaaagacttgttattcctttttctaaaaaaacaaacaaacaaacaaagacttggtattattactgttcaagaaaatggtatctaagagtattagcaaaacattagtattattatgaaaaatatacctcaagcaaaatctaatttaagtaacaatagtgtttacaagagggcaaggctgaggaagttaaaattcaataggattcaacaaaagtaaactgaataatatgagaaaatgtagttcttgttttggacatggcattattagttgggccaagcttgaagaatgagtgagacctgggctattgtcttcttggtattggatgaagttggattggactaagagagagaagttaaaatgatcatgggcctactctacttccctaatttaggtgtgaatttacaatgagaattattattggaaaattaaaaaatattagaatttgagttaacttttataaaaaatattgtcatacaattgtttttttttcaaaaatactgtatttcataaaacaatagtggaacacaaa

SEQ ID NO: 391557 - DNA, 807 bp, Cannabis indica
cctaactatatgtatcacttatacttgtaattattgtaacatatactagcacgcatagtattctattgtttttagggtactactagtatatatatattctaatctttttagggcaccagtagtatttaagtggtgatttgcgattaattagtaatattttataaaaattattatattgaattatgtaagactaaggctcgaccttaggtataggcgagctaggctataccacctagcccaaaggctcgtaattttttttttttttacttttcaaaatatgtacatattttttttactgattttaaaaaatactacatttttttctaaataaagactcaaaaatagttttttttcctataacacgctaaatttttaagtcggccctaataaaatttgataattaattgtactaacaacgatatgacatattgaaaaatgttaaatactactagtatattttagtatttctcttaattaatggtctaaaactaaaatattttgtaattacacttataatctatgcaaaatatataaaatatcctactagctagctattaattttttttttctcttaatacatgttgacatgctacttggaccaatcataccaataatgtaaagtcaagagatcttacacatatgtcacttagagttcgtttggtacgccgtattacaccgtattgtaatgtattgcattatattaaaatttattttatacaatatttttatgtaaaactatatgtggtatttaatttttatgggcacttaaatatatatatatataatattttagtataaattaaagtt

SEQ ID NO: 391558 - DNA, 1378 bp, Cannabis indica
atgaaccataatatcgaaaaaagttggaggaaaaatattttatagcttgcaaacaatctcaagtattgatattttcgctttttccgaatctgagactagtagagttctagcagatataagtttgaagaaagtgcataactcaataattggtgtgctgattgatttatctaaaaatgcattcacaccaattggaaaaaggcgttgcatgatgatatgacaatcatgtgattttaaaccagtaaacttattgtcattatcattcacatttttatttaggttggatccgaaaccatctggaaacttgactaatttaagaaatcgacaaaaattttgtcgatcccttggtgtgaaggtgtactttgcagcaggcttttggaatcaaccatttacttttttcagctgcaactctggtcttatatttattttttcgaggtctaacctagcattaattgtatctttggtcttattctccaacccaactattgtgcccactaagctatcacagacatttttttcaacatgcataacatctagattgtgatgtagcttcatgttggcccaatatgggagctcaaagaatatactcttttttcgccaaccaacttgttctttagtacactttcttttttgccccccataactttcatgtttactacgaagagattctggtattcaacttatttgtgtgaacatatcttccatacttagtttctccggaggtggtctcttttcaacagtgccatatgctttcttgtttcttctaaaacgatgtttaattggtaaaaaatgtctatggccacaataagcaacctttttatgcaaacgaatagaaggtgttgccacattgcatgtaggacaagcataacttttccagtgttttagaaagcaacaaagttatttagcttcactggtggaactaaattattacagatgggttttccccagagtaatcaccatctctaatattctgagttggtgtagatataaggattctaatatacactcctatcatctaacatataggtcactttcttgactgtcttctaatgttccttgtttgattacatcttacatggctcccactcaacagtaggagtctggttaagttcgtacataggtgtacacttagcctcttcctattagttctcagggacatctagttgtgacatattgtcttggtctgaaactataagttccttctagactaagtcatcaacatagcattctagtattaacattaatgtaaaatacttgtttaagaataagtaatcaagataccataaaacttttgttagaaaaattaataatatacccaagatctattatataacatagaacacaatagtaatacataataattaggtatgtgtacctgatt

SEQ ID NO: 391559 - DNA, 1851 bp, Cannabis indica
gatttttcagatttctgcatccactttgagattccaacttgaagtagagcatacacatatgggttttaattcaggttgcgggtcaggactcagtggagagacactaacagataatggtcaccagtggatcggtttagatatctctgacccaatgcttagtatgttgaagtatatattctcagttattttgattttaattttaatgattatatacttctctaatcttgttctacattatagatgttgcgttggagagggaggttgaaggtgatgtattacttgctgacatgggtgaggtaattcctttcccaccctataagatgatgctcattgtcttctcacattttccatatgtaatacagtaagcttatgaagaaccgaaataacatttataaaaaagatggatttttgtttattaacttgtagaatgacaaagtactggattggatcttgtttcagggtttgggatttcggtctggagttattgatggggccataagtatctctgctattcaggtgtactttctattatttcactatttgtttttcctctcttcttttatatgttgtaagatgtttaatcattaatacttttggaattttacttgtaacatgctatttattgtgtcgttgctatgaatttcattcagctagcaaatttatctctggtgactatgccctttaggatttgattaagcttgtaagacttatcaaatcttaactcagtgtgctagcttagtgtgcagcagggctgcatgttatttggtgctttaaaatttgtgttgtcgtatgacaatggctgtgagtaggaataagtatcagagtagctgaaactttatatttaatacttaattttatctctgggtagtatgttttattttattttttaatttaattttcttttttcttttctatttgttagttaacttcactttcttatcaaaatcatttaatttaaggaaaggtgcctttggtgaagaatatttttaaatgttcgtttacttaaattgagaaaagggctatatgtgcttactttattattgtatatatatcaacacaactcattggaagttcttatttcatattttttccactggaaatgccttcaaaattagtatatgcttttagttactttcttcacctgttgaattttttatgctcaattagttgattaagtatcatatataaactccccaccgttttttcctttgagctggaatgtatcacgaagcttgaaagcatacatgtttgtagtatataatatgtatatatttaaagctatatccacttcatttttctgaaatgttaaggcatttatatatatgtaatatatataatgtcaagtgctttacaaaataatttctaccttatttttctcccattgtgtgttaatttacagtggttgtgcaatgctgacaaatcctcacacgaaccaacactaagattaaagtatgtttgtctttctctttgactcattcttatcataaataatattttgtaaattatttctctttggttttactgtttaaggtactagctagtagctaccaagtctttttgtaatctttggctaaatgtttcttttcagggcattctttggatctctatacagatgtttagcaaggggagcaaaagcagtatttcaagtgtatcctgaaaatatgaaccagctagtgttaattttgagttatgcaagcaatgctgggttaactggtggcctggttattgattttccccataggtaacataagcttaaatttataagaaacatgaatatttaataacataagtggcgtttggtaacacttttttaatcagttttttgtttttaaaagtagaaaagtgaaaata

SEQ ID NO: 391560 - DNA, 789 bp, Cannabis indica
tattttagactccgaccagaccttgaacccaacctctaacccgagttcgaattcgatttcagacctaaacacgacttaaaataaaaatcaaaaaaatgaagatagaaaatgagctttacagcacactttttgtttcttagttttaaaattaaaaacaaaagtggttacaaatgtattttatttttacaaaaattaaaatttttaaataaaaattttggttttattttatagattaaaaaaattaaaaaataaaaatataaccaaacggaaccttaatttctcttttttttggataggcgcccatgcttggttaagtggaagttatagtattttatttaaagtattgcaatgcaagaattctgtgggcatgaattcatgttgatccagacacagtagaaccattgctcacataactatgtatttaataaggaattttacaattttaccctaaattttagaataactacaaagatactttcaattatatatgcttgaattcctattccttagaagaagacttctaccaaaaacaggctcaccaattatcactacacattcccaaaggcaataagaacacgcttatgtcatattttaatttttaaatccatttaaatgatatatatactagcaagtagcaatttttttttgaggatatataattgtaatttgaaatagagattattacgtaaaatacaaaaattatatttaaaatagggataattttaagattttttttatttttttttatttttacgggttttcataaaaataacaagaaaactatataaa

SEQ ID NO: 391561 - DNA, 926 bp, Cannabis indica
ttcatttaagttgggacttttgctggcgcaagtgcgccaacaaaagttttccacaattttcacgcacgttttcatttggacgggaagttgaccgccaaaaatttcatgcgccggcaaaagctaacccctgatgcaacgtgtccactggtcaaatggtttctacttttgccggcgcaattatatgcgtctgtaaaagtccccacctacttttgcgcgcacgctttttcactacgagggaaattgactgtcttttttttcagacttttgccggcgcatttcagcgccggcaaaagtaaataatattaaaaaaaataaataaataattttgtcggcgcgaccgccaaaaatttccaccttttggcgattggctgccaacttttaccggcgaaattattttacttcgcaagtaatatttgctattgctgacgatattatgcgccggtaaaaggtggggtgaacaaattttgttgacttcctttgtcgatgcatttgttgacttgcgctgatattggttgacatttgtcggcgcaattgctcaaaagtggacattcttgtagtgtcataatatttttcccataaaataacttttttgatagcaaaatcatatttctcataaagctctgtttctaagttctcttggaagaataatcaagaaggaggagatagagtttactctagaattgatcgtgtattgaagaatgaggattggcttgacctctttcctaatttgacaactgagtttctatgggaagtttgttcgaatcattattattgtgttgtgaaggaccatcaattgggggatcttgggagagagccttttagattctttaattgatggaccagccatgtgaattttaaagataatgtgatgaataactggtgtgctccaatacattgagaggggctgaactgttgggttttatgcc

SEQ ID NO: 391562 - DNA, 2095 bp, Cannabis indica
aaataaaataaaataaaaataaagtttaatccttaagaaagtagtactttatcccagcgttccagtgtttttcgccgatgtctaattgttcgtaatgtttgatcttcatggcgcagcttttttattctatattcacactacagaagaaaaaatgttggcaaaagctcgacacattgtgtatcataaaggtgacatttctaccatgaagtctaaaattttgcgcaataaatttgatgattcctaataaaaaaagaaaaaaaaaaaaatcaaactacaaagaaaaaacatacttgaactagtaaatagaaaaaaatggcaatactgaagcaatacaagccaccaagatctgcaaggaagctcactgcatagtatacaagaaaaacaaaccggttagttagtacaaatgaaactagattacaatacatctcattttccaaactaagaaccagggttgaataaagatcagatgaaattcagtgtaaggcagagcatataacttaccaggacccatagtgttttgatcatcgatctccacaatgtaggaagagaggaaattgacatacaaagtggtgttgagtgttccatcactggggttagctagagatgtttggagctgacgtgtgtcggtaaactgagagccgggaacaaactcgtgaaaaagaggttggatgagcctaaggtcctttaaattacgataaatccggggaaataaactgaacttcagtatatttgtatcctttcctctaaaggtaacaggtccgttattagaagtactcccattctttagtattccactaacaaaactcacatgtctcttgttggtatgactcctcgtagtaaggttgaactgaaatccaacggcagttgcaggattgtttggaagatcaacaaactgccaagagatgtattgattgtcatgaatgggttgacaaccatcacacttgagaataatagttggtccttcactagtatttttacaagagtagtttccaaagtttgacagtggaacacttttatagtcaatagagccaggattgccagtcactaaagtaccaagatctcgtaagtttgaacaactcatactcgatatagtggtaatattaaattccatgtcattaacaaataaggccaagtcaggtgcatttgttgctttaacgttatgcacctcaatggttctcctggatatgatttggtaaagcaacctgagaaaaactgaaaattctagtcagtacaaactcgctagtatagaaaaagagctgccgaaatcccataaacaacgaacaattagaaaaatgcatcattaattcgctgtgttatgtaagattccatcaaaaactcacgcggcaaataaaccaatgaagactatccaactagctattgagaaagtgccaccaagttctgttttcctctttttaaccaccttctgatcatcctacaaaccaaaggaagctaatttttaaaccattaaaaaatccaactctggactcataacaaaacactcaaaattatcactttgtgagatagagattcagaggttaaaaaaatgttgaaagtggaatttttgtgaggttttaaacacatccaacctttctaatatcaaaaactaagaaatcagatgaggagcaaatacaagaacaaagaaagaacaaaactagcttttacttaattcagactgcgatgtgcaatactacatccaaggcagaaaaagcgctttcttgttaattcaatacgcaacaagaattttttacaattgattttcaacacagaaggttgatgaattttctcttcttttccaagaaacaaacacatcccaatgatcccaattacaaccacacgacctttccccagaaagattctatcaccctctcaagatcgcttacaagaaccctctagttctcagttttcatttgtatatatagataaaggagtggaagtcttcacagcgcagtaaaacttctaatcgaaataacggtcttgaattagttgagtcacagctcatcaaatatttcacggtgaagccaagatttttaaaaattggtctaaaggtttctaaaattaccaaaaaaaaaaaaaaaaaaatacaaatacaaataca

SEQ ID NO: 391563 - DNA, 1786 bp, Cannabis indica
agatttaacatggtatcagagcgttggcctccgctcaatgttaacatggctactctcggatctactggtggtggcaactcgaacaacacatctggtttcaatggtggtcaggcagctcagcctcgaatcccaactcatcaagaacctgtatattttaatcacagcatttcaattcggttgaatgatcacaatttccttttgtggaagcaacaggttttagctgcgatcaaaggcaatcgtttgctgaaattcatcaaagatccaccaccagctgagtttcaaactccagaagatcgtgtgcaaaacagggtgaatcaagccttcatcgattgggagatccaagatcaactcctagtctcatggctgctatcttcgatgacagagagtcttttgactcgaatggtgggatgcgattcagcacagcaaatttggtccacactggagaagcattttacattgcaagtgtcctcgaaaattcttgagtttcgtacgaaattgcagaatttaaagaaaggtaatctcagtcttaatgactatctcctgaaggttaaacaatctgtggatctccttgcttctgtgggagaagtcttgagcgatcgtgatcatgttgctgcgatcttcaaaggacttccaagcgaatacgataccttcgtcatttccacaaacaccagaactgaacaatacacagtcggagaaatcgaggcactgctcctagcttctgagtccagaattgaaaaatctggtaaggaattcgatgtgagtgcaaacctggtcactggtgatcaagatcaacagttagacaccttgatggaggcaaatcttgcctggagaaggttcagacagcagtatgggagaggaaattctcaggtttataacaactcaggtcagttcaatcaacctgtgtttagaagctttaatcgtggagatagttctggtgtgaaaggtaatttctccaattttcctccctatcaagctaacagaactggtacaaacctgaataataaggttcaatgtcaattatgcttgcgttttggacacactgcacacgactgtttttatcgctttgacaagtccctctcaggactaaaccaggtgcaagcaatcaggtcactgtaccacagaaaccccaagctaatctgaccaccaacaacagttctactgattctagttggtatccagactcgggagctacaaaccattgtactcctcaagctcaaaacctggctgtttgctatgattatgaaggaacagaccaaatgcatgtgggagatggtacaggtttgtcaataaagcatattggtcattcattttttactcctcagcatgcatctcattctcttgttcttaataacttacttcatgtccctgaaattacaaaaaatctcatgagtgtttctaaatttgccaaagataataatgtgtattttgaatttcatgatgatttttgttgtgtcaaggacaaagtgagcaatattaccttgctgatgggaatccacaagaatggcctatatacttttgacaagtctcaacttggtccaatccattcaactcccacctctagaatcaaatttcaagacttgcagcagccaagtcatagtcaaaccagcagcccacccattcatgaaagcactttatctcaaccaaattccaagtgtacttttgtggcaacacttaataactcatctgttactgtatctaattgctataagtgtaacacaaatgtacaaaacaattttaccttgtggcataataggcttggtcacccctctgaaaaagtggtccaaac

SEQ ID NO: 391564 - DNA, 2931 bp, Cannabis indica
tatcttgaatttcacaaaacctgttgttttataaaagacaaagcaacagggagtgtgctgctcaagggaacccaaaagatggtctatacttgctaggacagtcctccaatgcctcaagatcaagttctccaactcactccaagtctcattttcttttcctgctgctatgatctgtaataaacaaaattccacaaatgtaattctcaaatctgattataatactgttgacaacaataaaatagatcattctccttcttgtttttccaatcctgtcacgtttcataccagcagtaaaataaacttttatatatggcatcaaaaacttggtcactgttctttacctattttgcaaaaaggtctgtctagcataagtaattccactacccccactcaattatctttttgtcatgcctgtcaattaggcaaaagtcacaaactatcatttcctatatctaattctagaggctctcaacccttagagttaatacataccgatctttgggggccatcacatattgattccaaagatggatataggtattacatccatttcttggatgactttagtcgttatacatggatctactctcttgttcaaaagtctcaagcatttgatatgtttacaaaatttaaaagcatggctgaaaagcaattcaacttgcctataaaacaagttcaagaagatggaggggggaataatgaccatttgctaagttcctttcagatcaaggaaatgtcttcaagcacccgtgtcccaagacaagtgaacaaaacgggagagcagaacacaagcacatgcacatcacaaaaatgggactcacaatgcttgctcaatatggttttccattcaaatattggtggaatgccttccatagtgctgcctttactataaactggtaacctacccctattttacaccagcaagcaccacttgaatgcctttttggcaacatacctgattacaacatattgaagccctttggctgtgcttgctaccctcatttgaggccctataatagacacaaaatggagtttagatcacaaaagtgtcttttcttgggatattctgcatctcacaaaggatacctttgtggaaaccaagatggtagactttatatagcaagaaatgttgtctttgatgaacaatcatttctagcaaaggactgaacaactccctgtcaggtacaatcttcctttactatgcctattgttgttttctctactaattctcacactactatgcctaaatctaatcatataaactctgaaaatgatgtctctgagtactctatcccatctgtcagccctacaccagatctttctccaactactcaatcccctaatcactcaaacacaactcctcaacctagttcgaacttgaacaccctaccaattgcaccctcaaactcactaccagataacactttccccaccatacatcctgctgcaacagaacctcaccatgagtcaccatcctcaataccaccaactattccaacagcgtcccaacccatcccacataatgaccccatatccactcaagagacatcattacctacaggtaccagagttcacaaaatgatctctagatcccagaatggaatctacaaacacaagtcgtatcttgcaacaaaacatcctccatatgattccacattgcccactgaatcgagaacactcaaagcaaccttaaataatccaaagtggaatgctgctatgaatcaggaagtaagagcccttgttaagaacaatacttgggtgctggttccctacgattcctccatgaatgttataggatgcaaatgggtccatagagttaaacttaacttggatggttctcttaacagactgaaatcacgacttgctgccaagggctatcttcaaatggctagcatagattttgatgagacgtttagtcccgtagtttaaccaacaacagttcggcttgtcttgtccttggttgtatccaacaattggagtgtggttcaactcgatgttaataatgcttttctgcatggcatattgtctgaaactgtcttcatgtgtcaactttctggctttgaggatgctacaaagcccacacatgtatgcaagttgaataaggccctctatggcctcaaacaggcaccacgggcttggaacgaaaagcttcaatataccttgatgtcatggggtttcaaagattctaaagcagatgtttctttgtttgtgtatggggctggatcgaatctcattgttttacttgtctatgttgacgacatttaggtaactgggccaaactcctctcttatttctaaacttgttactgatctaaagaagacattcaacttaaaagacttgggacaagttcattattttctaggagtggaaatttatagagataaaactagtatgtatttatctcaaacgaagtatattacagatctgttggtgaagttaaaaatggagggtgccaaaccatgtcctaatcccactagtcctgctgtaaagttttcactaaatgaaggaaaaccttttgaagacattaccttgtatcgaagtactttaggagcactccaatacttgtctctcacacgacctgatgtggcttacattatcaacaaactaagccaatttctaaaagctcctacacacttacattaggaggcatgtaagaagctacttcggtaccttaagggaacatttagagagggaattcatcttacacctacatctggattaactctcacagcatactcagacgctgactgggcaagctgtgtcgatgatagacgatccacaggaggttatttggtgttcttagggggcaatccaatcagatagtcagaaacaacatgttgtggctcgatccagcgctgagagtgagtttcgagccttggcatatgctgctgctgagttaatgtggatccagtctctactacaagaattaca

SEQ ID NO: 391565 - DNA, 703 bp, Cannabis indica
ttttttttttttgatgattttctatatcattgaaaatattgagatgtatcatccttaacctcatgttaaagttgttattgaaaaagtactaaaatataccaaaaatttataccagaaagcacataaaattcaaaaaaatacagattcaacctttttttgttggtcgacagggaaggtgatggtttcgtgtcggtcgacagggatgggttcatggtggaggacggtggacgagggtaatttcaacggtggggagctcgggttttgggtttggttgcgagaggttaaccaaaagagaaagagagagaaataaagttagaatgccaaagctaaaatgaaaaatttgtcaaactaattatttcaaatactaaaatttttaaaataatctcacttaatttattctatatgattatgatttcacgattataattatcatgtatggtcgcacattataatttatgctcatttttgtaattagttttttaacaaaaaataaagattataaatttctagtctttattattaggagaattaatttgctatcaaattaaaagagaaaagtgatgctttatatgatgaatttttattttattcttttattgtcatggtgtaactttatctttttgccataactatttctattgggaattttgattatatatacttaaaaaataaaaaaaaaattattattaaatcaaaaacttaa

SEQ ID NO: 391566 - DNA, 1379 bp, Cannabis indica
gataaaaatcttaattagccatttgtaaataaccatcctacatatatattcttttttgtttgaaatcatccaacatattaaaattagcaaaataacctttctttttattttcattttttatacatttaggtagcgtttggttggaaagaatgaaagtataagaataagcataaaaatggtaataaaataaaaaatgagtggaatgaattttattttagagtgatatgaatcatactatgataatcatcgacgcaaaaaaatttctagtcaataaactaattttctaatcgaagatataaaagtctgaatataagtcatacaaacaaagtgacttatataggaccaagttatttaggaaatttagacaaaacaatttgagaccaccttcaaaaggcatccgatctaaatgtatatatcagctgccttgttttggctttcagtggataggatccatcttttgttgtattttgaaaatgggacagcattttgtaataaactgctttgtagtattttgtaaaaagtttataattaaggggatccctgaatccagtagtattttgaatgaaaagttaggttatgatttaaataattttactaaaagttttaattaaaccacacatttcttaaatatttagtttattattataaactaattaataagagcacacatgtggcgcccttacggttcagggtgttacacttgcagagtacctattccctaaggagggtttacgattctgggttacctaggaataaaaaactgtccatgtgctactccttttctgggatagataataggtatcctcacccaattggatatatggtcatcccgaactcatcctttgatttcatccttcaagtaaacacattcatttgctgtgtgcccaatatcaccgtggtattcacaccttttgctcgggtcctttttgtgtcttccacccttgtacatgggtggaggctttttgtaatggaccatattacaagtagctttatacacactctcatgagtatcgaccttgctggtatactcagagtatttggactcttgagttttctctttcttcgaggattcattttgacttaaagctttggatcctctcttgtttcaagaatgactcatgtttgatttggaactttcacttgttagtttttctatccgggagtagcactgtatctaatttgtgccacttcgaagttaaagaaactagcttgtgcagctggttgtccagaagcacctggtccgtatactgttggagttgtgaacatgcctgcatgaggatgtataactggtgtagacaactgcagattttgagttgttataatattggtggttgtgttgtcgagtgaatttcgcaacaccaaattatattgtattgtta

SEQ ID NO: 391567 - DNA, 1151 bp, Cannabis indica
agagggaggttcgacgagggcttcaatttgggtttcaatgactttgatcgatttgcacaagatagaccatcttttgttgtttgattaccttttgattttatctctacaaatcgttatttcagcttcaagattggggcttcagtttcaatttgcatggaacagaaatcttattttgtcgtttgattattggttttattttttgttaaaaataaaaccttaacaagcgttcacttaagcattgagatattgttaaattttactattaaaacaaacactgataaattaagaattattatcgtatagtcacttttaatatacaaatatatatattaatttttcaatcacattattttcagtacaatattcaaacaaacatcttaaaatgtctctctttttgagtgtttttgtcagtctctcgttttgtgtgagttttgattgttttgtcgtgttctgtcttgtttcgggtattgttgtttatcctgtacgggtacgtacgtgttttctcatggcatcaagtagcactgatatggataatatagaggaacgttggaaaggtatccaacttgaagaagaagaggcagaggagactttctatgatgaaaacgatgcagaagaagatctggttattgacaccacatggtgtttggttggacggctgctcacaggcaaggtatccgactttcgaatctttcaaaatctgatggctaatctctagaaacctggtaaaggaatgtatgcaaagcagcttgatcaaaatcgatttttgtttcaatcttatcatgagttagatatacatcgggtgatcatgaaaagccgatggacctatgatcgcaaacagctaatcatatctcgcttaaaagatggtgacaaccccagaactgttagtctcaaccctcttgatctgtggaacaaatccatgatttgcaatttggtttcatgactatgaaggttgccaaggatgctggaaattatattggaacctttcttgaatctgattcgaacaaatttacaggggtatggcgggaataccttcggattcaggtcacgctttctctcgatcttcctttgaaacgcaggatgaagttttgtaagcgggatggggacttcttttatgagaacttttcagtatgaaaattgttggaaattatttt

SEQ ID NO: 391568 - DNA, 2393 bp, Cannabis indica
aggatgccgtgtggcgagagagtggagcgtgtacgtcactcgccggcgacatatcccggcggcgacgaacaaatttatttggttgattttcctgggtcggatcagagcgctgttgtaacacttgtccttcgttgtacgctattaattctattgtcatcttatatattaatcggattggctacattaagaacagtgaatttactaaactatccattgtgaaagtaagtttagcctaataatgtaaagggtgagattggaaaaacggaacagttttttttggacaggttgggttgagatgttattattaggggaaaggggaattttgtgcaaaaactcggagtagaagctaaagctgaatctggacgataaattggcttttgtggttctttgaactaataatagtcgaaaatggtctagattgagagtcatgaaatttgacatgttgtcgccataaaacaaatatattagtaatatccgatctgaattttaatcatttagccaaatttaatttttaatttcagccagattaatttaataaaatagtgaccatttattatacgtaagcttaagcttaaaaaaataaaagaaaaataaaaaaactttcacgcaagcgcaactcatatcccataaataggactaaatgagtttgtgttagaagtacaataattatcttcttctttctttaaaatggaatattaatttcaaaatttgtcacatgaaaatcatggtacaatttttcacttcaattattataatttttctgcttgtcttgctagaactagctagagtgatgagaggagaggaatatatgaaagcagatcgggtaagattaggccaggccaatttatatttgattgtacttgtatgggacaaaacaaaatggtaggtccctttcctatgagactcatttcctttttttttttttttttttttaattattatgatatgtgcctcacacaccacagataaaaagaattggcttgacttggcttggctagtaggctctgagtattgttattggtgattgattttaatggagagttggtaactcttcctttcaggtggggacgcaaaccatgatataactaatatacaactaggaaggggagatcatcacgtttttttttctttaatcatgtttaaaggtcacatcaaaatattttatgtttaaatattatgaagggctctcttccactttatttttccttaaattatacctttttttaaacgaaaaaatctaccaaattggtcccaaaaaaaaatcatccttacaacatttttatgtaaaaaaaatcataaaaaatgattttgtgagatatatttgttagaatgttttatgtggactaatataattaagaattgttcatttagtgtaggtgttaacatataataataactatataatagataatgcatgatattactattaggtcataataagacagacataatgtactaacacgctcgggcccgggacctatagacacgctctaaaacgtctttggttaacctattgagccaacacaatttgctctcacattgggcatgtaagccaaattggcctataacttcttataaagggcgtgctatttattttgtggttagggcatgagaggggtgtggctatggtgttgagagttgtatcaagagtagtgttcattacactcaagttttttggtcttcttccatgtgtagatcaaagaggtttatgaaatcaacaatgattcatagctcttaaagattcaacatcaaagcttaaatgaggtatgtttactaattctaaatgtttgctctaaagttaaatgtttgatattggctaatatgagcatgaatttatgctcaatgtgtagttatttttaacaaatggtatcagagtcatttcatttgatttagagcttacttttgagttcaaacttttttttgtaaatctaaatttgtttgatacaataattcttcgaaattgtgtttaatggtagaagtaaagatttttgatggtaagagttgttggaaacttcattttctcggccataaattttattttcttcaaatgtttcaaagcttttaggtgttttcttccatggccaaaaatagtttatttttttatatttaaaatgattttaagcttaaatgggtataagaattggaaagaggaaggaaaatggtaaaaaaaatatcccaaatgacatcaaaaatagtgtaccggaggttgaaatacaaccgggtcagtgatagcatctgaaatggatcgattcaagttttaatgtcccatttgtaggttgaagacaacccaaaaatgatgtgtcatttttatgtatgcttttagctaagttgttgtcattttttttttattatatatatattgtcatttgagaattgttgataaactacatgtc

SEQ ID NO: 391569 - DNA, 708 bp, Cannabis indica
cttttaaaattatataaaaataaccctaaatagtgaacaaaataataaacaaccaaaaaaagcccaaaatgtagagatccattaatgaacattaaaacaacaactcataaaaacctaaaaacaacattacacaaatcaaataaactttaaaacaacttataaataacaataaaacaacacaaataaattcattaaataataaatctatacaaacaaaaacagaacaagaacaatatcacgaaaaaaaaaaaaactaaatttaaacaagttcaacctaattaacaaagcacatcataactaacccattaataccaaaagtccacaaaaaaatgtaaacccctaaaatagaactaaaaaattcacaaataaactataaaatacttgacaacaaaaataaatgagaaaccataccttgttaactttctttcctttaaaatcttcattatcatatgggtatttattagaccacatccaatgttttttagtctatccagatccgatctaattatatattggatattagattttaccatccgatccaattaatttcagtcatccaatcaataatagatgttggattggatcgcttctatccgttaaatttcatatatatatttgtttaatttaagtttattcaatattttagacatattattttttggattgaatcggatccatccaatattttaggtctagtatgtattggat

SEQ ID NO: 391570 - DNA, 2043 bp, Cannabis indica
tagatcatcaaaggttccacatgttcctgtgcaaaagccatcagttccctatgcaaagcctaatttctattgtggtacacaagtaagaatctatttcccaagcaccataattaagtagaataatgcttttcatcatatatttgatttagctggataatcttattttctgctaccttggtttttggtgtgataggaattaaatttggctcatcaaagttttgcacggcttcatagtggtttctttggagttccccatatgttctcaattgtcaagcttctagggtctagatccctgccgtggcttattagggcacttctggatcatatatccaataaggtatttcccttttacgttacaccaccttatttgcatccagcatttcaaaacataaaatttatttagcctaatgacatctgcctgcttgctgaagctaacaacacttgaaccaatgatcaccggattgcaagaatcattgccaaaatccattggattgcttccttttgatgggggtgtgacaggtacataatatgcatcacgttgcaagttcaaatagaataacatcctttacctgtcacactagcttacaatatcttaaattgaaacgtgatgcatatcatatccaacactagcttacaatataattatgatgttgatgttatgttggcacactgaccttatcttgtggcattttatacccaaagtaaagcgaaatcttattattattgttaatcactaacatatgttttcttctttccagcatgtatttgtgtgtatattgcgtgttcttcaagcttaatattattctcttaagagttttttggataatatttcctgatctgtgtgaagatttctctctggacaggttgtatgaggcttgtaaaagaacatcttaattggggaacaaaatcagagctcaaatcagaggttcttagggggataaaggaaattggaagtgtgttatattggatggggcttcttgatatagtgttggttggtatcccgtgcttcattttacatattagagatgattataaatcaaaacccgtattgtaagaataacgtacatccaaagtgatgtgcaattggaaaagataacatatatatggcaacattatggactttataacatgagaattcctttgcctgaatttcatattatgggaggatgagcctaatttatactgtctaattggttagttaaagttgaatttagtgtttctggtcacttgaatcttattgttgctatttcacatgctgaacagagagaagtagatacctggcacttcatgcaaacagctccttggttgggtctacttcctagtgctgatggacaagtattacattctcaagatggtggagatagtccaattgtcagtctatttaaatcagtcactgctgcaattttatctaagccagggtgcccaaatccaacctctttcaacaccctatcaaaacaggcagaagctgcaggtacagagtcaaacattcaatttttcacaaactcgttgtatttaaatattatcaattcttgggtagctcaaatggtcaagcaggtggttagccctctctaaagtttaagattcaacttcttggatacctgcatatcaattgctgtagttttttatgtcctcaaatattgtatggttggagagtctagcttaaatgtgcatcacttattgttattcgtgtttgtgagcaagtgacacgtggcaaataaaggaagagattagcctcataatctcactaattaaaatctcccactacaacttttgtagaaaatagtgaatcgaattgtgtgtgtattttatagaatagtacatatttatatacaaagctaggagactaaaaaataggaaactaccaacaagataggaaactactaaatacaagttaccctaattcttttacacctaatatacaactaatattttaacactccccctcaagctggagcatagatattaatcatgcccagcttgttacaaagatagtcaacccgcaccccattcaaagcttttgtaaaaatatctcctagttgttct

SEQ ID NO: 391571 - DNA, 1105 bp, Cannabis indica
tatagtcctccctcgtcatcctccgaaaaatatggtaactttcttaagtgagagttcttccccattctcacttatttattttgtctaagtgttaatggggtttttcttgtcttgcagttatggatgtagacttggagaatatgttcaaaagtcctcccttagccgacaagaaatccaagaagagggtcgcccaaactggtgaggctttagtttttaccaaagaacctaaaaggaccaagaccacgaccaacaagaagaaatcctcgagccagcttaccattgaggctgataagtctcccaaggcaaggaatgaagtctctgctgcacggattgaggtctctactatggggaatgaggactctactgcagcgaatgtcgagggacaacctactgggtcggtgcatcaagtgaagttctctggttcttgtcctgagatggttcttcttgagccttcctatcccctacccctcgaggttggaactgaagggtcatgacttagctcgcaacatgccaccaatagttggtgcaatctcttgacacttggatccagtgactaggatctcctattcgaggcagcactgaggacctggccaaaagaagttatgagcttctgcatcaggtcaatttccttgccttcttgtttccactttttccttttttgctccttttactaacctcagtttgtcttcttctcataggcttcttttcttgtccatgccacacatcatcagccgtctcatcaggtcaaaatgcttcagactgagcttagccagatcagggaatagagggatatcaaagccaaaaagtggaacgattctgaagccgaggtctctcgcacgaaggaggaagtagcaaagcaatgacaagccgaccaacagaggatcacggaactcgaggactctcctccaagctaatctcgatcaaaaatagattgatcatgaccaaaagctcaaggagttggaggctggaaccaaagaaagggtcaacaacatcggtaggaggaccatttatcaaatttggccagcgaacccagagttggacttcagtttcttaagcgataaggctgatgccatgattgatttgtgggaaattattttaccaggat

SEQ ID NO: 391572 - DNA, 854 bp, Cannabis indica
tttgtgaaataatcccttaaaaatactatatcaagattacatttaaactaaaattgtgtatttttcaaagattgtatttaaactaaaaatcaattaatgataaaaaaattacataaattaaattaaaaagaaaaaaattattcttttcaaagtaattacatatgtagcgctaatgtggcaattgtctaaataaccatatcatcattctatttaccacttttgacaaaacttgacaggatgactaatttacaacactagaaatagtccaggaactatttttaacgaactaaaaaattcaagggcacaataaagcatatgttatagtttggaggcaaaatcctaaatagccaaatatcaatatcaaaatacattataacatatatttaagaatactttattccaaaatttcttctaatttattataaaaaaaataataataagtctcaatttgggccaattataaataagaatgacctctaaattataattagttatatatattatttatccaaattttgatgagggtgacatggcaaggatgatgacacatggcacgagaataccaagattgagttaatatggaatatttaaggtcattattgttgggaattattttaccaggatctaaattttctaacatgtatgttgattaacaccctaaatatgaattctctaaatcattggaatgtaaacacatataaagttaaaaaaaaaaccttacattggtagcagcggaataatatgtctcctctcactcagatctctaacacttgttcctttctgttgctgagtattatcaagatctgagtctgattctccttcaagtgttggattcttcacagtcttacacacta

SEQ ID NO: 391573 - DNA, 1102 bp, Cannabis indica
ggtactttgttgcaaacgcgacctattaatcatgatattactaatgagattaaattatctaatgctgactcttacgttctatttttctaacccaacaaatttttttttcttttggtgtgtataataatgatattatttagggtttattttgaaatgtttactgttagtagagaactttttttttccttaacaatttttttattatattggtaatattttattaattaatcaaatttaaatttaaacgtaccaaatctgtatgacttgtaaaacggaataactatatttaaaaatatagaataccaaaacaatattttgcaagaaaaaaaaaaaccaacaataagtctatagtacatcccaaaaaggttgttagaacactctatttatttttatattcaagagagctttttagtttcattagtttttttaatcatatgcatatttcttatagttattttagactacttataattttttgaatagtttattatttattgatattttcagaaccgattataaaaaaaataagcttaagtagaaataaattaaagaagaagatatcaaaattttttacgtggttcgagctttaatgaactttagtccacaagtcaatattactgaattaaaaatgcttcaaactatatcttcttacaagtgtgtttgccctagttaaagaacctcaattcccaacttttctcccaagaattcaattttcaacttagttctatttataaggaagaatcaagtatgagcataccgaacgcaaaagggttttaaggtatcaactagaccctttaatggggtaaaatatacatttattgacttttgaccatttgtgtgaggcccaattcatgaggtgaggattttccgtaccagtgaggaccatttgatgatgccacttttcatgcgcaaccacgttcgtaccgagaatgttagagaatatgttgttggacaaaaatgacatattcttttagtaaagcgcgcactttgccggtctgatataggagacaaactctaacactgtgtggggccctgtgtctaaagggtttcgtagtaacactgttgttttctttcatttttttatcacattttctaaatatta

SEQ ID NO: 391574 - DNA, 961 bp, Cannabis indica
aatccgcctcgccgcccaatccatcagataccctttttatgaagtctggcctttcaaaatccgctgaaattagattggatctgttattggacggatgggtttgaattggagtacaaactaggggtgtacgttgatcggtttagtcagtttatgctatattttactcaattcaatgtaaagattgagttacaaaaatttaagcgcaatctatccaattaagaaaaaagaaaatagtaactcgcctaatgaaattagtcggttttgtcagattaatccgtccaaactgatcactaatatttttttttattttacattcaattgttatattttagttaattataataatgaaacaaatatacatagattgaatttaaaatttaaattaaccaccataaaaaaaaattagtttctattttatattttataaatagttatataaattatatgatatataaatatatatagtaaaaacatattaatgtatataaaccgtcttaatcaggttgattggacgggttggtatttttttaatccgccaaatataaagattgggcggtttttcggtttataatttctattgagttatctcggtttggtttgggcgggttattcaatggggcagtgtacaaaaatttatatacaaccctaatacaaacaagctaaagtccattgtacccgttaattttttaaattatcattaatgtttttacacaaattatattacaacttttttttaatgtgatgacacattctggatattttataaatacccaaaatgccaaaagaattacaaaatcgatagtaagtaaatgaattactaaaaatcccttaagttacaaagaacttgttattcccaaccacttacagcgatttgatagtgaatcatcgaagaactaacaaaaaaacataacaaaataaattatgtcacacagacaagactaaaacacttaaaactatgtca

SEQ ID NO: 391575 - DNA, 1479 bp, Cannabis indica
actggcataggagctggtggtaagactttttctacagtagctgacgatgccggttgcctcaaccgccgtaattcatcctcttcacaaagtataatactacacatttcttgaaatatctgctgccattcagtaggcagattactgttgccaacccccgcattatccccaaaatttggcgaagccacaggccgtgtcagtggattggtttggtctacacaaggctctactagctcgccctgtggtctagatgattgtggagaatccatttccataaacagcacgataatcaacaaacctggcgttttagtcaccaataccacattgacgcacttcttgccctaaacaccaactcaactatttcattctaattaaataaaagtttatcatataacattctaaccatggcatcatatatcacataaatactctagatgctcacatactgccttaagtggaaaccggtaaataaatgatcatataagcaataaagcatttactctcaacacttactgcactatgagtcgagcttgtctctgacaatgattgtacatgttcggtcggtttacaagaagtttaaaaaccttggcgctcagatcccaaactgtaatgccctaataattaggcaccgctaaccaataaagaaaccccaatccgctaattcgcgattactagataggtaagcgcgggaaaatttaaacttttatctaaaacagaatgaaaataaaacttgtaataactttaaactttacaataaaaaatgatatctttcgggataaaaaatattttacaaaatattagaagttcttttcactagccgacctaagtggcaaaatcaaagttacaaaagtgaaacactggtaggccccaacccgcttggtctagtgtggcctaaacatgtacaagcaccaccaagctctcgaactcgtggcagatcagagattgatttaccctttcctgcacagtcgggcacccttgaggcaagcccagcaagacagtgtaaataactatatgcacaataaatatttaacacataattaatggtgccaccgcattatttgtctatgtgatatagacctccgtgttacgctcacatgcctatatatgtctatgtggcataaacccacgtgttatgctaacacgtccatttatgtctatgtagcatagacccacgtgttacactcacatgcctatttatgtctatgtagcatagactcacgtgttatgctcacaagactatttacaataaggccttagtagaatttatctcggttatagctatcgagtctaaactgattatgccttgcctgcataaaactattcataaataagtaattcatacgttatgttctttcagttgtttatcatgatgatatgtatcaggtgtaacacaataatgttttacacacataactcttgacatatatgcgtacattcaatatatactataatatttaaaatcttagggtaatagccctaact

SEQ ID NO: 391576 - DNA, 1258 bp, Cannabis indica
ctaaaaaaaaaacccaagtaagatgatgatcaagaattgatatgcttacattttactcgagaactttttctatgagaaactagttcttgaagagggaaacgagatcgtgtcttcatcaaatgaaagcagaagaagatcctagcatccataaacttcacaaaaaaataatataatcgcaaaaaataaaaacaataaaaatcgaaatcaaactatttaagaacaaagaaaattcgattcaagcctgcaaaaacagggattagtatacgaaaatcaagaaaacaaaagcaatgagtatcaaaaatcgagcgctggttggtgatcacagaacgttaaagcaatagagagagaaagagagagctagagagagagagattgagttgaattgtacgagtgatgtaattgggtttatatatacaataataattagggttttaagatgtaaaaaaacgatttttatcacctcctaaaacaatacaccagagatttctttctgtaaatcttacaacggctaattttcgaaaaagagccgttgcaattttatgttaccaaaatacccatcaccacgcatagtctatgtcacgccttaagtgggtaatttagtaaattcgttaataactccgcctctagatttcttccgtatttcttaattaattgttttgtaataatttctttagatttttttttttgggcaatttcctttttttcctttggtgatttctttggattctaaattcaaataaaaaatcaggtattaactttttttatggtataaaaatttatgtttattgaaaaattgtaataatctttctattttttttggtaatttctttttattctaaaaaaaatcatgtttttttcacaaaaattttatgtttattgtatagtaaatacctatctttttatctggttatcaaataaaaaaaatgatatctgttgttttatggaaatataaatgattttatatgtaagttttaatttgttaatttgtattttagataaaaataatcttttaaataataaataatgtactatatttaattattttttataggctttagggcccgtttgacacagctttacttttcaaaaaagctgtgacaaaaaggtgtttggtaagcagttaaaaaacagcttattgaagaatttatggaaaagctataactaaaaactaaagttggtacaatccaattttttaaaaagactgttttgattaaaatactctataataaattatttttactaaaattttatttaatta

SEQ ID NO: 391577 - DNA, 776 bp, Cannabis indica
aggtacatgatccatatgactaattatttctatagtgaaatgtttatatgtcttattatcttgtgataattattaaaataataaagtatcatataaaattagttagttgcaatcccgcgatcatcaaaaggtgcataatatgagtttagtagcaaaagttgtgattttagagaaaattgaatggctaaactgtcgcaggcaattgagatgtgtaggatagaaaaaaaaaaaaaaaaaaaaaaaaaaaaaaaaaagttaaaaaaaatggcctcaaagacaaccaaatagaaagatattaatgtttaaagtttttgaaaaaactttatgtacattttttcgtctttctataatttttttccattcatttattcggtaccttcacttattgtttcattgtattggtctcgaaaaattatatgaaaatgagtgggcatattgcaaaattagttaagaaatgaaaatattatgtcatttcaaagctaccaattactttttgttcaacaccctatcatatattcaaactaaaatctacaccccaactcattcgtactacataactttttttatatgtcaacctttatttttctactaaaatgtttctcatcatttcattgcatataacttttttatttcattctactaaaattttagtacaatgttcctttatgacgtctcgtacacactttattatttagtatgaagtatgttttctttaacctacttttataagaatatttcttttataaaatattaaattgtataaaaattaaaatatt

SEQ ID NO: 391578 - DNA, 1089 bp, Cannabis indica
ataaatattataaataaattttttataaataataattattttactatttcttacactaagaaatctttaaccttagggtatttggtcaactccgagtaccccaaaatactccagtaattctaaaatcaacttatctcaataattctatcaatattattaactaaaacttttgtgacatttttggcctccgatcaggtctccagggttgccaaacttgaaattatttttatttcacaaataacttacattatatcttcatattccaaataaatctccgtaattaataaattacgcctagttgttcacttataacaaaatttataatttatgctaaattaagttagtaggattataatcctactcattactatttaattaacctataatatataataaatcttaattattcataattggttttcacgatattacatgcaggttgattgctagccagtaaacgaagtagatcccatgagcttcgacgaagagaacgattaggtttcccatagaaacaattaatctccattgagtattatcttcatactccaccaaaaagtcaatatagttacttgagaagcccaataacttaccaaactcatcatacaccaccactaccttaggcctccacactaaaaatagcataacaaaactcccctccttatttctcaaatctcattctcttctttaaatgtaacaccctattaatttaggcgtgctattgcgattttatattaatttacaatccattgctaatcaacgggttcattgaaaatcataatttattaaaacttttatttaattactctttattctttaaatgaaactaaacatcttttacataactgggatcccgtatctaaaatatttactatcgtaatataaaacattcgatacaaaagttatcgcctagcgaccattcaaaatacagcctactgtctcaatgatcatacgctctaggctgaaccgtcccgacatgtacaatcttcatccactcgcactcactgctattaagcctagcttttcccttacctacacatacatataataattgtgagtcgacacactgagtaagaaaagtataatcataac

SEQ ID NO: 391579 - DNA, 522 bp, Cannabis indica
gacacacacacacactccctctctactaatactgaaatggcgaacaagaagaagcaccgacagcctgacccgagttctgacaatgaaagccaccaacccttcaagaaccaaatcaaacccgactctgtcatcctctaaatccttcagaaactcacctatttagtccgtgcagccacagaagcctcatcgtcctcatccaaagccctaaccctcgccgacctagctctctccgagtcttgccgcgaagtggccaacctctctctatcctccgtccaatctaccatcaaatccctaaccctaaatatcgcccactctatcctctccggcaacggcttcgccttcgacgtcccctctcagtccgccgcgaaccagctttatgtcacggagctcgatcgaatcgtcttgagaaacaaaaccttgcttcgtccctacaccagcatggtcacctgggctgttcgcaggagagatcaatgtgtttggatttgagatttttttattgtggatttgatttgggtttgtttg

SEQ ID NO: 391580 - DNA, 539 bp, Cannabis indica
aggtggataaaatttagaataacggtaaaatacattttcttttttttattccatgcataaattgtatatatggtatacatatatgtgatgcttctttggaattaaatttcttaagttactctttcaatgtaaaattgtcatgggatacaatgatctactttaatcgtactattgtagagattattattgttgttgtaaatatgagattatctccgatttggatatttttttaagaaaaaatttggtgtatctgacggttttaaaccgtcagctatactatagtcgactatgtaaaattgtttgctatagtgttcactattgccgacgattttaaatagttgagaaattttttcaccaaatttttcaaatgtcacctattcttcccagttttgcgacggttgaataagcaacggttatagatcctgacaagagtacattaccttattgtttaaaactatcgggaaatctactttttttagtagtggagtcaactagattttgcatttacataatacctatcttttgagatctaacaatat

SEQ ID NO: 391581 - DNA, 902 bp, Cannabis indica
ttttttttcttatgaataattattttatgtataatttttagtataataattttttggtaaattattgattagtattattattattatttatagaatattattatttagtatcttaaaatatctaatattatacaaataataattatttagcagtttttcatattagtcactaaatcaaaatttgtacgaccgatattgaaattacaccaataacgatatgtcaccattattgtgtttaacacctcagtattttccttattatctccaataaatagtgtataacttcagctaaaaatgaatcaatattataattagcccaaattttataatagtgctccaatacatttagggttcatttggtacgttgtattacaccgcattgtattgtacagtattatattaaattatattttatgcaatattttaatgtaaaactacatgtgctattaacttttatagatacctaaatatattattttagtataaattaaaatttaacataatattatataaaaaaaatgatatacaatccaattcaatataatacaatacaatacgacttaatacgacgttccaaacgagcccttaaggtaaaattaataattttttaatagaaaggtgtaaaaaggtaaacaaaatcattaagtattattaaaattatataaaacttctattaaatatatagataaaatgtaagaaatgattaattacaattaataaatagcaaaagagtaaatagaaagtaatattttttgcatgtaaaatttggttcatgctataacttttcttaaatttggcacaactttaagtaggggtagaaaatattcaatccagtctaattgaaccgaatcaatctaatccaatcctattacaaaaaattggatatccaattacaattggat

SEQ ID NO: 391582 - DNA, 517 bp, Cannabis indica
agattctattggagtatatcctcaagaacacatttgagctaaggaagcaatcgacccaaactagattgagtgaattgagagaaaaattgtataaactgatagatattatattttgattagattgcacctggtgtaaagaatttaaagtgataatacaattttgctattgaactaatttttggcatcaacaactgtaaattatttagagttttttaaaaatttaaaaggatgatcttctaactataaccaaaattaccataaaattaaaaaaaaattatatattttggcatgtaatttcaaacgtaaaatttaactaaaaaattataatagaaaattgtaattaatcttcatttttctcatatattaactatgcttttgaatttggattctttctttcattaattacttgttttgtcctttagtagaatgaaagctgaatttgaacaaagcaaaaataggaaagtaatacaatgccaataaataaatataaacatgatttttttaaaattttttattt

SEQ ID NO: 391583 - DNA, 665 bp, Cannabis indica
ccaaattcggtgatgacgtggaaccgaaaattcggttacggtctggtcggtttgatggtcggtttcggtttttcggtttttatgaacacccctatccaacatattggtctcatgaggtggatgactttagtatgtccacattagttagatagtgtacaatgtgaattctacgttataaaatttattaaaagttaaattagatccaatgcaccattaatagaagaggtaaattagttaataagtagttttaagtttgttttaaatacttttctttttttttttttggttaaaataattttaattttactaattaataatttctttcttttgtattataaggtagattcagtatcccatacataaatgatcacattaatgttagtctacgtgatttgtaggtagattatgtgaaaacagaggtggtgtgtcaaggaaaattataagtatatatctcaatatttatgtatatactggtacgtaattagtttcatataatttataatttatatattttttaattaagttagttaaatatatttgtgcaaattattaagttatagtaagaataagattacaaatatttttgtattaatccaactacattattaaattaattattttaactgtttttataaattgtaaaaataatgaaaaaactaatgtag

SEQ ID NO: 391584 - DNA, 1356 bp, Cannabis indica
tttcttcatcaagaaatttatttctttgtgatttttttagtgattttttcagcaacaatgccaattctaacaaattttttagcgtcggcaataactctgacgacttttccagtaccgacagctactctggtgatcttttcgacaccgtagcaaactccggtgacttttccgacaccagtgacaaataaaactacctaaacaaataaaaatattaaatataagatttgaaaacttaatttatatatatggtatatcaaataccatgaaaagaaacatgagatatgaatgcaattaaatgaacatgtccgtacctatctggagactttacttctctctgtgttatgtctcttgctaatttatagcttttcagattatcacttatggaatcatcttctgaatcatcacttctgtgatctagatgtgttttagtctccacccttcttggaggctccacctcaagctcagtttttggagctttatttttatctcagttagtattggcttgacttcaagcaagtttgtgaataaatcccataacacatttattaaaaatcacatcgctactaattatacattttctcattccgggctccaaacatcatagtttatatcctttgaccccttttgaatacaccaagaaaatacactttaaggcccttgcctcaagtttgtcttgcttgatgtgtgcataaaaaacacatccgaataactttgagctttcataacttgtgggcttccctaaccacacctcatcagtcatcttgaaatctagtgttgttgacggatatttgtttataaaataagttgcagtgcacatagctttcgttgagaacactttgggtagtccaacaatcaataacatgtacatgactctttctgggatggtcttgttaaacctctccgtgagtccattttgctaaggattcttcctcacagtcctgtgccttgctattccttctttcttacaaaacacatcaaactcatatgaacagtactccagaccattatcgattcttagctgtttcactttccttctagtttgattctcaatcattatctttgagtgcttaaatttctcatgaacttcagtcttatttttcaaaataaacacccataactttcttgagtaatcatcaactattgaaagaaaatacctgctcccaaagtgtgatgatgtcctcaaggatcctcataagtcactgtgaacgtaatccaatattcccttagtatcccttttgcttgttccaaacttgactcaacaagctttaccaagaacacaatactaaaagaaatccactttctcaagctttacttttctaagtaatctctgcttattcaattcatgcaactctcttt

SEQ ID NO: 391585 - DNA, 920 bp, Cannabis indica
taaaacatgtgtattgtaataataaatacctcaagatgatctccagtattgatcaaaatagcattggaaggcatatagtttacgtcgatccattttccttgatgggatagaatttggagcccaccattgatgtcttggattagggagacgaaaaatcctggatcagtatgatcaggcacgcccattgaacctttggatttgaagtttggtgggtaaaggttcatggcagacacatcaaaccctgactccaacttaaatgctttttctatgaatgattcttccattcccagtgttttcgatatagcttttccaagaccatgtaccacttctctcattcttgtgtaataatcttccatagtctcactgaaagtggtttggttagaaggagaatgatagttgggatgcgtaaccatcttgagatattctctgttctccgctgccgatgagcgcaactcccatcggatcatatcagtggaactcttcttctggtatttcatacgatcctctatcaccgttggttcaaagtaatctgatattgctttgaaaacacttttgaaaacgtattcaggaacaccgtgatttaccagctgcccatgcaaatcaataaaatttattaattaaaacaacatcacaatataattgtatttttgaaaatttaaatcgaataaaataccattattagaattgaaatagtttattgtagtatatgtgcttgtttctcttttcatatgtctatgcatgcccaataagttacatatatttgaagactaatttcaaaaccctaaattatataaagaagaataaaataattttgtgaaatttttcatatagctaagtattcatgcaattgtaaaatctaaacttaaaataaaatcaaatggacaattcatgctgaactaaagctatatatatactgttat

SEQ ID NO: 391586 - DNA, 1042 bp, Cannabis indica
cggaggctgttaagaaaccgaggcaagtggatactcctgctcccagtgctgactcagggattccttccgaagtggatgagtatcctatgcccccaggcattatcttgactcctgttcatctacatgaggaaagggctcggcttcggattgctaagtacaactatgccttgcgagagtacaccaaggggaacgcagaggtggaggctctaaagaaaatactaagggacgcccaggatggatctatccaaagtgaatacgccagaagcgtcagggatttgaatttggatcccttaaccaactggcttcatgcttcgtgggacctagcctggctccttttgccttggagatgatgagccactttgctgtcggcctgacccaactccccatgaagagatatgcggcatgcgcttctactaaccccgtgtaccaaatccaggacatgagcgtggccctcactacagtgagttcttatcttttagatttcttaagtctcttttattttttgtacaagcaatactacaaaaagagctttttacttcagattttaagtgacatataaagattttgcttcaattggtgtaaccgacgcgtagacgcaaataatgatatttttttacttcagttatgaacaaacgctaattgattatttgcttcggttataaactgaacaaaaaaaaaaaaacatttttgctgcagttcataaccgaagcaaaaaactagtgcgccaacgctaattgttttttgcttaagttataaactgaagcaaaaaaaaaaaaattaagtaattataaccagatcgatgccacatgaattcttttaatttcacacaatatttttagtttcacataaacaaatctcatatctcaaatttacagcaatctcaaattttttcaatgatgggatagcaccaccgcgcgcaatgacagcaccaccaccttaccactgcaaacctaaaaataggcatatcagattaaaaatagagagattaaaaaagggaataagataaatatatatatatataaatggaagaggtttcaatggt

SEQ ID NO: 391587 - DNA, 864 bp, Cannabis indica
ctttatatcagttttactgtgcactgcatgaagttccaggtcataaaacttgaataattgcttcatatcatttaactcctcccaaatgcacctacattaaattattaagtgttaatattttataaaaaaattagcaaaaattgatatataaagtttattaagttaaagaaagcgtgactcattccaaaaaatattctttagtctccaatgaagtcacacaatgcttcctgttgttcatcatccctaattaccgtgatgtgagtacgaggcgctatgaatccacatagtactggagtttggactataccatttttatcttttattctcaaaaatttatcaaccatgtatctgatcgacttggggatttctaccatgatatgtggaccgagtaatagatcagcacaatctccattgaatttttgacaaggcatagggcctttttcattcgacataacatgttttgatcgcggttgagcaaggggaccctatacaaaataccataatagatcaaaacttgtatatattatttgtaatgataatttctaagaaagaaattttaccttcaatgtttaaagttaatgtttcggccaagagaggaaagtgttcactgtttccttaacatatatgttgttaggaatattttaccaggatctagatttactaacaaggatgttgaattaacatcttaaatatgaattctctaaaacaatgaaattaaacacataaggatttaggaaaaccttacattgattgcagcagaatataatgactccttccattcaagatctctagcccttaattcctttatgtagcagagcattatcaagatctgaacctggatctctttctctccttcgggtttgg

SEQ ID NO: 391588 - DNA, 2741 bp, Cannabis indica
taaaaaaactcgataaaaattgatctcggggtctatttggtactattttgataaaaaaacataggttttgaattgttatttattaaaacaaagagtcaaatctatacttttacaaacacaagatctaaaatggtatttgttttactaattaaaatttataattaagaataatatatatttaggctcaaattaatttgttttacttattgttaaatttaaataaataatattacaacatcatgatattttctgctaattttatttcatatattatttaatttaaaaattatttattttaaaaaatctatagtattaatttattaaattttaccaactattaatttattattatgtaattatttgtttaatattatgttaacccaaaaaaatttcctagtgacatggacatcaatgtttaacacataaaaacaaagatgacgtcacggagttgagcagacacgagtcatagcatttgacttggaaggggtccctagccctgctcccaggttgattttgagaactcagagatttaagttcagactttgataactcattaataactcattatctttcagtattctataccatgaagacatggaaaaatcaaattcaagcctcaggagctaaaattacatgaacctatacctcagaagtcaacttgggcacctagggtttcacccagcgcccaagttgacgtcctcaccagggtttcagattctggtactgtcttagggtaaattggtcaaactttacattagaaaatgaactagacataccaaggacatttgacatcaatgtttgaaacgtggcaagaaaaatgatgtcacagagttcagtagactcgattcatagcaatcgacatgagaagggtccctagccctgcgcctaagttgactttgagaactccgagatggaagtttagactttgataactcgtttctaactcactatcttttagtatactatagcatgaagacatcgtttaatcaaatccagccatcaagagctaaaattacatgaacctgcaccccgaaagtcagcctaggcacttagggtttcacccaacgccaaagttgatgtcttaactagggtttcagtttctaggatcgtcttagtgcaaatgggtcaaactttgcattgggacataaactaaaaataccatgcaaatgggtcaaactttgcattgaatcagattcagagaaaattaatttttgagcacctgaagcacctggtgcccgggcacctgtgcctaggtaaacaatttgtcaatctgggtgactttcaagtatcagattgatgttctgacttttgcatcatcttcttcttcttcataaatggggaaacaagtgctttcggggaagaaacaacaagttcgggggtgctagaattatggccaagtgccctggttgacacatgggactggcccaatgcccaagttgacatttcgtcaacctgggtaaattccaatgatgtttttcgagaactctactagaaatattctctgtttttagcaaagattaagattcaactatttctgaggaccaaacaaaacatccaaggggtcgaaactaggacaaagtgcccagattgacatatattatcaacttgggttgtttccaattaggttgtcaaaaaagtgttcttcggatttttttccatcagaaataatgaatattcaagcaaactcgggtagaaaaccacaatctcgagggcctagaaatatagctcatcgtccaagttgacttggtgcaagacccagctcctaggttgataatcaacctggtgcactggtttcgaacattcaaatgcaaaatttgatccgagcattcgctctaaaatggttaaaaacgagggatgggacctcgtcctcaagttttagaaccttgaaagtatcaaaacaacatcccaaaagccctaaaataagcacccagtgcccaagttgataaatggcctagtgcgctaggttcttcttatctgattttgatttcatctcgactgcccgtctagtttctcgcataactaagatctatgaagtcagagaagtcaaattctcatttctcatttccaacatgggaaaaccactcaaaaatgaagagttcgagtctctcatttttgcagaatagcaacatctccaagaactagtgaccagctttgtcagaacacataaacagactaagtgatgtcaaaatatcactcaggcttcaaaaagtacatccccatgatattttttcactcacccagtatccacgttgacatcatatgtcaacctaggcactcgatgtcaacttgggggttgggtccagaataacttttaggaaaatggccataactcactcaatatttatttgattgatgtgattcaacttgggttttaaagctatttcaatgctctatcaagtcatgtcccacacttcaattgcaattcagaagttatcgactctaaatttcaattcaagggagttaccaaaataaaccacaacttacccgaagtcggtcctactatcacgactgaggttccgaaaattgacaattaacctcagaagttaattttcacgttagatcatcacgtattgtcaaaaatagccaatttatatttctttattattattttattcctatttttaaggatctccttcatctataaaaggagagctcatctagctcattttttatattcagaaaactacccacaaggttagaacacttctctctagtttttctctctagaaaccagagcttaa

SEQ ID NO: 391589 - DNA, 1355 bp, Cannabis indica
cctgattatatgagcacaaaactattgaatacattaaaattttgaggtttcacgtaaaagtaagggctagactatagaacatagtaaagtagtctactataaaaaaatggtacaaatcaagtaataacataatagtggtacagtaaatggttgtatatctaattaatatttatttgactttattccttttttttttttacaaagatgatgtccttgatattttgatgctttctaattttttttcattaattcttttcaatgaaaaataaatttgtttgagttattttaatgtaggaaggtgatttcgagatgaaacacattgataagacaggctcacaatcctttaacgtggctattgccccattttccctttctatacttggggatgatgatgatagtttttaagaagtgaatgactaaatggccccacgaatcttttttgtaaattttgttcgaaaagagcagaaaaaactagttctgccctatatataattatacaaatttactatagtacatattcgattacttgttggtctaaatgaagaaaataattgaaacattatgctaaactcagggaaagtatttttgtgaagagactgtatagcttttgtgaatttcttcagtagtgtgattgatattataattcaatagcttagagctctcgcaatagtggagctctaggcgcattgttattagccactaatgatacgtgattaattgtcttgtgaatgattaggggtttcacataataattattaaataaaatatgtaaaatttgatatttaattacaccaataataatatgattttgtaatggtgtcctttaacatttcttgctaaactctatgtttcaaaataatttacttaaattgttaaatattatgtattatatattttttacatttaaatttttttataatttttattatatacattgtttaaataatattatattttttttttagagaattaaagatgagaggaagagaataaataattaatttaatatatatatatattttttttaaaaaaaaaaacatatattattgataaagttaggcaatatgggcactttacgcgttaatttaatttttttagtacgaaaataaaaatataattccaaataatagtaaaattatattatttaattccatattattaatttgtattatatatgaaaatacaaaatggtaagtctatcgagataggaacaaacattttggaagcttatcatagagtcatggcagaaaaagacaacaagctcaactcacatgtccaggagagaatggtcatctatcactctctcttcttcgtttctcttcttcttcgtcgtttcttcttgtctcgtctgattt

SEQ ID NO: 391590 - DNA, 2274 bp, Cannabis indica
tctcgagtggctaccagcttgcaggctgcacgccaagtggcttctgcaggctggacactaagtgtctgccagcgtttggctagctaagtgcctgcccgggtccggctgaccaagtgcctgctagctttggcaagtgttggctagcctttgcatgtgttgcgcagccttagtacaacttcccttgcaaaggtcaggcttccttagtcgaacggaccctctatggtctgacaatcaccctttggccgaccagcttgtgctcaaaccctggtcaaccatacaagcttctcctgaccgacctatgtactccctttggcttgttgcttgacaattttgccatgccttgtaaggaaactttatcctactgctgacaaggttgtattccacacgtccttagtcttggcttacatggacatgccatgttaggtggataaaatttgggataatattttcctcacaagtccctattcgaacatctagtcagatagggactttctagcttttatctttcctgtagtagcctctatcgagctgccttgtctgcccaagtattagtttttcacatggcatttctttagatctttgatcttatctctccatgtatgcctcatcttcttttctttcacatttcttctttaaatctggcattgataagtttcaagctttttaagcttttagaaactttttgattctcattttagattgttttggtattttgatccgcatgatagttttagaatgcataatgtgtgatttcctgacgaaaaggatctgatttctgcctttgttatgatttttgactttttgagtcacgaagaacacatttcagttttgaaaaacatacattttaattcaaaactaaccttcgccgaccctagggatcttgtttgagacccacccttagggtttttccatgggtgctggctagttttaaggtttcaccctagaaagctggtcggttcatgcttgggtttggggaccctagctttttcttggctgggtcatgggaccctggccaaccctctcaaaccttgggaaccctggctggcctaggccttggttccaagcaggtggccagttttctatcctcctttgacctcggcaagaatcatgtcatggccttgtaggcatataaaaccttagtctcatacgtagttcccttagaaactttgtatgaaacttaatgctgagtctattataatcaaatgctcaactgaagactcaatatttgtccaagttgttacacttgaaaccgtactttactgatacccagccttgtaccatgacattatttggcaagtattcttgggtacggttgactagagtcttgtttatgtcttgaaacctgcaaggaactttgccttttggcttggaacctgcaaggaactctgccttgccttagagacttagcctggtatgtggttcctataggaactttgttcagctcttctctggctgtatggttcttgaggggccttggccttatgcatttgaaccaattttgttattcatattcgtccttaaggctttcatgttcttagttttggcgtataggcactttgttttttttagcactactattgtttagccttaaagccttttattatggacatataatttattgccttgacatgtaagtatccagatttacttttctttatgccaatctgaagtatgcttgcactttacttataggtaggtttagtagcttatactaggcgttaaaatttctctgcataagttctccatgctagtttattgccttgtacggtgtgggtggcccccaagtgaacacgtagacttacggtctcttggtcacttgcaattcacgatgtttcatagagctttcctaggaattttcttggaggtgctactaggtgtacgcatgtggaattgaaaaagaataactttaagaagttatctttttagcaagtggtttagaaacaattagtcatgcgtataacaaaagcttacaatttaatgtccacttttgaaatcacattttggctacccctgcctgacatggaaagcagaggccatcgctgaagagcgatgggaggccatgctcaaaagttatgggtactagctcttttataaaatcctgcacggtgaaacatgtagaggaaccactattgatgagtacaagttggttagagagagtacttaccgagatgttctccattccagtattttggtagaagagccaactcaaagttcttgtcatacttgccaagcttttatatatgcaccttttcttgttatcttgtaacttggtgc

SEQ ID NO: 391591 - DNA, 1101 bp, Cannabis indica
aacatcttatttgtattttctccatctttttgtggatctccttctcctataaaaggagagctccctagctcattttacacatttaataaactactcacaaggtcagagcttctctctctaggctttatctctctagaatttggagcttattatattgttgtaattaccatcttgtgagaaataaaaatttgaagtagatttagccctattactatcgcgatataggggtgaactactataaattttatgtgtctctcttataaaaacctaactagttattcattctcgccaatataacgagctggtgtggcttaaaagaatggtatagatttttatgtcaatattttggtactttcattgagagccacaactcaagaaagctactagcaagatggttgcaacacagaacgcatcatagttaaaaatttccttgaagagttttatttttgatcataaatggagcatattgagcattataaacttagaatcttttaccccattatatcctagatttttaaatttcatgataaatttatcatattcatttcatttaacatgtttcttctcatttttaattcatattatgaattttattatttaaacctgaaacaagtagaaaataagcgtaattctacacaaaatgaatataatcaattgatacacacctttaaaataatttataaaatacacttaaaactagcatatcacaaataacgcagttgcatatagcaatatagcattaaatacaattttatgtattgttattatctatgataactggaaagcaattactaattaatatatttataagagcactcacaacaacttctttaaaatagaaaagttttaaaaaatttaaagaactgtactaaaaatacgctacaatagatgctctaaaattcttcttgttgtgatattttgcacacgcaagtgcacgtatcgtgacaagtaataaactcaccaagagtgaggtcgatcccacgaggattgtagttaagtacgttaaaattaaacttttacaattatttggttgaataaaaattaagaaaggattaaactagaaaataaaaacagtgaaagagtaagcaattaaactaataa

SEQ ID NO: 391592 - DNA, 1290 bp, Cannabis indica
ctcctccattattgggttcattgctttggaaccatagttggagtttcgggatcaaattttcctgataacaggtatagttctctaacttttacttttttaaaaaaaaaaatcgtttacaatacttttctaagcttttttgatcatggtctgtgtcctttctcctgttttctgtccccatgtaaaaatcaaattatttacttttagagtggaaagactcaatgaacatctgattaaaataacaaaaagtaaagtgcaatacatttacataaaatgatcttgacattattggacaatcaggtgaaataatgcatttcgtgattagtaagctattaattcctagtttaaatttttacttccctgtgtgttgatatgtatacgagattgggaaactatatagtaaagctaaaatgaaaatggctgagttgggtgttaatcccaggtcccggaacagggcacctggttttaccctgctccattgtcaagatagacttttgatcacaatccaccatctaaagagtaattcaagtcgccagaatattattcctcttgtcagaaaggcaatcacagatactgtgtcgtctcattccaatacagagaccagtcaagatgttgttgtattagttcttaatttcttctgtatgtctgatgaatgtggtgaatgagcttgggcttccttcatatatgtttgttcatgctttactcgtcataagcagatcagtaatcctgttcctacaagtgctcttttctggtttttgttttgctgtgatggtggctattttgctcatgtttaccttaatcgaaggttcagtgagacaaaagggattatagtaagtttgtttgaggaattggagtcttatagttctagctcgatgaatgatggggatgggaaacacctccaatctacatggttggaccagtacactttagacttcaaaagttactcacccaagtttgaactaagttcagattgatggagtctcaaagtaagcttgatgagtgatagccaaaaatccaaacttagttcttgaatgagtctgaagattccaagctattcgagatgcttggggtctccctagagtacttgactcaaatttcacatacaaactacatatcttttagggcttttacaattttgtatagcaaaaaaaatttattatcattttctcatacatttttatgtataattaaaaacttttttcaattttttgtataatatatatggtaataattattgattattataaatatggtaacactggttatgtttatttttatgtttacaattataat

SEQ ID NO: 391593 - DNA, 1807 bp, Cannabis indica
gttaccgtagtaacttacatttactgaattataaaattattacatgatctaacggatctttagctaattaaatatttaaaattagagtggtatgtctcgtctaaaagacattgctcaagagcaatgatttttgaacatactgcactttgaaaatggtcatccgacctgagtaccagttgttttccaaacctttggtcgaggtccaatctgaaggccacctacttaagagtaagtattggatcattttgcaacttatggggtcattggaccttgtgcacttattggtagtattttcttagatgttcaccattccagtatcttggtactaggattatgttttcatcaaaccaaccaagtttgtatgctttaaattttgtaactttagttacttgatatgatccttccacaaaactagctcgttatgggttggatgatgaaattaatatggtcattggttacagtattgatgacgatccattaacctataaacaggcaatgacaagtccggaacagaaacaattgtcagtcggcatggattttgaaatagattccacaaaaataaataaaagggtttttttttctattttgggttaatattattttagataaatatttatactacaagcaaaaataaacatttatattgtttattaatttcaaatatattacttttaaagtttgttatttacaaaaatacagtagaaaaactcccccgaatgttcaaggagaagtgtgacacacatgtggctatgtgggcgagtgagactcacacgcgagtgaggaacaaagccttcagagttgcctgacgctcacaaactgtagcgtcagaaagcagcagtggttgccacgtggcgaattcagacaaagtgaatttcaacgtgtagggtttcttttctcagcacaaaacaactaaacaacaacacaaaaacaactagaaaacaacttaaccataacatataaatcaattaaaatttatcatattatgcaaataaaaaaataaatttataagataaaccctcaagaaatacaatactgaaataagttaatagcaacgaataaacaacatgataacaattctattttaatataaaaattaattgagcatcaacacttacatcaacttaaaaaataaataaaaacaacacataaataaaaaaaaacatatatatacatttatttctcttagttaaacaactaaatataacaacaaaaaataactgcataaactccactacaatatacaaattatataggcataaaaacaactctaaaaaagtaaaaaataccactaatgtataaaataaaataaacatgtatatatatacatttttatttgattgaataactaaataacaacaaataaacaattgtatactataatatgcaagttaaataggcatgaaaacaactccatgaattgcatcagatccaagaaaaaaacacacaaataatctataaaataaatttaaaaacaactacataatacttgtacacgaactccaaaatatatctacacattaaaaaaataaatatatactcatttttctctttgttgaacaacctaatagccacgaataaacaacacagttataattctattttaatatgaaaatatatgcataacaacttcatttcaatatgcaaattacataggcatgacaataattttaagaaaataaaaaattccactaatgtataaaatgcatttaaaagcaactacaaaatacatttctaccaactcaataatatatgtacccataaaaagctaaacatatacttatttttctcttggtcaaacaacttaata

SEQ ID NO: 391594 - DNA, 1340 bp, Cannabis indica
tttttgtttggctagaatagcaccttgcacttagatcatccaataaaggcctaaacaaatgatttactaaaatattgaacttagcataaaaggtaacaaactaagaagaagcatcatgaaaaaattaattaaattttttatttttttatgtgagtgctactgctacaatctattttaatttttataaatcattgcttcacttttttttaaaaggaatgaagaagtaattgttcaaaacaaaagaattgtatttatttaataaatatatatattcatcttgacaagaatcaaaaagttttttacttatctcaagaaacttatattaatcgtgttctcaaaaggttcagtatgaattttagttaggttgttttgttcctattctaaaagggagataagtttactaagtaaaaatgtcctaagaacgacttgaaaaaaagtataaagaacatccaatgttaaagtgtagtaagaactttgacgtatgctcaagtttgcactcgacctaatattgctttcatagtcaatgttcttttgagatatttatctgatcctggacatgatcatgggattgcagcaaagaaagtcatgagatatttgcaaagaacgaagagttttatgctttttcataaggatgtcaataatctccgagttgttggttattcatattcagattttagtagttgtgtagatgatttaaagccaacttctaaatatattttcactttggcttgctatttcttaaaaaagtattaaataaactttaatcacattatctactatgtatgttgagtttattccatgttatggggcatgtttacaaactttgtggttaaagaaattgattttagagatacaactagttgattctatttcttctcctataataatattgttgtttttctttagaattaactcaatttcaactttcaagtacacattactttacttaacaaaaaagaagtacacgttacttttcaaatctagagattattatttaaacgggtggattttcttagggaaatttgaattaatatgcttaaattatctaataatttttcccctaaatgtaaaattaataaaattggtcatatatgaccactttaccaattttcctaaactacccctctcatttgaaaccctctctcttcctctctcttcctctctcttcctctctctcagccgaacaaacccaacacccaaaacaacccagccaccacgattagcacacaacccacgcaacccactccgacgaactcgcaacccactccgacgaactcgcaacccatctcagcccccttctctcttcatctctctaaaccgaaaagaaaaaaaaaaaaaaa

SEQ ID NO: 391595 - DNA, 869 bp, Cannabis indica
aagttttttttttttttttaaaaaaaaagacatatttttacaattaactcataatttagaaaccatacaaataaaaattccctcattattaaactacgcgaattattgtttattgctgactacttttgaaaactataataatagttgtcttgcagtatcactctcttagagttttgttggatctttattaaaatacggatttttcacacccacatgaaatttttcattttttactttgaggttctgttttgttttctacgacaatatattttcaaaaaaaattcttgtggtagtacttttataaaagttaattcaaattctaatatttttatgagttttccttaaaataataaatagtatttttaaaaatcactaaaaagtatgtgtattttaaaaagattttttaagacacttgtgttgggtgggctggccctgactccaagttagctaatgtaacttgcattgttgtgagatctcttgaaattatgctttgggtttagacaccacatattgatattgtagctagtagttgttgttattgttatggttgtgttatgattcatgaatctctaaccatgcattttttttttcataatctgatggttgtgacatttcaatatgagccatcttgaaatagtatatgcaacttgcaccttctattatagtatagaacttaaatagtgagtgcattatttttgtttcaaagcatctatagatattacaatttatatatatttatagtatatttattgtacatatagtgattatttgggtaaatattattttagaaatttattaattggactatttgttttgttttgttaaatataaaaattgatcgtattttttacaattatacaaataagacc

SEQ ID NO: 391596 - DNA, 2093 bp, Cannabis indica
cactccaagacatcatcaggcttttaaactttcggttaccttttcacaagcaatgatggttcctagcatgactcgcaataagacatgaaatgaaaataataacgaaaaaagagaagggaaagctgttctaaagccaaaatttaacaagtttaccagtcatctgtttcatgtgaccttctaattggagaagcccaagagcaccatccacttcatcaggacaatttgttctaatgatatacaccttaaagaaaaaattgaagcaagtcatagttatattatttgtcatcagagttatgacttcaagcagtaaattttaccatcaataaacataacaaattcgcaatggaatcgtcaaagaatgctcaaacactattaccttaaatttaataggagttactaaatgaaagactacaacatctccttcaactaaattatgagcaattgaaaaccctctccatccagcacttaatcccaccttcaatgcaagatactttgcatcacatacttgcccactttcatcttccaaaaccatcattgtatcttcctttggcaaatacatatcacagaactttttaggaagaccctgccattgccaaccaaaatgttttagcctaaaaaatcaatctacttatccatgactaagataacatttataatattagataagtttaccagccaaaacccaacagaaacatgagaatggagcataagtttaaccatgctaggaaactcaggagctaaagttgcttgaacctcatatgctcgttgcattgtaggtgataatgcagctttgggatcattgtacaagctttctacattcactttctttcgtttattgctataaataatagattgaggcagtgttacaagataatacatctccaacaaatttaaaacagatttaatggaaaaagttttactcacttctcagtcttcattggatttttatagcaaactagctgaacaagagttttcaaaacaaaaaaaaacagtaagatggcaaagtcatgtaacaagactctatacacaatctgtgtaaatatttgtgtatcatttcaacaagtttgctttcttacaaaactattttgtgactgtttcttctattatacactacaaaaggaaaaaagtgagaacatttaaacaacaaaatagatttttttcaagaaaaaacaaaaacccacaagttatttttcatattttgacatcaaattgttgggattgtagagataaaaagaacataatgggtcttactctcatttccttttttttggtaagtccaactcggttgacctgaaatgagtcatagcaagcttaattgggttacaaacattaaacaagaaaagtggaaattgtgagagaaagtgaaaaggagtaaccttttgaggtgaagactcagatggtgattgtcttcgttgaggaagaaccatggtttacaggcaaagagttgggagctcaagggtctctctctctcaggacagaactttcaaaagttcaaaaaacaactgacaagaaagctaaacagaaagttttgtattttaaaataataaacaagtcctttcctttcttaaatagaaaataatttcttctttcaaggcaaaatatatgttatagtgatattagaaaggaaaatatttgtttattgattgatttaaaataaaaaagtaatataaatgacttccccctttaatttgatacgtgtgtctcgtgcttagtgttgtaagtacgggtcgagtttttttgacacagcacgagtctagaaggtacaagtatgattaggcacgaaaaaatacgagtttggacacgacacaacacgaaaagtatgaaagacacgacacataaacacaaatagactaacctaaaaagcacaacacacaacaaacctgaaaaacacaacacaacatattaaaaaccttatgaataataataataatatgaatttattaattataagtaaattaaaataataataaaacttaaatataatgctagatattataattgtataattaaaactattaaaatagaaaaattaaaattatatattaatttatttagagtgtgatatagaaatttgaatattcattagtaaatat

SEQ ID NO: 391597 - DNA, 630 bp, Cannabis indica
agatatagtgacacacaaaaaaaatcagtatacttattcatttatttatttatataattattttatatattgtgtaccatctcatttgaattttttttttttttgttttattgttatattacatatttactattgtagcaattaataaataaatttattaatcaaacaattaatttttattaattgtcataataaaaaaaatgttactacatatattaatttattttgataataagtggattttataatgaattattcttttttatataagaatgactagaattttttttatacagataaggacaatattctaacacttgcattttgagcaaatagaataagtcagtgccaccaaatcagcggcgttctagaaaccacgacccaagtcatgagctctttgaaacccctaaatcatcccaatgcctttgtcaacttacagagaaaaaaaaaatatacatagctcttatcaaaaattataaccaagttcatataaacaacaattatggaattttagaacagttagcaaaactggaacataggagtgtcaatgggtcgggttggatctgatccggctatgatctgacctgatccagatcatgtaaggatctgccccgccccgccccgctagat

SEQ ID NO: 391598 - DNA, 1099 bp, Cannabis indica
aaaaaaattacaattaattttgattgtcaattgaaaaaatagaaagttaaaatatttttatagaacatgtttttagaaaatatttttacttttctaattaaaaataatagaaaattgattaaaaatattactaaacgcacctttaatatgtcgaaaaaagagtaatttttttattttcggagaattactccatatataatttttttttcttaaatttacgatttagattgctccgatgatttttatgtgagttactatgtagattttgtttgcaatttaaattgctctagtagttgctatgtgagttgttatgtagatttttgtaaaaatgaaaaaaaaaaaactgccttaaaatgtaaaaataaaaaaaaaaaactatttattttatatgtagtgtttttaatattataaatcatttctaattttttttaaattttagagaatcttttaaataaatataaagtacatattttagaaaaaatgattgaaaacttttttttaatgccaaaacagtaagggagatattgtggcaccttttttttttgggtgcattctatgtagaagcatccaataaaattgagcctttcaaaaaaaaaaaaaacttgtaaattggataaaagaataacctgtgtgttatgtgagtaacttataaggtttataagttatagtgtgatcaaatctgaaaaaacaaaagtcttccaaaagaaaataataaataaattagttaagttgtagttgtgttttagtgattttactagaaaccatgaaatgacatattattattaatgtattttaatattaaattttacatattttaattcaataaataatataaaaaagggtaaatagcggtataagtactcaaagttttgagtttgtaagtgacataaatccaatgattttttttagtggcataagtacccaatgtttgtaaaactgtaatttttctctattttcgtcggtatatgctccgttttaaatttattaaaaaaaaatggaagtaactgatattacaatttttcgtccagactaaataatctaaaatttagatcttatatgtgtcttgtttaagacaataacagagtctgtactgataaaa

SEQ ID NO: 391599 - DNA, 1783 bp, Cannabis indica
atttttttcttcagaaatatacatatccttttatataccagaaaaaaaaattacgtgctttgcacgtataattaatttgatgttacggtactttttaatttgattgaaaataagacaataaacaattatataattttttacaaaaaaaaaatcatttaatttaaataatataaatgtattttttttagtaaagtcctcaatttaagaaaaattaatttaaattattttgtgaagttatttttatgtatatttaataaatatttaatattaagagtaatttgcggtaaaatattcttatgttttaatttttatacacttaacctccttatctttttttttttttatggttgcaaaacctccttatgtttatttttctctacaaattttacacgtcagttaaatattactgttaaatatcaaccggatgaccactgtttacacctgtgtatatgtaccagtaaaatctcgaagtcgatacagtaataatccagttatagtactaatcataagctcaaaccaaagataaaacaaatataccttaagggagaaggtactagaattttacctttgaattgcactaatcaattccagctgaaaatcctcaattcacaccaaaatcctccaatattgctgctgccctagtggattcgagaaggagaaaggaagagcataaagttgaaactagcttttcttgactttttgcttaaaatgtaaatctaataatttctaaacataaattgaaaataaagatatacttaatggccagctgtcccaaaattaggctgccacctaaacctctcatacagattaccaaaataccccttaactagaacttaaacaattaataggcctaggggtgaaatggtccaaatcataaccccgcctaaccctggtattctaaatatatcacatgtttttttcactaagaataagttctaaacttacccatgtgactttaacggtcatccatcacattttctgtcgccgagcaaaattataaaaattgcataattaatatttggcttaactaatactcttagagtttaataaaatttctggagttgagaagttataactctagtgcccacttctaagaatgggacccacaatcatagtaaaatcgtacataattataaaaatatccataattaatgctaattgcttttactaatccatattctcaccttcggtctttacaataatcataacgtatctatatcgtagaacatataaagcgttctatataattgagagtgtgctcaattctaaatctattgtggtgcaaggcagaattaatacattagagaattttcttagtaaattctaaaactacatattgaaagctcggttatataggcccatggtcccctcactagttgagataatactactagcagactcagttaattgcttttgattaatcaattataattctaaaattagactatgtcttatttatgatttttcactaagcaagagcttaattgtgaacttaagaaaagctagattcatagatgtcctaatcgtgaacttaagaaaagctagaactgctaactaaggtttgcatatttgatagctattctaagtgattaggggtggaccatcctttggtcattaagataagaaagtgtttgttttaataaatactacttttctaagaaaatgactaagtctgaaaacaaagtagcaaagtagaggagataaattttattttgattccaaattattctatcatcttattcgatataagatggtccccatgcatctgttgtcttgatacaac

SEQ ID NO: 391600 - DNA, 1731 bp, Cannabis indica
tgggttggttgggttacaaccctcatctgaaaatttagatctgaacataataaattcaaacataaactaaagaggagaaaaaattcaaacactagcaaagactttcaaaattccaaataaaagatcataaagtcatccaaaatattataatccaaattttacattcattttaagtaatacaacaaatataaatctaaaaaatgatcaaatttcagaatcacaaacaaaataaatagataaaaaaaattctacaccaatattacgacataatatataacaaaaatattccaaaaaaacacaaaaataaggtagctaaactcagtaaaacaaccaaagaaaaaaaaaatataaatagcttgataagatcatataggtgacattgactcttaaattctaaaaaatcaaatttattacacaatgaaactacctgaacttgtctatttggatagctgaactgagtaagaatatttaaaataataggcagtcactacagttggccaaattagctctcaataatttgcaatacaatctactcactcctcttttaattgttctcataaagctcctttcactaactttgcagtagcctagtgtttgcaatatttgatgagcaaagcttgagtaatttcctttaaagtcaaagaattctcagagatataaagttggcatgtcacagttaatctttctcagaaaaaaaaaaactttacagtaaatcataaatcatacatggcctacaatatatataatacatataaataacaaaaaaaaaatcaaaattaccttgtccaagaatttgtgcttttaataatatatgatttagactgcaaaaataagagagaacattaaataaatgtttatattcataataagttattactggttctactcattataaaaatcaaagattcaagaagttaaaaacaaacaaaatgaaagaaacgaaaagataacacacagatttcttcagctcattatactcaaaatttggaattataacaaaaatacatatataaaaatgaaagaaacgaaatgtacaattataaactacgaactctgaaataactgtttacattacaaaaaaaaaaaattaaaggttgtgtctttgtctgaggcgatggatcggttttgtcgccgcacactgcgcttaggaggagttcgtctgaggaggctgagcacgggcagcggctgtttagtgtttagggtttgtttagattaatcacatgtgtgcgtgcaagtacaccatcagaataaaatctattaataatttttttaaaacaaaataacttatttattggatcggatgtaccactaacaggggtactaacaggggtgtccatccaatctaatccgtatttttttttatcaaacaacattcaatccgcattaagtgcgcatttcatattttggattcaatctgatccgcgtaatagtacggattggatcggttattttggatcagctgtttttttttatgataaattatttaatatttcatagaaaaaaattaaaaaaatactattgtttattaatctccaataataatttattttcatctccatttatatataaatcaaaccaatatacatatatgttaatatatatactcgtctttaaatttacactaaaatatatatgtattcattactaaaataaataagttagtatatatatatatatttaaatttatgtgtatttgtctatgtgaataagaataatttttttggtgttttt

SEQ ID NO: 391601 - DNA, 1611 bp, Cannabis indica
atcaccagctggctttagtttggagatccacaccgcacgctgggcagtaccaccgttcgaagagctccgtctagtcaccatccttccacgtctcgaaccacgggaaacattgggaaccgacttcccagcaccaccgtcgacgccatggatgttcccagctgctctgagaggacgacgatatggagggtacagtgcatagccggagtgatctcgacagggcagaatcgagttggcgcttgagaagacgtccaagtaagtagacgacgtggataaccacggcccgtacagaggaaacggagttccattgtcgctggtcaccatggtcggagaagaaagcttgcacccccttctttggtgacccaaacaaccacagtagtagcagaaaataccgatctgttcatatttaaattgtagccactttctaactcccgtgtccagatcgaaaaaacatccagagaacagaggatatttaatatcaatttcaatcaaaactttgagatatttgccccatgaggatgggttatcctcttgtaaatctacatgaataacactccctgcttttcctcctagcagatgaccattagccttagagaaataatcgtgaggcatattatgaacctgcacccatgtacgcaacatatcattcttcacaggggacacattggtcggggaccagacttgcagaaaaaacgagtagccacggatgcaccaagggccgtgatccaatgcccaacatctatcttcctcacgagcaaaactaagctcaaagcagttgatgaaagtagggccctcagacaaagccaccacagtcacagggaacttccaagccttggccacaaaatcaacaacattggcttcactcacagtcatgggggccacaacttttcctagcagacaaaaagtggataacgcttttcgggaagattcactagggaccaacttaatcaaagcctcattaacagagagacacctacctctaagaggagaagtagttaaggaagcattaacaagctccattaatgtcgacagtaagagacaaaccacctacctccaaagataacaagaataaaaggaataaagagaaaacaaaactcacccactctcactcccactacacaaggcagacagacaggaaagaaccaaaataaaacagccccatctaccacagatgaaagaaaacactcaccactacacgagaaaacaaacccactaactagacacacaaagcttaggacaactcacaaaccagggaacaaagaccacaggagaaatgacaagaaaaaatgacaagagaaccaaggaagacacagaagataaactcacgcgagaagcacagtagatgaccatgctctccatattattgtaaaacactaagactttaaattgatagatttaggtagaccttagaagcacctaaacttttgccagaggttacttttgtacacatattatttttactcttaaatcacagttggatgatgaactgtgcttcacaatttcctaaagtgaataaagataattattaactttagcacgaccaaagatgatttagtcttttgtttgtggtttggtctttgtaattcacaagactttatttacaaaaaaaaaaaa

SEQ ID NO: 391602 - DNA, 1068 bp, Cannabis indica
acacaataacaaaatctgttagttaccgataaaatgaagaaagaagataggaaaacaacagattgaacatgtggactccttgatgctcacaatgtacctctccttaatcgagtccgatgatgaagctttcattgaggtcatgacaaccgtcttgtcttcatcgtcatcctcaacaactaacaaccataaaaaactaaaacaacctaaactagaaactaaaataccaacaacaaaacctagattgataagatagtaagaacaaaaaaaaaaaaaaaaaaacaaaaagaaagaggaagaggagggagacattgagagaaatcaacaccatgagccctttcagatcaagagagagagggagggagaaaaaaaacagaaagaaagaacaagagaggtaacagaggagcagctatctgacggtagtcgatgaaagttgtccgacagaggtgagtgggggaggcagaagagatggggtcctagggtttttattttattttatttttgaaaatgaaataaaaatttcatttatcagatggggttctaggaatttaggtttagttagtgaaaatatagtctttttttttttttaaatttatgttataatttgttttagtttttactttgttttattttattctatttataattttattaattttataactttaatgtttttttttattttaaaattaattttgaaattattttttataattttgaaataataatattaagtatactaatatgaatatatcatgtatacgagattatacatataagcaattcttattaactgttaaaagtagtaactaaataaatttattaacgatttaatagttaagagggcgttttaccatcaaaatttatccaaaaaaattaaatacaagtgaaataatactttttaggtttaactaccaaaaacacttttattaattacgagcattattattgggaaccagtgttgcctagcacctctcactacaaaaaattttacttttagtcacaacaaaacttgggactaaaagtaaaaaaaattgtgactaattataaattatcatttatatgttgtga

SEQ ID NO: 391603 - DNA, 1070 bp, Cannabis indica
gggatgatgaagaatgggtcttcgatccgaaagaaaaggtcctccctcccttgtgctttttatggggtatatataggccaacttatttatatgggttgcctcgaatggatcatcgttggggaaaaatcccaccgtcagattagtaggtggcatatttcccatatgacatttaaggttgtcagattatatgaattgggcttcagacgcgtgtcacttcaggatttctcccattttaattttatttatatctagtcgttggattatttggttaggtacacgaggacatgcatgttatgtacgatggtgtgtcgtgggagataacctctgatatcgtactcgaggagagcctggtccctaggtccgtagtctgacacgtataggtgaggcttcattgggctaaaggcatagcccgatttgtcgtgtctctgaatgccctcgttccttttggacaatccatgctcctcgtaggagtagatggcttcagctcctggaatggagtgagactttggttcacggatgccctttgcatggccagcagtcgaggaactcaccttcatggagactcttcccgcgaggttagtgccttttccttctaggatcattaattgagagagttgggcagatgatgactccttggccttctttgattaaaatcaacgtgtcatgcttacaaaatacgaataacatttacccccaagcttccagggtgtgccatggtccgggagcttataatatctcctcttgagaaatttcgcgcacgtgggacatataacaagccctttaatgcactatgtcatcaaccgccaaactgaagtgtcatcattcaggaggtataactccctctgttttcttgtcacggttttaaatgctgacttttgagttttgagggcatgctgggcgcgtgttctgtgggatgcccaaaacggcaatgattggatttgagtcgactttctatttgccgagtgctttttaagatgcatgcaatgatggaagccaactgttgggagatgatataccctgtcagcttcccacttatccaaccgttggatgtcccttgggcgaacgagtca

SEQ ID NO: 391604 - DNA, 597 bp, Cannabis indica
attaatataaatcacagaagtaacactgacttaacttagtaaaaataagattttttgttaaaagaataaagctgatatattacattgttaaaaatgtcgccttaactttattaattagtaaaaattaagatttattatacattttataaagtggccgcaaaaggtatgacttggttgataatatactaacatgttcatccatgtaattaattatgtgactggaaaataaaaaaataaaaaattaaactaatttatgataaaaatctcatgtaaaagttatacttgtaaactaaactctttaagaatcttgaaacttaaaattaatttcattaccaacgaaaaaaaattaaaactgagtatattaaaaaaatattaaattaattttttttttttttattttaatttacttaggtagaaaactaaattacataatattacgaaagttaattaggatttttacttatgaactttgacatgtactaaattataccctctcaatttttaaggttattaaaaataccccttgaactattgagattgttggatttaaactttttttcaattttagtgaaaaagtctaatatggatgaaagttca

SEQ ID NO: 391605 - DNA, 669 bp, Cannabis indica
ttttgttttttttttatcttttgctcaataatacgactttgaaattctttgagcaaatttcataaaattagaattgtactagtttttttcttcttttaatcttttaaaaggtttttaaaaaactggtttttagatactatatggtttttttaatttataacactttcatacataaaataatttttttctctaataattttatttattttaggaatgaggaaggaatagaaagaatgaaagaaaaaaggaaaaaagatatactagtaatacttttacagaattttctatataaatatactaggagatgtatgcgtgcctatatatatggcacccatctttattgttctaaagaaaatatttcctacttattcttgtttttaatgtaaattgttaattttttccttaatctaatacacttctttctaataataataataataataataaaaaaaagtgtaatatttacgagaaatatttgagaattgtatgcatgggttttggaagcacttaacacactttaaactacaaacatatatacattatgtatatatatatgtccttagctagttaataattcaacaatttaaataaatatcgatatcagtaacttacagtacgactaatagaatttccagcactaatattgatcgacgaagcctctgctaaagc

SEQ ID NO: 391606 - DNA, 3533 bp, Cannabis indica
tctctctctctctctccaaagtttcaaagaagctgtaaccaccaccaccgctggagaccatattctggccaccacctaacccacgcaccgtatattcagacccccaaccgtcggcgatctcaacccccaagcggtgcctcctcattcactaccgtaagcgagagatcacgagtcaaagtttggaggttaaaactttgaacgcattttttgatcacatctggtgttcgtttgatgatccgtcttcaccactagactcagctcgtcaaagagaacaatctccactaagttctgcccagctcgctactttttcgagtgacatttttgtagctccaatcactttctggtgatatcgtgtacctctttaacaaatagttggcatgggtgtggtctactcttcgaggtggtctttttgatatatactatctctatttttggcaatgtttccgatacacaaatatttttactgctaccgataattaatgcgcactgcttaagtgaagtttcagaactccaaactttaaatatagtcaaattatatgttgttggactcaattttgaatatagaatgcaatgatgataattatttagtattgatggtataagtgaaagtgatatctaagattagactaaaagattagagcttaagacttgagagcttatgatagtctttttggataaaatttaacaacttgggagagctagagactgaacttaattattagacttgattttattgtgatgaatatcatttgatatatttcaattttattaatttataaaaaaaacttaatctgaatatttttctaggctgttctggagtgccaaatatattttcgtacagttacctatgcaggttatatttttgggttttagcaaattacagccgttatactgccaaattttctaaaataaagggaatatgtatttttgctattcctggtacatgtatttagttttactaatgagagccatatttatcgaatcttgtgcatattattgtttcacgatctaatctatatgtgtcatcatagatagatcaggtgtgcactcacatatatatgtaagacctaaaatctatacggaaagtaaaatatagctgtgtggatattattatcatttattagcattatcccatgactacataaccaatttcaactgtcgacactgataattaatgttcaccgcttaggtgaaattttagaactccaaactttgaatatagtgatgttatatatgtcgttggactcagttttaaatgtagaatgcaatgatgataattattaagttatttgatggtataagttaaagtgatatataagattagactaaataattggagttcgggacttgagagcttaggatcgtctttttgaataaagtttaacagcttgattattagacttgattttattgtgaagaataacatttaacatattctaaaggaagtgttcatatgtagtactcaatgtaatgtcctcacccacttcacatctcatataatattttggaaatttgaaataagttacaacattttccttcacttataagtactaacccaacttaacgagctgataccaaccaaaatccaccttattaatttaccttgcactacaaaaaaatactcttttttttactatgaaaaaacaacacatttctttaaatgcatttatccgactatattgaagcaaaagatttcgttcactcacttcttgcatgcactataatccactggttggtgaatttgagagtgcaatacatataaatagctagcttcttctcataccaaaacacacaccactactcttcagctcttaattaccatttctaacatgggaataataatcataacaaaaaccaccatatgtgctataatcttaattataacactccattattcaattttacatatcaatgcagtaaacccctcctcttccaaccacacaagacaaggccgttgggaccttttacgtgaaaacgtaggtgtagtagccatgcacatgaccttaactcaccacggcacagtaatcatcttcgaccaaacacaagccggcccttcccggtacaagctccgccgccgcttcagcagcggaagacattgctcgagttcaggcgacgacgccaccgactcttcatgctacgctcactccatcgagtacgatatatcaaccaacaaaataagagctctcagaatggacacagacccttggtgctcctctggatctttcctaagcaacgggacactcctccaagcgggcggaaacggccgaggagctcgaagaatcagatactttcggccttgtaacaacaccgaatgtgactggagacagtccaggacacaactctcggaggagaggtggtacgcttcgagcttggcgttgccgcaacgcgatagggttgttgtggttggtgggaggagagtgttcagctacgaatttgttcccaaaatgttatcgaacgatcatcgagcttttcacctaccgcttctgagccaaacaaacgacaggaattcgagagggaataatctttacccatttttgcatctttcgtcggatggtaacttgtttatttttgctaatagggactccatactgtttaaccacagacggaacagggttgttaagaattttccgagaataccgggaggcggttcgaggaactatccgagtactggttcttctgttatacttcctttgaatcataatgataggtttcagagagttgaagtcatggtctgtggtggctccgcctctggggcctaccaagcttcccgccgccgtcatagatatcttcagggcttggattcatgtggaaggatggttatcacaggtacagttaggactaggagaggctgcttcattttgtttattattactttgtctaaaatttacagaaaacactagctagtacactagtacaccagcacagctaactacttgacacttatcaaatagagaaatgctaaaagttactcctagattttttttatgggtcattattattattatcggtccaattaaataaaatctcatataattttatataatttaatgtaataaattttaaagaatatatatcactagctaatcacaaaactttgtttagaaatctaggtactactgtgctcaaatagtgagatgttagtattatcatctcatataatttaaaaaaaatataaaaaaaaaacaaataagtgcctatcactctcatcactattgatgtgattaaatatatattaaataagatcccttatatataatttaatttattaacttttaaataatctcgctaactaatctcaatattccatagccctaataacaatgctcttttaacttaaggtaatagttattaaaaaatatcgaccgtcatagattacttttaggttaggttgtggtaccactatcaatgcttcgtaaattatatatacattgtaatatttagtagtctagtaatcatcatgacttaatatttttgtatttttggtgtttcattaattaaaaatttaacttgtatgtgcaaaaaaaaaaaaaaaa

SEQ ID NO: 391607 - DNA, 830 bp, Cannabis indica
cattttgcatttaatgatataatcattattataactgttggttcatattccacttgattgacacgtgtcactctctaaagtatagccgaatttcaggtagaacaagaggatgaatagtacacttttaaataaggtgagattcttgataattgaatcttattatctaatcaacaagagtccaagtagagttattcaactcaagacaccatatgagatgtggaatggcaagccaccagcagttgcacacctcaaaacttttggatgtgcagcatatgcacataatgtagaagacatgttgagcaagcggtccgtaaggtgtgttccaatttgatatgaagttagagtcaaaggctataggttgttgtcaacaaaaacaacaagatcattgtaagtagagatgtatttttcaattgaacttgatagttctgatatttcaggtagcttacaatcaaaactggagtggaaattaaggtagaaccaggacatactgagttggagaagatggactagttggagactaaaactaaaaagaaaaatcaagaggaacattgaataaattacgaacttgcaaggagcagaagcaggagaaaaacaatacccccaatgaagtatacaaaagctgacataatttcttgtgcactttcaattgtggaaagatcaatgatgaaagtgcctatgacctatatggaagcaattagctacaaggatgcaaaaaaatggagcaagtctatgttgaaaatattttaccaggatctagatttattaacaagtatggttcattaacatcctaatacgaatttctaaaacaatgaaatgaacacataagggtt

SEQ ID NO: 391608 - DNA, 2098 bp, Cannabis indica
catcctttagatccgttaattcactaatgaacgtataatttagatataaaatttgtgcataactttttagttctagaagtgaaccaacattcgattcgttaggaaagtcaggattccataattatagatcatgttcccagacatccatattattagatccttaaaatagaagttgtaagaatcaacttctcgtaatcaataaactaataacatgaactcaattcatgattactcaggatttatgtcgatctactattgatcatctttatgacatgaattaggtctttatagtaaacgacatgttacaccttttgacatgggccattaaatcttttatcacggttagccaaaaatactcttgcttgattatttttttagacaggttctgtcccttagcgtgatttctataaaaacctttgtggacctcaacacgaatttgtgctacttcgccctcagtgacacatcttaagaggggaagtaaatttcacgtttgtacattgctccatccataataaagtaccatggaactttcctcattattttttgagctttatttttgtcacttgggagtgttcttgattcgaggtaagttacgattggggtcatcttggtaggagtgtcgtctaaaatgtcaatctcctttgagcaggtgatgcttggctcttcaaggtattggacaagaactaagttttccttgttgaccaccgtgatgcttgctaaccaatctaaagcgtatgtagttgcattttcttcccttgggatttgtcttatcgtgtaccctttaaattgtgccaagaaatccttgattttgatgaggtaggctgccatttttttctcatgccatatacttgcctagatcatgattggtgatcaactgtgaattactacatatatctaagtattcaacatgtatttttcgagcaagtttgagtccaacactgagtgattcatactttgcttcattattcgaggctgaaaatccaaaatttacaactttgtgtagtttttatcccccaggagtaattagggtgattcttgcaccagaaaactactggtagatgactcatccacatggtcaaatagttgatagccctccttgttctttatctgggagaccttcctcatggacgcctcacgagaggtttagtatgtgttggaggtgtatcattctgccccgctcttattgcagcagcctcgcattccagcttcacatttctttggtttgactcaataagcctttgctgaagttgacggttttccacttttacaattggaatgtaattgttgggatcatacgccccttggttctttctttatggaataccctcttcattgtcatttttctcaaaacctcatacactaaaacctcttcctgtgttttgatcctcattgagataagtttcctgtggctcctttccagggtgatgccccgtgtccgtttgttcggtatgaacgtcaggggtagtatttttcatggaaaaaaaactttttaatatataaaatatgtgattagaggagatgtgttttcttagagtctaattatcaaaaactatcattaaaaataccaaactgttaactccaaattttgttaacattaaatgaggcttagataattaatactttggatatcaaattaatataaataatatattcaataatgaacaataaatgaaagataaaacatttttaatgtggttttgtagttaattctacatacttcatgagtctattttattgattaaaatattgaggaaaatttagaatcaagatacaagattggaaatgttttttcagtaagaaatttttatcgtcccttgttacattgatttcccctatttataggttaaaagtagcagttattaaatcctatatttacgactaatgaaacatagacaatcctcacatttcatttatcttattttgcaggcaggaaatatatatgcataactgctatgtattcgaattataagataattatggcagttatatttgatcttatctagaactcgttatgagtgaccccttattcaagcagtggcttaatagctcttgagttgaactattctatttataactttatttgggagataattcatct

SEQ ID NO: 391609 - DNA, 1760 bp, Cannabis indica
acaatactaaattttgagggcaaaaatcctaattacatattatttttggtaaaaaaaaactacccttatatatttaaagtttttatatatatacttatgatattcattcaaattaaaaaaaaaattagtataaaagtaatcgaaaaataatatcaaaacaataaaaagataatatacaaataacaaaaaattaacaataaaattataagagcacaataaaaaaatacatcaaaatactgtattttttgtaaataaaatcaaaaaaaccgtaaaaattatttaaaattttgcatgactatatttttgttatttttttttattcatttttatgtatttataaaattatctcatttatttgttaagattattttcattttttgacaaattttaaagctggaagatttggttagattttgtttatatggattgatgagaatcaagtttgatttgagagaataagaattaggaacccaaaaatttaatggggttccatttttctccctcttactctaagattaagttaataatgtaatctttacaagtcttatagttaattaaataaataaataaaaaaaaaaaagcaaagtgcttataataaatcaaattagactttaagattataagactatgtttggaagttgaattttgacaagaaaaaaatattaaaaaaataaaatagaacaaaatattatatttggtagaaaaaaattaaatcaaaaaacgctcaatttaacaaaattttccatttcatacttgaaaaattaattttttttcccacacttttttttattattattattttcgccaaaattcaacttctaaatataactaaaagatttcttggtatctaagacaattcaaatatatcaaataaatttttagcaaaatctacttaactacattaaaagcaatatagttaaatgttaaaaaaaattacaagccaaaaacaatttaaaattaactaacttatataacaatattaattaaatcatttaagtcaatgtaatcttttgttcaattaaacatagttgtaatcaatgtattattagcttttgactcatgtattgtcctattaagctctcaaatagtttttagattttaaaatgacaggtggactaactcatgactttaggcaaatgttggaaaagaatgtattaactttttcaattagtcaaatttattattttaaaaaatgataccacaacatataatgttttaactttaaatacatattttgagtacatatattattactattttacaatattattattagttattagtgatgctcaatattacaacaagataactttttatgaatgatttataaggaaaaatatatagtacatctatctaactcgttatttaggaaagttttatatatttttttgtatgaatgtctttcttataattattaaaggttattggtaaatttttttgaataatttacattgtccaaaaaaaattaatatttattatacacatgattattttatcttatacataaagtaaatatttaaactttacttttttataccgtaaactattcacaatttactgaaaacttacaaataatcttaaataactacaacgtatataattatgaaaaaataatttgacttaaaaatattcttaaatgtcaaaataaatatgaaaaatttataataattattaaattaaaatatataaaattctttatttttatggaaattggtaataaagtaatagggaaatcacctcatatattatttttaattttt

SEQ ID NO: 391610 - DNA, 721 bp, Cannabis indica
actaaaaagtggacggtaggctaaagttgggtttagggggtggaggggatatactccattaatttcttgatcacatattaattgtgatataacgtgagccgtcataattaattggagagttgagagagtaattaaggtgagaaggaattgaatctttagtatcgaggttgtaatcatcatggcaagtggagagaaatggggattaagagtaataaatgcggtagaagaaggtattaatcctaagagcccaaaacagtagaaacttcacgaaaaagagttatgtggtacaatgctctatcacttgttctttaggctttcaagttgaatttttgaagaaaaaaatagataaaatataagaaaaacaaaattgtagataataaaaaatatatattaattttttgaaataaaaatttttgttgaataaagtgtttttttatacaattttttttacataccaaatatgataattttttttttattttctattttttttttcgctacaattttcttactattttctttccacaccaaaattcaactttcaaacataacatagtttccatatgtatgggttttgtgggatatgatcacccttagttcaatttacactagagttataagatctatcaaagtcaaaaattactaatgataattataaaagtatatttttatatttttacgttcaaagatttttttacttttatatttttacggtattcta

SEQ ID NO: 391611 - DNA, 812 bp, Cannabis indica
catttaagggtgtcagattgtatgagctgggcctcgaacgcgtgtcgcctcaaggcttctcccttttgaatttctttatccgtagccgttggattgtttggtctggtacacaaggacagacatgctctatacgatagcatgtcgtgggagacaacccctgatgctgtacctgaggagagccttgtccctaggtccgtagtctgacacgtatgagtaaggcttcaccgggctaaaggcatagcccgatttgttgtgtctctaatgcctttgttccttttggataatccatgctccttgtaggagtagatgaatttggattctagaaaggggtgagacttttgttcatggatgcccttcccgtgaagtgggtgcctttgtcttcccggagcattaattgagagaggtgggcaactgatgactccgtggccatctttgattaaaatccacgtgtcatgcttacaaaaatgcagataacacatacactttggtatacgagagtcaggtgttaccctagtatataagagcttagggttgtagtgacattcaagaatgtaacgatcgagtttataaatttaaagttctagtgcaagtgttcctccttggttcacaaaaataaaaaataaatgaaaagtatcatcagttacataaagctctctaaaagcagggcgctgcatccagtggagattttctaattgattgaagaaaatcctctgggagtgagacgctacccagttgtggtattttttcagtagttaaactcctcctaagtatgggatgctgtacataggatgagtttaatgttgggttttatg

SEQ ID NO: 391612 - DNA, 2562 bp, Cannabis indica
tttttctttttctgttttattttgtctcattcatacccttgactgtcttatagaatggcaattcagggaccatgtacctataatattaagtgttgacctcatatttggtcagctgacagtggagccttatttatgatcgaaattatcacgtgtaaataataaaagtaagtaaagaaaatagcatagcaatttatagaggtttgaccctcttggttagtaggtaatgacatactctcattttagttgtattgatttgagagacaataccacacaaattacaatcttctacagtgtaatttctagtgtagctctctttgaatgttacaatagtgagaataatgtaaagtagatctcgaacaagtgagataaggagacaatcttagtgtcggtgctatggatactcgagtgagagagagaaagagagagcaagggtctcgagattagagcttggaacttaggttttagggcttagaacttaggtttttggttttgtatgatgctctataaactttcatgactccattctcaattttaacaagaaatccttgatcgtctaacattccaactgagatcaaattttttttgagatcaagtactagtcagacgtccttcaacaacctttccaaaccatcatgaagtttcaatcttacggttccaatccccaccatcttacaagacatgttatctccaagatacacaatcccataatttggagatgtaaattcttcgaactaagatttattcagcgtcatacataacgaacacccagaatccaagatccattcagaatctgaattctcagaggttaccaactaagcaccaactgagtcataattgtcacttatcactattgcatctccttcaaatctcaaattttctgacttaagcctctccgaactcatctttctggcatgacccgttttcctaaaaatccagtatctagcgctcttccggctatcagactgtaatttagatcttaagtttccttttaaacctttatggctttccttttctcacttctacctctcgtatacaatccatcaccacttccagagttctttctcactcttttgatttagctctttcaaattcaaagatcattgacaatcatcgactgtaattgaatatcttccatatagcattgtatctttaaaatgtccaaataacttcagtaaataactgagtaacaataggcttgatcctcgtctttaatggtaacaccaatattttcaagattcagaatcaacttgttaaactcatcaatctgttctccaatagatttttcatccatcatcttgaatgaatatagggcgtatttcagatataactttttcaccaaagatttaatcatatacaaactttcaagctttagcaaaatacctgcaactgtggcttcttttgtgaccttcttcagaaccttatcaccaagattcaatatgatgtcacaataagcctttggaagaacctttttcttgtgcttctcaaacatagaatcaggaagagatttttctccaagaagagcctcatacaatccttggtgaacaaatagaccctttatcttcattctccataatccaaagtcatccgtactagtaaactttttaacatcgtactttgttgcaattagattacaaccaagctctgataccagtttattgtgaaataacaatcaatgacatacgatgtaattatactggaccaactaatacataataaaaaataatactcagaagaatcacaaagaattaggtaacatattaaagtaataaaacagggaaaacaacactcggtttaacgagtttgagccttgtacaatgctttacgtctcggacgaaatagcagtagtcacatctttattgatattagtatttttaaggttacaagaattctttcaaactattacaaaggttacaagatgaacttttgctttagtttagactctctctaacctcacacaagcacaatttttctctcaagccttcaatggtatgattgtaatgtcctcacttcaagtctccattgggcccttacattcatgaaatgatagctcttatacacgagtacgtcattatagctacttcacgaactgacgactggccctacagaccaacacgagtctttccagcgtgctttgtcctcactcgcacgcttcctaagaaaacttcccaagaggtcacccatcctaaaattacctcaagtcaagcacgcttaaccgtggagttcttttgtgatgggctaccgaaaaataagatgcaccttgttgatataggtagtaccaatcaatctatttaagccatcttcaactgtgtggtcccatacctacacagtctcagaatcatcacacttgacctacccaggcgatgtgggattacacagcttacccgatatttctccttttgaatcacaggactactgattgtcacaatcaacccccttacagggtttgacgtcctcattgaccacacttctggttgggttaaggctctgataccatttgtaacatcctcgcttcaagcttccattgggcccttacacctacggaatgataactcttatacacga

SEQ ID NO: 391613 - DNA, 1217 bp, Cannabis indica
acaataaaaatgtaacgattgaatagtcaccctttatatattatgtctaaatatatattttttaaaaaaataatgataatgatagatacaatattttttaatttatagttaggagagtgtagttataataaagtgtacaaattattataagcatatatatatatattattaatcatttttaaaatagaaggttgtcataaaattaaggtttaaatatgtatattttatttatagatgtaatttttatttttaaatatatataataaaattaaattttttatacaatatctaatataattttattttacaatatatataataatattataaaattaataaagaatattctgttaaagttaacgtagaaaaccaaaaaaattactgttaaatcaagaattgtgttacataaccagataatatatatatatatatatatatatatgtataggatgtgattatggtaggagctaccaaaaatatctacccagtaaaaaagctttatagatcaagtggcaatataagggtggggtgtacattaatagagtgcatagtaatgtatttgataaaagttttatatattattttaataatataataatatcttaaaaaaatagtatattatatgatactaggtgaggttagcacgtgatgatgcacgtgcctagctcttcttgttatattttatttttatttctgtttgcttaattttaatattataaataattataataaaaatttaaatttgacattttaattgtagtacaaattaaaaattataaattacaaaatacatattttattattgtacaagagtaaaaataaatttttaaattgagtatttaagttatataagacggtcaatatttatataatttttaaatttttagccatatataagatggtcaatattttaatatattttatagagtatttatataatctgtacataatttttatgttaactgatatataaaaataaaaaaaaaaacaacaatttcaaaattgttacaagggcttgattggtttgtgattcaaaatttgtgttttttaaaaatgtgtttcggaaacaaaaatttaaattttgtaagtgaaaatttgtttttaaatatgtgaattggttgtagtgggatttaatgtttttgagttttaaaaaattgaatatgtgattggttgagaatctcaaaataaaaaagtaagagaataattaaagagttttt

SEQ ID NO: 391614 - DNA, 1161 bp, Cannabis indica
tatatatatatatcatatttcagccacaaatagttttatctgtacttaatgtttagaatcttacatttattaatgcaaataaatgaattacgttatttatttttttttttttgagataaatgaattacgttattaatccctggtaaaataagaagaaaaaaactgacctaattacagttacacgtatcataattgccagcattgtcattgctgtgtcatgaacaagataaggttaaaatagattatttcagttacaattattcaatttatttgtaacttatgaatagtattacattaatttatataaatatataaaagagaacggtaaattaatgatgttggcacttttaaattagtttacagctatttatttattttttcaagagatggcatcatctccttctaatctattattattttttttttttgttaatttatgatttttataattcttttgaacatttacattaatttcacataatttttttttgaaaggtaaaatcaacttttattaaccttccaaatcagtcaccaaaataggcaacaaatcagttggaatatttcccatactgaaaatacaatcaggataaaataaagatgctctaacaaactcatgagcaactctattagctgaccgcttaacaaaacaaaaataaacattatttaaactaaccaacatggctttgcactcctggatcacacatccaaaatgagaagacagaatagtcgagttccgcaaaacttgtacgaccactaagcaatccgtctcaacccaaattgaactgtatgtttggtctttaatccaacttaaagcttcctgaaagctcagtacttcagcaatggacggagcaatataaccattatgtaacttagtacgaccttcgatgagcataccattgtggttacgcaccaccaaagcacgtattgttagaattattacttaggttttcatataattatgattagtataattatagaaaaagttcaaaagacatatacctttaacattagtattttttttattagttataaaaaaaatattagtatatatataatttgtaaattgatcatgaaaccaaaacacaacaaaaaaatattatcatatcaaatacatttctttctccttttccttcaccattcttatcagcaaagacctttcat

SEQ ID NO: 391615 - DNA, 1221 bp, Cannabis indica
aggagaagatgatggggatgttgcttatgacttagttgaggattcagaccagaatgtggaagatcgatggtgtattgtagaaaagtgtctcattgagagggccattgattttgacaccatgaggcatatgatggcatccttattccaaccaggtcgtggtatgtatgtaaaagaacttgagccaaatcggtatttatttcaattttatcatgaccttgatcttgaaagggttatcgaaggaagtccatggacttttaatcgtattcagattgtctttgaaagactccaaagtggacaagatcctcgcttcgttgttatttctaaattggatatgtgggttcaagtgcatgggttacagcggggttttaaataggagagagctcttcgtgatttaggtaattttattggtttgtttgtgaagacggattcaaagaacttccaaggcatatggcgtgattacctccgagtccgtgtgacattagacattaacgtcccgttaaagagaagaaaaaagcttcgtcgaattgctacggaggaaggattctaggctatattcaagtatgaatacgtccctacattctgtttcatttgcggcataatcggtcattcggataaattttgtccccaattatttgagatacctactgataaaatcattaagccttatggggctggaatgtgtgctcagccaaggcgacgaaacaatttgatcggttctaaatggctcgttaccggagccgaggacgatgagacattctccggtggtgtggctggatcggtcactttttcctcaatcaaagctcaaggtcaaccttcaccattaggaggtattatggccaccaatcatggagtgtcaagaggtaagatccatgtcataactacaaatcaatttgctggaagaaatattggaaagtcaaataatcaaggagataatgttgttgatgactcactcgacgtggggattaatatggaaataagtgaggcttctcatcttgttgttactgatattaaaaggagaaggacaaatgaggtaagttctattgggcctgatggggtgagcttaattcataataggcctctttttgataatagcaaggacaatatggaggttttagtttgtgacaatgatgaaaaagagggctcaaaaaatggcctattggtggatgctggttcccaggcccaccgctcattatgaatatcctaagttggaattgtcggggg

SEQ ID NO: 391616 - DNA, 936 bp, Cannabis indica
aaaaaaaaataataataacttaaaataatttaaaaatatttttaaatttaaattaaacgaatattctcacaaatatttattatgtcttcataatctataaaagattaaagacaaatctaacctaaaaaaaagaaaaaactaactgaatagaaaattgaaaataaatttatctcaaagtttaataaccatatatatggtgcgactaacttagagtattacgtacacacttgcatcatatttagataatttcttgataatactctggataatactctctaggtaattaataattttgattataaataatatatatattatatatacggtaaaaataaaaaataaaaagaaaatatatattaagattggatatggtgcgaattgtattatacccgtcttcgtcctattctcgctttgggtatcaaaattattcttgaccaccgccccattaactgccaagttgggaaatctccaccctattacgggcaggtccctacggttactcatccctgcagtataaattttatctctaatgagaattgtgattatggcatattacaaattaatataagtacagaaaatttgaacataaagaagattattttagaaaataatatgaaaatttaatcacttaatgtaattttttctattttttactattttttactatttaatcattaaagcacacatatattttttaaataagaatagaaaaatacaattaatagcaaatataaattgacgtgaagaaaaaataaaacttaaagtagcgtttggtaatacttttttaatcagctttttatttttaaaattggaaaagtaaaaatattttctaaaaacaagttttataaaactgctttcatgttttaattttttaattgagaatcaaaattttgaaaagaaaaaaaaaatcacttttaatatttttttaaacagttt

SEQ ID NO: 391617 - DNA, 2347 bp, Cannabis indica
ctgagaatgttaaagaagggtatacatttttctatagacttggatacaaatccgcttaatgtagcaatgcgtcctattaggctttgtacttcaatgacagttgtggtaacttaatacacaaaagcacttagatcttgtctaggtatctttctattcctttggcgttgactatgaagccaaggaattttctggagcctactcgagaagaacatttaagggggttgagcttcatgttatagctgaaaaaggattttgaagcattcacctaggtcctctacatgcccccagcctttttggacttgacaagcatgtcgtccacatacacctccatgtagcagccaatgagatctttgaacatcatgttcaccaacctctgatatgtggcccttggattgttcagcctgaagggaatgactttgtagcagtacagacctaagtctgtcatgaagctagtgtgctcttgatctggtggatgcatctttatttggttgtaacttgattatgcgtccatgaaactcaagatttcatggcgttatgtggcgtctataagcttgtcaattctgggaagcgaaaaacagtcctttggatatctttatttaggttggtgaagtcgatgcatactctccacttttattaggtttgggcaccagtacttggttggacacccatagtggatacaattcctatgttatgaagttatggggtcgtagcctcttgacctcatcttttagcgcttgggtgtgctccttgtctagtagcctcctcttttgttgaacaggtcaaatttttggatcgatattgagtgcataggtcatcacagactggtcaacccgatcatgtctccatgtgataacgcaaaaagttctaggtttgcccttagaaatcttatcagtattgatttaatttcttgtgctaaacctttcccaatcttcagtcttcttgttgggaaagtgggatcaacctcaacttcttctaagtcttctacagatctgaagcttcctgtaggatccccaaagtgaagatcgatgtcagtgtccccactttgggctggacttcatttccctttgttaggctcgtcttttgggcccttagcaggtgtattctctttcttggctttggatagggccaagttgtaatagtgacgtgcagactgctggtctcccctcacgcatcctaccccatgcattgttagaaatttgaggcatatgtggtagatggaagttaccgccttcaggtcattagggtttggtcaacctatcatgtcattgaaggctgatggaacgtcaaatacgacgaactgtggcatcaaagttctggtggtttgattttctccaactgtgaggggtaatctgatatacctgacaggtgcgatgcttttcccaaaaaagccatacatcacttggttgcagggtgccaggtcggtgagttggagccccatcttttcatatattaacctaaaaataatgttggaggaggctccattgtcaatcatgcatcttgctactgtcatgttcctgatttgtgcagtaatgcccaggatgtcgttgtgtgggaaactgatttgagtagcgtcttcttctgtgaaagaaattgtgggctctataagttttggttgcctagagcccttgtctttaacggtcacgatgttgcttttaggcttgtgacggagtgtccgaccatagtgctccctcactttgctggtctcacatgtaatgtggggtctgtcaatgatgacccctaatgtcctgccaccggtggtggcattggatctctattttgggcaccttgttcctgagtttgataattttgcacatcaaaatatagggtggggattgttatgccttatgaggtattcaatctccctctttaaattttggcactcattggtgtcatggccgaagttattgttaaatcgacagaacttcgacatgtccctcttgctcagctccctttttatgggaaagggctttctataggggactattccctacgtggccatgaagatggcctcaagtttctccatgtaaagggtgaaacaggtatacttctcctccttgtggttttgtggcgtggtagacacgctaaacttcccctttttgccaatactcctctcacatctatgcgtgttgcatttgtttctaatcgtcttgccattagaggtcttggtagagttactggtgtctgcctgtgcacttggtaggtcatgagactgtaggatatctcatgactgcttattgttgacatgccccgtctaggcctatcgtatggctttgtaacgtccccgcttcaagcctccattgggtccttacacccacggaatgaatggctcttatacacgagtacgtca

SEQ ID NO: 391618 - DNA, 582 bp, Cannabis indica
tatacagttatcatttattgctagatccgaattatatatatttaacaatatataaccacaaaaacaaacacaaagaactatatcaatatgtatatggaaaatgatgttaaatattcatgtgattggtctcacatgcatggctcagcttcattttcatattatttgattaaatttgtaccttatacactaagtcaatcatgatcaagaagatcatgagctttgatttgaagagttacaaaggtcaaacttcatgggattcacccaaatctaacaaaaccctttttgtatatttgtttgaatacaaatgactgagatcttctagttataattatgttctatctttgtacccaaaagttgtatagttatttgacacatattgtcatgtggaacttgcctttatgttattggacccttaacttccaccattttattggaccccaaaaaaaaaatcaaataatttttaaattttagacaatttcttttctataatttacataattagtcatatatatttatatactagatagatattacgtatgttcaacaaaaaaaagatagatgttacgtgccaagccacgtatg

SEQ ID NO: 391619 - DNA, 772 bp, Cannabis indica
taacgagttttttaagagcttgctacccattgacccacatacttatgagtatgttgaaagactaagagaaataagcaaagtgcgacttatctcagaattcttaaagactaatccaagaattgtcgtaaaaggtcatagtgaggataaacatcttaactagcatcacacggaataagaccagctattcctaaacaccgttgaagaaagggagaaaaagttggagtatgctatctcgacaatgacaaactattttctaataagaacaaaaaaagttatcaaaagttatttcattttatccacatattgtaaatatgaaacatggggattatccatgtttcataaatatttacctagtttagaccgaaagagagtaactgtcattccaaaaaaccctataagtagggacaaaacctatagcaaaagggatcggtcttttttgggaagggaaaactttgtgaggtggagtgaatatccagagaaattctcttgtaatcaagaaacattgtaaagaaatactcagaaataatattgactcgtgaagtatgtagattttaactacaaaaccacataatttttatttacaagactttatttattgttaacaaaaatctgagttaacacaaaccaacttattgatatcaaatatatactaaaattgagatagtgtggatgtagtgctttcatcttctcatacccaatttcttttgtctagcaaattaattaaaagaaagaaaaaaaatatacataattttacttacacataataaattga

SEQ ID NO: 391620 - DNA, 1263 bp, Cannabis indica
tatgataattgaattaaagcaatgtcaattaggagtgtttatggtttagtttgattcgaaattttattttttggaaccaaatcgataatgttatttttaaaatttaaaatcgaattagactaattaaatgttaaaatcaaaccaaattaatcaacttaaaaactgattggttcggtttgaaacgtggtttataattcataaatgttcttattatttttactaaattagttttactttaaaacttaaaatacgtaaataacaataaaaataaatattcttaacacaatgttaaaataactatcaatattatgactaacattgttcttaaatattaatattcgataaaaaatcatattaagtatatataaagaattagatattttggtttggtttgtagtacggacgaaaattttaaaatcttgactgaaccaaaaaaattataaatgatctggagtgactaagctattgacactagattcatttgatctggtctcaaatagtttagtgcgaattcattagagtttggaaccacatattgcaaattatatgaacaatcttatttaaatatatatttcaatttttattttgagtagtagtacgaatggttgaaatctttgtccaaggctggtcgtgcgattttgatcaaatcggttggacttgccttactagtttacactatggagactacaagttgtctaagaagcttgcctttaaaattgatggtatgattagagacttttggtagagttgcgaacagggcaatcattgcatatatttaaaggcttggaatcacttatgtctccccaaatcctagggtggccttggcttcctaaagactttaataatgaatcaggcatggctagccaagcggggatgagccctcatttatggagatcaatcgttgtgctgttaggtgttaagagccaagcatctgagatgtaactatgtgcactaatgtaaacatttatctaaccttttgttaagtcgtaattgttcgttaatttccagactttgtaattttccaactcataatgtggctaaataggcttttaccaaaaatattactgacatggttaagctatcttctataccaagtaacatcatgaccgtgagttctaactctaatttcttttattaatgggtaattactattttggaccctgtgttttgcaaaagttacagattggaccctgtgttttgttaaatgataaaatagaccatgtattttctaaaatagtaaaaataggaccctgagctaatttt

SEQ ID NO: 391621 - DNA, 821 bp, Cannabis indica
tctctctctctctcttctttaatctgtagggttgtcagcgagcggcgagtgcgtggtcgctgatgtttgaagcgcgtcagctcgacggtgtttaggtggatgttgacttttgcggctcagagttttatagtgatggcatgtgaatatctgagatttgtattttttgttttgagattttgtattttgtattttggttctgtaattttttgtaatgactttttggtcctgtattttatttttatttttttttactcaaattcttttaaatattttggttgacaataatctagtgtaaatttgagttataattaatttgagatattaaatttgttagtattattttcgtggttttatgatggtggatttgaaatacatatcttagatctagatttttttgaatgtgtcgatttaagattggaggtcctgcttccagaacctctcatataatggctccattcaattatcagcaacaaattcttctgcatggaaacattggacctggagcaactggtacctgaggtggacgtacaacatgaggtctctactgcctcaacctctgaatctcctcatcttgttgctggatcttggcttgcatttttgcaaacttttgctcttagtctggtggagtctgtggtgggttttcattactgccaccatgaaatcttctgctggctctatgttaggattttatgccctaaataaaatccattacaatctaatctgatttgttatcagtaagagattagaagttatttatgtttacatgttgttttcatgattatggtttaatatatgtacaaaatctgttaagtccagaacat

SEQ ID NO: 391622 - DNA, 850 bp, Cannabis indica
tctctctctctctctcttcgcccgaaccaccatcccaacccaaatcctcagccacaaccaccatcccaacccaaaactgcagcctataccaccatcacaacctaatctcgcagatctcaactgtctcgtccatggacagccacgcacagccactggagatgtctaaggtaagttttgatcttactttgaattccttttttttaactatctatgcataatgtgtagtgagtttgattagacttagggtttgttttgggtctaatttgtgaaactacgattaaatctagtttttagcttaggcccgatgcatgctcgatgtaggcccgatgcatgtgcttttgaataaagttagaggttaaagatataggtctgatagaggacgatgtaggtccaattcaagcatgatgctaactaacagatgcttaagtccaaaagaggacgatgtaagggtcaatagttggtctaatagtttttgtaggctttatatttttatagaatttgtctatgtttgacagaggacgataattggcccgattatgggtctgattgttattgcatatttttttttatagaataccagtaggtccgatagaggacgatgtaaggggcggtagtgtgtccaattctttttgtaatttttatttttttgacaaaatgtgtctaggtccattatgggacgattgttggctcgatagttgatccgattgttgttgtattttttatcttttaacattttgggtttgtgtaatgtctccgcttcaagcctcaattgagtccttacacccacggaatgaatgactcttatacacgagtacaccattttggctgcttcctggattgatgactgacc

SEQ ID NO: 391623 - DNA, 673 bp, Cannabis indica
gtttgaggtattttcgatggaggccggtggacacgagtagagttagtaagaacaacttactaagtggaaattggccgagggtttttcataatgatgcatttagaaatagatcttgtcataaatataaaatccatacatctttcttatctttccaatgcattttaaatggtctgattccgaaataaattgagaaagttatggaaaaaaaaatactgagaccattgaaatgtgattgtggggtgtttgagccagtgtgcctttgcatgagtcgatgtgcatatgtatgagctggtgtgcctatgtgcgagccagtgtgcatgtgtacaagcaggtgtgcctctgtgcaagctagggagcatttgtgcaagccgaggagcatttgtgtgaatcgtggagcctttgtgcaagtggtggagcatttgtgcaagccatgatgcatgcgagacatccatacaagctctggaatgagacatgcgtgcgagacccacatgcaagccgtggcatggaaggtgtctggggctcacatgtgagcaatgtgtggtgtgtgaatgactcacatgccagctatgtgtagtgtgtgtgaggctcacttgtagggttagtaagaccaagttcttaagttgaaactactggaggagtttcataatgatgcgttaagaattagatcttctca

SEQ ID NO: 391624 - DNA, 1211 bp, Cannabis indica
ggattatggttttgtagcagtgatacataattatttgttgtaactaaaagaatatcactataggagatcatgatgtctaacatcgcttagctggtgttttataaatagttaacgattttttataattattattaaagtaaaataagtaggatctgatattaaatacattatagtatgtgcggataagacacttcataggctgctaggaccaaaaaattacattataaatggttcttataatcctaacatatatatgacactacaagaactaagggcatcaatgaggataacgtcagtgaaaggtacatttttcgttagtaatgtccaacaatagtgacatttcgttggtgaaaagtcgttggagaaaatttgtcagtagaaagtattatcaataacgacatttacagtcgttgacaaaactaaatatcaatgacattgttcgttttttttttttttttttttactatattggaagaaagtgaatgaatattataggttaattaatgaagttagaaggaggatcaaaagtttctgattcctagccaagttgccttcaaaaggataaataaatgaaagctaagatagaaatcagccccacattatacaattcaataagataccaaaaatgttaaaagaacacatcaaatgccactacaatttaaagtaagggattaaaatgaaatatttcatgctttttttttgttcattcaatattaatagggaaaaaaaacttgatttggttgaatagtagaaaacataaatagctttggtatgtcatcaaaagtgtgttacgcatctcaatttggtcacattgttccttatgtcatattccatttgcacttacatcaagtgagaaagcataagtattttaagggaagggctattttttttttcttaaaaaaattgttgtgaaaagtcaaatgtgtaatttgtgagattttattgtaggaacattatttttattgatcactactacaaaattaatttttttcaacggtttataactgtcttttatattatttccctatggttcctaaaaccgttggctatgtgggtgtcataaaaatgcggaactttaaatgacggtttataactgtggcaaaaagttactttaaatgacggtttataactgtggcaaaaagtcactttaaacgacggtttataaccgttgggaaagacttccatcgggtagtaactgatggaaaatatct

SEQ ID NO: 391625 - DNA, 528 bp, Cannabis indica
atgtcaagtatgcgtaatttatgtgtacagatagatatcactactctaataatatatgcctataaaagcatattaagtagggacctagtaatatttttattgttggactgctacatcatcttaactcacacattagttagtatgatatttaaatgagtatcattttaagttagtgtggcaaatttgtgtagtatgattaatctggaaacataacagatgtatttgactagtaactaattggcatttggcacgtgggttgtctttattatatttttcactgagttgggtttagtatatattttctgttagctcaactttcatattttaacacctctttaataaaatacacaaatttcatcctttgttttctctttgttgtaaatttttgcatgtgcaaaaaaatcaagcttgaagttagttcatccatggagatctaggactgctgatcactacaagaaaaaatgagtattggcatgattaaattagtgccaacaaatttattttttagtgcccatctgttgattggca

SEQ ID NO: 391626 - DNA, 1385 bp, Cannabis indica
gttttcttttatttttatccatatactattttttatttttttttatttacatcgctgtaaatatttttttttgcacaaatacggtaaataatcttttgtggtattaatacggatatatgttttattttgaaaaattaggactgaagccacaccccatcaaatactgcgatccaacaaagaaaaaagaaagaagaaaaatgtgcgctagagcttcacgtatgacatcatctcctctagctctggcaagttttcgacaattattattggaattgctgacctttgactcatgagaatgactgatagaggaggaagaagtaatattgcaatttgggttgcgatataattaaatggttatttaagttaggttgcgatttaggttgcaatttgcgattgggcatgattgagattgtaaatatgtttaatggtgatttagggttgcaatatcggttgcgatttgtgttgtaatatcagttgtgattattcaattttgtttaggaaataaatggaaacttcatgcgttggtcttacaatttaagttgcgactggggcatggttgagattattacgtgatttgatggtgatttagggttacaatttgggttgcgatattggttgcaacttttgttttgttttggatttcaatggaagcttcacgtgatggtcttgaataatcacatagaagagagaatgactcagaggaggaagaagaaagggattgagattgtgatatatggtttgatcatgatttagagttgtgatatgtgttgtgaattccgtttcgattttagaagaaaataaacatttttcatggtgttaagtaattgggagtctgagaggaagaacacatacttgattaatctttgttgttcttgttctacagtagaaatatgggttgcaatgataattcagtgttttaatttcttaaaatcaagagatatatgcgaattgagttttgatttgggaaacttcggatatgggttgagatgaggattttagggttgcaaattgggtgtgcatttgggaaaattgtgatttggttttgctaatgtgggtactgattttaaatttaaagaagatacactatgcagaaagaacaaaaagagatcgacaagctctgtaatggtagtctttggtggacacccattatctccaataatcacaaagatagaaatttagcgagaaaagaaaaaataactttgggtgattctataatgtacccccttaaaagggatgtactgatgcacccctacttgtttcggcatctagaaaaaaaatttagtctaattttttttttcatattcatgtacgttatagctatttaagatatcctgcaaattttggaaaattcgaaataatttactctatagtaaacaatgttcaaacag

SEQ ID NO: 391627 - DNA, 923 bp, Cannabis indica
aggggtttggttttgagaaagagggaatctctattatgcaaattgatagggtgtcactgagctgtagtgtagtgcttaggaaatttattcattttttatcttttattttttgcattattctcaaattatcagttaattgtgtaaatgaagaaatatttcaattcaaaaccaaacaccaattggaggcatcttaatccatccatacctagtattagttagatgattaaaacatgcattaatgaaaagtggtcctatgatttgaatgggatgatgagattatttgagaaagactaaactggtcttaatactcaacacagagtagaggaccagctgataaaggcattacatggatattttcatgagtcgttgctgttcaattattattattattattgtgtggaataagataatctatgaaacaacaattcacatggccgtcgcgtcgcctatcaaaacactatgattataattatttcaaataatgtaaaaactagtttcaagtgcagctttgtaatttgcatacttaaatccatatgagctagattgggtatataaaaataaaaataagaaaaagaaaaagaaaaagaaataataatacgtcgacagcagggttcgaacctgcgcgggcgaagcccaacagatttcaagtctgtctccttaaccactcggacatatcgactgtacattaaatctttcactaaatatttataattagtaaagaaactaacatcattgtacttatggcttagaaagaacaacatcattgttttaaaacctataattaatttatagatgtgtaaatataattttgtagtttctgtttttgtaaaagttattaattgaaccttctattttgataaataacaaaattaactttatatttttcaaaagggtaaaaataagatcttgagcttaatttttaa

SEQ ID NO: 391628 - DNA, 1009 bp, Cannabis indica
gatctttttgacatgcctatattcaaggatcaatttgctaattatggcatcatgcacgagttcacttctgtggaaacacctgagcaaaatactgttgctgaaagaaagcatcaacatctgctcaatgtttctcatgctttgttttttcaaggcaaatttcccattaaattctggagtgagtgtgtaatggctgcaactttcttaattaacaagatccctacccctttacttaaaaacaaaaccccatatgaatgtctttttaaaaggccaccatattacaatcacttaagatttttaggatgtcttactcttgcttctacctatctactcacagaacgaaattctcaccttgtgcccgtacttgtgttttcatgggctattctcaaggaattaaaggttacaaattatatgatatcaacaatagccagttttttatttttcgtaatgttgtcttccatgagaatgtgtttccctttcacaaactaaacactgatgcatctaaatattgatcatttccctcaaactgttctccctaacactatgattcacaacacacttgtctgtgattaccccacagaccacaatactactgtttttttaccaccacatgtacactacttatataggtgagatattccatcaaagtctctgccacattatttattagaatattttgacaattaattttgaaaattaaatcgagcagctaaaatatttaataattaaattttactaccattagaatattttaataaattagtaaataattaattatatttaataaatcaaatcagatgaaatattaaatttagtaccatatacaaattattttaatatagtatacaagaaaaaaagaataagtcataacgaacaaaagtttattgctaagctgattaaatagttttttggtgggttgatgttgggctggctatggtagccttggtatagtacttgttttgttgattattgaaatcttttctttggtaaaatgtgtatatatatatatata

SEQ ID NO: 391629 - DNA, 2186 bp, Cannabis indica
atatatttaatgttttccaaacattatgatataaagtagccaaaattatgcttatttataatatacagtatttttacttttaaatttttctcaattgcaaaaattttatttaaatatacaaatcgttacaaatatcttctttgagaatccaattgcattctcctcattttttataacaatttacttatataactatgagttacaggtataattagtataagaacttatttaataattttaaaatacttaaaattcagtttattgacattaaatatataaacaataactttaaaaatatacatgtgtaccctcataatttattattgaatcgctaattatataatatttcactttgatactttaattgaatcatattaacatgatgttaatactatattaataaattatttaaagtaatgatcagaatataactacaaagaaacattcacaacaatttttataatttaagataaattcttataaattataaaaattctacaagtatcatatatactttggggaattcatcctatttatgctatatacaaattgtatgatatatatatatatatatatatagatatatagtcatatagtcttgcattgcaattcgtgttaagtaaattttttattttaaaatgatttgatcatatgctacgttaatttgatatctgattgattaagaggttaaaaaaaccacaatagctaattaattaaactaagttttgcactttaattaattaattaattatgtgattaaattaatattatggacacgtggcagcattagggaggggtgattagtatgggcggcacgttttaatttatttttgaagtgtgtgacgttcacgatgttaactgctttcgaaactaacgcaaaaactaataggagtgatcgtagtggtgggtcccacgtattgatataaccaattaaatattgccacgtggaacaacaaccttacgtggtgaaagtggctcaaagaagcttcttttttttttttggtaacagccataaccctatccacttactgaatctgaattatttgtttgaattattatattagtacaatttacattaggtctcctttgttaatttcaaaaaaatatatattatataaatttatttatgtctccttgttttgtttgtaataattaaaaaaaaaatgttgtaattgttatttaaaaagaaaaaggaaatcttgaaaacatagtgataatttggacctttatttaaaaaaaaaatgtggtatttttaaaattaataaaaaaaaataatgtaattttaaagatggaaagtattttcttgaatccttgaactaggtgggccctgggcctatgcctaggccgggcttggatacttcaaacttcattggtcaccaaaatttgtatatttgtaaaagaaatatgcaagtatttgttctcccaaaatagtggtgttggttctaaggtgaccctgagattaattaggtattaagaaaataaaaattattagacgttttatttaaaatatatgtggtatttttaacactattaatatatatttttaaagaaaaattatatttttttttgacccttgagctggttggacctaaacaagggccctagttcgccttaactcaagccgaccgcaagtggaagacctagaaatggcccttttatcatgaagatgtttgacactctaaataactagtaaaaggtcaacgcattaacaacactattcaacaaaaccaaaatataacgaactaacaacgaataaagaatttgtaagaaaaaaaaacaacggataaagaatatatattttcatccacactaaacaaaattttaattcgttaatgatcttttgctcaaatgggaggtaagccaaagacaagttatgaaattatttattttattttttttaaaaggttattaaataattttctagagtgttctagaaaaaaacaaaatctagaatactaaaaaccaaggtagctttttggcaattttactcccaatgaaagaaaaggcgtagaacttttttttttctttgaaataaacttgtgctacaaaaaagagaagaaacaaatacaaaacaaaagcacaagctacaaggaaggtagagaaccattccagatcaactcattatctaatcctagacccatcctagccacttttgttgggttcattgccttaaataaaactcattt

SEQ ID NO: 391630 - DNA, 696 bp, Cannabis indica
gttaaacttatatatttatactggacaatactctacaaaaattgagcaacaacgttttactaaacaagaatcatttaaaacgagtgagatggagtacctatgtgactatactactttatcttttggtgactaatcaatataacttttgtgttgctcatgatattgttctactacaatttattggtatggatcgatccatccatatcatatatatgcatttgttgtttaaagttattttccgtatacccaaaaaaatgtccattcaaagggtctaattatagagaaagaagaaaaaaaaaaccacaatcactttccatcaccagaaaactttacaattaaaattttagatagctaaaatatcatctatattagggatggggtctaattatagagaaagaagaaaaaaatcacaatcactttccatcatcaaaaaactttacaactaaaatatcatctatataatttagggatggtcattcaaatttaatacgcatgccattttatttatagtgccttcgattcacattaagtgtagatttaattttttctatccaatctaatccacagataataactcaaattaaattcatcaaagtacatattggatctattattttgcattgattattttttaatattgaattatttaatgtttattgaaattttttttttcacataactaactacaaaataaaa

SEQ ID NO: 391631 - DNA, 539 bp, Cannabis indica
gcacattcaactctactttctttatcatcaaattatgattagtagggagataatttgcagctctacacacaaagttctttgtctttggaggaaccttaaggctctaaatttgattccacataggcgaagaggtattggcaggcgcacgctcaacatcctgtcgcaacaaaacataggtcaacttaaccgagcaaacaccagaattttcacccgaccagaaataagtatccctttgtggcacactcaaaactggaatattcaagataacttaagcctcacgagtgtcaaacaaatcatgaacaacttctgaattccaacctgaaccatccatagtcaaaaatgaactaactttcttattaacaagacctgggtgccgagagttcactaaaggtttattaagaacaggtagccaaggaccatcaaggatagaaatggaggtgccatcacccactttacaatgatacccttttaaaactagattccttgactcaaaaatactcctccaaatatagctaggattgttccctaactcgacttgt

SEQ ID NO: 391632 - DNA, 2812 bp, Cannabis indica
gcatttggctactgctgctagtccatctgttttcagtttgtgtcaaaataaaaattgtactcaagattgtaccttggttgactcttcaacctctacttgtaataatcaagataataaagagtcattttctttctctccaactgtgtacaattctacagctttcattgctcaaactctcactgatgttaatgtttggcacacaaaacttgggcaccctgcacctgatactttaagaaaaatacctcaccaaagccaatattgcttgttcacttaaagatcttaagttttgcaaagcatgtcaactaggcaaaaatcatagattaccttttcctctatctcaatctcgagcaactcaacctcttgctcttgtgcacactgatttgtggggtccctcccacattctatctaaagaaaactatagatactatattgttttcatagatgattatagtaggttttcttggattttccctctttcaatcaaatctcaagcctttgaaacctttataaaatttaaaagccttgttgaaaaacaattcaatcttcccatcaaagctgtccaagctgatggtgggggagaattcagaccttttgagagatttttagcagatcaaggcattagatttcagcaaccatgtccccatacacatgaacaaaatggtagggttgaaagaaagcataggcatatcactgaaaccggtctaactcttcttgctcaagctggtcttgatctttcttattggtggtttgcgtttcaatgtgcaactctctctattaatcgaatgcctacttcgattcttcaccatatcagtccttttgagtgtctatttcatgaaatccctgattatcacattcttaagccttttggctgtgcttgctatccacatctaagaccttatcatcatcataaacttgaactcagatctgaagaatgtttgtttcttggttattcacccaaacataaaggttatgtttgtgaaaatgctactcacttttaatgaattattatttcctactactaacaatactcctactgttgctaaagaaacaactgaaactgctggctgtcctactatgcaattttctactggttttccacaggttttcaggtctgatgtaccacttatttcagctgcttcctcattcaattctggtgctggtactgttccaactgcattcgaaaaatgctactcctactgcttctactaatgtcagcaaactctgtaccacttaactcaccagaacatgtgactgcaactgaaccaactgatgcaactcttgctacagcacctgaaccaactgctgcaactcttgctacagcacctgtgcaacattctgtaccagttcttcctatatctaatgcagcagtttcaacaataccaagaactcattctatggtaactagatctatgcgaggtatatacaaacccaaagcttatatggccactaagcatagactacctgagtctctcatacctcgagagcctaaatctgtgaagtcagctcttaaagatcctatctggaatcgatctatgtcaagtgaattctatgctctcaaagcaagaggaacttggactcttgtgccttatgaatctcatatggtcctaatagacaacaaatgggtttttcgggttaagttaaatgcagatgggagtcttgataagtgtaaatcaagattggtagcacgtggatatcttcaacaaccgggcattgactttgaggacacatttagtccggtcgttaaacctgtcacggtcaggttagttcttactcttgctgtccattttaattgggaagtaaggcaattagatgtgtcaaatgcttttctatatggggatcttaatgagacggtttatatgacccaaccaaaaggctttattgattctcaatatccccattatgtgtgcaaactaaacaaggctatctatgggttgaaacaagcgcctagagcttggaatgacaagcttaaaaccaccttgttcagctggggttttacagcttctcgtgctgatacttccttgttcctctatggctcgggtcctaatcaaataatactcctagtctatgttgatgacatattaatcacagggcctaatccaagtcttatacaaagatttataagtgatcttaatgcagccttttctcttaaagacatgggtgaagtccactactttcttggagttgagattcatagaaatgaaagtggaatgtcattatcccaaagcaaatacataacagaccttcttgtgaaagttcatcttgaaggtgctaaggtgtgttctagtcccacaagctcttcacataaactgtctcttaaggaagggactccttttgaagatagaactctttatagaagcacggttggcgcattgcaatatctaactctcactagacccgacgttgcatttatcataaacaagctatcacagttcatacatgccccaactaccactcattgggaagcatgtaaacggcttctacgatacttaaaagggaccattactcacggcttgtttctatctccagcagctagattatctattgaagcttactccgatgctgattgggcaagttgccctgatgatcgtcgctctaccggtggttatgctatctttttgggaccaaatcttatctcttggtctgctaagaaacagcaggtggttgctcggtcttccactgaatcagaatttcgtgctctagctaatacggctgctgagttaaagtggctgcaatctctttttacagagttacaggtggtcttagctgatattcccattatttgggtggacaatcaaggtgctgcagccttagc

SEQ ID NO: 391633 - DNA, 669 bp, Cannabis indica
aaaaaaaaaaaagaatgatgaattgtctcatatgtagtcccacagatgcaacaatctttgttttaatcaactaatgctatatctgaatagtctcttttttgtatgtaatctattcaacacacccaaccaataaaactatgtttggaaatattcaacctactccaaataacctcctaaaaactgaatctatccttggaagagattaaagtgacatgagcttctgaataatttgtttttcacatacagcttttgttgccaatatcagcttggaccttcaaaactccaccaatttttatcatacccatatatacactattaaatcactttacccataaattatctttacccaaaaattatcttgcttgattgcaataaaatggactaaagtaaatatttcaatgaaattattacaagttatattcaattaatcaacataaaattagttgaatttggctatgatttatcaaagatttattcggtgcatatatatgaaaccaaattcatatttagccgccgctactatagtgtatcttgaaaaagtgtattttggaaagaaaagaaaaacttatacaaagtgttaaaaatatgatgatagatgaattttaaacattacacatagaccaatcactaatttgttagattttttatttgggcttacattaactttta

SEQ ID NO: 391634 - DNA, 2224 bp, Cannabis indica
ctaaaataaattttacaaaataatgagtttttacacatgaggagtgcttcagaaacaaatgttggaatatataaatatatatatatatattagttttaaatttttttgaaagctgtcttcattatagttataatattatttttgtacatttttgaaaaattttaaattgtttacaatatcggcaacgaagttcctgatactttgacttactacacgtattaaaaaaactccaaaccttcaatcgatattgtaaattactcgaaattaattttttaaaaatttagtattattattgggattggtgcccttaaatcatatatctataaaattattactggatatttaaataaaaaagtattattcactcataattgtatgtaatttacatgtaatttatctagaaaagatcctttgtgatttagtaaactactgaattaagtatatatatgagattgtacacgaggatttaattaaaaaaaacataacataaatgaattatattgtccttaattgttaatattataagtgggagttttgatattaattaaggttatgagaacaacttaaatactgtcttagatagaataatctattcggattgttatgtgtggttgatgttggaattttatgtcctaaataaaatatctctacgtaatattctcattatttcccaataattaaaacagaaaatcttttatgtctatatcaattgctttattcacatgtttattttatgcgattatatgtataatatgtaaatactattagatcaagagtatatatttatttacaattatagtgatatcatcacaatagaaaatacttgtgattatatgattcgaatatttttagttttgagatttatcagagcaccgaatttaaactgacatgataatcgacgatatggtctatttaaattagggcaagtggtatctcttttgcaagggattggtaaatagacttgaaattgaatatgtaggtttatattggtctagactgatgttgacagtagaacatatattataaacttatcgttatatctattctaagtcaatattacttagtttttcactattaaatttgatttgaatcctgacatgaataagctttaagttaattctattattcgagttctttgatttgttcattaccagcttatcctacagacatacttacgtcttgggaacttggtagaataattgagtaggagtgttagcaatagatatagacatctatagtttctattctgttatatgttgttactcaaatttttggctaagtgatgtggaacgaaattaatgagaagaccttcatcataaagaaaagatctacgaagtgtcctctgccggaatgcaagaaagatgaagcttgaagccctagctaaaatgcttgggcaacatgtgatagagtatgacccacaggtactaaccctagacacttgtgtgtcatacaagaccctcccatgttacatttcagttgtaattcaatgatcccgagttacccttctcaaaaagctgtctaatatgcctcgcacgaagaaaaggaaactctggagtgccccaagtatggagcacacatcttgtaacatccccgcttcaagcctttattggccttcccccgcggatttatggctcttatacactagtacgtcactctggctgctttctggactgacgactaaccctatacactaacacgagtacttttagcatgcttttttctcactcgcatgcttcctagaaaaacttcccaggaggtcaccaatcttggtagcccatcacgaaagaactcaacagttaactgtgcttgacctgggataattttaggattttttacctcctggcaatttttcccaaaaagcatgccactgaggaaaactcatgctagaaatacttgtgttggtttgtagggcgagtcgtcagtccaggaagcagccagagagacgtactcgtgtataagagccataaattcgtggggaaatgcccaatggaggcttaaagtggggatgttacagaatggtattagagccttcacccaatcggaagtgtgctcgacgaggacgttggaccctataagggggtgtgatagtcagtagtcccgtgatctgtaagaaaaaaatactaggtaagttgtgcaatccgacacatcctgaggaaggtcaagtgtgatgattctaagactgtgtaggtatgtgactaaacagttgaagagggcttaaatggat

SEQ ID NO: 391635 - DNA, 1086 bp, Cannabis indica
tgggtcgacatttgagataggggattttgttggttttgtctttttggagcctttggacgactgtttgggagacgagtctgtagatgggataggaatagactttgtcttagactttttgacaggtggttgataagtggtatcacgcgatgattttcttttttgttgaaccctttctttgctttgggaaggtataaagaccttagagggaggatgaggtggtcctatggggttcaatttaggcaaagacgaaggctgaataggggacgcatgagactttaaactcgaagaggaacgagtgactctcttttaaacaagatgagtgtatgacgacggagaagaagcctttttagaaaggggaggggccttaccttgaaatgtgcgaggcttctgactgactggagtcggggatgacactcggcttggaaagcaaggagaatcatcaaaccccgactggtaagggacaatggctcgacatggattggccaatctagtcacgactgcaggttcgataggagtcattgatgaaaggatgagaatgcctccaagggacaccaccatcggagcaatattctccattatagacaaagatatttgagttcttcagtgattagggtttctaaagagtaaagtgaaagagcctattcacttttcttaggctttaagtagagaatactttgaaaaagtttgaccatgcaaagaaaaaaatgatatttatttaaaaaatttaactttgaaaaatgagatatacacgcccaaatagaacagttttcaccacacgttttggcacaaaaaccgaaacaaacacatagacatttggtattgtgagcataatgaactaacaactacaaatatgccagcaatataaaccaacagcccagacttgtcaactgagataagaaatataaacttagagatactcaaaatattttagaaaaaacaggacagtcaacatctgttcaataacaagaatggggccactgagcacaaataaaaaatgcaagacatgagaaacattttgaatcatattagtgttgcaaatattttaccaggatctagatttactaccaagtatgttttattaacatc

SEQ ID NO: 391636 - DNA, 637 bp, Cannabis indica
ttttttttttttagttttgattaagttggaatgtattttaaattcggtttgatattattctggttttcaatcgttaaatgaatttagccttgctcaaatgattatggagaccactaatgctattgctacccatgcaaaataaattcatatgtatatgtagaagtattttgactttaacaaaattatgaactttataatttaacaacttttgttgacacaaaaaattgtagacaaaaattgatttgtttagtgtattcaaacaactaagaatttagaaatttttaattttaaccaaaaaaagtaacaatattataaaagtacttccaaccgaccaaataaataaatatatagtccaaataaaaaattacacaaatatctcttacacacacctacaattcccgatccatgcttcttggaattaaaactaggattgaacatttcgaccaggtttggctcgaacccgaccaactcgtctggacccgacctggtcaacccgtaaaattaaaaaaaaaaaccccattctgttcgggcgggacatgtctaacccggtacactttcgggcgggttcacgggttggttttttatagtcaccgggttttgggttgaacccgaaaccgcccgccaacccggtcacttt

SEQ ID NO: 391637 - DNA, 1123 bp, Cannabis indica
catgggcctggcgcaccctccaaaaaaaaaaatgtaaaacagagtaagaaaaaatgaataagtataccaaagttgtgcaatgttaagcaagtagtgacatcaaatatcaacattatgctacctacttcaaaattagccatcctagaagaaactgaaatctaaagtaatctagggtctagtcagtttttaaaaggaaaacagtaacacgattataaaatataactctgacaacatgaaaaacaaataattggcctaaatatcaatgaagttaaaatagttaattgtttataaggaaaactgtattgcaaaagaaatgatacctgaaatgcattaatcatgaagaccaaataatttgttttctctgcgatacttagttcccttccctgcaaccacgattggaaataacaacttaatcattaatctcaaacaccaacatcaatcatttgcaatcttatatctgacttgtggctccttcaactaaaggttataacttgataaatttactaaatgtcaaaataaagtcaacttcaaatcaaactacattaagtgaccaagtaattatacatcctttacaaaggagggaaaaaaaccgactttcaaaaatatggaacaaacctccttaagacgaagaaccctctgaagaaaaccctgaaacacatctttccgatcataaaaacaaacccaagctgccacattttctcgaaactgcaagttgaaaagacaaataagtaatctgaccaaaatctttacgtattttatgaaaacctcaatacaaaggaaaagaagtattaagaacaattataccaatgcatcagtttaattttcggtgaaaaataaaatcaatataacagatatgtgcaaaccagtcaactgataatgtgaagaggagtggggcaataaacttggagtgtgtatggtaagaggtagatgtataaggaggatgaaacgcatagaccttacttgatgattagaatagagtgattgataggtaggaagaattttcttagggcagacattaggaaatgaatttcataaatttttttaaatttctatcctcccaacatttcacatttgagagattttaggtgtgagctgttcaatacagctaaaatatcctcatttc

SEQ ID NO: 391638 - DNA, 672 bp, Cannabis indica
ttactaattagccaaaaattaatgataaattacaatatcataactgaaatctatatcatgatttgggcttattgtattttccaattatcttaatcaaataactcaattgcctttcaatatatttttatttttaccacaactaattaaatatttttataaataaataataaactagaattattaggaaaatactgataacaaaaataaaaaaatcatttaattttatctgaatgacttatcaaatttagttacagtccaattaaattgaattaaattatatttattgattttacatagttaaataatttctatattttatttaaatttctgttttaagttaaacatataactattgactggatttttagccaatcgatgtggaatcataataaatgagatttaaactaaaatcgtaacaataaatataattaatgataccaaattttacaataaatgtaaataaagagactgaatttaaagaggttcagctccagttgtcggtaatagcttactccccttgtgttttattaatcagggatgcaaaagtcaagaacaggctcttaaatgcaaagaataaaagattatttttctctaagtgctcaaaattgcgaattcccctcccaagttatgagtgaccccttatataggggaaaaggtcggtgcttctcgctt

SEQ ID NO: 391639 - DNA, 1951 bp, Cannabis indica
aggtaaagcttataaagagtactatagttgtggtgcaaatattcataacaaaatataacatccgtttattttgtttcaatattgggcaaggcagatgatgatgtacaatcacaagcaagtaatgcaagaactatacaaaaccacatattgtaacagaaaactatagattccaatattgatcaaatgcatgtcttgctttcataataaattaaagtatctatacgtatttataaccaaatgtttcatgaaaagaagaaaaaaaaaagaattcatgattttgactcgaattcccttttccaattttatgcttcagttatgcaagaaactttaatgattatgaaaatatactcagacaagtttgaaactttaatgattatgaataagcagagaatttattcactttttctttttgtcttttgcttcaaaactacatatataccatagcttcataaggcataagaaaaccatatagtacgttatatagtactattaatttgtattattttacttggttgcgtgggaattctctgatttattggtaagtcgatcaattatttggctaaattattttgattttagtgtattctcacatcaaacatattgcaattatttatcgtctttactgaattaaaacagatacaaaatggagattactcaacagtacttttgtccccagcaacatgttttgttggttaaccatagtgagattggtaatgctaaccaaattacttgtcaaatatgcgagtcttctgttgtagctccattttatgtatgtgatacatgtaaatattatgttcacaagtcatgtaaaattaagaaaattaatcacccttttcatcctcgccaccctctatctcttaccccaaaaaatgctctttgcgattcttgtggccaatactctcgaaagagtttcatgttcagttgtattgaatgtcgtctatctttcgatgtggattgtgccttgatgtcaaactcatgtcctcaaggtcaaaaacattgcatccaacattctactcatcctcacttgttactacttgttgacacaaccgatactatttataaaaatattcatgttagatgctttgcatgtcaatctaaagattcaccatcagatgatcaagtttattatggttgtaatagatgtaaatattatcttcataaacaatgcattgaccaactcccacaacaaatccaaacattcgcccatcctaatcacgattgtctttcccttcgtacgacaaagttctacttgggtaaatgctttctttgtaaaagtaaagatccaagagccttttattacgaatgtcaacaatgtaattttcggttgtgtatggattgcaatgttattggagtcttaaaatataaataccatgatcatcttcttttctttgtcaagaaaatgtctcctgcatttgaacaatgcaatatttacaatacttgttttcagtcttcattcatgtccattaatgtttcgaacgaattccaaaaaactgagtctttcagattccattgttgtgattgtgatttcaagctccatttattatgtggtccactacctcgtatcataaagtacaaaggtcatgtgcactccttacttcttgttgattcattcattgaagattcttctggtgaatataactgcgatatttgcgaaacagaaagaaatccacgaattcgcatatattgttgtggcgactgcaaatattttgctcacgtgcattgtgtgatttctgaggtatgttatagtttatatatatgtaaatataaatattctttttagatatctatttttatttttgtattagttgtaagcaatgtacgtgcttaaattttatttttattttttttattttcatattaatttagaataaataaacaatctcatatatctattttatataaagtgtgtctatataactaaattcttggtttatgagaaattcatgggttt

SEQ ID NO: 391640 - DNA, 630 bp, Cannabis indica
ctcaacagaagactaaaaggaaataaaattttcttggattgggttgctctctttgctccattacacaaactccctcatccatctccatctcagcaaagcttcttgttcttctctggactctaactctccatcttctagtggggttggtcatgttgctgggtccatctctaagcttgggcctgagtattgcttgttggtccagcatcacttgggccgagtgctcatagaatggtctatcaacagttgtcaatgccatgaaagaaagaaaccataaacaaacaacttaaattttctccttctccacctggtaaatccttgagataaaattaatagggtcagatatccatcaattttctagaatttaaaagctaaaggacattgccataagagaatgagaaatatcctctagtattcctatttttgcatctaaactagctccaatcaacatttaatttcctacaattaaaaaaaaaaagaacattgttagtgggcagcaagcatttaacaccgtaagatctcatatgataagtattttgtaagtttttatttctattagactctcccctacggtgactacttagaaataaatttacagaatatgaaacaatggtggaagctcataaaatgaga

SEQ ID NO: 391641 - DNA, 1581 bp, Cannabis indica
ttaatgtattcatttatcttatagttgtcttctatatttctataatatattattcgttaattacttactttcagggcataaatcccaataatctcccacttgtactaaaagtaagtgtcgtatgttctataactcttatagatattacatctcattcgactattcagactaagtcttgtgaatgagaccctccacataatgtagctacattcccgaagaccaccacatcatcattggacaaatatacataatttaattcttgtatatttagtttattttttttattatttccttcaggtattcttttgattaatcatttaataatattttttttgatgaaccaggttgtatattcattaccccattaacaatttttgtacatcctataagcaccttcaaatagaaggccttaattttatctatacaaattgatatttataaaagatgaagccaatctatatcctcatgacttactttctttggcattacaagaattactctattttgactatccatttcagatgcatcagctcagaaggttgcatcctatttgaattccacatcaggtcatttctagcagcccaaatcaggtatactaaggctgctattccagttgattttacacatttcctaaacttggactgcttggttctccttatccactttagtagaccctgtagagtaccagcagtggtcttccacttgaaccatgctttgacctgcaataagaaatcttgagagaaaggacaactaaaaaagagatgctctcctgtctccttacattattgcagaatatgcaagaagatgaatttgcaaccttgaatctgaacatcctatctcgagtttttaatctgtttagcatagcaagccatatcatgaaactatgctttggtgtgttaagcctagaccaaacttcattacaccaattaactctttcttgaacctgatcaaacaagtaatatcctactgcaattttatattcattaacagtaaacacatcagtttgcacctgttgcttaaccttgtccttaatctctaccatgtttctccaataccagctgctttgggttatttgttaattgagagactttgtaaggtctaattactaaataagataaatgaaaattttatataataattaagtataattattatataaatagttttaacatttataggatttaaattagaaaatatagcattagtgaaagaaaagattaattatgaaataaagtgacaaaattttaactagtggaatccaccctgtgtgggccggccacttagtgtatttttgcctattattttatcttttttaatccatataatttaaatttgaaatactataaaaggaataatatggctctcattctcatccactttaataacctagttttcattatttgtcacacaactagaaaattgagagcctttttcatagtgattttaaattccttcttattgttttttatcaatgtcgagcctttagtgatagagtaccatgcccactcatatcaagtcaagtactcaatcatagtgtggaagactgtggttaaccaaactgaaggagagaagattcaagtt

SEQ ID NO: 391642 - DNA, 1239 bp, Cannabis indica
  modified_base (40)..(40): a, c, t, g, unknown or other
  modified_base (64)..(64): a, c, t, g, unknown or other
tattagattcatgatgatccaagtcaaattccttacgggngagccaagcgaatgcttaatcganacttacagaaaataaaactctacgggatatgggtacgaagttacaaatgagtctaaaattgattgggcacacagataacgggctggggtagggatcaggttgacgacataaaagagcacgttagggatatagccttcacagttgcatttttaaatattttcttgggcatcaaaaaaaacaagcaactgttgcacaatcatcaacgaaaagcagaatatattacagcagcaatgactacaagccaagctatatggcttaaaaaaaatactagaagatatggtagaatcacagaagtaggctacaaagatcttttgtgattgcaaattggctatagcaatggcaaagaatctcatatttcaaagctggacaaagcatataagcattaagtaccactttattagggaagcaaaaacaaacaataaaatagagcttaagcactgcaaggctgaagaccagttagcagatatatttactaaagcactaccaagaggaaagtttgaattattgtgagacatgatcggagttatcaaaatgtgtattaaggaggagtgatgaaaagtgctacatatttctacactttttttatctagaaaattctagtattaactatacaaagttaagaaaattagagaaaactagaattacctagaaattatatttgtaaactaagaaacttagaaaattctagaatttcttaaaaagttagattgtaattcaaaataataaaaaaaaaataatagaaacttgtagtatcaaccttagctctctataaataccaagcttaggttaagtggaagtgtaactaagaacaaccaacatttaaactatcaataaaacctattacttttttatacaatcagcttctaataagccaaaccattctctactatatacacagtcaactatcaagttatcaccatactaccatcatcatcatcatatactacactaatcactaaacacattacaaaaatttcacctaaacaaatcacaactatttacactattctaatttaacaaaccatataatcaaaatcaactcatatatttatatatgtgaatatattgaatctaactcctcctcgtcaaaaccataaaaattattcgtctttattaaaattaggataaatgctattttggaccctgtattttgtaaaagttaccgattggatcat

SEQ ID NO: 391643 - DNA, 686 bp, Cannabis indica
ggatttataaattactatgatatttgaggagaagagaaagaagaagagatgagttcaattaataaggtttcataatgattattattaagaaaaaaaaaagaaaagagaaaaagagagaagagatgatggaatggaatgaaatggatggaaagaggttgggggtttgggttgggttggccactttcacactcaagtgtagccaaacttcaaccaactttacttatttggacagcaaacactttcaattcaattcatacatacattatacatacatacatacattcacaataatcatctatcattttgacattttccattctttgtaatttttcagcaaattttaaaattaattcacaatactataaataaattacgtatacatttaaataactactatatacattattatataaaaataaaataaataaagaatatagaaatacccttttaaatttgtaactaaattaactctatttagttgaaagaaaatttagaagtagttgattatgtattacaaaaattgaattatcattaataagaaaaaaattagacaaagtgtattacatcatgatagagcaaaattaataaataggcaaattatgaaatgtactaaatcgtgccccctgaatttttttagccgttaaaaattctcctcgaactatgaagattgttaaatttaaggactt

SEQ ID NO: 391644 - DNA, 731 bp, Cannabis indica
ctttttcgtgactctacctaaacatttttcaaaaatagataactttatagtgaatattttaatatgatccttttctttcttttaattaaaatatccttaaattcctatgaacctcagtatttgaattgctgctatacacatgaatatatatactaaattatttggggtagtgatagtactaatgatttgagttagtttctgtatcttttcatgggtcttatcactatttttaaattgtgatatttgtagaattttgctttttgaattttttttataacataaagtttaaagattaacttcaaattcatagattgataagaaattttagatttactattaaactattatttatataataatttttagagtcttatatcatataactattttgaaaaatgttaatttatatttttgttctttgaattttgacgtctaccaaattatgttctctgagtttttcaagcctttataaattttttccgaactattaagattattggatttaaggatttttgtccaattatactgaacaaagtgtgatgtggatgaaaacttaagggacacaatttgtacttttgaaagatggggtgcataatttagtagatttcaaagtttggggaacagaatttagtacataacattgtggacatcttcttgcatagaataaatggtagagtactgagccatatataagaacatggactactctacttatcaccaattaattttga

SEQ ID NO: 391645 - DNA, 1714 bp, Cannabis indica
caggatagcttaatttggggtctaactaactctaatatctttactgttaagtctgcctatcatcttgcctcttccattgtccatacggcttcctcctcaaatccactttgtcttaagagttggtggtcatccttttggtctgcgaaaatcccatataaaatcaagcacttcatcttgagggcttataattacaatctccctgtggccactaattcgtattccaggaaagttctcaataatctagtttgttctagatgccacaatcgaatggaaactgtatctcatgcactgcttgactgttccacggtaagagaagtttggaagcttttatcaattcttccagattaataaaagacttgacattggaccgtttttgtaaaaaacttatgaagagtttagtagtgagaatttggaatctatttgtggtttgctttgggctatctggaagggcaaaaataataacttatatggaaaatctaatcttttgcctcagaatgtgtccagctatgtttcttcttatcttcaggaatataaggctgctaaccaacgaaggggcatgtggaacaaccttaatctaaaagctaattgggaggttacttggaacccgccaccaccaagaggtctgaagctgaatgtggatgctacaattgacaatcaaaaagtcatggttggcctggctggggttgttaagaatgataactagacagtcatagcaggttttcgcaaaaaaatcttaggtctcccaaacacaggcatagcggaagctcttgctatctatcatgcaatcatttggtgttctgctgtttgataggctacaaaagcctaggcttgataagtcttgtttatctaatgtgttcaagtgtgttaatacctctttggtcttgttccctaggatttccctttcttatgttcctagagaagctaaggcttgattggtttgagatttaaaaattatgttttctaaaagagtgttttggaaacaaaaatttaaattttggatgtgaaaaattgtttctaaaaatgtgattggttgtagtgtaatttgtgtttttgagttttaagaagttggatttgtgattggttgggaatttcaaaataaaaaagtaattagagagtatgttatagtgaaatttctctcacctagaaactcgagaccagactcttatttagaggacacgtgtactcagatttttcaatgaaagctgagtcgtttgtaagagactccttgaagtttaaacctcgcccaagatagaatcagcgagatactgcgagtatgacctaagtctgatcgcataactataactcgtattatgcgggataggagaatggatctaacttgcatatatcaggatatgtgcgagtatcctctctatattcctgcgtaagcatagagatcgattttttataatgcgagttggtcaacagccttgataagctgatatagactcgcatgtctaggttctatcagctcgtcatacgatgtccaaagaggcgactacataagaacgcagacatcctaaacgcaattaagtgttaggcccgcgagcttaacattagaatatgaacagtcaactcgcatgttagagggcgcatacgttgctgaatttagtaactgctattcatttattaatgtttacgttatttagtttagttattggaattcaatgtgtaaacggattgacataaatgcaatctttgtataactaattggaca

SEQ ID NO: 391646 - DNA, 1441 bp, Cannabis indica
agagagccttattccatttttttcttctcgaaacccaattcctccaaggtttttagggagacaaaccttttcctaagaagctcggtgaagcttactcctattcccagttgttccctaaagataatccaggtagctcttatcaatggcagtcgtaatctttgaaggaatgataaagatactcatccagaagttccttattccaagcaacaccgagtgaatcaattgagcatggcctgtaaaggataaatttctactagctcagaaattaaggttcttattcagttaccttccattttgttggccaaagattcaccccaaggtatttaagtggaaaacagccttcttcaattcggaagagatcaaggatcttggatttgacttcctcactaacccctccaaagtaaatatgagactttgaggtgttagcagacaatcctgtagcattgcaaaacttcttgaaagcttcataattaagcctcatcgaattataattccctttccaaaaaaataactagatcatcaacaaaacacaagttagtcaatctcagatacttgcataaaggatggaagccataaccctccttatctgcataaaagcttagcaaccttgtgaggtagtccataatcaaaacaaagagtaacggggacataggatccccttgccgaagaccctttttccccttgaagctaccttgaattttaccattcatcagcagatggtaagtggttccctttagacacgtcattatccacatgataaatctaacgggaaaacaaagcatccgaagtaaatcttctacaaactcccagtcagccgtatcataagccttgctgaaatcaattttcatgatgcatcttgtagagacattcttcctagtataacccttaagcagatcctagaaaatcataatgttatgggccagcagtctattcttaatgaatgcaccttggttatcactgacaatcgagggaagcagttctgaaagtctagaacagatcatcttcaaaatgaatttgtaaacagtgttacaacaggcaataggtttgtaatcctttgctgaagaaggattttcgattttgggaaccaaataaataacaatctcattcaatgcttttggcaatttgccattagcaaagaaatccaagaccactgttgaaacatcattaccaattttactccataaatccttgtagaatccagacccgaacccatccaatcctgggctcttagtagagtgaatgttgaaaagagctttcttgacatcccccttatgaaaaggcttaatcaaattagcttgtttcttcaaatccagacatttaccccgctttaagcaagccccatcaatcaagctagacgctaaacttttactgccaataatgttttcaaagtgcttgacaaagtgtttaaccacttcctcaaaatcatcaatgatagtgtccc

SEQ ID NO: 391647 - DNA, 1901 bp, Cannabis indica
tttttacgagtcaatatcgttatcggtctattgaagtatcggttctcatataatttaatataaaggtaaataacaccattttgtaagtggcataatcccaatgttatttttagcggcataaatacccaatgtttataaaactgtaatttttctctaatttcattcgtacaaaccctcttattttcttaaataggccacatataaggtctagattcttgatcattggatctagacagaaacatgtagtatcagttacttctaaatgttcttttaataaatttaaaacgaagtctgtactgacaaaactgaacaaaaattacagttttacaaacattggctacttatgccgctaaaaataaacattggatttatgccgctaacaaacttaaaactttgggtacttatgccgctattattcttaatataataatttttaggcagtattactagttaatttgcaaaacgacatgtctagaggtgttaggcattattggtgcccaataacaatactcttttaatttattgatgtaatgtaaaattacaaaaattactactaaaatatgtatggagagaccatctttgctagatgtatggaaaagataaattgtagtaaataattaaaaaatattgtactttttaggtaaatatttttattttaaaatttataggaaaaggactattttatattatttattaattaaattttatttatatacatcaataaaatgtgtaattttttgtagtgaaaagtcagaagcttcaaacaaatactctagaaaaagagatatgtaaaatttattttcaatgtagttgatccttaatatttataattttatgtgtaattaatttatttatttagataattgtaaactatatatttcaaactatttttattaattttcataatttactctattaattcttttcattaatttcataataatctctactacttcaatttttctatcaaggagtattcttttaatcaagttactttatattatgtgggaatcttttcatactaagaaaaatgaagaatttaataagtctagatatgaatttttatttatgataaagttgtataaattattctctttttagttttttgtcaattattttatactttatgtgtcatataatttgtttatattattatttttttttatttttttatttgtcaatcatgctatattaatatgccatgtaatttattttacaaaaaaatctaatacacttgacaaaaaaaaattagtttatatgtttaagaacctattgagtgagggttttgtgtacaaaatttgaagattgttggaataacaggtgagtaagtatagactactttcaaataactataaaattttatttttgactacaactttattgatgataagaaatagttaacataattccaatcaatggatttcaatgcgtaattctaaatttaattgatttatgtgttagtgataacacaatactatattatcattatagttgatataatactttctattatatctccttaattttctcttttttttttatttctattaagtttataaatatataatttgattaattatcttgctcattttttctatttgttttcttaaaaaaaaatttcgtacgtaacttttttttttcaagaaaaatttctatttgtttatggacggagcttcggcggggggcaacagcttggaagagcttccttgccagagaaaaattcatatctaaaaaaaattaaaaaaatcctttaacactcaataaatcagagtgtacgagatagaaagatatggcttcaaacctgaaataaaaaaccattcacttacaaaaagtttactgagttgggatagtggtgggagcttaggctaaagctgggagggtgatgatagcttgggttggag

SEQ ID NO: 391648 - DNA, 1141 bp, Cannabis indica
gaggcgccggcagagaaagaatttgggaaaagagtatatgagagagccaactaagaagtgtacttgtatttgtctgaagaccaagaacaagaacaagaacaagaacaaaagaaagaactttattatttttttggagtgaaaaaggagaacccaactcaacacaaatcttataacaaaataaaattcaaagtttcttcttttctttttctttattattattattattattaaaaaattagacaatgcacttcaatacaatgcagcctattgttttggaattttagagaattttttaatctaatttttaaaattaaaattttaagtaatttaaattaatttaagatgtcaaaaataaaattaaaatagtttctttcgcatgagtaaaataaaagagtgtaataaataattttttaacatattaatatttttttttaatttattaaaattttatagaatatcttaaaaaaactacaatataaaccatgaaaaaaaaattagacattattattattaagaaatgttttattttctttaattaattcataattttttaattaaaaaaaaaagaatcacataataaagatctcttccacactcctttagtagttttgacaattttggaaatgatgtgatagttataagagtcttataattcattttgtctaaattaggtcattggtatgcaactcatgaggattctcatcccattaaagatgtggtaccgccacatcaaggtagcctcccagagggtcaaacataatttctcccaataaggggttatggttagattcgaacccgtaacccaagcaaaaagaaagtaaagattttcctaccgctacactagtaaacacttaaaggcttcttttataattcatgtgtgtgtaaatgaaagtttttaatgatttttattatttgttaattttttttatgcagttagaacatcatggattaattgtgcatgctaatttatttagctactttttatttagcatatatgacattacaactaacatactccctaccctaagtaaaataggagatgtgctaaaaaaaaaaatccttcaatcatgaaaaaatgtatgaatgaaaaaggaggttcttatttttttttttctaaataattttatattattttaataat

SEQ ID NO: 391649 - DNA, 785 bp, Cannabis indica
agcttgtatatagctccgccccttctcagactcacgttctaagtttcactcacactcataagcattatagcaataagtcttctctgtcttctcataattctcacttgacaagcacattgtaatactgaagagagcctaactacaaattacaagatcttagcctgaaatttacttggtattatctcaagagtgaataaaactaaaactatagtagatattaactgaactaaagaggtcaaacctttataaatgtgtctcttacatttactatcattctcatgtaacaaccataagcaaaattcgatcctagtcggactccgtgttagctggctaaattcatagtcataacaactatgttaccttttttttgactaattagcactactacaaatttgggctttaatggtagtttttaaggtctttcagcgttggttttaataaaatttactaccgatgccaatccaggcgacgctatagggttgaaaacaatcgacgttaaatgttaccctatggcatcggttattatcaaaaaaaccgacgccatatgtgccctatgaaattggttatatacaaataaccgacgctatatatgcacatataaccgacgttgtattcctaaaaaatgatactaaatcattaataattattatttttagttaaaaacctatttctaatcaacaaatttaatttatttaaattatatatttattaatttatattaaatattatttaatttaaatttaaatcaactatttatttttttaaaagctaaattaaatattatt

SEQ ID NO: 391650 - DNA, 565 bp, Cannabis indica
aacttcctcatattaatataggaaaattgtattccaatatatttttctttttaggattgtattgcaatatttaaaaaaaaaaaaaaaaaaacaattgttatagggcgccaaaatacctagcaccattatgaggttgtgttctataactgattagtgattctctataatctttattaaattaaaataaatgagatctgatgttgaattgcactaacagcaatattaaattttacaagaatcctacgcatgcaccagtgacctttagcatttctctatttaaaattgtgaggttttaccttttcttttctcatgtaaaactctcaaggctgaacccaatccacaagaaatgttaaagggtatagagatgagaggaaattacactctatatcctttttatattgtcctcttttatttttaccctcttttttaaagtctatcatttttacctctttttttaaatattgtactaattttgtccctgtcacttcaagatactctttgtgtgactctcttatgtcagggtattttgggcacaatacatataaaaagaggtatgtttcaaata

SEQ ID NO: 391651 - DNA, 528 bp, Cannabis indica
gcatagtgcaagctctagaaagtcattcaagttatttccaaatgaggtttgatacaaccagtaaaagagggttgtctccactacagaagtgtactgctgctatgcgaatgttggcatacggagtacctgctgattacgttgatgagtatgttcgaattggtgaaactagtgctattgattgcctagtgaattttgttcggggagtgaatgagatttttgagaccgaatatttgagatgacccaatgttgatgacattcgtcgcttacttcaaatgggagaggtttgaggttttctaggtatgttaggaagcattgactgtatgcactgggaatggaaaaattgcctagtttcaagaaagggcaatttacatttggtgattatggtaccccaataatcatgcttgaaataattgcgtcacaagatgtgacagccagtagtcccgtgatccataaggggaaatatcgggtaagctgtacaatcccacatcgcttggggaaggtcaagtgggatgattctgagactgtgta

SEQ ID NO: 391652 - DNA, 661 bp, Cannabis indica
cggtttggatactaaattcctgtgcagagccctccctgttaggtcagtgatcagtagtaggtttcttattaaggattccagctgccccctttgtggtttggggaagaatcgttttgagcacttgtttctctcttgtgatgtggcttttcacttgtggcggtcctctccttggggtatttaccctgtttacaatacaagcattcatctttgggactgggtgaaattcatctgggatttgaaacacaagggtattaatgcggaggatgtttttctttatgcttcaatcgtggctgacaccatctggcgaacccgtaacgataaggttcacaataattgtctggttgatatgaagaaatgtattgactctatttgtacttcttttacagatttacaatcttctcttttctctcctcctactccttactgcatagaggcatggtcccccctctcctcaagactggattaagctgaactgtgatatcagagtggggatggatagcatgtgttcggcagttgtggctagggaccacctaggtcgggtgatccgaattcatacagaccggttggattttttcgatgcgttgtgtggagaagcggcgacctgttactcggctgtgatggtggcgctggacatcggtgccaagtttattattgtggagaa

SEQ ID NO: 391653 - DNA, 772 bp, Cannabis indica
ttgaatagtgatgtaagtcagtataaaaagatgattttcttttcatgctttgcagatattaacgttcgacaagccaacattacagctagacaactttaattttcaaaatttggaagaaatgccgatatctttttagacaaccaataaaatagataaatacatataatctcgaaaacttgactcaaaatgactgaggaggacaatactttttttgccgttaatgtatgatttataataggaaatttgattatttatgcatactaatataggagaaattaattccctaaatttatatttcaaaattttaaaaataagtcaaatttacatttaaccaaaaataacctctctcattttcaaacctcacttctctctctaacctctgttctctcctctctctctctctcgctcgatatcccttgaacatcccaaccgaaccaacgcaaaccaccccgcagacccacaaaattggacccatcaaaccccttaaacatccccaccaacccacgacgcaccaccactgacccacaatacccgggcgcacccccaaccaaattaaacacaatgtcaaaggtgagttcgtgttccgttttttagttttcagaatctcagatctgtgatttggacaaggtccgatggggctcgatagggtcgaatgaaactgtgagtttgcaaggtaggagacgtaggtctagggccggcctagggcctacacttttcgggggcccaaaataaaaaaaaaaattaattagacttttatttaagtaaaatttaa

SEQ ID NO: 391654 - DNA, 1305 bp, Cannabis indica
gaactaacaaacgaccccaaatactactaaaatagaaaacaacaacaaaataaaagacataaccatagactacctagtacaacgaacgaggaagagacactccaacacagacaacttacgacaacgtaaaggaaacgacgaccgaccacaaactacacagccaatctaattgatcatacaattaaaaaaatagataattacataaaatacttaatttttgttaaaattttctatttttatgttacaaagtattttttatatatatttttacggtgttcaaataaaaataacatataaaataacgaaaatgaacaattaattaacaagagtacaatataaaaatacattaaaaactcatattttctgtaaataaaataatttaaaattctataaaactatatttttattatttttatatatttgtaaaattatctcataaaaataattagcacataagtactcaaatctcctttattcttttttaaaagaaaaaaaaatctattttttctgaataataattaaatgataaattattacatatattttttttattagaataattttaaaattcaattgcaattgcttaaaataacatatagaagtttagaaggaacattttcctataaaagaaatactattatgtaatattatttaattaatttataatgttttgattgtatttctttccatttcacattttagtcaattaaataaataatataatacactttaaattttagtaaaggtgccatgatcaattctttttctctttttttggtagaatgtcatcatcatttaaaattagtacaaactttttttttttaacaaattcttattatcaaatgaattgcaccatcactgtaattatataattaaaaataattaagaaatttaaattatactctcaaatttagatgccctttacgagaattgggtgtaattatactatataattattcaaaaaaaatattttaaatattaagtattaaaaattataatttttttttgtgtaattactaactattttgtcaaacaaaatactaaaaattcataaataattaattacccactttgtattcaaacacgatttacattttaaaatatagtgtaattcatacactaataattatactacctaataattgcacactagaatacaaatttggattgggaatcatggtagtttgtaaataaataaataatgtagggctttttagataaatatatatattaaatttttgaaagcaattaattgggtagacgaaaagaaaaaagtagtaagttagcttacaagtaataactaac

SEQ ID NO: 391655 - DNA, 546 bp, Cannabis indica
ctccattttgagggttgctacagggtaccgttcatcacggactcattgattaacaaaacatcaaaattgaaccatcaattgctgatacacatacttttgtttaacattgaaattttttcacaactcatataaagattattatgtcaaactcatctataaattcaaactacgtacaaccatttcaaatttgtagctactgcaaaagagaaaaaataattaattaaaacttaaaaaagaatttgtagatcataagagtttgactacttctttgatgggtgaacaagggtagggacaatttattggaagatgtgggcatatatcctacttgtatgggtaggtcattcccctttaaattaggatttagggtagagtgaggatataaaaatatgtagtatagggtaggaaaatgagtataggtataccctgccttattaccctacctacgcaattacatatttatatatattactagtaaaaagctacatgcgaggcacgtatactaaattttatgctagttttttttttatgttatttgaaagtgataca

SEQ ID NO: 391656 - DNA, 1802 bp, Cannabis indica
aagttcaataagtcacatgttgtgttgattctgaaagtcagtaagcctgcgtttgtgaaggaataccagcctattagtctttgtagtgtgatgtataagattgtggctaaggcagtggcgttacggttgaaaggtactttgtctccgttgatttcatcgtttcagagtgcttttgtgcctggtagagctattcatgataatgttatggtggggtttgagttgctacattctctcttcaagaagaataatggagttcgggggtttatggtgttgaaattggatatgagtaaggcctatgatagagttgagtggtgctttttgcgtgccatcatgtccaagtttgggtttccttgccgttgggtggacttgattatggattgtgttacttcggctgagtatgcttttctggtaaatggtaggcttcagggttgtgtggttcctacgagagggttacgacatgggtgtcctctttcaccttatttatttctattctgtgctgaggcgctttcaacgcttcttcaacaggctgagctaaatggtgatttgatgggatttaggtgttctcgttctggtcctcgggtgtctcacctattttttgctgatgatagcttgatctttggtagagataatggtagggaggcggagtctattcgtcggattcttcagtgttatgagagggcttctggtcaacaagtcgatttagataaatctgcaatcacattcagcccgaatgttcagccagcagatcgtacaagtgtactgggtatattaggcttggggtcagtggccactcacgataagtatctgggattgccaaccgttattgggaagactaagaagcgtacgtttactagtatttgtgacaaggtccagaaacgggtgcggggttggaagcggagtttcttttcagctcggggccatgagattcttattaaggcagttttgtaagcggtttcgaattatcttatgagtatgtttcaattgcctgttgcgacgtgtgataagctgcgttcaatcattctccagttttggtgggttacaaagagtgacaagaagaagattgcttgggtgaaatgggatgatgtttgccagccgaaagtgaaagggggattaggatttaaggatctgatcttgtttaatcaagctatggttgctaagcaagtgtggcggttactccattcaccagacttgttgccaggtcgagtattgaagcataagtatttcccggagacgtcaacattggaggctaaggatcgccaaggttcattccatttgtggtcaagtttggtgtgggggttagagttgttgcggatggggatgcggaaggtggttggggatgttcatactattgatgtgtttcgtgatccttggattcctcggccgaggacattttgccctattacggtcgttccttcgggccatgtgatggttcatgagttaattggtgtggatggggcttggaatctccaaactttgtctcaaaatttcctacagctggatataaatgtcatccttggtattccgttggggagtggggtttgtggtgatcggtggtgctatcattataattctaatggttcttatactattaaaagtgggtatgcggtggctcttgatgtcatgggtgaaaggttaggctccttttcttgtaaccaagctcattggtggaatgggatgtggaatttaaaggtcccacagaaaatcaagatcttcatttagagaatgtatcatcggtagggatgcaccggcgggggggggggggggggaaattagcggggagtgctctgttggaaattatttta

SEQ ID NO: 391657 - DNA, 899 bp, Cannabis indica
cactactgtaataaagtattggatcccacatgttttaatttaataacgatagaatgtcgctagcaattcacaaggcgctactcgtggtgatgctagatacatctaatatcttaatcaataaagagaggttgctaaattttcttgagattctcactatcctcaggaccaacaactctcttccttagactattaggtgatatttggttggaaagaatgaatggaataaaatttaaaatacatacaaaaatttaataaaaaaaattattatattttttctcatattgcattggaataatctttctttctatttcaaaatgaaatagtcattgtatcataagacattctaatactaaatgcaaccaaacaataaaatgaaataaaaattatttcctttccatttcattacctccaaccaaacgcaatactttgcattccaattgaatccacatcccaagccatgtggcaggatgagaattgttaagattgctgcaaaagctgctgcttgacagcttagtagctttcaacagtcttggccaattgttcatttgtctctcttaccaaacaaccatttttgcttttcttacctgggttaccttgttagagatatctcatttcactactttcctaaattggcaatagtgatgctcactccttggtaaaattagtagtgttgatgaaggatcactatgtgtggttgaacactctttttgtattcattgttgatccaacagtggagcaacaaatttggctctcttttggggtgtttgaggatcttcgaaggagttgaaaatggggtatggggaaagatgaaattctgagtggggggtggctacatggttattttaatcgaaaggttttgaggggctatcttttcaagatttaaccagaaaatggagtct

SEQ ID NO: 391658 - DNA, 1484 bp, Cannabis indica
  modified_base (1409)..(1409): a, c, t, g, unknown or other
aaaaaaaaaaaaaaaatcactcatcaagagtttaaatattttttagtttttattaattaatttgagtagaagtgttattttagtgagtctgtttttatgttattttgtattgtaaaataatactttacgaatatgatattttttgagcatttttaacaatatcaagtttattcttattctagcatttttaatttttgatgttttagccctgattagaaaaggaccaaatcactccaaagacgccttcagcatctagggatcgcggatcgatcgtagaaccctactaaaaaagtggaacactttagctatctgctttcaggttaggcagtcaaggtcggagaatgtatcactttaaaaatttaaactatttgtttaattaatacaaattgtcactcaaatttagtattccaaagataaaacattataagtttctaaaaataaaaaatattttcaattatttatgaaaacatatcaatacaaaagaatctttttttttttggacatatgacagataatattaggacgtttgactcataaatgtgaaataaaatgtgaattgaatatggtaaaatcttataatagaatcatatatttaatgtttacataattttagcattggtttagtcaaaatggaccaaacaaaagaaaaaaaaaaccagaggctaaactcccaacccaactgcgcccacagaccctttattttaaaccattttgtctatttaatctcattctcacgcgcttcacgctccaaaaaatatgctattttttaatcttccaaatccaaacttcttacgtgtactacacgtcccatgaatctttcatttccacgtcagcactgtcttcgtgtttcttggcttataaaaaagtcaacaaatgactcttgtgtgttgtaatggtagagattgtttggattcaaaatttactataatcttttttgaaaggaattaaaagctaggattagtttgcttagcactactacttagaagtgatgatttgtaattggttaatgatattttataataataattaaattaacttatatgagacataatatttaattatattaatagtagtgttaaatattattggaaaattttacaatgcacagccttaaaatggatatattgatgcacccctatctgttttagtatccaaaataattttttagtcaaattttttcacatggtcatgtacgttatagttatttaagacatcctgcaaaattttaagtaatttggaaaaatttaatatgccgaaaattatgttcaaacagtgtgttgtacgcgtgactattttattttatacgcgtgtaaaatagattgtttgaacattattttctatattgtaaattattctgaattttttaaaattttgtaggatatcttaaatagctataacgtacatgaatntaaaaaaaaaattagactaaaaaatttttctagatgccgaaacaagttaagggtgcaccaatacatcccttttaa

SEQ ID NO: 391659 - DNA, 893 bp, Cannabis indica
tggaggggggtggtggtcgggcggcttgggctagtgggcgtcgtgggggatttccaagtggcggtggccgagcttatggctctccgagcgggtcttgtttgggctaacaggctggggttcactttggtgcgtgtggagacggattcttcaattgttagttcttggattaattgtccggataatattcttatgtttaagccaattgttgaggagattatttctcttttagcggctgttggtggtggttcttgttgtgccatttcgcgtgatgcgaatggtgtggcccatgcactagctaagtctgttactagtcctttaggagttcagttgtggacagatgcttgtcctatatttattggtcctcctgtaacagctgatttgctttaattgaatgacattctttctttcaaaaaaaaagaaaagaaagttcttgctaacatacaaatttagccacggatctgaaattgatatttgtttttttattcatatatataccctttgctataattgttgttattttaaaaaataaaataaaattgtcccccattatttttttcttctagaaaaatacaaaaatatattctctcatattttcttcctaccacattattaacgtgtaaatttggtttcttgtttatttgtcctaagtaaacaggtttaattagtttttaaggatttgtttaattaatataagttcaatagtttaatatatgtttttatatataaaaaacaagactataatgtttatattcaaaagtccaaactgagctgacatataaaatagtcctaaatttaaaagttaagttgataaataatatttttttaaaaaaaaaaaattaacaaaatgaacaaatataattaactaatacaaattataaaaatacatttattat

SEQ ID NO: 391660 - DNA, 578 bp, Cannabis indica
aaaaaaatcgtttttatgatagataagaataattagacttctgtgttattacatattaagtttgtagaaatggttgataacggaataacactaaaactctgatgaacaaatacctatttaactatattataggcgataaagttacaagatctactaatattagtaaaaatacaactaataaataagtgagaagaagaatctctatgtaagattctgaaaaatgtaaaaagaaaaaaaaactgctttaaagtataaaaataaaaaaaattcttcttcttcttattattattattattattattattattatatcttttacaggttgaagtgatggtatgtacaactcattaatttgtatccacacacaacaaggtctttataaaaaattaagaatggaactttaagaccatctctaatatgagatgtaaaaattgtgttatatttgacacaaaatataattttgtggtaaatttatatcaaattttaactttgtgcttcaatgtacaattacaaaattttaatgtaaaatttaatatctaattaatgttttattaaaaaaaaattaataactttataat

SEQ ID NO: 391661 - DNA, 1614 bp, Cannabis indica
tagttatgacttaacaaactcctttaaatagaatatccacattagcacaagaaacgtgttttcggatgagacatacgctttcgggactaaagaccaaagcccatgctaaagagacttctcagataggaaaaacacaactggagtcgactatccaggactccctaccaggagggagcagctagccaccctgaaactcctttttggaggaagactagctttccttgagaatcattctgccgatagacatccgggaacacccttccggatggtacctatcattccacgagacatctttcgtgatggacatgttagacttctggggcacctttctagatgtcatctaacttttcataaccagaataacttttgaagatcttttcattggaaggaactgagccacataaatgttatcctaaaaattatatttgctcgctaccattagatttatgattattgattacatttccaaatatttaaaccaaatataaatcgtttcttattttgaaattatattctcataaataaatttatttatatgaaagaaaatttggtttatttcttctaaataactaagggctagtttggtatagttgtgatgtaggaaaaagcagttgtaactgtgctgtgagaaaaagcaaatataactgtgctgtgggaaaaagcagatgtagtagaattgtgcaaaaaagctgacctgagtgtttggtaaattataaattttaaagtgttgcgagttgttaagattctattataataatgataatattttaatctagttcattataatcacaaatatatatatataaaagaatatgttatataaattttttaattattttttccatagtataaatttatatgcatttgataaaaataatttgttaatatttctaacacttgtaaaaaaaaaaagtgtaatttataagaaacttaggttaatattgtttgttaatactaaaaatataaatataaatattaaatattttttaaaacaaaataacaaaataaaaaatttaaatattatttattttaaataatttttttaaaaggtatattttttattttttggtaatatataataaatataattaaataaataatgtttgagtagattttttttctgctttttctctctagcctattaacttttgaagctcttgccatggcgaagactaggtcgaaggggttgggaaaacaacaatctagagttaagaaagtgaggaagaaagggccagactctgctagggatgtacggaaaacaaaatcaatggataaggtactgagaatagagtcagctttgttctcggatgatgaagacgaagcacatcaagaacatttggggtcaacatctgatccaatgcttcttgatgtcttccaacctccattatccccaaaatcatctctaagagtaattgaacaacatgaagatgctaggaaggacttcgagaggtttctcgctgcaaatgaccaatgtaacagtgatttgttgcaaggtaagaatctgaagcctccaattttaagatccagaactgtgattaggagactagagacttcttttactagtactaaaaagtctaccaaggttaaaataaccatggaagacattgaagatga

SEQ ID NO: 391662 - DNA, 1280 bp, Cannabis indica
atcactacaaccttccatgtttccgaatttttaacacatttaattaacaaccatgaaatgataccaaaaattagaatttcacatttaatttatatataatatttcatagcatcatattaatctaattatatttattgaaaagattaatgtactgcaaaatcaatctaccttacaactggggtgcctttaacaattatttaaccaattactaatctcaatttttaatttaaaaattcctaaaataaattacaaaatagcaaatataaccaaaatacggcttaatttaacccatgaataagatttaatgaaacgacaaaaaattcctataaaaaaattcctaaacaagaggtaaacaaaaatccttatgcaagaggcaaatacatattacatttattttacgtctaaccagctaatatttactacaaaaagaaagatttacgtttgctaccaccttaagtaatgacacaacaacacatggaaattataaataacccccacttttacgctccacctgagcccccaccacgaacctacccattcaccattgcacctcaacaccgttacaagaattatcgactatgggaggtaaaatctcgcacctctaactaaccttccaaccaatcaccatctggcatgtcaagaaaactaaggggcccttaacaacactaagtgttggacaataccgaagaaaatcccttatataaataaaagactgtgaaagacaaggaatattttccccaaaattaaatagactaccactcttaactaacatttttactctctttatgaatatgtccaatgttctcacaagagagccattagttgtttgttggtattaattacacgggaggtttatattattcatatggtaaattcccttctaagaatgcataattatatctcaaattatgctagaaccaatcaactaaaactttggcatgcatggtgtaacgtacgatctaagatggcacgatacaagctaagtaatgcccacaaggtggccaaggggtggtcaagtggtggtgcatgttagtggcatgttgatgctcagtttgtttggcaatgatatttttgtaaatatcttcaatattgtctagatcgggactggacttggtattcaccatttatttggatctatgaatacaatggtgcaatcagatttgagaaattatgtgatttagtatatggtgatgaccatatgtctaaagagtaaaaatcatatatgctcctggtggaaggctaaaagcttagaatgctctttaaggggggagtacctggtg

SEQ ID NO: 391663 - DNA, 1229 bp, Cannabis indica
gtggtgtgtgcttcgtgtaagagtttgctcgaggatggagtcagcacctcactactagaaatatagtgtgtatcttcagttttttatgatacaaaacataaaaggcaaagataagagtatggataaaaagaaagaaaaattttgcggatttatatctttgattatttgaaataacaaaagacataggtcatggaggcatttatcttcggttgttttgacaaccaaagaagtatgagtatctatatcttggattatcaaatacacgtggagggctatgtcttcaattatattgaaataactgataacatagatctataaaattctaatttcagatcttaaagtctcatttcttctttcttttccatcttttctctcaacaaaaaagtgtcactcccatctctcttatacctccattttctccatacaccatcatttccccctcatttttgttttaatcttctagttctctcacccaacatatatacactataaaaattaatttattataggatatgagggtagatatgtgagtttaagccgatagtttttaggtttcaagatgttgtcttttaacttgcattgaggtatacatcactttattatataccttagcttacattggatttttttagtgagtataatatagggttggatattgcggtggtggtaggaaaatccacagtaattgttggaaaatcaatggcgatgctccaaaatatagtggtgttaaatggtgttgattaaaaaataatgttgtttaagaatttttattttcgggttttttaagtttggggctcaacggcggcagtgttaacgatggcttcgagttaggtcccccattcatcttctatgttttcgggacctatgtcttcgcctcaattatcttcgatagggaaaacttttttaaccgaagataaacaaacttaaaatgcaaagagaaagcctatttgtctagcattgcctcttggctttggcatgtagttggtgaagcaacaagattttgttaggccttgagggtttggaggtttttctcaatccttggggtattgggatggggttggtggaggtgtatgtttgactctatcggatcatggatttggcttgcaagactaggttccatagtaatttttatgtctgccctccctcgcttgaggtagtgggatgtgttggaatatattttactaggatttagatttactaacaagtatgtttttaacatcctaaacatg

SEQ ID NO: 391664 - DNA, 1385 bp, Cannabis indica
tatcattgtatcctgtaagggagaagcccttttagcgcatcctcaacttgtctcttgaagacaaagcttctagaaggttttcaaagcttaaatatctccaagattagagtagatacttgattttatgtaacttattaaatgctaaaatgcggggtaaatgtaacattcccccgaattgtggggcaattagtaacaaatcctatgcctatataagcataaatctagggaagggtctatgatctgttctgattccacgatggcgtctctctatcttcttatctttctatctctctttctattttcatgttttcacatactctattccccagaaacacttcgtcctttgctcactataaaagaattaggtatgttgacattttcttctaaaatcaatcacatagagacacttaaagagatcttattaaagatctttctcgttgtaatccactcaagcacactcttgagaatgtaactctagtgtgtttgagtcgtgatcaatataaaataacaaatagatgtagatccattaccattacgatatggggagtgaactactacaaatcgttatttcttgtttcttacagattatttttgacaaccgttgtctcagcccagtccacttttttattataatttttttaaatgtggttgataaaaaactgcgtcaacatatactatgtataattcttacatgtgttacatattttattagtttatatacaatgtatatatataaatttaaaagttttttatgaaataaattgaaaaaagaagttagaggatatgataaaatttacgataactaattatctccttaggataaccacttactctatattattttttcataaaatggctttttctaaaaaatttcatatttttacacatttttacaagaaaaaccactaaaatgaagagcccattgagctcttgtactcctatacaaaaaggggtatttacatatatttaggaacaataaaggtagtttacattaggactgtacatcagtcggtttgggcggtttatcctatatattttctaacctaatctaaagttcggggtgctaaaatttaagtgcaagccgctcaatttaaaaaaaaaaaattgtaaaccgaccaacggtttgggcggtttggtcgagttaactcgcccaaaccggcaaaacttttttttttagttttctaaagtcaataaaaattaaaaagaataaattaaaaataatcaaattcaaccaaaacataacataatatatatatatatgactttgaaactaacaattaagtatataattttatattattaaatatttaatcatttatgttatatataatgaaaactaaaaagaaaaaaaaaaaaccaaaagtacgggttaggtcggtttaatt

SEQ ID NO: 391665 - DNA, 784 bp, Cannabis indica
acaacagactgattcagttgatagcaggtaagtgtatgttaaataattttttttcgaagcataatcattttttttattttgtggaaaccaatttctatgttttttatttgttattaaataacacctattttctatcattgttgtttgtaattgtaacgaaatgcatgaaatttattatatgttttatataaaaatttaaaattttagcttgaatttagatgaaacgaaatcaatttttttgatactgtaccttatctatcttcgaatgtttcccttagttttgtgaagaaccattcccaagagcagtcatatcctgagtttcctatcccaaatgctagattgaatatgctgttgtttgcatccatagtagaagtagtgaatagagttcctccaaatgatgtgtttaaaaatatttcgtcggctacaatgactggcttgtaatgtttccaacctactattgagtttgaaaatgctagatacaaatatttgaaacgatctttcttatctgtttccaattgtgcaattattttaggatttgctacttttagcatgtgtaggtattttggtagttgttgataagattcatctttccttcctcttactaactccaaagttttttctcttgctctccatgctttttgatagctcattgcaactccaaaatcaccaatcatatctatcataatgtcatttggtctatgatctcttttgattgacagaattttttttatcatttctgcaatcatgttgcggtttgcctgcttgtggtctcccattacaatat

SEQ ID NO: 391666 - DNA, 970 bp, Cannabis indica
agacatcctaacaatctctaataataagtagtgttaaattttttgtctatctctttttattaaatataatttatcatatttgatataatgatttttcctttttgattgaatgatgtaatattatatattatttaatatttattcattttttttttgagtaattgtgttttcgtaacactttaaactttaaactgtgattaagtgactttaaactttgattgagaatgtgtataaaattttcatttcaatcttaatagatttttatttaaaatgaaaaaaaaaaaataatacaatttttttcaacctagtaatacaacatgacatattatatattgacattttgtatgtgatataacttttgtcttgattaataattatcttttaccgaaaaaaataatatatatacccatttgcatatataggttaacgtaatttacttaaataataaagaaccatatatatatttttttatgtatttttctttttctaattactctatgatgctttatttttaatttattttaaaataagaataataatgatggttgaatataaaaataaatgagagtatataaaaaaaaaaaaactcccaattatatataaaaaaaaattggttcaatttaatttaatttattttgactatattatatgtaagatacaaactacatatataaatatattatttttttttttattatttataattacttattttgatagagggatccaaatctcattgttccttttagtagtaattttttcttaatgcaaaaattgtaaatcatggaaggtcatatttaaattttaaaataaaaataataatgatgcttgcatataagaataaaaaaagagtataaaagagaaaaacttaccaataaataaatgattggttcactttaatttgttttaaatatggtggtgtttggtaacacttgtttaatcagttttttgtttttaaaattagaaaagt

SEQ ID NO: 391667 - DNA, 869 bp, Cannabis indica
aaaataatttccaacagaacaggacttggtgctcaacataaaagttttagatctcattcttagctttctgaaacttcttgaatcgtccaaatctaagcaatataaagagagttataaccaaaatactattagtcgttgcaacaggaaatttctgaaaagaaataggcctaaaggggtgagtcctcgtcaggttccaaatttttgggattagcaccaaatttgtagcattaactccctgatacattgaactcgaattgaagaagtccctgattgctgtgcaaaaatcctcaccattgtctaccaataatgattgaggaaaatggctgataattcatcttggcctggcgctttattgttacccatattggaaagggttttacaaatttcatcactatttggttgtttgatgaggtcttcctggtccttaagggatagatgtcgggtattagatagccacaactaagcattggatcgttgttacttttactgaaaaatcccattaaagaactcaataaattattttccaatccacccctgtgaatggagccaggtgtcacttttatgcagaatgctttcaatggcattactctcctgctaagagtagctgagagaaagaaaatttttgaacatttatttccctctttatgccagaagatacgtgtaacaccctaactaacttaggcatgttagcgtaatttttaacgtgctgtgcaacccgttgctaatcaacaagattaacgaaaatgtgattaattaaattttcttatttaattagaaacataaagtaatatatttataaaatatcgggatcccgtttacaaaatatatttaaaaaagtttgctatccatatacaaaagttttgtcgcct

SEQ ID NO: 391668 - DNA, 510 bp, Cannabis indica
tcatcagggattatgatcggtgagggcttggaggtcattgggctacgtctatcggggctgggggacaatcggggctgtgggccaatgttggggcctaggattggcaaggaaaccgaaaaagagagagtatgagaaagagatcaagtgtgagggagagaaagaaagagtggcaggtgagtagggtaatgtgagtttgtgtaatatttaaggttaggattttgttttagggatgtagcatgagctttggcctatttaacatttgtaaatttttattttagttttagttgcactggttttttactaaaggaaaagctaaaaatgttggtttttaatcgacccaaagtagtgttcgtcactcaactgaaaaaagtttaaactggtatttttattttagctttagatattgattgacatgttgaccgacacaaactaaacattttgtagtagtgtgaacgtgaaattcttttcatttggaacaatatctaaaagttcactacaaaaaatcttact

SEQ ID NO: 391669 - DNA, 860 bp, Cannabis indica
gcaaatgcttggacaaatgtggttttggagtcggattgcttaatagtcattagagatattcaaaagtctaaacatatggcctcgccttatggtcatataatttctgaatgtttgactctatgttcggatattgtgggtgtttcttttaattttgtaaaacgatctgctaataaggttgcgcatgttctggcgcgatcttctcttgttgaggctgattgtactttgtctggggatgctttacctatggtagttgcatctttggttttagatgatttgatttaataaaattcaccattattacaaaaaaaaaaaaaaactataattagaatttagaagggtcatttaggtgaaataatatacatgagctttaaaatttcaaaagaagaaacgtttaaatttttcattaatataatgcccttaagggagcttaattttttctttttctttttatcttttaaggaaagtgataatcaaaatgaccttgttatctttaatgcctaacaatttctttagtattattattacacccatcaaaataaagtagtgttcggcactaggagtcacttacagcaatactcagtttgaaaggatgtggagtttattttagacatgaattataagtacattgattactgtttgtttgtttagtgaaattgatattaaataatgggctaccttgattagtattgctgatgggctaatttgaaactaattgcttgttttggataactgtaactttcgataatggcctactatgacttttaatacaaatgaatattttcataaatatccaaaaagacaaaacatttataaaaatatggatctattttatatactaatagatgttacgtgccaagtca

SEQ ID NO: 391670 - DNA, 1319 bp, Cannabis indica
gttactttttttacaacttaagaaatctttaactcttgaaactatgtggctcctacttagttggattagaaacattacaagtttgtgagttgtacctttctattttctttttcttttttttttcttgtttcaataaaaacaaagatagttaacattatctactatacaaaagacattttaacaaaatttgttttaataactactaactataattattgttttttttttttttttgatgaatactaactataccatttgttcaccgagtttttaaatttatattcggtccgtttactcttgttgctcttcagtagtgtttctgtatttttctcaaaaaaaaaaaaacaaaaaagatagttcacatagctcctctagcaaaatagtgggcttaattttttaaaagataattacataaaatactattgtttttaatttttacatttttatgtttaaatatttttttatatatttttacggtattttataaaaataacaaaaaaaattatataattgtattataaaaataacaataaattagcaagaaaaattgtattttctataaataaaattataaaattaataaaaatatttaaaattctataaaactgtattttcgtaattagtttaagccttctaaattataaatgaatatacataatacgttttatagttcgatgtaatcaacttattaaaaaaaatatctttttttcccttacaataaatttcatttatatttatttgtaatgattaagagcattcctatatcaatttattcgtaataactaaaaaaataatattaattatactcatccatttaatcataataattaaatttaaatggttataaaatatattaattgaaatctatctatattaaactcaatgtagagtacatcaaaataaaagctgatcatgataaatttattatataagattttcagaaaatatatattatataagagtacgtataattatgttatttattataatgaagaaacaaaattcaaagcttaatttgtctatgaaaacaaaatccaaagcctaatttatttatttattaagagaagtagttttgtaacgtgagatgtgttagagattttataacaatggaagaaaatcaagatttattacaactctattgtaaaataatacaaggactaaaataacagattgattaaatatatgttacaatatatatatacactatatatattacatatatatatgaaaggtagaagagaagattacaacacatgtaatataatatatatatatataacaagagaataatatatataaacactcactcacaaccttga

SEQ ID NO: 391671 - DNA, 935 bp, Cannabis indica
ttagttattaattttgttatttctatgttttacttcatattttattaaattatagtttgaatcctctgttatgagaaaatctgattttggtcaacatgatttaaaaataatatcatttttttttgccattagattattaatttttttttggaggaacattagattattagattactaagatatcattttgattatttttgtcaaatccgagatctaaaattaatttaacaaattataggatctaagcatgtgaattctatttttttgtggcatcttttcaatcaaacgcatgttctagcccaataaaaaaaatataccagattatataattggtcaaaatacagggattaaattgtattattcaaatttattattaattatatatcttaattagaggaatttacagcaaaatcgtcttatgttttaattttatacatttaattttttattcttttttttttagcagaacctcctcaaatttacttttcattgtaaatttaaggtgtcagttagatattactgttaaattctaactggattactactgtatcgattttgaggttttactgttacatatacataggtgtatacagtggtcatccagttgatatctaacggtaatatttaactggcgtgtcaaatttataaagaaaaataaacttaaaggagtttcgccacaaaaaaaaaataaaaattaagtgtataagattaaaacataagaaagtttttgccgcaaattgctctcttaattattatatgaagtatttattagaataattcaatgtatttggtaacctgcagaataacagccaatcacaatgctttcttccaaggcttaaaattgtcatcctcatcaatttccacagcaatggtaaatttgatgcctgcaatcacttttgttatggcaagcttgattgggtaaattacttttcaat

SEQ ID NO: 391672 - DNA, 863 bp, Cannabis indica
tatatatatctatatatatatacgtgtataatattatgatgtatagatatacaaaaatatatgatttcttgtttaaagaagaaataaaaaacaattcttcttcttaatgggtggtaaagcagctatggactcgtatctttgactaataataactattattattattattattattaattattaatattattcaggagaagactccattaaaccacatctcttttctcatccaaagataagacccaaagagaaaaagagaggcctgcaattaagtatatttaaaaggatcttaaaagcaaaataaaaataaaataagggcacatacttaaagaaatatataagtatattttataaatatttgcctttttaataaataagttgagctagcttttaattaattacttgcagaactgacaaaaaaaaaatatagaggatggataaaaattaacgaggtagaaataaaaaaggctactaatataaggtgaggctagtctcaaagttagcttatagccaaatttaaaactgatgtcacgaaatttacattttttgtaattaggtaagatattattttttttgtaaaatatatatatttttaagttaaaagaatgtttatttatatttttacggcttttcaagaaataatacgaaaacaacataaaatcaacaaaaaaactacataaaagtaacatgaaaataataacaaaaaataacatactattaaaaaatcaacaataatttaacaagattataacattaaaagatcgtattttttgtaaataaaatcaaaaaaatcgtaaaaatgtttaaaattccgtgaaactgtatttttgtaattttttttgttatttttatgtttttgtgaa

SEQ ID NO: 391673 - DNA, 1367 bp, Cannabis indica
ctattgttgattgacttgttgaaactttgatccacttggtgtttggagttcaaaaatagttttgattgtgttcctgaaaaagagtaatgagaaagaaacaagaagaataaagtaattatcggctaatggttatggtatcaatttttctgacttaaatttgcaattattggaatacgtttctctactttttaaaattctattagtacttaaaaaaccaaaacttaaggtgaatacaaaaagcaaaagaacaaaagttaaaagaaaggaaaaaaagaaagaaggattttctctggttttggctaataattgtttccattgtaaggattatgtgaatttgatgaataatatcactatattattattattacttctcatgttataagtagttttattattttttttaaaagtacaattaacagctttcaaaatgaataaacagtgatgcaatcaatagctgagctgctttaaatgattgtttggcagattgttagagattattccctttgtaatatttttactgagagaaggaatagagaggaaatttaagttgtaaaccagagagattgctgttgaatcttggtacgtagtcgttttcaataagcatactcaaacagtcaaactacctaatggagctgactattttgacaatttttctctgttactaaattaacatatcttcgcttctttatttctatgttaataactctactccttttttttaaaaaaaaaaattacatgtagaagataatttagaaataaaaataaataatttttcaatttttattacatgtattcaaccccataaattttttgtcttgcttgtctatcaaaataccaatttaagtgtgtagtgcatatcttctcaataatatatattaggctatttagcatttttgatcttatggtgctttttgaattttttagtctttcttaaactatttaattttcttaattattaattaatttttttaaaaaaattaaataattattattctttaatgttaaattatacctgtggtgttaatatggcaattgactaaacagccatgtcatcagtttgcttgtcacgtgcgacaaaacttgacaaaatgacttttacaattctatgaataatttagcgactattgttaatgagttgaaaagttgaggagcacaagggtattcattggattacattcaatatttttagacttatctaaatccgattcaattatatattagttacattttaccatgcaatctgatctaattcatttcaatcatccactagatacaacatccattggatgttgtattggatcagttgtatccattgaatgtattttatgtatatttattggattaattcattgttatctaatatttta

SEQ ID NO: 391674 - DNA, 1476 bp, Cannabis indica
attcagaagtaataaagtattttagtgggattgtactacttattataagaatatgattttaaagaaaaccatattgctctttataacaacaattaatatttttaaatcaaatcatgatctctagtagaattaaacaatgaatgagatttattgaaatacaagatatactaataaaggtttgaatctccaattaatttaaattagtgattgttctgacatgtagaacatctaagcctgatgagaaacaaattaatagaaaagttactactttctaattttgaactttagagtcttaatatgattattcaataatcatgcattaatagtctcatcaaatattcaatacactaagatgatactgagtatagaattttaataagtaagaaaatttaaccttattaaaatgatattgattactataatcaataagggtatgtgagttagttcagacaaattataatatttagatttaaatttcgatgagattgaattcaaataatataataaaatagtaattattatatattagatattcttggagaatatagtaattgatatctataataattaattgctaataaatagtattactaaatatagatttaataatacaaatatagaaattggggatgtcattaaagtactaaataatatatttaaaagatattcaacgtatgagatacaaaatttttgaatatcataattgtttaactgttaaaaattagagtacttgtataatgagattaaacaagtaataaatttcaaatcataaaacaatcttaattaaaatgatcaaagacagtgggtaaatgaagaactattttaattgagtgggggtattaaatatggtgggagtatatttaaaagatcattcaagaggtgaatctattttaaaaaaaaaaaattattagaattgatgattaaaagaaataattaattgaagaaaagacacattataatatcgtttgagaagcgagaaataaatattcttattaattatgtaatcttaaataaaagaatcacttaaatgtgacaaggatgagaaataaaatcgatcattccaaacatccgacttgattagccatgagatttattgagttcattaattatcttaattaatataatcaattagatgtgactaatagagggttctagattaatcaattttaaaactcagttttgaatagacatatatttagtattaagaatattaaatgattaatcaaacaaaatgaacttgaaggaaataaaagcaatgaatatactaaatatatactagaattaaattctacatatttatctaataatgatgtgatggtctttgagatctaaaactacattatgtagagggtctcgttaatatgacttagcctgaacaatcgaatgagatacagcatctataagagttatagaataagctgcacttacttttagtgaaagtgagagattattgagatttatgccctaaaagcaagt

SEQ ID NO: 391675 - DNA, 645 bp, Cannabis indica
gtcaatatctaaaattataattggtgacaggtaataaataaaagtgggttattatgggctctactgtagtgactaaaaacttttgtaaaattgggtgtatccgtggaacttctaaattattataaaaaagaaatttataatacacccccttaaaaagaatacaccaatacatctatctgttttagaacctgttggaaaattatagtggcataagattctaccatagactcaaaaggaaaagtaagtttatttgtataactgaaaacaagaaagatgcataacaaaagattatgtaacaagtttatctaaagtcaacaaataatcaaattgtattatgagttggctaaaggttaaaagcccacaaactttctgaattcttgaaaacaaatattcaaagactcaaggtgtcatctcacaattaacaccatgtgttggagtgcttccttgaatgtctccaagcattgcgtgactcttgccacttgtaatctaagggcccgtttggtacgcaggactggattggagtagacaggctaatttgtccaatccagtatttgggcatgttacaagtctggataactaatccagttaacgtcatctgtctgagattatttatcccatccaggagggtgggataaataatcccat

SEQ ID NO: 391676 - DNA, 1078 bp, Cannabis indica
aaaatggccccagctcgctgttgtgatcaatagaactaagcttctgtcgagacatccccagatacaacaattaaagacatgtttaaatacacgatcattttgactcagtaaaagtgagaaaatcacagctgtatgattttaaaataataatcctagttacactatgtgatatgtaatctaaccccatgattttaggggatgattgttgtaaacagattaaagtgaactttgtaattaactgcccactctataattataaatagtggcaagcaagatcaaaaaatggacggaaaaactcatacaaaaggggccctgagaaaaaaatcaaaaatctgaataagattgactcgtggactatgcagaattttaactacaaaaccacgtaaacaaactctgtgttcatacttttacttttatagctttatttttttcctgtgtgagattgtcacggttaggctcaaatttggttaacaaaaatctgcgttaacaccgttgccttgcctgccactgttatttgaccccttcccgttcgaatttaagttgctatgatactatggactttaagcgggtgctcctgccgaggttgtactttgttggcttttcttttttccgatagtatccacacgttgaacaacttcctcgagcttaataaatccatcagctcaatctaaaaattctaccatggtccccaccgttagcctcatgatatctttccacagatctcctagttgtttaatgctccccaatatggaaaccagccttccttcctcggttaaccccttaacttttgtagcttctatcatgaatctgcttatgtaagccctgagggttctcctggtgtctgttttacctcaacaaggtcttctagatgcaaggagagttaacgggaggaggaaaactatgcgtggaattctgaggagaaaggattccacgaattaaactgtcttggaggcaatttgaactaccactgttgggcagcttctgcaagcgtagcagggaatcttctatatcttgcatcacctcgtaccccctacaaatccatttgtatctcaaagtatttaagatgtgacaagggatc

SEQ ID NO: 391677 - DNA, 1016 bp, Cannabis indica
taatccctacattgtctatcattatcctaccaaacatggacaggacctgccacgtaatcccttggttgtccactattatcctgccaaacatggataggacctgcccagttatctcttggacactgagttccctctaggacatagggacctctgccgacaaggatcccttatgagggagggatcttcaacttaagatccaactgtctcattaaacgacctgattaggtcgttagcctccctattctagcgtctcagctccacctattgggttcagaggactgtggcttgtcaatccatccattcctggaattcacatctctattaggtaaaatcgttgcccatggcagcgcatgtctcttgttggtcatggtacaggacattagtatgaccctatacattccctacagcctctcttagcatggaaagttttgtatcatcccccatatccatgtggggttcgtcaatgctaaggtcgccaacccctggtcaactctcacaagcatagacatgaggtcccactcctgtgccaagaattttagttgtgggctagacggagggtccaacagagactttctctcctggccatactatagtggaagctccgggctactggtcaaaatgtggcgactggccagcccctcttggactggtcaccacgggtggcacttcgatatttttctctgtggccatagggtctcgtgatttgctcaaatttccacgtattgtgatagccatgctgaaaaataaaagcttcttgaatgagaattttggcctctcaatgaaagcacaaaaatgttgactgtggatatagccaaccaatgtggagtctgactaggatggtagcctatgattgccacgtgtggagcttacacgaaaagtgttggaaattattttaccaggatcttagatctactcacaagtctgttgattaacaccctaaatatcactaagtatttcgaaatcttaaggaagaagagagagagggagtgggcggccagatagagagagagaggctc

SEQ ID NO: 391678 - DNA, 577 bp, Cannabis indica
tatcatattacacttaaaaattaatgttaaaagcaataggagtgtttatataattgtaatttgtgttttaaacctcaactaattcaaaccatattatttgaaatcgagttaaatgaattagatgtaaataatttggttaatttagaccgttaaaattctctaatttggtcacgaccaaatcattctatataattattttattaatacttaatatatatttttttttggacgaaatgttgatgtatgagaataattttattaggttgaatattgatattgacttattgttatgataaattttttttattattatttattatgtatttatttgttatgttttgcatagaattctctttattgaaattatttaatattgtctatatttgatcataattgattgaaatcatcattgattaatatcttagtataagttatcatttttaattcatttctttataaatcaatgtattttggctattgaaaaaaaagaaaactataaacctatttaagcttccacttttaaacttttcattaaaataaaatgccaaaataaaaattttaaaaatttattgtcata

SEQ ID NO: 391679 - DNA, 588 bp, Cannabis indica
aatagcatgataaaagctagtaagaaaaaatctgacaaagaaattttcaatcagataaaaaaaatggaaaattgacgtgttgtcagttgtgtcacttcactccaaaagaaaaaacttttatttcggtatacgtaacatagagttattacaaaatactcgatattctttcatataaataaagtaaagcatattttcataaataatttaaaatatgcgtattcctatgtaattttctcaaaaaaaaaatgtgtgtatgagtatttttttaaaaaattattaaaatataaaaaatataaaattaatttaaataaaaattaatagacattatttatttttgaatggagtttgattaataatcggacggagaaaatagaggctaagacaataataaaattatggcccttcatagttaaataaaaagatatttactctatttattattttttaatttgtttttctaaatttacgctttgaatttctaaagtggttgcagcgttagttacaataagagtttctatacgagtttttgttgcaatttagattgcagcgctagttgtaataaaattttttatgtaaaattccataaaa

SEQ ID NO: 391680 - DNA, 993 bp, Cannabis indica
gttggaaacataaaataacaatactttgttttattttgtcgctagttagtgggaaaaaaaaatattttttcataaatattaaataatttaatattgaaaagtaactaatctaaaataactgatctaattcgcacttttgcggattgaatttgattgaatttgagctattgtgcggagtggattggatccaaaatataaaatttagtgcagatcgaatgcactatgaacaaaatagtgcggattgaattggattggatgaacactaataaataagctctatctattggtgacatcacataaccccatagcttaagcattgtttctatggaaacccactccactttaactaacaaagctttaagcatagtttccatagctttatatttcatccatcatttcttgccgtgccttctcgtcttaatagaatagggaacttcaaagggcacatggtattatcagtgttatagtaaaattactctcacctagaaactcgagaccagaccgagaaaagttgagatgtcaatgagagactcctcgagtttaaatctcgcctgagctagaatcagcgagatgatgcgaatatgaccaaagtctaatcgcattcgtgtgactcgcatcatgtaggactaaagaacggatttaattcgcatgtaccaggatacgtgcgactaccctctcgatcctcctgcgaaagcatagagattgactctctatgatgcgagctagtctcgatgacccaacgacctcgataaaccaatatagactcgcatgtctaggttctatcagctcgttatacaatgtccgtaagtgcgactatacaagaacgcatacatcctagacttaactaaatgttaggtatacccttagcccacgagcttacaccagaatataaacagccaactcgaacattagaagtcgcatacgttgctgtatttagtgaatagaaactgttattcatttattgatgtttacgttttagtttaattactgtaa

SEQ ID NO: 391681 - DNA, 1257 bp, Cannabis indica
ttcacatactactcgaacattttccagttcctcaagtatatctttcgtggtacgcaacacactagccagatatcccatacatccttctcgcaataattccttggtcgtaggtgccgatatcattggaattcgagatccctaaacttttcccataaaaacaaatggggtctcaccctgtggttcaaaagttactgtcttcctcttacaatctatggtagcattgtacttagtcaaccaatccattcccaggattgcatcaaaatcttctaagtctaattcaatcagatccactgacaattctctcccttatactaacattgggagagaccttacccacctcctggagattaccacttctccaataggtaacaaggtaccaaatccactagaattgatatcacatggtctactgaatttctcaatgattctactagaaatatatgaatgtgtggcactagaatcaaacaaaatagtaaacataatatgaccaatagatatctcacctgtaacagacaaagggccagctttagcatctggttgggttaaaccctagcaggaaccataggactctctttcttagtctcacgcttttgtaactgtgggcagttgttcttgaaatggcctgcagctccacattggtagcaaactctaggccagaattcacccgagtgatgtctcttgcattttgagcattcaggataaggctgccaaaccttatttttgcctcgacaaaaaccctagttaccttaaaaaattttgttttgacccacaaccggtggtccatatagtttcctctttcggtcattagggctaaaacttttattactcactccaatacccgatgaggtcttccgcatgcccttcctctgggtacactttttacgaatcaggctttcaacccctttagcattgagagctaagtccagagtctgaggataagtcttcacgacccatgattgtttgactgccataatcacatctctagcaatatattcttcaaggcctcttataaacttagcctttcttgcatcatcactgaccacttcatcagaagaaaacttggccagcctatcaaacgtggtagcatattcagtcgcagtcatgctaccctgaactaatcgtgcaactcttcagcctaagcagcataaatagattcattatagtgtttctcataaaatagttccctgaatgcatccaaagtcatagtattcagattatgaccttgggaaacaatctcccaccatatccgggcatcat

SEQ ID NO: 391682 - DNA, 713 bp, Cannabis indica
gtaatgaaaattaatatcatatgtatgctcgtatagtctttatttactaataaataaataaatatggaaaaaatattaaaagaaaggagcaaataaataggagaaaaaaatggtaaaaaaatgtaaaaaagatttaaaaaaaaatagtttaaaagagaaaatttagttaaaaaaatgagagagatttattaagaaaaaggaaaaaaaaatatgaggcctaaaaatggtaaaaatattaataattggtacaaacaaaacaaaatacacaattcaaaacaaaaaaaaaaaaaaaactacaaattactaagaatcttatttagtttgagaaaatataaagagcatactatattaaaaccttacttaaacggtgcacaacaaataaaaataataaatattattttttttatttactattttgccacttattaatataattaatcactagctttttatattttatttatatatttaatagaattttatatacttttaataaaaattaattaatgcttttgctgacattgttgtacctatctatcaaaaaacttatatatttggcgcaattttgaccaaatatattttgactcaatttttagttcaaattaaacaccatccattaaagataaaaaaatactaagagaggtgttaaacatcataaatggtggcaccgttattggtgcattttaatactacaaattttaatttagtgaata

SEQ ID NO: 391683 - DNA, 620 bp, Cannabis indica
aaatataataagtttagaattatacctattattctaaattttgtccacctcacgtgacatgtctacataagtcaagacagaggacacgtggagcacaatcttgccaatagcaagacaaagtctccttacaaagcatgacaaaactgtcaagtagtaatcgaaaggagttaagtgagccgtcaaggagttgtactaccatatcttgttagccaaggggagcatataggccacccaagatgagcttatatggccgcccagggcttgggcagaagctagctggccagcagttgactttcaaaacaagggagggtccgttcgaccaaggaagcctgacctctgtaaggaaaaggtgtacaaaggttttcctccacctacaaaggctggcatccacctccaaaggttggccatcccatgcaaagacctggtcaactcttgacaaagctgacaggaacatgacctgccagaccctatctagagcatggctggctagacctcaacctgcaagcattgtatggccggccaacctgcatcctgcaggtgcatggttggccagattttccctagcaggacattgatgtgcagccctcaatgtggacaacaagccaagctgtgagttgggc

SEQ ID NO: 391684 - DNA, 794 bp, Cannabis indica
ttttcaaaactaaatgaaaagtttacatgaagaaatttcaattatgagagatttattttattctataggtatactctttaaatttcatatgttcaccaccatttgagaaaattctttatggttgtctgtatgccttctcctctaattcactattttggaattgattaatgaattgaaatgagagcaacaaaagccaagtttactataatagaatcttttattaaaacaagtgagaaagtaaattttttttggtgctatgaattgtttctcgaacattgtctacaaattcttccaattacgacttgatctaggagataatcttttccaccaattctctgcggactttgacagagttaatgaaaaccaaaggtactttgttccattactagtttttgctacctgcatcattaggctgtacttggatagatggtccctaaggttcattcctgctttatacaattcaatttgaagcattctgaagtgctccaaaaactatgcatctgttatagtgagaatttttcacctaaaaacttgagaccaggctcctataataatgacacatggactcactctcctcgaggagggctgagatgtcagtgagagacctcttgagtgcaagcctcgcctgaagcagatttagcgggatgatgtgaccttgacagtgtctagtcgcattcgagtagctcgcatggagcaggaccgaagatcggtttaagactcgcatataccaagatatatcactactagaaaaagtatattttgcaacaattatttagtaacattaaaaaaaaaaa

SEQ ID NO: 391685 - DNA, 691 bp, Cannabis indica
cctacgctgaacggatctcctctcccatcttcatcatatgatcgttaccgcttcggatttttcaaaggggaatgcgtggccattgcttactcgattggctaggaattctataactgcaactcttccacggattaatcatcgaccgcctgcccatccacaacctctactgattggtgaaggctctaatgctcgggtagttacccctccatacggcccaaatcatgctacaacaaataaaccaaaatatggctgcttctactatttttacccctggtgttttgacaaattcttcccttatttctactacttcagtcaaaacaaccactttttcctcatcatctactgatcctattcacactccatcagcctcttcctctttgcttgttacatctgctacacacattgatgtttatatacctgatattggaattcattctacaaatatcccaactacacaaattcatctaccctttgctacttatccatccactgattccatttccaataacttgaccacgtcttgcctatgccatttattccaaactccacttccaccactcaaccaattatatctggttgctgtcatgcacaaggcctggttgatcaagaaaaatgtcaatcctaatcgtagagttaaaaggcagaaggaatcaaaatcatgttaggttttatgccctaaataaaactcttt

SEQ ID NO: 391686 - DNA, 1546 bp, Cannabis indica
gaaataactgctattgtgatccccctctttcaaccagaattgttttgcccgttgcttccagaaactctccctttgatcgaaagcatcatatagttttttcttgatttcggcatgtctttggactgagacagtatccctcaaactatgaagcttcttcaaatccgccttatagcttttaatacgatgatttaaagaaccagtaatctccttcccccaaatagacaacttttcagcacacatattaattttgctttgaatattaacatgttgatcctgggcccaaacatcacgcacaatctcaagacaatatggctcttttaaccaagaattctcaaaacgaaagcgacgactaggaataaaattattccccacaaccggttataggaataaaggtgagtggtccgaagtagcaaaacccagattataaagacaagccgattgaaataattgattccaagaagtagacacaagggctctatcaagacgtaactcaatccacgcattcgtcgctcttcctttttcccaagtgtattgatgaccttgcaactcgagatcatctaatccacaatgaagcaatgtttgctgaaaacccgttaacaaccattgaggataagggcgccctcccctcttatcttcttgacgaacaatgttgttaatgtctccaataacacaccaaggaagtgaagaccggtcctttagactttggaggagtgtccatgaatcgcttcttctatttctgttgggctctccataaaaaccagtgagaagccatgtcggagaagtaggtgataaagagacttgcaaatctatgtgatttttagaaaaacacaacaaagagcctgaatcctcatttttccatagcattgcaataccacccgaagccccaatagcatcaaccacaaatacaccatcaaaattcaaagtttgggccaagcccacaacttttgatttaggacacttcgtttcacacaaaaagacaaaatcgggtttcttttgaaaaacaatttccttaaggaattgaatagtccattggttcccaagcccccggcaattccagcttagaacattcataatgcttggcgggcctggaaaccaacacccgcctctcccaagttttttgaattttcgtattgggctccattatcattgtatgttgcaagtgaaaggtccatattattttcttccccattaggactacttgtctcacggcccagctccatgtggtgactgtcacttagcccattatctttttctaggcccattctcctccttttattattaacaaaagtcaatccagtattcaaatcacaatcagttacctcttgtacaactttctctttttctttccctaaaaccagggattgctcatcattaaatgctcctccatttactttgtcaactctccccatagctggtgcctccatagtatcacgagaatcatggaagagtaatgggggaaatcgattttcagcaatcacaaaattgtaacgccctgtccaacatggacgccacgtgtgtgcaatttatttaaaataccaataattat

SEQ ID NO: 391687 - DNA, 849 bp, Cannabis indica
agagagagagagagggtgcgagaaggagatggtgttgtagagaaatgaaggaaaaaaatttctaagtgtggataaaagaccgttaagtgaggaattaaatgacaaggtgtgcacgtggaaaggttcaaaacagagtacggccacgccttcagcgtggcctggtgatgagagggtacaagtagtgaagaaacttcatctgcagcttctgacatcccaacaacgtgtactctacaaccactacccctgcaactcaggaccacctgacaccgataatggtacaaggcacaagaccacctcatgcacctgcaatccgcagccccttaaggtcggcttgtcccttggggatcacaagtgtatctcaggccattagagcctataaataccccattctcaaatttgaaaggggattggaaaatcattgtaatatttcaccttaagaaatacaagcatctcatctccatttttttgtttctctgacacttctcaaagttttcatattttcatttttgttttaagtcttgtatttgagttttaatttttggctttaagtttgttgatgagtttttaccatcaacagcttggcaccgttgtgagaacgacaagctcaagctttgttgtttccttacttaccgttgctacaagatctctagacattctcgccgtcttcaggacgtcgagatttacctagatgacactcaactgatcgcctccagaaaagagccaccggcacccatggttgaagaagttggccagaacagttgaatacctcaggcaagaggagatagcaaccgtcgtgaaaagaatccgatgaacacgcgccaagatggaataactgttgggtttgtgccc

SEQ ID NO: 391688 - DNA, 555 bp, Cannabis indica
attgtactcacaatcatgacaccaacttcagctatgcctgcaagaacattatcaaactgtattagccaatgtgtgaattgggtttagttcttgttagttgatgatttatgtgtttgatgaaacagaagcaaaaaaaagcagtaaattaaattctgctatctaatatttcttattagtaacattggtgagaagttttggcacctaatttctacatcctatcgttggctctcactcggattgatgatatggcattcttaagtctgttattttagttagttgaccattgtaactaacagatcactcaagattcatcctaactgaattaaccaactcagttaggtggcgtttggttgagaggaatgagaatataaaaataagaatgtaaatgaggataagaataggaatggaataaattaaaatacataaaaatttaatttttctcatcatgcattggaatggtctttccatcaaattcaaaataaaatagtcattccaccaaatggtgaaagaccattccattagaatgacattccaatactttaatatgcaacaaaa

SEQ ID NO: 391689 - DNA, 998 bp, Cannabis indica
ttatttttctttaaataaaaaattcttttacacatattcaggtggataaccattattgattgaataagttcataattgatacatgggtaaatctgatgaagtttgtcacttgggatgaaatcctttcactttctgtttttccagagatgatttataatgacccatatcattgattcacttgccgacacaatagtaaaaaaatgacacataacacaattagcttattattagtgaggactatcattactctaattatcaaactaaacgagcagcaaacacgaactacttaatttttagtaagatctccctcgttaattagaaagtgttgttatcacttcagaacggtttaaaattcactagactagtgtcacaactagactaactaactaattagacaattacaactagtgttcatgagaatgtgagagtgtctaacatgtttgtttacaaagccctagcttgtctttttggtgaaacgtctaatttttgtattttaatttttcacaaaattggaccaaagattttaatgcaaaatggaccatgatttgactttacctttatggtgttgtatgtatcagctatttataagctgtctgtttaataacctatatacttgatgtgtgtatatagtatatttacttatccatatatttatgtataaattgttcttcttctttatatagtttctttctttataattaaaactccaacaccattgtgatgattgattatataggtatgtgaactaagaggtcatttttattgtatacatgtttcattccatatattagattattgttgaaatttacatatgattcttgatgggaagtttggcttgacaagaaagatatcatatgacattaaggacttccaattcataaaaagctcttctcgaaagagtataaacatatagtgcatgtttgacattataactaaaaaactgtttttttttttaaaaacagaaaattgtttttggaaacaatttggcttgtttggct

SEQ ID NO: 391690 - DNA, 1825 bp, Cannabis indica
tggacccaacccagttactctacaaaaagaagtcagtttcactagctaaaatggtagtactactaaaaaaaaaaaaaaaaaaaaaaaaacaaaatacgcaatatagcgcgaggaaatgggaacaccacctcaatgcattcaagaaccaactatggagtttgggtgctccgatttgaatctctggcaagaagccctatctgcttatccttcccgcatacaatctctcaacaaaccccatttggtttcgctagatgactattaccgcaacgaactcccacctctcctccaccaacgaaaacctaatccttacatcaccacctccgagctctcaaagctcatgcagtggaaacttacccgtggaaaatggaggtactctctttccctctttctctctttctataggtatactatatatatatatatatatatatataaagttgtgtgtataaatcgaattcataggccgcgtctgttggattttgtttcgggtttggacgatgacctggtaaaatcagcatcggaaaaggggtttcaatctctccccaatgtatcgaaagctctatctgagcttacggtgctcaaaggcgtgggtccagccacggcttctgcaatccttgcagcttacgcccctgatgttgcgccattcatgtcagatgaggtcaggttcatattctggttgggtttgtttgttacctctttgtttatttatttaatttcatatcatataaacatggtgttggtaataaaaaaaaaggctatggaggcagctttgggaaactctaaagattactcggcgaagcaatatctgttgtttgcaaataaattacagaccaaagcaaaggtcagtgaacaaattaattctttatctacgggtcaatgctgcatagttgatgagctaggtattttgttcgtggccatatgaaagaatgatttttatgattcaaaattcgaactagttacgaagacttattttttaagtagaaccatttatgtgtgtgattgaggcttatgattcaaatttgtagaaagtgcaatcctcctgtataagtggtaaaaaggggtaaatttagttgccaacttatgaatacttaatggaggatgaggcatgttgacatgttgtatgacttgaagttctaatcttacaaatacaatcataattaataatttgtaggttcatcttaattcaatttaggatgagtacatgagaattgacatgtatactaatgagtaatgaactaataacaacacacaggagttgagttcaggagaagagagcttcacaccatcagacgtggaaagagctttatggagctctgttgtagcggaaaagatgctatcttcacagtcaaagtctaatgaaagtaaaactttaagacaaaagagaaagcgttaattttgtaattccatttgctgacttcaacttttataaatttgaactcttaggtggtttaatgcttctttctgtttttttgccaaaacagtggttcaccaactgagtttaattttagtgagatgtatttttaaaaacaatggttcaaaatgttagtgatttatttattttttttgatagttaaatgttagtgattatatatataatttgctttggggaattatgtgtcttgccccatcggtgggaacaaatctaatggtctattgtattcttgatagagttttggtctaccgctgtattttatattttattttgggggaattatttaatatattattttatattgattttggttgtgatttaagatttttttctaacttgctatgtagattttggtaaaaatacaaaaaaaaaattattttaaagtaaaaaaaa

SEQ ID NO: 391691 - DNA, 730 bp, Cannabis indica
tttaactctccaattacaagccacaataatatagaaccacataggagacatgatcttatagaatcaagaaattaaagagcttgtaatctaataaaaaaatagagttaacgaaagttcttgatgtgatattctgtacaggaagtttgtgaactgaaaaattaaactcttctctccacataggattttttgaaccaggaaccatttaactacatcagcaaaattagactcctctccacacataggatttcttgaaccaggaaccatttaactgcatcaacaacaaatagacaattactatatgcaaagatagtagagtaaaagaattttgtatttttactcatgcacatttctagtaatatgatattccatatagcttcttataaaatcttagccttatattggttctaaaacacacttgaaaaaaataaaaagtgcccacaaagtaacttgaatatttctatttgttaacactctttgttatccatgtttccagatgagtgacacgtggtattttagaggagtgttcagttcgcatattaccccagggccggccttgaaaatttatgggcccaagacgaattaaattttggggccctcaaaaatatatcaaaaaaagagtgtcatgggatttgaacacatgaccttggacattatgtcctccacctcaaccaactaagctataaatatttattgtttatgttacacttaaattttacttaaataaaagcct

SEQ ID NO: 391692 - DNA, 1710 bp, Cannabis indica
gtaccaaatatgtaatttttgtaaatttgaggtacaaattcatcattctctaaaacaaagggtaccaactaccaagtatgtattttgataaaacacaaggtactaaataagtatttacctaagacaaaataccaaaggaagttgatttattaatagcaactaatataattagaataaggataaaattgtctttataatcatcacaccattaaaaaatgagaaaaaattgtctttataattatcacaccattatgtgattttttttttaaagaaacttttattagacaaaactaaacctgaggagacaaatatactttaacacaaacaaatgcacaatcaagaaaatccccaattcaaacttggttacaaccaatagagaaggctaatttagcaagctactttattaaaatcttttttaacataaataaaaagaacaaaccaaaaagctacttctatgcgacttggtactataatttcagttcaggacttatataacatggagacattccaatttgagaatacaagggacaaggtggaaactatgggcaagacgaatacctatatgaattgcaaggctttcagctaactcgacagaaaaatgacccctacaatattgaatctcagtagtcaaaacggactccgttgtgtcacgaatcacagtgttgatcccacatcgatccctttagattggcacactagcatcactgggaagcaaggcttgcttttgaagctctgggtcagcccacttcaaccaattttcccgagtgttggtgtagatatgcaacctttttttttattgtgtttgttccagttgagccaagagagaatagcaaattaaaggaacatgtacttgggcagcctattgaaaaatggcttatgatctccatggggtctgaatggaactcggggaggaagtgccgaaaggaaaactttttccaaattttcaagacaattgggaagaatcaaagggcatgaggaattgatttaatatgggacctacaccaacaacaatggccatcaatcttcattccacgatgagttaagaccttgtcagttgggagccaaccttggaaaatttgccaaatgaagttccaaactttaggaggaacttctaactttcaaagagtgtcaccactgcttcatgctccatctgatctacagaggagctgcccggagcattgggagagtgagaagccacatgatacccactcttaaaattatagtcgccttgaggatggtagcgctaaattaaatcgtcatcagccatggaagcataagggaccaaccctaaaactaaaggaatatcattatcatagaatgtgttagctataagaactttgttctaggtgccatctttattttttagagtatttacagtctgattcggggctactccagtagaaatacaaagagcagaggtgcgaggtcgagagagccagttgtcttcattaatcctcacacctcttcctgacttgattctccaacaaattcctttgattattaatgtaacgccctaacgctaaggcacgcgcgctacaatgattttttaattacagtgctatttttgctaatcaaagaactttcttgagaatcgtgtcaaattagaacttttattttaattatgaaactttataaactttacataattatttacaaaagtcggaatccctttctaaactttttacaaaatattccaaaatacatatgtca

SEQ ID NO: 391693 - DNA, 573 bp, Cannabis indica
catattaaaatacacaaacggaattgggcaatttggtcagctagaaacgatttaatatggcagcagcatgttcgatctgttcgggatgtggttgtgttcgctaactcgagacttgatcaatacctcaaagcccaaggaagggggaatatccctttgctgtcaccacttaaagcaggtgatggttcggagcattggattaaaccggtttcaggtatcaagctcaatgttgatgcagccactttcgatcgagattttaaacatggttacgggtgtgtggtgaggagctcgaatggggagttgacttcaatttttgtcggcttcaacaatggaaaagtctcagccgaactagctgaaattatgggtattagagaggctctaagttggctcaagtgcaacaattacacacgggcagtcattgaatcagacagattggtctgtgtagaggcaattcgaagtgcagaaaacattgcttctagttttggtttagttgtggaggagtgcaaaaagatgttcaaaagtttgtcaaatgttttgctattttttgttaagcgttctgcgaattgtgctgcgcat

SEQ ID NO: 391694 - DNA, 527 bp, Cannabis indica
aaccctaactcagaagaagaagaagcgtaccaaaggtagcgatcagcgtgaattcttctttaactcaaattggactataaataaaggaacaaaagttttgtggcaaagatgaaagctggaaaattcagaatcgaataaagaaaattttgagaatattagatttgagcccttaaaatcgattcggtgatagaaccgcaccaccatgcccaactccactcggagattctgaatggggttttatttgtagcagcaaaagcaatgggaaagggaggtggtgcgatcattttcgaagtctgaagctgaaagggcagagaacagaattaacaacactcggaattgtggcgcgagaattacactccaataacggcctccgacgtgtggtgttgtggacccatattttcaagcatttaaataagagattatttcacaaaaacataccaacaacaaaaaaaaaaaacattataaaaatacggtttcacagaattttaaatatttttacgatttttttaattttatttatagaaaat

SEQ ID NO: 391695 - DNA, 793 bp, Cannabis indica
tttttttttttaaaaaaagggaacacattatttttctctttctcatcaaaagtgtccactttaaaatcatttttgtacaaaagtttcatctttcactcaaacatggaaccaagtgttcaagaacaaaggctgcaacaactcgaaaaggcggcctcggcgaccatggagatagcgaaagtttcaagctctataaaggagaaagaagatgttggtgttgatgatgatgatgataacaaaggatattgtactccaaagggtaagagacataggatacctgagttgttatcttgtccaccacctccaaataagaagagaaggctagtactacctaataataattcaacttcatcaagttgtatattcaagaaaagatcatctcccatggcttttttttcttcccctgatcttgaacacttcttcttttttgcttttaggaatagtagtagtagtagttgctagagagtgtttgagatttgagctgaagaggtttttgtactatactcatattaatatatatatatagtagattattagttaatctcatactatagtttaattactttgttaacttttagtacttataattagcaagtttgttctagaaattattgtaatattatcaagggtttctgattatgatgaaagccatgtttctgtgtttttctatgtttttttttctcttctccattactataacatctgaatttatttatatataaatatttatggaatgtgttaaaattaaaatccatgcagtaagatcaatattgactttattttgaatttgtatgaa

SEQ ID NO: 391696 - DNA, 605 bp, Cannabis indica
gctagaacagtcttgattagctcagttttgattacaatacaggcttactggagtcagattataatacttccaaagaagataatcaggggtatagaagccatctgtagagctttcctttggaaaggtcaagcaatgtatcatggggatggttcaattgattggagtatcatatgtactccaaaagcatctggtggataggaataaagagactagaagaatggaacaaagcagctatgtgtaagtacatttgggcaatagaaaatagacaagaaagtctatggatgaaatggatacatagtgtacctaaagaagggagattggtggagtcactctgcttctatccattccatttggcattggaagaagcttgtgactctaaaaaatcagataaagggcctaactgttgtacacgaatttactgctttgaaatactctattgcagcaggttataagcttctcagcccttcaatgaacaagttacaatggagtaatgaagtttgggctcggctaaatgttatgccctaaataaaattctatttcaatgtaatctctatcatttaaatatcaataaagagaaagaagtattttcatcacttatttaatgt

SEQ ID NO: 391697 - DNA, 1218 bp, Cannabis indica
aaaaaaatatataatcaggttaagaaaccttaccttatgatctaaatctatataaaggttatgaaattgattgtaagagacatacactctcccattatcaaaactcacttgagaattgaattttaggagaacataactctggagagttgagcattgagatcaatcaaattacaagtggactagcctattaccgctaaaagaaggtgaaccactataaaaatttgtgttcatcttactggtttacgatcttcttagatccgtcgacgaaaactgcgtcaacaagtattgactaagattaaataatgcaacaatatatatgtgtactgttatgtgtactccaagctcaaatttcggtggtgaaaccctccaaattagtgaattgttagtaaatttaaggtgtcatttattttttatattggtacacttaatattattaattaaaaattataaaaatatatttaaaatttataatatttttttatatttttattttttattttttaaatatttcatttgttttttcaattttaaaataatataaacgtgtcacatgtacatataaacagttcatggtaacagttaaccggataccttaaatttgctaacagtacagtaatttaaaagattttactatcaaaatttaaacttaaagagttaagtgcaaataaaaccatagctgggagagtttagtcgcaaaaactcttatctctataatgaatgttaaatattcacataccaaataaaaagggaaacttacaaaaatactgtttttttaccaaatgttttcaaaaatactgggacacggcaaactttacatttttactgtccaagcccatttttatttcttttatactgcccaggcccaatatatttacttttatactgtaaacagtaacaaaacacaaacgacacctgtccttcgtggttagggacagacaaatcaacactggaatcatagaaacaccagaaaaaaaaccataaaatatggcaaagagaaaaaattactaaatcaacaataaattactgttttgtagtgttattttactgttgttttaatatgaaaaaaaggccacataaatgaaatattgtaaaacatgacaggacatggaatctataccagttctcataaagagcaatggacaatgggaaaaagaacataattatttcaagagaatgtgacaatcctataaaaaaacataagaaaacactactaaaaca

SEQ ID NO: 391698 - DNA, 1079 bp, Cannabis indica
atttatttttattgtgtattctattagtaaatttattttcaacatttgattattaaatctttattgcatttttcttttcaattttcaaactttgtctctgtttttttagatttgttatatatatataaatgtatacaataatattatacataaacataaatgtatatatatgatgaagcagtatttgcactgcaagaattgtttccagaatcaacgaaaggggatcttgcatatgctcgtggccagatgatcagagagaaacaatgatcaagtttattcaaattaaaagggtaattttaaaaatttaaattgagtttgactggtaggtaatatcaagattttaaaaaaataaaaaaggaagtaaatattgatttttttttgcggttgatttagttaaattgtatagaatttttttttttcatttttagtggttaattttttttcttattgatgttaaaaagagattttacaaaaaaagatattttttttgttatttttatatttttactatcacatttttttttacatattttttatactgtactaaatttttaaaaatattatgttaaagttttaaaattgtaaaaataccgtgtttcagtaaaattaaaaataactctaaaacaacttaacaaataacattaaaacaactataaaacaacaaaatgataactataaaacaacagaaaaataacaaaacaattacctaattgcaatgtacaaataatatcaactcctcaacatgcttttgtattatgaattttttttactcagatttgacgatttgatttatctttttgtaagaaaataaaggattatcggtgatagttcttgacgaacgagaagcagacagtgtatttttaaagtgatactagttagtaaaccagaaaaataaatatgaataaataacacaataattcctagtaacaacgccaaaaatttgatgtgtgttgtatgtggtatcaaatttactaattgcaatatgcaaacaatatcaataggaaattagaatttctatgcatgcattaggggataattttttccttaaactaataattttcaacattgaaaacatatga

SEQ ID NO: 391699 - DNA, 712 bp, Cannabis indica
tttactaactttactcaagtttaataattatgacgaaaattcgtctcataataaagaagacattgctatatatagttattttggtgtacaagtacactgtacgtgagtgatcgaatagagtttgatgggtatatatatgcaggaggatcttgtgggtacgggaatttggtatcacaatatccattctcctccatgattactgcagtaacctcgtctctctataactctggcaaagaatgtggagcctgctatcaggttaatattattaatatatgcatatcataatgacgctgatttttctcttcaattattcatatataaaataaaatcattttgtaataaatagatgtatatatgtatgcatgctatatatatcgtgaccaattacttttactttctgcaccaacaaggctgtctctaatatgtaatcagcattgttattaggaaccgtgtatatgtcaagcatcacgtagagtaggggtgtttatagtgcacgtgatataactaaaaattttttcaacaaccaaaccgtagatgcggtattttaatttctcaaacgacaactgtattatactgcaaaaatacggtgtggtgcggtgcagtttaagtgatttacactatcatcattatcgaacattataataaaaatttaaaatcaatctataaaattttaacaatacaaaaaaaaattattacaattttaatatcataa

SEQ ID NO: 391700 - DNA, 1201 bp, Cannabis indica
tctctctctctctctcttatctgtatttccgaatagggacacgtgcaattctaaaagtagtacaactcagttacttcaagcccaacaacaaacccaatcaggataatttactaggtctattaacaaattcatgtcttttggatgctggatagatgacccatctaggcgagataactctccagcatagcgtgtattcggaagaccaagtgttcagagaagtagttcgcaaatccagacatccagctcatggtcatactcattacctgttgctgtgataacaagacttaattcacaagatcttgtttgaggacatatcttctcataatgtaaagatagtgattgaaaatcaagcattaatgtgtttttattatcacaaaagagaacacggttttgacaactatcaacgtgatgtggcatccacatcaacatactgttgattttatggtactaaatcaggtacgcagttgaagagttttgtattatctgattatcactgtatcatatcccaatggatctccaaatgtgtgtacattaaatcaatataataaattacaagtttagaatatacctcttgaagtctatcagggtatcctcgaaatttctcataagttgtatccttcaattcagttgatgaggaaattacaagttggactcacactagtgtcttccaaatcgatccaccacacacaaggaatagtaagggctattaggacattgttcttgttgagttttcaacacatgagcaagaacaattgagagaaaactcaatttcctttttctctctataatttcaaaaattatagttcagaaaagagtgttttgatttttcaaattaggctcttatttatagtaattaaatcccttataattaaattattatttaattgtttaaataaataaatatctataatcgaattcggatactgatatttatgagggaatctctcagagagaatgtctcaacaaccttaaaatatctataacgactttaaaattagatatctacctaaatgaattaattaaataattaattagctcaacagacaaactccatagggatatgacaatgttataggcgcctaccatgtctatttaggacaaggtttgtgtcttttatcctgacaactttttcttgacaaatcttgtctcgataaattttatcttaacaatttttgtcttttcctatttaattaatttgaaa

SEQ ID NO: 391701 - DNA, 746 bp, Cannabis indica
gaggtgtttttccagctgagattgttgaagccatgagaataaaaagaagcccttagttggattaaaagtaagaattggtagaatgtggagattgagagagatagtatactttgtgttcaagtcattcgcagtaataaaactatggcctctatctttggtactattcaagactgtcaaactttgttattctctctactcaatgtgaagttactattttattaggcgatcagacaaatcgtgtagcacatattgttgttagatactctcgtattttctttttagttatagtaatttttaaaatataattatttaggctgtatttactaagtttgtttagtaaatcaggactccatatatataatataagaattatatacaatcaaatatctatgatcacctaaatagtactattaattaatattataagttataacacatagtatatagaatcatgatgcaattcgtcatgatataggtttttttatttttgaaaggtatacataataagtagtttggcttatacaatacttaatttgattaattatggggtcaaggctagggcatcatcgtatcacatgcaatgcaactataaataatattattttattacaatttgtttataattaattatttatttgtttgtattattcttggttggtatataatatagacaaaatttagggataatttttacatttttacattcaaatacttttttatatatatttttacagtattttataaaa

SEQ ID NO: 391702 - DNA, 1274 bp, Cannabis indica
gggatgctccttcaccgacttcctgaggggtagtattctgaaggtattgtgcccgagctacgcgatcttgagccttctcatcgtctgggacaggaacctactgccaagaagaatacttgggatattcgtaatcacatgtaaactccttgtcagttaggagatccacagacctcaagttgacctcgtttagaagaaagtcacaggacctaagaccgtaggggagagtcagcaggagcctgtgtcgcccgaccatctcaggggtaggagtaggtcttttcgagacaactgtcaaaaataaaacgaaattataatcaactaaattcaaataaaagggttcgattacttaaccaagtcttatgcgaataatcacttacgaattagacggaaagtggttgtgccaattggggaaaggccggtcatccaaatcaccaccacgtaccgatctaaccagacaatctcgcttgaactcaataccacaagtccttaatgtatcacctacagaacatgcgatggctcgcaccttcaactctattaatttttccacgaaagtgacgttagggtcttggggagtccttaaattacgtggcttggaagttatgattgcaaaatccaagtcacctggttcaaaagcaattgcaaccttgggtaaaaatagaggcttagccaaaggaatagaagacgcactaggtggtttaggctaagcagcatctcataagaaacgacgcatgccttcaataatttcttacaagaagcgtctatgacgattagcaatgaccgcttggtgaatcttcactaagtgctctctaattcttgcattatttacctctaatttggatttgggtcctggagttctgggtttataaggaacgacaagttcagttggacactctatctctaattcttctggacgataaacttcaaaactagattgggacattactgcaaggaggaagcaatcccaattcctagaggaaatttatcaaacttgaagttggtaaattggaaatttttgaaaaacctacattctgcctaaaccctaatagttaaccataatcaattatgccctaatatttctagaaccaaatgaagtaaccaaggtgctgactaagaaattagaaataaaacccagaaagacaacatcaaaggtacgtaagaaaatgagaagaagagttacttattatttggagctggattatgagacgatgaacaattctacaatctatgaatcaatgaacggcgttaagatccctctgaatgcttgaagtcaaaaatta

SEQ ID NO: 391703 - DNA, 1018 bp, Cannabis indica
caattttccttctctttttcttagtatataaatcatcttattgttgttattgtttttattatattttttgattaaaaaaatgagttctctcttaacttcaataccgaaagatagtaatgaaaataccacaattgctagtttacagataacccaaggcatgcgcacacatgattgagtaatgatgcatgatctcacggtttgcatgaacttgaagaagaggttttctttatctttttggtttggtgtgaagggagctcttaattttcctctacttcttcttcttcttagctttcttggctctaaaactaaaagatagtaatgaaaaaaccacgattgatagttcatggataccccaaggcgtgcgcacacacaattgagtaatgttacacgatcttagggtttgcatgaacttggagacgaggttttctttttcttttggatttggagtgaaggaagctctcaattatctttctctttttcttattatacaattaatcttgttgttgttattgcttttattatatttttttattataaaaaaatgagaactctcttgattccaatgctgaaagatagtaatcaaaatatcacgactcctagttcatggataactcaaggtttgcgcacacatgattgagtaatgttgcacgatctcagggtttgcatgaacttagagacagggtttttttttacctttttggttttgggtgaagggagttctcaatttttcttttcttttcttattatataattcatcttgttattgttattgtttttattatattattttattaaattatattattttattaaaaaatatgagagctctcttggctccaatatcgaaggataataataaaaataccatgattgcttgttcatgaatatcgataggcatgcgcacacatgattgagttatgttgcatggtctcagtgtttgcattaactcggagatgaggttttctttacctttatggtttgggataaaagggtgctctcaattcttcttcttcttctt

SEQ ID NO: 391704 - DNA, 709 bp, Cannabis indica
tttaaaatataaaaataaaaaaagtaaatccttatacatattttggtaggtcatttgcgatgtgatgatataggaaacaattataatgtgtacacgtattaacaacgttaaccaataatcagctaaaaaaatatgttattactcaagttaattttttttttcgagataatatattattacttagcaagtattggatcgattagttataactcttatcatttgcttaaaagaaaacaggagtaaataggaaagggataaaaaaaatttggcaggaattagttttttttttacttaattgtcatgaaaatatatatacttattttaaataaaaaaattaatcacttttagtaaatttatttaatttgtaaaaatttaactattttgaaaaagatttatcaatttctttttctttactattttattattataattattttaataaaacaagagtatttaatatttttaagtaagatttctttttgccccagctggtaggaagtctgttatttcagtggtccaagtactggacatgtgtcatctcctcattgtcgtgtcagtaatgttaaatttaagattgattgagtcgttagaataaaatgatgattttattgtgtatttgtaatgccctaatgttaaggtacgctacagtgctatttttttttaattacagtacaatatttgctaatcaaagaattttctcgaaaaacgt

SEQ ID NO: 391705 - DNA, 654 bp, Cannabis indica
aacctcgtttatgagttgtcattttttttgtgggagccttttgccacttaggatatcttaatcttttcactatgtaaccttttcaatgagggagtattgactctttagagcaatctcgacctcttctcaattttcattttgtttgagggatccttttgcaactttgggctttctcaacctcttttatagtgtaatcttattatggagggaatatagactctttgagcaatctcgacctcttatcggttacttatcaaatataagggagcttgtggccccttaggtagcgcttaaccttttttaaaattttataattttattgggggaacttgtgccctcttaggcagcgctcgaccccttacattgcactcgtggcacttagagcacattttgaatgctagaaaattagcactccttttagagtccctttcacaaaaaatggaaggaattattgctctattttttattggatttggatctatcaggactgacggggctcgaaccctcagcttctgccttaatagggcgatgctttgaccaattgaactataatccccaggaaataacattataaaatgtacagtctacaatacataattttatgattttattctttcaatgaaaaaaaaagtctttccttttttccttggactt

SEQ ID NO: 391706 - DNA, 822 bp, Cannabis indica
aaaattattatgtaaaaaagttaaaccatatttatatataatatttaaacacaaattagttacgaacgatttttagttaactcaatttaaaaatagatctttataatatcaattatatacaattagataaaaaaaatcaattgaaaagggtcaagtataaataagaggagactctactttgctcataagattctcactatcaaaaacgttcttgaaaaattttgagtgtgagagaaagctcttccacttcaatgtgtactcaaaaaataacttgagaggaaaattaaattattaagattgagagaatacaagattgattgaaagtatagaaggttaccattggatttaagtgatttggaagctccattaatgatataaattgattctttgatagtgcagcaactgagcttctctttgaggtgagctccattgatgatgtaaatgttttgtgttcttctatctctcgcttcaaatgtgtgtttgatttgtattgccttaaaaattactgagttttggtttctcttctagagttttctttgtagatctgaaacaaaataatttggggcttttctttcttgaacaatttagggcttttattgatattgggaaaggaggtatttattaagagaagaaaacgacatttcttttaaaaaagaaaagcaaaaaataacatatataatttgattgagggaatacttagtctcaatcatagttctattaactctatagtggccctttgtatatatacgacaacatatatgagagtgtacagttgagtctcaatcgtggctctattacaaagattataaagattatttatgt

SEQ ID NO: 391707 - DNA, 977 bp, Cannabis indica
ttgtaatttccttctctgccttgtattttgcttttaatgcattccaaatctccttcgtagatttggtattagtgtagaaatcatatagcctatcggacaaagtattgagaatgtgacctctacataagagattgtcatcatctttcttccttctcttccttctcttccccaccatctcagaagtgtccttctcagttggagcaggtagaggctccaaggtagacttaagtatatagactatctttagtgtagtcaagagaaattttaccttgtcttgccacctagtaaagttggatccatcaaatctatccaacctcactaggtcttgatttatcattttgatagtctccccttccattgaagaaatgtaggaagggtaaacttttgattgttggaaatactagtgtttcaatagaataacaaaccaaagaagacaaagtcaattggtactgttttatttatgaataaatataatttatcccccaaactatgatccttgtgtaccctctaaaaatttttctactctgaaaattttccttgaactataaaaattgttgtaaatatctcctatagttgcatattgctcatttttttttaacatgttatttatataacactaatgtcacgttatctaacatagttcatagttcaatagtttaatgatgaattagaaaaatatgtatgtacattcttagagctaatatttatatatttaatattaataaattaaattttaaataatttaaaattgttaaataggctcttgtaaccggtaaccatataaataaattgttttaaaagcaaaggggtagaataaaaaaagaggaaattacacttagtatggaattttaaaagttcttatgataaatatgacacatttaagtttggccaatttatatggtattttttttgtttttaggtttttttatggtatttgatatgtcatatatacgcaattaggtttctaaatcccatat

SEQ ID NO: 391708 - DNA, 696 bp, Cannabis indica
tgcctcaacccgttagcctgtgggtgcaccaccgtcgagaatctcctttcaatgcctctctcagtgccataagaattcagcaaatctcctttaaattgggtcccattgttagtgatgatcttgtaaggaactccaaatctacatatcaggaatttattgatgaaggacaccacttgtttagcaataatgctaactaatgcctcaacctctgcccatttggtgtaatagtctattgccaccaccgcgtattttgccctggctctacccatcgataaggccccaatcaagtcaattcctcatatggtgaaaggccgcgggctggtcatgctcgtgagtttggccgaagggcgcctgctgtagctagcatgcctttggcatttatcacattttttttacgaacaccacctcatctttctccaagctaggccaatagtctccctgcttgaacacattccttgacatcgaataacccactacatggtttctgcattctccttcatgtatctcatataacacttgttgcacttcactttcttttatacaatgtaggagcagggtggagttaggggtgaaaatcgggcggttatggtcggtttttccaattttatagccgatcggtcagttaggttttttattttacgaaaattataaccgaatgtttagaaattataaccgtataaaaccgaccgtacagtt

SEQ ID NO: 391709 - DNA, 1531 bp, Cannabis indica
aactttgttatacataattttgttaccgaggaatgcatatgacaaattggattttgtagttcgtgtggattcaatagggatggaaggacagggcttgtttttgttgaaagtaatcacaaaaccgagcaacaacacttttgtgaacaaaagtgttggcgatgctcttttgacaattgcaaatattagagagagtatttatggttcgaattcgttagaggatgatattgaagcgttagagaagtgttgtcgcgtaagagataagaagttgtaccattctttggcgcttcgaattagcgagagaaggattcttcagaagctcagaggttatgctggtaggagaactttacacttggaatgtatctcagatttttgcactatttcatgtatttaatacaactagttaattcttcaatttcacaggtatggagtcacccatcgtctgagtcgtctgggtatagcccatgttgagtgaccactgcttaggattatagtattcaatgttgtgttaaacaagaaacttttgtaatattctcttgattgagatgagttgagcattacatgctactatgctacattcttgtacaaatagttgtgtccaactaaccatgtaagctaaatctttgttggacgctttgtcttgcctccaaagagttttctatgactgataatgtgtttcttttctttttgatttttgtgtttcattagaaaaacgctcgcactagaactttagatttatatacttggtcattattatgcaagtgaccttaagcgtttgggaaatcatcaaagcactagcttagttgtgcaattttttttttcttcacgacacttttgttggtggcacgctttttgatacatcatgaaagaatgaagctatgatcaataccatttgcgacatagatagttgatagtttcttagaacttgtcgtccacaaaaattagttaaaataaattgtagtatatgtataaatattaaattatccaaaatataattttattatgatatagtattaaaaaatatttacttttatatttggaagatttatttcgtgtttggtattatatagtttcactttgtaagaactccaaatcattgtgttggagctcatcctatttatcacaaatgatatgcttatctcaaaatgacttagtttgttcttacataattgtatcatataattagaatatttatgtgagagaatctcattaaaaaagttgaaaaatttacaatcgttgtgtggaattagagagatttatggtttttaaaattttattgacaaaaatataaattacttatattttaaaattatctttatattataatattgtgtcaaattcaacacaaaatatagtattatggtaaattttaaatagaaatttttataagtttgttatttattattaataatattaataattctttttaacaatcatttataataaattttaatatatattttttttaaatggtacattctttaattataatattgtcattaattgttttttaaatatttaatttattaattat

SEQ ID NO: 391710 - DNA, 1148 bp, Cannabis indica
tcttttgatgagcggtgtgagttgataatgctatatgtaaatttagatatacaatatttcaaaaatgtgcttcttcttatattataataatattaaatgcatcagataattagaaatttattttgagtttcattcaattattaaataaataatatatttctaataaaaaatttatacattaatttcgcatacaaatattattgcgataatttaattgcaatagcactacttactttttaaaaattacaaaaaaaaaacttaaaaaatgtaaaataaatttattgtaattaaaaaccatgtatattgaattataataatgactattcttaaaaaaaaaacgtcaatacctttagtctttccaaaaaaactaataacaaacataaataaaagaagaaaataaaaagaagactaattaattagggacaatgtgaaattttagtttggtggagacttattattttagtcggtttgtttgttttgttttagtacattgtgtgtttattttatagttttctttatttattttgttgttaattaagtcgatgatataatgcattgattttcttgttgttgttgttgttatttacgggatggattgaaaattgtgaactgtgtgcttgattctttgactctctggattaatttggatgcttagaaattgtatatcgatgtaaattgtcaacatttgaattgtatcataactgttctactttggtttgtggaaaaattgcttgaatatgatatatagaacttgcataatttattctcttgaggcgaaattcttggcaatatgcttgtttcgaatatcatttagacaatttttttgaactgtttgagtctttcaagcctacccttattttatcatctctagtttacatttgagcttgagcctgtgttaatatttatggtcacttaataaagcctaaaatgtgtctattcattacttttcttcctattgcaccttaaattatgtcatcagcttaggaataaatttgagagagggaaatattagtgagtgattcttttagaaaagtgagtgattgagaagagattgtaaaatgtatagagcatgtttggtatttgtttttctgttttttgttttcaaaaaattgtttttagaaatgagaacaaaaaatagtttttgaagt

SEQ ID NO: 391711 - DNA, 965 bp, Cannabis indica
aaaacatgtaattatttttaatttatatgtttttgaagaatatatttgtctttttttatttttaattaataaaagtataattaatatttagtaagttaaggaaaaggaaagatattcccaataaaaatagggggagaacctttcattttattttctcattaatttatgtgagccctactagtttctcccattccaaaatttagtaaataaatgaatgggaatcaatcccatacaattaactctcattccccttgagtaaacatgccactataataattttcatgtataaaaggaaatttggattttttttttcttcaagtaagcagagagtttttagctaatgttttttaaaataagctttaaattaatttactttattttctcaaaataaaaatcttgaaaagaataattaatacatatatattttaaaataagctaatgtccttgcacccctaaatttttatttgattactttcttcaaaaaaaataaaaataaataaatatatatttggaaagagaaaatattgtgaaagtttataattttttttaattaatttttaaaatggtagaagctcaaatactccattctaagaaaacaagatcaaatgctttgactattttcaaagaacgattagtttttgaagaacataaaagaattttttttagtatcaatgccaaacatactcttagaagagcttgcctatgtagtgacaaaaatcaatattaatggtccatagctcaaagaatttgtcattttagtcaagcccatggctgaaagaatgaattctaagacaaatgtcataaaacttgatataggggttctcaatgctcatcaaatccaatcctcactaatttaattatcggttaatttcacaaatgcacaaaaataagaaaaaaacaacaaaaatacggtttcacggaattttaaacatttttacgattttttgattttatttacataaaat

SEQ ID NO: 391712 - DNA, 1127 bp, Cannabis indica
taaatacgtagttaaatgtcaaacaccgttatccatccttccacgtggttgtaggagattcaaactctaataatagagagataataaattgtgtctaaaatattttatcaaaataaaaaaattatgattaaaatacctaatattttttatatcatggtctattattttttggtggtacgtacaaatatttttaaaaatgtatcaaaaatgtgtatataaaaattcactactagctagctataccatttaataatattttagaagtgtaatagtttaaaaataaatatattactgttaaaaaaaaagaagctagtataagaatacaacattttaaaaatatcagtattttaccacacacaatatttatatctgtatttatacttgtataattaaaaggggtaatatagaattaattaaggtcaatgaggtaatgggagggtagtttggtaatttgaggtagggaagtgtgaagcaacgaccactgaaatccaaaacgaaaacgctcccaatggcaaagctgacctacaacaggggccgactcttattatcccaatctcctccttatctatacctgtacgttcccactcatatatttatttatttatttaattttcaccaaaaatattattattacacacaattaattattttcttaaaaaaaaaacgaaattaattattacaaggttcatgtatatataattagctttttatttttttatgataaaaccttaggcaatgctggctcttaatttgaaattaaaaagattctttagctctaaatgtaccctaaacatccccttttattattttattttaattattaattaaaaggattgtgcctctacatagtaaatgacagaaaaacccatctctattaaattataaagaaatcacgttcatatattccaaccccttcttaaaacccaaacggaattcactctctcatcaaattctttctcacaaatatttttttatttttatttttattattttttttctttctctctacaatctcttttttttctccttcagctgtaatttggagatccacatcagatcagatcatgggagactcaagtaatgatcatcgagctggggtagtagctgtttcagcctccaacgttacg

SEQ ID NO: 391713 - DNA, 764 bp, Cannabis indica
aaaaaaataaaataaaaacccaacaactccttgcgtcacctgaagtttcagatggctcaatcagagtcgtggtacctcggctccagtgagatccactacgaagagaaagaaatagagggtatgtgagagagagagagagagagagaggacaaacgactcaatcaaagttgtgtggagtttcgactctgatgaggtccaccacgaagaaagggggtcggaggcatgcttcgcacctgctccacagctctggcgaggtctaccacgaagagagggggttggaggggtttcgctgggttcatcatagagttttggggctcgtcacttgaagttcgagtctcgcggaagatgaagaaggaacacgggaggggggcgtctggtagtatcgtagaaggaagaggaggaacacgggagagggggcgtctgttccagtcgcagcaaaaagatgaaggagaaggagaaatagaaaaagaaggaaaataaaaaaattaaaatttattgatttaattatttttttttattttataattttgaaattattttttaaaataatgaaacaattaaaattaagtagatcactaaaattttgtcacatgtacacttgtgtacacgtggataatgtaccatgacacttaactgcaatttttggatagaaatgtaaagagcaacaatgaatgcgagattggtaagattttcgctcaaaattttaatttttgtaattaagtgttaaaaaacataaaattttaatacttttaccgctaatatat

SEQ ID NO: 391714 - DNA, 1168 bp, Cannabis indica
attaaattttttattaatgttctatatgatttactaaattgttttatttaactactgatgcagttgcgattgcaaaatgtacgtcatataacatatagagcataagatactggatctaccattttttttgagaagatgatgaccatatgccgctatttagacaaagatgtaatgtaagtttaatcttccataacttatcatgaactttatattgtttttttttttaattatattttttaaacaatctttacttttagggttttttgttgaataatatgttatcaataacattcagttactttttgggatcacattcaaattatatcgtaaattattagctttcattttaaaaaaaaaaataaaatatatataaatatgttaatcactcaaattactcaatttttaaaaaagtttttgaatggtccgatactcattcgatgttggccccatatatgatccgataatttattatggccaaattacttaattttggtaaaaccttttatggatggcccgatagatggccgatggggtccgatatatggtatgacagcctatttgctcaattttgcaaaaatatttttgaatggtctgatactcgtccaatgttagcccgatatatagctcaatagtttgttatggcaaaattacttaattttgtaaaaaccttttatagatggcttgatagggtccgatgagggactgatatagggtttaattgggtcacacaagatataagttgatcccaaaatagcatcagacctacatcggacttgcatcaaaactgcattagactagcaacatatcggacccccatcgggtgtatggtctgattgggccacagaagatataagttgatttcttaaatggcatcgaactagtaatattttataaaggaaattttgcagtaagtaaatgaaaacgttttcatgccacaaatgataataattaacaaagtccaataagaattcaataacaatatataatagtacaacacataacaatacgactaaattcaacaacaatttttaacctcagtatgtgcaagactttttgttgtgccccttaccaccatacttactacaagttcgttttatcacaatctttttcaccattacaatcagttatgtttgtcttaattcttccaactttttgttgggttttgtgc

SEQ ID NO: 391715 - DNA, 1369 bp, Cannabis indica
ttgtttttccaatatcttcttgtattagaatcctacgtacgtgacaattaaataacaatattattgtgggaaaagcaagagagagagggcaaaggtattgggctgcacaaaagtcaaatgttcttctagctaatagtgtattgctattctttaaaaattattacattaaattatttatcttacacttaaaaaggttaaaaggtagttagacaagtagcattttagtaattctcttaataatataatatttctaattatgatatatatacgtaaaagtcaaagaagtcaacaaagttcacctatacacatatataatggcccgtggatttcatattaaaccatcatatattaatttatatctattcccttggattggaatggtctaattcagaattaattagctacgtacccacctcatgaaatatccatatggacactataaatacatgacataccttcttttctttgctagaacacaaattaataacacttcctttcataatcatttgtgtttatctctctcaaccatatatatcttttttatatatttttctgtgtccaaagtaaaaaagaaaatggagtttaataagcatgagaaacaactatatactctagttggttttctggtgctctttcctgtattatgtgcatcaacgtttacagcctcaagagccacctattatggcaccccggatggctatggtactccaagtatgtatattatatatagtcatattgtaacacatgtatatgtatttttattacctatgtatataataacatatagtaatgattcttctgtatctttaatttattaggtggagcttgtggatttggcgaatatggaaggactgtcaataatggctatgtatcagctgtttctagggcactctacaaggatggtgctggttgtggtgcatgttatcaggtgaatattgtatctgtttcatatatagttggtatttggtataatatcatatataacataatttaatataatatatataacatcaaagtgactcggtcaacaaataataatttatatatgtgtagtcaaatattaatacacacaataatttattaataagtaggttaacatttcaggttaggtgcaagaaccctcatctttgtacctatgatggggtgaatatagtagtgactgactacggggaaggagataaaactgacttcattcttagcccaagagctttctcaaagctagctcttccaaaggcagataaaaagttgatgagttatggtgttgttgaagttgaatacaaaaggatctcttgcaattattacccaactcatcatattaataatagtgtcatcacctacaagatcagtgaacacagcaattatccatact

SEQ ID NO: 391716 - DNA, 774 bp, Cannabis indica
ttggtgccaacgtttgtcggcgcaattggtgtatttcgccagcaatattggctattgccaacgataataggcgctggtaaaaagtttaggtgggcaaaaaatgttgactttctttgccggcgactttgttgacttgcgctggcaaatgtcaactaatgccagcgcaattacctaatagcgccggcaaaagttggcattcttgtagtgcaactagttttgaagggtgaggattcaccacaaatacattgttacaaaaaatacggtatttttatattgtactcttctttgttgtttattttttgttatttgtatattatttttggttgttattttgatgttatttagatgtaattttcatgttactttaatgtagtttttatgttatttttgtgttatttctataaaaaatcggaaaaatgtaaaaaaaaaaattctttaaatgtaaaagttttttttttaatgaaaaatagtatcttatgtaattattcttattttttatacaaatttcttgtttgtcctgctacaagcattttaatggccttaatttcaagtagaggtatttgctcttatggtatatggaaataaattgcgctcaagctataaatctttctgttcaagtattattttttctttctttctaattccctatcttttgttttgtctcaactttaaacaataaagcaatatattatggtgccgtttggtaacacttttgttttttaattttttaatcataaaatgaaagtaaaatttttgtttttaaaaattttattt

SEQ ID NO: 391717 - DNA, 577 bp, Cannabis indica
ttttgaaatacttacatattttttctttcaaatgaaacaattacaaattatgttgaacgtatatatcaaaactagatatttttatatttatttttagttaagtagttaaattaagtaaaaaaaatttaatttcttcgtttatcaggtccaatcttttattgaggatatttatacttttttgttgatgttgccattaggaatgtttaggttattgagatgattgtcattcgtgttcattgtggtactattgtggagattgttctcactttgtagattcaagcagagaatgcgttacaagagggagcttttgtttttgcccatgctttgtctttagatttatcccgcaattgagtgaattttatttttctattttcgactgctttatattaggtggtatttggttggaaggagtgaaaatgtaggaatggaaatgagaatgtgaattagaataggaatgagaatatgaattggaataggaatagaatttaatgcataaaaataaataacaattataaattttcaaatcatgtattggaatggtctttcattctatttcaaaatggaatagtcattccac

SEQ ID NO: 391718 - DNA, 1222 bp, Cannabis indica
ggggccacatatgagtttcaaattgttcacagggcatggccctcctcatgagtgcatcagactgtaagaagttttatggaaattgaatgctaattataatttggcagacttattctgcctactgataaatactattatggaaaagaaatttagaagggtacatcttaataattagtattatggaaaataaatttgaattttagcaaaaggaaaaaattaatttaattcgattaaaatactgattcaatttaattcgtaaaatgtaaatatatatacttttacatgtatatccaaaagtaataacctgtataatccaatattgatagtcgactaagacattttataatttgtaattttcataatcctaagaccatatctacttaatagatcaatactatatactatgggtatatgtattttttttaaaacatattctaagtcataatttatatagatgttgtaatcttaaaagaagatggctacctattaacattgtttaagttatgtagaattaggcatgcctaataatctatcactaaaagtttttcaagagaaaatagctaggttgtctataaacatactattactgcaaagttatgcaactttgagactataaatgtataagttcatgtttgatattagtgattttagcgagagcgcgtatatcaccttttgagggagtggctctcaagacaaagtggcattctacaagtggtcctcttctcgaggatgtggatctattctagaagaagtaagtcatccatgtactattaatgacaatttctttggatctaagatagttccttctctacccaaaggagaggcttttcaccaacaattattatctctaacactctcatgagagctctataattccactcctagagaaaagcacttccaaacaattttggatatacgggtatgtgactttaattgctttcaagatgattgaccatacaaatagtcacttattttaagattactgtggtaaataatccactcaaaactaaatcagtttttacctccactgttatttgaaagttagttactttcagttataactctttcatcttgtatcagttagttgttagttattgtgttagttattaactaacttcggttgaactgttaagagctggacatgtcagcatctaacaggttatatataggctcaattcatttgatgaaaaggagcagaaaaagaggtagagaagacaagata

SEQ ID NO: 391719 - DNA, 1769 bp, Cannabis indica
caagctcaaaactctattgggataaataattgtctattgaagaaatggtaatgcaattgaatatgattaatgataataaaaattatatttaatcgtgcaagctgctagataattgctttattttttattatttggtttggctattttcacgggaaataaatttattgtgttcccaataagaggaggtgtatcacccaaaactatatttattgcttatatttttataattataaatattcaagagaaagggttaaatagacttttggctttaaattttacctatattttattaaaatatttagtgtaattgcaataaggattatattaattttgtatgtaataataatcattacaatactcaatataattagattacaaaattcaaaatataaaaacctaattattgaggacaaccttgccaagttaccacaaaagattcttcgcaataatttaaaatcttatatattgaggacttcactaagaagatcaaaaactctattgggattataatattatagtaattgtaatttaatagaataagaatgtgatagaaattaattacaatattgtttgatttattgttggaatcaacactgtaatttataggaaaatatcaaggaagttacttaaaagaaaaatgttaaagagtaccaatagtgcctagcacacttttatgtgtcaatatcgctattggtccaactaagtattgtatccatataatttaatataataatttttagggaatatcactggccaatcgcaacatgatatgtcgagaaggtactagacattactggtgcctaatagcaatgctctacttaaaactcttgattcttaatttaaataaatacctacatattcacatttgaaatggaataaaaaaaatatcaaggtaattaaaaggtcgggacaattttctaaaaatttgagatgaccatcttattaaattgattatgtcatattacaatacatgaaaattattttgcgtaaccggttctacagcatctgatctcgaaataaaatagtcaagagatcaaaaatttagagatgagagcagttgtaagtgctaataatagtctcaagggtaaagaagttattgtattctttatgaacaaagaagatctgatgaaataacgtcacaagaacattaaatgtaccgtttcacttaaagggaaagatagaggttagccaactgagaaagcggagcgtagctcaaggaaattagaagtagtagagcctgaggagctttagaaacatgagcaagtaagaaaaacacgcaaaaacgagaagagaaataagtccacgtggaccaatctaaatgctggaaagaaaggggaccatgaatgatcattcatgcctataaataggagaccatcgttcaataaggaggatgaattcttgcttacactagattagtcagaactctatcgaaatacatcctcaaaacattttgagttcagaaaataagggaatcagagagtaattgtagaaattgagagaggcgatggtgtaaattgatagaccaatgtatctcgactagattaaatctggtgtaaagaattttatgtcataatattttgttgttgagctaatttttagcagcaacatttgagtaatgaattcaactataataaactatgtaaacacacaacaatataatttgtaattgtatgtcttgtgtattatttatatttgttgatttagtaaaataaatatagggatatgattttgtcctgttattgtactttcacggattgtaatccgtgatg

SEQ ID NO: 391720 - DNA, 596 bp, Cannabis indica
ccttcttcttcttcttcctttctgtgtatgattttcccttgcattggatctccaagccctaatcctagggctctaaggcttacctctgtaagtctcctcctctctaacctttttgttctgttccttttttttttttttcaattgagtatgcatgtatttatagctttaggatagaagagagagctggaagttagttgcaacagttttaacaaactttgcaactaacttcaggttttgtctgactaggttgttagaggccgaaggccacttgtagatttaaattcttgtaaatgaattttgctaatctgaacagtgcatgtggggatttattttaacaataaataatattgattaatttaataggcttttggtaacgtaacacattattattcttaccataatactaacaaaaatcacataccagaatccaaaaagaaaacttgccatctcgctccatgaatgcgtcgcattcttcctctaattacgagattgatgggtcctaatttgaacaacccgtgaaatacaatacaaaaaatgaaacctttaaatttgcttcctattatagaatattaaaatcacaactagaatcattctca

SEQ ID NO: 391721 - DNA, 1111 bp, Cannabis indica
ttgtaaaataattgtaagctttttcttgagaactcttaagtaactcacttggccagctccttgtgatcttattaattctttaaagcaatacaacaaaaaagggagtaggctattaccattatcacggggccgaacctctatatttttatgtgttctaatttgcttaagtattcattattattaattattatctattattctcattagtatctataattctcatcgctttaattgattcgacgtcgttggctaaaagtgagattaatattttggtgctttcattgagagcaaaaagaacactgcgtatcgctttgatcctctccaaagatggttgtaactaccagaaggtcccaaatcactgaaataactattctgatggctacggatcctaatgtgaaaaatcctattaataggaatgataaaatggtggcaaatcctgatccgagcacccgtctgccaccacgagttccaccatcagcaagacagggagtaacaacccctcgggcaaggttcactctaggtggagaggatactagaaccactagtattcatagcggagagactagacagggtacctgtgatccatctcttagagaacctcgagtggtgatcggtgatgatattgagttccaaaacgtacgagatgccttagggcaaatgaaataacataccaacactcttcaccatgatcaggagtatacccgatcagttgtgaatccagcattcaaacagtaaaaatgccaattccaagagtggatgaatcaacagatggagatcatgggagcccaacaagcagcgattgataatcgctctaggtaggcaaccgtgctgattcaacgagcttattagttaattggacaataatcaatggaatacactccactcatacgggatcttaacagaggaaaagaaacctatacctaaacatgccgtagtatgggccagaagaacatctgaccaagtatactcaacagacccaagataatggaccgtcaaatctaaggccactggattgaactgtgggccacatggtaaacgagcaagttttgtgttacaaaaattatgatcactacgcaagtatacgcaatcaagtagtaaactcacacaggtg

SEQ ID NO: 391722 - DNA, 586 bp, Cannabis indica
cacactcccctctcaatatctccctctctcttcatccctcatttttacctccatctctccttttaccattattccctcactcaaacactctccccgatcactacctcatgctcctcatctaaacaagggagcacatagacccaacacttagttaaatttttaagtgttatactcgtatcatgagtgtaagctataaagaaagggaagtcaagggaatgtacaacaaaggataaagtcattaaagcatgcacgcctttgaggaagaagtggttctatgacaagtataagtagtggagacactatttgtctctctcggagtactaactgagacccgaccaccacctctccactacccatctggcacgctactcttcatggtacaaaaggaattttgtcctctaacttttgagatcacttgtattttggagtcattagagctccatataaataccattctcttccattgaagaaagggttggaaaatcattacttgtaagagaggtctaatattcaatacaatagttgtaaagtctttttttggcaagttagttgacaaaatattttttccatttatggtaagattgct

SEQ ID NO: 391723 - DNA, 1219 bp, Cannabis indica
aaagcctaatcaaccagttccatgattccagtgagaattttaccacataaaaaagaccacaaggattataatttgtgagaaaaatctacttcttttagtcgtgatagtgatagtaataatttaattgagaagatctatctgagacgacaaaaaatgtctatctatttatttagttatttgattaactcaatgatttgttattgtagtttatggtaatactaattttatattttttctaaagaaacactaatgtcaattaaaccaaattgaacttaaaaatttatgtgttgcgactaacattagtattgaacaaaaggtcagcctatatgttatcactaaaaagttagtggctaaaaatattaatcctaaaaattataatttattgtgattaaatgtatttttataaaaaataatttatatttaaatactaacggcaatgataagttacttcttattgtaagtaaaatgatgttaagtaataaaaaatttatgttatgtctaaaaggttattacctataagtgatagctttcttttagggcttatttttttttatatatattaggtagatgttacgtgcaatgcacgtataattcttttttttttttttaattaggttcaattaggtgatgttaagtgcaatacgtgtatattgtttatcttttttaattaggtagtgtattttttttttttttaatttttgaaatgaggtgagagtttgatatttgagaattttttttagctatttcggttacattggtgtgtcctttgaatgtgattatatatatacgtattttatatatacaataaaatccaagtgagatatcgtggtgaatcgttttgtgcccgattgaacagaattgtctcttaatataattttccttttcattttaattcaaagttaaaccaataaagttaaaactatgattaaaaatatctacaatattttaagtattttaaatttaaattatctccttaaaaatacaaattaaatataaaatattaatcaatttatataaaggagaagtatgaggcagtaacatgacattttaaaattactccaaaattatttttctcttctctcataaattagtacaattttaatatcaatcaatctatattatatatacaaaggagaagtatgagacggtgatgtggcggtctaaaatctctccaaagttattttttttctccttaattctctcaatttttttaatattt

SEQ ID NO: 391724 - DNA, 1550 bp, Cannabis indica
catatgccatgagtgtttttctatttccactaggcatttgtgaggacattgagaagcttatggcgggattttggtgaaagacttcatctagtaaaggtcatggtattactttgtcttcagagagaatgactgtttcaaaagatgagggtggtatgggtttccaatgccttcaagagttcaatcctgctatgcttgctaaacagggctggagattattatgtcaccccaagtcctttataggacgtatattcaaggcaaaatacttccccaatactgattatctctcggccgaacttcggaacaatcccagttttgtgtgacgtagcatttggggcccccaaagtgtggttcgtgctggtgcttttcgaaccattgggaatggactaaccacaaatattctttcccagccatggcttccacattcgtctaacaagtttgtttcgtcatctcatccgaccttatatgaacaaactattgactctctctttgtaaccgaggaaagaagatgggatactgaaatcattaatgatttgttcaatcaccattaagctaccctgattcttggcattccactgtcacctaatgcccacgctgatttctaggcttggtctggaaaacgttcaggtatcctctctgtgaaaagtgcttccactcttttgcaaaatggtaagcccaagagccggagagctgataagtcttgattctagcgcaaactatggcatctaaagacccccgcaaaggttatgaactttatgtggcgtgctacttctgaatgtctccaaacttgcctccaacttgtctcaaaacatgtgagaatctcatcttcttgcccggtatgtaactcccattctgaaacgactgttcatgctttattaaactgccatcttgcttcacattgttggtcaacattggggattactttgaacatgcctttaccagccttggttgccaattagctccatgaagtcgcttgcttttcgcagacgatagctatctcttttgtcaagctttgagttgtgcagcccaaggtgttattaatctccttcatgagtttgaacttgcatctggtcaaaaggtcaacattgccaagtcttctatatttttcaaccccaactctgatgatcaaacccggtctaaaattagctctattcttggaatggcaaaagcttctgatggtagcctctacttaggcttacccaatatgattggtcgcaacaaataaactatcttcagcttcctaaaaaataaagctcttgctcgtctaaacagttggatggcaagtttctctttcgtgccagtaaagaaattcttctcaaaacagtcatccagtctctacctacatatgccatgagtgtttttctaattccacttggcatttgtgaggacattgagaagcttatggtgggattatggtggaagatttcatctgtaaaggtcgtggtattacttggctgtcttgggagagaatgattgtttcaaaagatgagggttgtaataccctagagttaagaaatggattaccaaaaccctatgtaaagcccgcttagtta

SEQ ID NO: 391725 - DNA, 1073 bp, Cannabis indica
tctctctctacctctcaatctcactcttaacctctgctctcaaaatcatctcttgtgttgtatttctaaagaagaggatggtaatatttatagatttaggaaatgaatcccatagtcggtggttgcaacaaccaagttgttaagtcaattacgacttcacagacttaacaaactccttgtaacaaaatctccacatcagctctggcacgagctctgaaaatgtaaagcacacttttggaatgggtgtcccagatagatgatacatgttcttgggaggatgttccaaatagattcaatgccagctggagtagagttatcgagaacccccttccttgagggaacatctagccttccaaaactccattctggaggacgactagcttctctgaagactacttctggagtggacaagctagacttctaaaactcctttcccgacgactgctagctttccacgagactctttccagaaatcttttcatttggaagaactataccaaaaattccacctaattcctttaaattaaaagtgatggtaatgaagaaagtatgcaaccattatggttggtgttccaggtatctcaatatgctaattttgagattgatcaactccaagcaatgcttgaacttgttgactgttaagaccttagtcccaacatcgacaagattatcttttgatgtgaccttctctaattcaaccaacccttcttcgatcttttttctaatccagtagagtcttatagctatttctttgctcttttcatgataaatcgagctcttacaaagatggatagatgactgactatctgagcacacaaccactcctccttttagttgtttcaattcgtacaaaatcccttgaagccataaagcttctttgaatgcttccgtggtagccataaattctgcttccgtggtggaaagagcaaccatagactttagttaggtcttgtagcatatacagtcccagctttttgaatcaaatcagatgaaacttaaaaacaaggctaattaagatttttgtcccctgaactttggcatgtaccaaatcatggcccctgaacttttaaggt

SEQ ID NO: 391726 - DNA, 853 bp, Cannabis indica
cacagaatccttcatgtacctcggacaagagtcctgcagcctcctcttttgttacacatctaagtaatggcatggagaaacctctcatatacatcacaccttcaacaatgatataccacacaacttttctcatcattttccgaagttcgttcccattgtttcgaagttctccaatgttgagataggctggtatgggtgtcatccaatttggtgttgtatctatcatttcgacttcttccacacagttgatgttggattcttctaggaattggatggggactaaattggacttatctgttactgtgctactcgcaagccgtgccaaggcatcaacagttgtattttcttcccttggaatcttcttgagggtgtaacccttaaattgtgcgagcaggtcttggatcttacttagataggccatcatcttttctccactggccatatactctcctgagacttgatttactacaaattgtgaatcactatagacctcaatgtattcggtgtgtacctcccaagcaagcccagctatgagtgcttcatattttgtttcgttgttggaggccttgaatccaaattttattgctctgtccatgtgctgcccccaggtgttatgagggcaattccttcaccagaaagctggtcagtagctgatctatccacatgtaatttctaggtaagtccgtcttcattcttttctagtagggattatactggctctgggttatcccttgtattactctcttctttgactgtacatgtcaccacaaagtccgctaaggcttgtcctttaactactttacggggttctaagtgttaggttttgtgtcctaaataaaaccctttacaatct

SEQ ID NO: 391727 - DNA, 1473 bp, Cannabis indica
ggtcccccatccaagtctgggtcttaggtcccgatcagagtctaggaccctatcggggttcaagtcttagtttgaattgaagttctggtttctgatctcggtccgggtctagatctggattcgagtctatatccaagtttgggtctgagtctcgggttccgatctaggtctggattccgaggcccgggtggaggtcccccatccaggtcgtgggtcctaggtcctattctgggtccatgtttaggttcgggtcctaatcaaagttgtgatttcgatttcgtgtctgggttcgggttcgagtccgggtctgggtcagggtctgagtcatcgtccgagtctagggttgggtatgggtccaggtccggatcctgttctgggtctgggtttgggtctcggtcgaagtccatgtcttgggtatgggtttaggtttgggtatgggtctgggtcttagttcagatgcatgtcccaagtttcgatcccggtctgggtatgggtctgggtttgggttcgagcgcaggttcgtatccaaatacatgtctaggtccaagtctgggtctgggatcgagtcaggttcaggtttgacccagtccgagacctgaaaccagaatccgacaagaactgggactagaacccagacatgattttgtaataggacccaaacctaaacccaaactcagaccagaatctataccaggacatggacccaacaatgaactgtgacctaggacctaaagcaagaccgagacctcgactcagaccgggacccggacccagtcctaaaaaccggagctgaacccaagacccaagcaacagactcggccttaggacccgaaacttggacccagactaggactaggaaccgaacccaaaccaggacctggactcggactggacccgaactcgaacaggaacaagaattggacccgtaccgggacctaggacctgaacataaatgggtgacccaaacctaggaattgagcccccaaactaggaccataacttgggcctcagaacttggatcaggatttgggacacgaacccagacccaaaccttgacctaggacccacattgggacttgggatccgagactcgatgcttggacccgacccgtagtcgatgtctggatctaggacttagaccagaacccgaacccaaactcgaactcaaaccaggactcgcacacataccaagacccagatccagactcgggaaccaaaacggaaacatgaacaggaactagaccgcgatcttggaaccggaccgggatgtggacccagaccaaaaccctaaactagacccagcgtcagaccctaaccgagaccgaaacctagacctgaacctcgccccagacccaaattaggacccaacccagacttggacccaaacttgacccgaacccataccccatgacttgaaactagaatcgaaactagaagcggatcgggacctaggaacaggaccaggaccaagac

SEQ ID NO: 391728 - DNA, 934 bp, Cannabis indica
ttttattttaatctagtacatgcaactacactttatttaatgtgtataatcaaaagccatacatatcaatggttaaaaaaatatcttcatagtatgaggacaaaataggtgtgcccatcataaaaattttctacatatatgtataagcatttactaattagcctctctaagtgaaaaagatcttaatagaaaaatatttgaccaaaagatttgaaaattaaaataaacatctttaatcaaaatttatttcaagtacattccatttttaaactactaaacatagatgagaattttttttttttatatgatggatagctgacgttaagaatttgtcaactaactttatggttagaaaattagaatcaagagcaaagttcaaaaatcaggtaaagttaaggtgaaatgcaagtttaaatggtcagagatttcttgagtagaagaataatttcttttattgcattcattatatgagttacactattaattttctaatcccctctcacacttcaaaatagggtatttatagactctaatggcctgaggtacatggaggtcccaaagagacaagttattgcttttgaactgcaaaccgttggtgttggaggtggtcttttaggctgccaactgcaggtaaaggtccaggaggtggtttgatttctcctctcacgacattctcttcaatatgcattcaaatttcacctttactccaccctaaacaaacaacacatactgcaaaacgacttgacacaatacaacacacactcacacacacgacatgacccgcatgaaagcacccaaaaaggctcgcacatgagcccctagtcacacacacacacacacgacacgactcgcatgcgagcccctactcatgcacacacacggcacgattcgcatacgaggccccacatgggctcgcatgcgagcccctactcat

SEQ ID NO: 391729 - DNA, 1654 bp, Cannabis indica
catttgcccaatcttttcctccatagtcatacgcttcagtaagtcatttattcgaacatttatgggttgttttgggtctttatacttgtagtaactatctaatgcatctgctatggctaaacacagaatcaatagaagaaatccctaaaccctaaatcgaaaaattgaaactgaaaaataataaataaatataaagattatgaatatttgttggctagggtttgtaaagggatgaaatggaagaagccattggagaggggaagcagagagagcttaaaccctaaatcgcaggggcctattcaatttcaaatcaaagagaaggtgtacctcggtttggtcgacgtcacacaagggggtcgaagtggtcgtcggggttggtcgacgtcgcacaaggggcacaagggggtcgaagagggctgggagttctgtgagggcttggtctgtaggaaaagaagaaagaagaagaagaagaagaaagaaaaaaagaaaaggaaaggaaaagaaaaaaagtaaagtaaacttaactgtgatttttggatggaggtgtccagagcaaaaccgaaccagggtttaggtagtttagccgccaaatttcgatttttgtggttaagtgttacaaaccgtaaagttcaggtggtttagtcgatatcccttatttttgacataatttttaaatttttcatgtacctttcaaaagggtacatcaatctcataaaatactgggccgcccattataacttcttttgaaaaatgtagcactaaatggatcataatatcgaaaaaggacagaggatagatcaactccatcttacacaatatatgaatgagatcttcttgagccttttccaatccttcacatttactgtccttgaacataacatttggaataattggaaaagttctatgatggtacctcatgttctcttatccaaaaaacttgtcaacacaaattgggagtaatcgctgcattatcacatggaaatcatgagactttaatccaacaatatttgtgtcttttttgtttaccttcttcttaaggttagaacaaaacccatctggcaatttaactcccttcagaaattgacaaaactcttgtctttcttcaatagtcagcacatgaggagcatgaggcttcattaactttttattagtatcttcgtagatccataatgactgccgcacacctagattttgcaaatcacgtcttgcattaagggtgtctttcgatttgtcataatctaaaagtgtgccaagaatactgtcacatactttcttctcaatatgtatgacatctatgttacgcttcaactcatttgaactccaatattaaagttcataaaatatgcttttttttcctccaattacttgtatcctcgccacttttttgtttcacataactaaaagacatgtgttttccaacaactttacttggtagggtctttactttttctaatatctcctcacatgtatatcttctaggaggacgtctcttctcaattgatccatcgaatgcgcaatcatatctcattcgatgattagacggaaaaaatcttgtatggccaacataggaggtcttaccgagcactctcatgaaacaagtttcttcgttacatgtagtacaagctttgtaaccttgaccactccacccagataa

SEQ ID NO: 391730 - DNA, 1541 bp, Cannabis indica
aaaaaaatcagccatagattaaaaatattaaattttaagagttataagtatttagtaaagcaagaaaacaaatacattttgtttttttaacaataatcactttcactgaaaaataattaaaggtgagcacatcatacataaacggtgaaaattatctaactaaattagtttatcattcacgctaagtacatgtataaaattttttagcagccataaaataaggatgcatcagaaaaattagatagtaaattataaaaatcgtcgaataaggtatctaagttattacaaaatgagagacgcttgaagaaaataaagataagctaaacagttagatttcctagtaacgaacaggagtctcaacttcaacgaccaatccaatgctctcattattcagtgctacaactttgatttcaacctaattgtgaactaattcccataagagtccaatcttgtgttaccatcaattctcttgcgttcacttgaattattgtaaaactccctacaatatcaataaaatttataatgagttattagaaaaaaaaattgattttttttataatatttaccttaaaatattaaataaatttaaagaaaaaacgtatctgatatgaatgactcaaaatgtgatgaagagatgtccattagtcaccaaacataaacaaaatatacaataacataacatagtataacgtgatataccacattactaacaatacaacaccaaagaatcactactataaatatcacatgtagctctgacaatgaggttatcacgacactctgaagggagatgaggagcaaatgggccaaaatctaaggccactcacttagctcaattttttttttcaaaattttgcgaactaaactttgacatgtaccaaatcatgtcatctgaactttttagacagttaaaaatgtctctcgaactatttaaattgttagatttaaggatttctatccaacttcgctcaattttgctaacgtggagattgtccatctaccaagtcgtgccctcctaactttgatatttaccatattgtgtctcaaaacttttacatgtactaaatcatacgtcttgaactttcatccacgttagactttcgttggtaaaattagtcaaaagtctttaaatcctacaatctcaatagttctttttaacaaaaaaaaaaataaatctcaatagtttgaggaaattttttaacgacctgaaaaagtttaggagacataatttggtacatgtcaaagttcagaaggtaaaattttaattaacctttatacatttattttactgaaaatatacaatttctttcttaaaaaaagctcaatttataattttttattagagctctcaaaatagttgagacgcccttaacatactactgcatagacattccgacaagaatatgaagaggctacatgttgtgtctcattctctgcagcttcttattttagattttcagcaatggagaaggtgttgggcaatgttgttgttaggctaaaattagtctaagtttcgggtcgtattttcggttagttttcac

SEQ ID NO: 391731 - DNA, 813 bp, Cannabis indica
catagggagcaaaggctatgtcactattgctatatagtatgatttgtgtgtacaaagttttgggtcttgaggcaaagatggcatcatgagttctcataacctctttggcaaattcttgggaagagactactatggttggaacttggccaaattttaggtacataaatggcccatattttttggctaagtctcttagtgtatggtggggtaaagaccccaaaagattgtgcatgtttcccacaaagggtagttgccatggtcctggtgggagggttgaagaagttcttttcttgagtatgtttatgatgatgatcaccataaacaaaaaaattaaggttgagaaaattattgggaaagagggtaggtggagctccatatgtatatcatgaaattgttataacaatattggtgtctttttgtttctgttatcttcattagttactccttcattatatatattggtagaaattttataaatatatatctgtttttcctacattttatattgtcttagtaacttaattaagataaggccagaaaagggtagagatttaacttatattgatcaaatattctttttaaatcaatttcaggatatattttatattaattttattttttgtcgttgtgtagttagtgctgtagtaggtagagatcataagtttgtttaattaaagaaatagagaatgatataatgtttgtttaatttttgttaatcatatcaatttgtttattaattagagtgaaaatgaaatgcctacatgacgattatatactactttattattattattttgagaaaataatgactca

SEQ ID NO: 391732 - DNA, 985 bp, Cannabis indica
tggatgttgtttgaccaaaaataatacagattgaatcaaatgaacacctttatttgtatattattaatcttgacagaaaaaatatataaataatttatgaatgtttccagttaagaaaacgtagttatatataattgtgtaaactgttagtacttttttatgaggtatattgtaatagactttgttaaaatactaacaaactcaaaataaaatatttagggagtgagagatatatggtattaatgtttatataaatttaaatatcaataatttttagaggagtgctaccgtcaacttcctgttacaacctcttagtcaacctccatgcccaaaaatacatgtcggtatattttttttcaatttttttttcacggggagtgttcgttatacttacaatatcatccttataaacttttgaaatttttcgaataatttatagtgccgaaaatacgtttgaaattttttgaacgcgcgtggtaaactggaatatcaggaaatctgtttttcgatcctgtaaactactcgaaatttttcaaaaatttacagggatgatactgtaactataacgaataccgttatgaaaaaaaaattgaaaaaaaaatatttcgacatgtgatttcgaacgtagaagttgacgaagagattataataaaagattgtaattaacattcttctaattcttattggctaagaaaatatcattgtataaaatagattaatatagttacctactcataattaggaagaacaagtcctaatggccctaaaaagataaaccgtgaagctgaggatgtcacgtggacattttagggctcaacttgggtctaatgtcagtgttgggcgcccaggttgacatcttgtgcaccgtctcgcatcaattttagttctcataaactttttatgggcaatctacttagttattgtcctaaaatacatgagagtaggggtgttcacaaagtatccaatccaatccgcaaaatgcgga

SEQ ID NO: 391733 - DNA, 2207 bp, Cannabis indica
aagtagtaaaagaaattacacagcagttattgagatctctttttaagactaattctccacacaaaaataaataaataaattgaagtttgatttttttttattatttattgtataattttggactcaaactcaagacctccaacacacgctctcctatagccacttgagccagcagttaaattgaactttgagttattagctagtgtatctaatgggagtccgacgaccaggcaccggtttagacaaaccaccaccatcattacccaaagcctgaagaggaaatgaagagggtctgccttccacccttccaggggcaagatgcaacttccttgcatccatacgggacctcttagactggtcaggtagtcgatggatgggattcgcacgaataaaatcatcatacttccacttgtggccacgcagaatcgaagtcagtaaagaaatgcattcccgcaaagggtgtccgataataccacaataaaagtaaagatcgagtaattgttcatactttagaggaaatttaaagttttcctctcccttaatcaaactaactttcattagtttaggtagtggttttgtaatatcaattctaacctggacacggagaaatcttcccaaacagtccttagacgagttctcgtcgacctccgtcaccgggccaaggagacaccctaactcccttcccatcctgacggtcatacaagaaataagaacaagatgtatttgaacccagaatttgactatatcaaaagccaacgagagataatcacccacacccgaagggacctccaaagccaagagttaatgttcaagcaaccacggtccaccgcgaaaacctttcgtttgcctttagatccaaaaatctaaataaaatcaaattatttcccacgaccttgacagtcactgaaccattaattttcagaaaaccttgatacattgcgacatgtgctctcttgaaacaactttggatgagatcaactttctcactaaggttcgatcaacactatctttgtaaagaacgcctaagattaacattttagattattaaataattaggttttatgcaagagaaataatcgttatttataatattgcatattggtaaaaattatttaattgcaatatatgttgaaaatgctatatgtaaatatctcaatttctgtgattgtgttcggaagctgtggaaagcgacgttgggcctttagagagtcgcattttatatgttttagaatattattaccggggtatcattgttagacattagaaatttcagggatttgtcgggatttgaaaatgacaaaattgtccttaggttgtttaatctttggttttaattgaatgggtaaataggtcattttgccaattattcttttggcttttagtgggtactagaggctgccttttactaaacttatcattagttaatattaataatattagaagaataaggaaagaaaggataaaggggtagattggagtaacctagaagcatctctctcttcctctctctttcgtgcaacccaaagaaccagcaagggaagggaattcttgttgcaattttggagttctaaccagaattagaagacccaatctaaggtattaattcctagctttttcttccttggttttcttgaagtaaaagttaggtttttgaagatgaattgtgttctaagtggctgattgttttagaagtgtttattcttgtatggtgagattaatgaaggttatccttgacctaataagctaagttgggtgattgttatcttgcttgaactaaattatagtttgaaagctctagctttgagctttaatggtgatttccttttctgagattcttgtggtgttttcttgcttggaataggttggttttgatgtgtacaggtatactggaggttattagaatgtttgggtgaattttgagttgaggggagcaattttcgggttctcagcacagaaccggtcgaccggttctgggggacctgttgcaaccggtctgccggtcggggctttttctcgaaacatagtttttccagtttttatgttgctaagggtgttagcatcctatttatcgatagggtaatccttagtttcaattttaaatccacgatagatattttagcgtgtctctcattgaattttgaatattatggtttagggccctgtaaagcgtcgagctgtgtttccactcaggctgaccggcacacttg

SEQ ID NO: 391734 - DNA, 1414 bp, Cannabis indica
atatatatatatatataactaagagcatttttgtacgaacttgtctcccatgaattagtcccattagtgctaaagcagtttgcaccaagttagagtggtctccttcaaaaggtgtgtagagtttgttagtgcaagaagtgtagctctctgcccatccaccatcttctctttgtgtttctagtaaaaattcaacgcctctgcgaaccgcttcacagttgttgtagtgtcttcctgcagcctccaatcctctaatggcaaaccatgtgccatacacaaaacaaattccccaatttccataccaagacccatcagccatttgtgtgtcttcaaggtaattagcagcattggtgatgaatttatcaacctctttctctctatgcccaggatgtgatttcctaaacaaatttaatgcctggattgatgaagaggtgcactctatgtacctgcatattaatatcaataactttaaaaaaattgagagtcattagtaaaaaaaataacatttttggaatgtttaaaacttttttaagaggtgagaccctaaccacatgtcttggctgcctgagcacagggactatgattatatacatacacaaaacagccataatttttcgtttttaattaattcgtttttctctttttatatgtatacatattgataattcaagttcgataatttcacttactcatattcaataacaaggtcttcaagaaactccacagggttgaggaactgaaaaaagaaaaaaataaataatcaattgttactaactaaaactattattacctgtaagatgaagattgatgaatttatataaaattatgaaagttctttttttttttttgaaataatttaattacctccaaccattttggagctcctgttggctcccaagctgaaacaccgccatttggactctattaattttgttgaaataaagacgtaattaatagttaatattatgttagtttaataacacaacacattctataatacattatcgcacctgtaatgacattatgacattaacagcatcatacatgttctctgcttccattggctcacccacaagttccgatggcatcattcctaacaaaagacaacactaaactttgcaacaagtttttgttaataataatttaaataatgaaaaaatttataaattgatgtaataatagtactggcaatggtaaggttaggttggttctcagggcttcacacaaagagggctcaaaatttacaaaaaatattatatttcttaaacacagaaactctctcgaaaatttaaaattacctcttcttatataaaaaattgcaaaataacatatttttgagccttattccactatagtttgataagtggcataagtaaattacctttaaagcttcagcagtacaatcagaaacttgcca

SEQ ID NO: 391735 - DNA, 2576 bp, Cannabis indica
aataaaataaaagaaaaaacaaatggacacgacattctctctatcgaccctaaatacccttctctatgggcaccacacaatgtcggcccaaattgcatcgtccctaaatccattatttcttgtagtgattggtgagctccttaaaaccttctagagttgcacaatgacttatgatgtgtacaagatggggttatgcttattcgttgaggatgttttgtacgctcgtgaggagaatttgaatgtttggactgacatgctgatggtagaaactatcgaattattcttccagttttcgtggggaaagttatcgttcaacaaattgataggagtttgccataaagacatgatacaacataagaagaatttagagaataaatttagaagaaaaaatcacaaaaggagtagaagtactccttttacagatatgtctgggcattgcagtattgggcctttgagtccatcatggagttggttgatgattatgatgtgaaattggagcaacattttccaagaatgcccaactggaagagcagagcgaacatggagatacacaaggatcaactttttccaatgttttcaaaaaggttagttttaactagctttgataaatggtttaaatattgtaatatgtttttttttaatatttgtaattttgtagccactacatgatatgatacgatagtggtacaattgttagttagataaataaaaaatgttaggctagataggggtacgattgtggtacgatgggaagaaggatgatgtcaatgagttgaggagaccttagtcatagcagtcgacctgggaggggaccctagcactgctcccaggttgacttcgggagctttgggatgaaagtttggacttcaataacttgaatccaactcactatctttcagtaatctataccataaatacatggagcaatcaaatccaagcctcatgagctgaaattacacaaacctgcaccgaaaaagccaacttgggcacctagggtttcatctggcgcccaagttaaggttcccaactagggtttcagtttcttagtgaaaatggatcaaaccttgcattgggacataacctagacatactacagacatatttgaggcatcagaattaggttcagagcaagttcatttttgagcacctggagcacttggtgcctgagcacccagtgcccaggttgacaatttgtcaatctgggcaccctccaagtatcagatcgatgatccaacttttgcatcttattcttcatcatcaaaaatgggggaatagatactttagggaagaaacaacacttcctgggtgccagaagcaaggcccagcgcccaagttgacacttggggctgacccaacacctaggttgacattttgtcaacctaggtcaatttcgatgatttattctgagagatctttcaagaaacttctccattttcagtaaagattaagattcaactatttttggggaccaaatgaaactttcaaagggccataactaggacccattgcccaggttgacacctaggattaggctccgcgcctaagttgatatgttgtcaacttggggtgtttccaatcaagttcgtggaaaagtgatctagaaattttgtccataaaaaaaaataataaagattcaagcaaactcggggagaaaaccacaaacctgagcccctagaaacaagacctagtgcccaggtttacaattaacttggtgtgcaggtttcgatcattcaaattccaaatcttattcgaccaatgaatctagaatgttaaaaaacaaggtaggagaccttttcctcaagttcaaaaaccttggaagtatcaaaacaacaacccaagagcttagaaataggtacccaatgccgaagttgacaaatggcctagtgcgatgtgttctgcttatccaattctgattttgtttcgaccgtctatctagtttttcactataactaaaatccttggaagtttttacagttacccaacgtctaggttgacgtcatatgtcaacatgggcgttgggatgtcaaccttagcactaggtcatgaattgtctttagtaaaacaatcataacttactcaatattgatcaaattgacaagattcaacttgcatttcaaatgtaattcaattctctaccaagtcatgtctcacacttcaatcttaattctgaatctatcaaccttaaattttacaaacaagggagttacgaaaataagctttgggttacccacaacgggtcccgccagaattccaaaaatgactatcaccatcagaagctaattttaatcgttggctcatcatctacggtcaaaaacatataatttatatttttctcctctttttttgtgcctccttcacttatgaaaggagagcttcgttagcttatttttcacattcagaaaattacccacaaggtcagagcttctctctctagaaattggagcttcttacacttagcctatttttgtaataccatctcgtgagaaataaaaacttgaagtagacgtagcaccattactgttgtgatacagggagtgaactactataaattttttgtgtctctcttataattactt

SEQ ID NO: 391736 - DNA, 2325 bp, Cannabis indica
tatgtatatacatttataaaattaagcctactaatacctctaaatttaacggaatatttttatattcttaaaatatttcgttaaattaataaaaattattaaatagccatattttatatataaagatattattatatatactcattattttgtgaaggaaattgattatatatatatatagagagagagagagagagagatgagatgttacaatcagattaattgtttttataagtagagaattgtgatgttataaaactgggaccactatacatacattacaattataattaagactatatataatatatatattacaatatttacatttgtgcttttgctgtcaatatacacaaaacctcacaagtgtaatatggaccacaatatatacatgtatgtatatatatatggaccacatacatgtatatatatatatatatatatgtatgttttatatttacatttgtgtgccttttttcatccacttgatcatgatgatcgtacatacatatataaacattttttatgcacgtgcatgaaaacgtgtatatatataatagttcattttattggaaataaaatcttgtttcttaaatttttactcattatctatatattccaatgcacattaagttgcaactactacattatatgagacttacttaaaaaaaaaatattaataattttagatgtgaaaattaaaattcaaatagtttgttgaaatagagtaaaaatactaaacatgcactcgtccaatatatatatttgaaatctaatttcactacatgttaaactagtttagatttttttctgaaacaatggtatttcttgtcgaaaaaaagagcttcatgcatgatatcctaaagtagattctgaaggcaaaagtttctagagataaaaaaaatgttcttttgagtgtcattattacggtttattatatttggcatgcttaaaataaggtgctttgatatcaaaagcttccaataaagtcatttttaattgtattgttaatagtgtttgtgttaagaatttgagtaaaatagatagtgagtagtgggtggaagctttaactaaggcttataagtaactttatctcgtacgtgttgtaatttgagttttaataaacttttttttaattttctaaaaaaaaaaaagaaaaaacaagaatgtcaaatagatagattaggttcgatttgtggacaacaagaaacacatgaacatttattttttgagtacccatatagcaagagatgtgtggaagagattctaaagtgagtggacattggtacaaaacaatatatcgatttgtggagatattaaatggcattaattagaataagcaaaacaagtcaattgaggaaagaggtgtacatattcttacctctaaatcttgcctttacttaatttggaagacaaggaatagcagtctatggaaggaagaagttctcactatattacgctacaaaaaactgttataatttttgtgactaaatgtgatttttgtgttgtaaaaacaacttacttatttaacacaaaaaaaagatatatatatatatatatatagtgataatgatttatttttaaagtcataattttttaacttctaatcataaatcgtgttcttgtgactacaaagtaaaaaaaaatgtatacatttatgtaaaatgcccttatatatgtaaaaaaagcatgaataaataatcctatatatttaatctacacttaattaattagctctaattaataataaccaacatcaatgactttaccgatttatatcttattatctgaaaggaaaaaaaatcataaatggaaaaagaaaaaaaaaaggttttacacacatactgaaattttcacttttttattgtggggcggaattttttttcaaaaatactgtataaattttatattgtgtactgtgttaatttttacggttgttccacggttattttttagttgttccgctgttgttttaattgttctgtacgttttattattttatggttattttatataaaaaaaaatatttttgtaaaaaaaatctgtgtgacagtttaattataattttttgctcaaaatctaatatttttgtaaaaacctcccaaaaaaaatgcttcttggcccaatgtggcccaactcaaatgatcaggtatgaaaaagcccacctgttccaagctgaactatctagagaaaattacattctatatcctttttatattgtcctattttatttttactctcttttttaaagtatattatttttacctctttttttaaacattgtaccaattttgcccctgtcacttcaagatactctccatgtga

SEQ ID NO: 391737 - DNA, 804 bp, Cannabis indica
gaaatgtcgtatcactaattaaacagttaaatataacaaaaagtaataaaatggccacatttctacaactatcttatactgaggagcattttttacgggtcgcatattataaggaatatcattaagtagtgtcataaatttataggtaaaaatattagattatttttttaattgtatttcttatttaaaatatgtaaattgacacttatattggtatatttttgtattttcagatcttcaatagttataatgtgaattttgttatatgattgtatatattattgttattggaatattatatgaatttttaaaaatttgtaaataatttatagtataacaaatgtaatggattgttcttattgaaatattaaaaaaaaaaacattaaagacccataaaataaaatacagcccaccatgcattatatgtctctttgataaagtagtttttttttaggaacaaattggctgtaaaggagtacactaatattaggtgtacactttcttttcttaattcttattggcccatttaacttctttatgccatgaggtaaaaagaaggagagctacactagatttcccttatatatattgattatatgataataataatattataattattattttttattaatcacacatttaataatgatcacaaatttatagtgactttctttttgtttgaaaagatttagagtggcttttatttttagtaatttaaatcatataatttatatatatttatattacattcatataactatcaatattaaaaggtggtgtggcatgttgggttttatgccc

SEQ ID NO: 391738 - DNA, 699 bp, Cannabis indica
aatgtaaactattcagagttttccaaattagaacattaagcaatcattatgattacaaagtgagctaaaatcttaatgggaagagagttaaggttaaccaacctccaatagatatataaggtattctacgagcaccattgatgtaaaaagcatcagataagatcccataaagaggtttggccaccataggaagattaccagagttctgaacaagctgtagagtagagggatgcaagttgagattatgagtcaaatgaaaattcaaagccaaccatggaaaacacctaaacccctgaacccaatacccaagtccacacaaatccaacatctcagggccacccaccaaagccccacttctctgttcatttctcctatgaaaaaatttggttgaagaagagaaagtggtgactttcgggttctgaggatgatggtgatgataacaatgaactggttttgagtaaaggagagattttttcaatgaagtaggtctcttcatcaagatctggggaggagtaatattcattatcctccatggattttcacacaaacccaattgacaaatcataatattttgtaatggggttcaaggattttggttgaaaatgagtttttttctttccctttctaaagaaagaaaacaaaaactagtacaacaacaacaaggttggtatgattattactcaaataaaaaaggaatct

SEQ ID NO: 391739 - DNA, 695 bp, Cannabis indica
aaatatatcatgtatttttttaataaaaattacacaaattttatattcttaaaagtattatgacgaaaaaataacatatttactatctgtttgagggtttcggtcaacaaataaataagatacaacataagataataactctaatatatacataagcaagaatagaatcattcttaaaaagcttcatacaccactcaagtatatgaacacaaaaagcttcatagaaagatgatgacgatgataataatatgacacattcacaaaatatcacttcagaccaaaacaagaaacatagaaagaagtggattgaaatcatattaatatggatggaaacttcacatttatgatattaacaatagctttacctccctagaaaaaacaaataaatgtataaaattgaaccacaataagtcacaattatgaccacaccagcagagggaaaaaataatcaattcctgcttgacaatactcaaacaataacactcatacacatcatccctcacataaaatttacgaaaaataaaagtatttcaaaaccccatactgtaaaacataaccaattataataaattttaaaacccaacttgataatataagaagaaaaacaaatcaatgagcacctattacccacttcctgtctttgtgtatctaagatcgtttttttttttgaataatggttaaatttcattaaacta

SEQ ID NO: 391740 - DNA, 1723 bp, Cannabis indica
cacttttttttttttaaggaaaattttacaatttggtgtaccaattcactattatttatttcggcatgggacaaaatttttttagtttatttttttttataatcatttataatgtaattatttaaagtattttacaaatttaaaaaaattgaaaatgtttaatacactaaaaatatagtttttttattttatatgcatgtgaaacaaactgtttgaacattattttttatagggtaaatagtgacataagtacctagagttttgagtttataagtagtataaacccaatgattttttttagtggtataagtacctaatgtttataaaactgtaattttctttcagtttaatcagcatagattctgttattgttttaaacaaggcacatttaagacccatattttaaattatttggtctagacggaaatatgtagtatcggttactttcaaatcttcttttaataaatttaaaattacagttttacaaatattgggtacttatgctactaaaaaaatcattgagtttatgctacttacaaactcaaaattttgagtacttatgccgttatttacattttttttatattgtacattattttaaatttctcgaaataaatgtcttaaataacttgattataaaaaaaaattagattaattttttttcaatatgcggagacagatagagatgtattagacataaataaatacacaacagcctaaaattatttaaaacatgtatttaattgcaactttattaaagttgatactacctgctccttaaactaacgagggatgaagtcgaattcagtgaatttgttttggggataaagttcaattattgtttatgttttgtgcatcaataataagtgtatagtagaaatatagaaattaaaaaagtaaaattatagcataagtgtactagtaagaatttatatatataaaaaaagattgaaaaattatacattgagggaaaaatattttttaataaaaaatcaacttttttccaatcttttcatcgtttgacaatgacaagtagagtacaaaagaaaatattgaaaaataaagttttggtagtatttctcaattaaatatggcaactgctccccttgcatccattgagtttgttaatagttaaattaattactaacattcaattaaataaataaaactgtgatcatcagtaattgtgtattattgaaaattggacatcatttgaataaataaagttttaaaaccaattaattgtaatataataagttacaaaaaattaaaacgtgcgcaagtgcgattttaaacaatctcgaaagctacatgtaaactcatgttttattttccttttaattggactatcaataatgtattttgagaatttctatctcattaaggatgacattatcacaacaagatctctcatgagagcaagcttaatacctctcaaaaaagctcttgtagtattcgaatccttaacccaaataaaaaagatatggacaaaagcattgttaccactacttgaccacacaacatgtggtattgaaacacaactgtggaacttgtgttaattggttgggactataaaatattattttgttatatatatactccatggctaaagcaaccatacagattttagtactgatacactattttttatgttttcaatagtttataattttaacttatatataacatatctaacaaaattttaaaatatttaaaataattt

SEQ ID NO: 391741 - DNA, 1548 bp, Cannabis indica
gttttattattagcttccaaggaatcgaatcaaacctggagaagatatatgctctcttagatatgccctctccaagaaagcataaagatgtccaaagcttaactagaaggatcgcaactcttagtagattcgtgtccaaaacaataggtaaatgcattctgctttttaatatcttgtgcgaaagaaaaaaattaaaatggaccactaagtgtaaagaagccttccaaaggtgaaaggaacatttggctacagctctcattttgtcaaagctgtttgagggagaaccattgtacttatatttttcattgtcagatcaagccatcagtgtcacattagtgcaagaagaaggaaagttacaacttatagtttattatgtaagtaacagattgcggagcgcagagtccaagtatcccatgattgaaaatctttcctactatttacttataaccttaaggaagttaagaccgtacttttaagcacatacccttaaggtactcatgaaccaccctttccaccaagtaaaagctagaatcctcagtgagactgctcaagtgggccatggagcttagccaatttgatatttagtaccactcaagaatatttatcaagggtaaagttctagccgatttcattttggagtgtaccaggattaatgatgatccgtagaagccagttctatgactaatgatgtaacgccctaactatataggcacgttacctaagatgattaagaaaccctaatcccctagaagggattactaatacagtaagcgcgggaaattaaactttaaatgaaaacaaaatgaaaataaacttgtaataattttaacttcacaaacaaaagtcacatgtttcgggatcccaaaaataatttataaaatattacaagtccgtctctaatagccgatctaagcaacaaacagagttacaaaaaaaatcatcactggtaaaccccaactcgcttggtctagtgtggcccgaacatgtacatatatcgcctagctcctgcactcatggctgatcagagacagatttaccctttcctgcacagtagagcaacccctgagccaagcccagcaagacagtataaaatatcgataatcacatttatcacattatataaacattaatgccattcacatttgtctgtatgacacagatccgcatgctacgctcacatgcctatttatgtctatgtgacatagacccacatgttgcgctcacacgtctatatacaataaggccttagaacagttcatctcggttctagttaccgagtccaacctagttatgccttgaacacataaccctaaatctcaatattctcatataattaacatggcacaacatttatacatcatttatcactagggtaataaccctaggccgttgaaccgctcatgttagggtaataaccctaatcccagtttctatttactcagatataacatttcaacataagcgccaccgtgcataactctacatgcaactactgtcttacctgatatcccgcaaatgtagagattccaaatgttgggttttatgccc

SEQ ID NO: 391742 - DNA, 2443 bp, Cannabis indica
aagtcagagaaatcatagggaaaaaaactctgtaaaaagcggatgaaatttaaaaataaaatcaaacaaaactagccacctcaactaaaattggaaaatatttacatgtaaaaaagaaactccagtcttttggaagatcatgagacaaataaaaaaatggacaactatgagaaacagttcttttgcgattcaattgtacggatcatggataaattaaatcctgaatgatctagttagagcacatatatgtcagataattccaaattccaagttcaattcccagccccgaataagaagaacagaaacaccagccaattggaagcagttatgaggcaagaaccaaattcttaaaatcttttacctccttcagaacatcaatattgatttcagtctttgataaaaaatcctctgcacaaggtttaacattagtcattctcaaacggcctcttttgctaattttcatatgcgatattgcagttggccgtttactatcaatacagaccgacctggtttgtacattgttggcattcatataacacaacatagcctcaccatagtcatcactaccaagtttccccatgaaagcaactttaccacctaagctagcaagagcaatcgcaacacttcctgcagatccccccggagcccttacaaatttttcaggagcccaaaaggcttgattcattctttcgtgtacttcataatctataagtctgttggctggtcttcctgccggcacaaaagcatgttgtgcagctccaaagcaacaaacaagaggtggccaaccataagtgaagctaatatcctctccctcatcaatattcaactcttcctcactttcatcctcaacatttgcaatgaaggttgactcctcagactcactcatttctgagtcactaaccaaatcatcattatcagaatcatctttctgcttaatcttcctcctcctccttaccttcttctcagttaccacatcctccgagctactagtagcagaagaagctggaaacaattatgctaatatgtttaatgctgaccaatcgaggttgaccaaaacacataggtacttaaaaagcaagagttgcacaaaacaaaaagcaataccctacactcattctctaccctaagggcaccaacgcttagccaatccacagttacttaaacaagcaagagttgcacaaaacaaaagacagtacctttctttcgagtcttccttggagacttcttagtgtccttactagacgcagaaactacgttatcaacactctctccatcactagttacctccaattcagaattctcttcaggagtttccgttatggctttcttccgagtgcgtttggaagtcctagttgtcttcttcttgaccacgaccttatccccatctggtgtatctgaatccaaattctctgcaattttctttctagcagcaaaagcccacttcttattttgcaacctgaaaccctgcagctgtacgagtttacatgaagtataacacaacggccaatccgagtggcacctgcacattccagtcagaaaatttcacagttttaagctataacagaatgcttccatttcagggttttagaggcttatgtaaacattacgaaaacaaacaagaaattcgggttccttgccaatatttagtgcaaaatggtagtaaagcagtagaattacaatggctttcaatcaaaagaaataagtacttttttttgttccttcacaaaagcaaaacaaaagataaaggatagagggggaaggcagaacctgggtaacgagaacaagtgagcgaacgaaagagacgccattgaaggagctagagagagctaaatctcagctcttcctgttctgggtaatcctctttggcaacgaagagcagagagatagtgtgggtttaagacgtgttttagcggtatgatgattgagtctctgcactgcggggctttactgtattgtcaaatgacgaaaacaccccttcaataggattcacttccttaaaatcaacggtctctaatttgacacgtggcttaatattttcagtcttcttcttcccacgcagcagtgttaatatgaaagtgtaataattctttgttcaaaacggtggctcaagcgttgccgacctatgcgatgtctgtgtttcttcttccggttaagactgtttcacactttgagagcttaatgtcaaagtactagtgggggtcctctaataataaacaaaaggtgtcagttggttttgtagaagcaagaattcaggtgggattggctttcgtaatttgcgggattacaatctttccttgttaggaaagcagggatggtgtcttcttctgtatgaagattctcttgtgggacgtatttacaagacccgatactttccaaatggtaattttcttacggctgagataggtccgaacacaagttttatttggcggagtgtgtttgagtc

SEQ ID NO: 391743 - DNA, 620 bp, Cannabis indica
ctaaaaggtacccttggtatttaataccttcttcggtattatactgctattagtataattaagtaccaaatcacatacaatttaaaaaaataatatttaaaaaatatcactagcactcaaacactactatgcctaatagcaatgtttgtgcccaaagcatttctcatatctgtatttgaaaagtcaaaacttttgaaacacgtcccactttttcaacagcatcttgataatttttgtaggataaattttaattacacgcatattactctaattactaaaattttattataatatataataatataaatatcccacgaacggggttatgaacataggtaaattataactcagtattttttaactcaaaatatgaccaccacaatgtgtttcatatttttttttaaggcatgagaaattggttgtaatttgaaatataattttcaaataataaattaatttaaaaaggtgtacatcttatcattctatttttatttcttaatctctttttattttattttcatataaatataaatgtttttggaatttaaaacggttgaattgtattttatatggactctgagttctatggttgttgagaccctgtgacaatgtttgatatg

SEQ ID NO: 391744 - DNA, 1148 bp, Cannabis indica
ttttacaattaacattataaaatgtacgtatattttttctaaaatgagtttattattttattaattttttttctttgtattatctatacattaaaatatttgttttcaaagaaaaaaatattaaaatattttttatacgcaaaaagaaatagttattatcatttaataaatttatttaaataatttacttgtatatttaaataaaatcattacagaaacatcacacatcacacaaatatggcattcatgttgttgggttttgggagaagaggagtggtcaggtttatcccacttaatctcatgtattttgttgggactatttatcccataagagttggattatttttagtgaaacgattatttttccagttaattattaccaccaaatataggattgagataatttatcctaattctagtccctatcctactggccaaacgggccctaaagatattggataactcactaacaaaaataggtacattttaataaaatatgatatgaaaatatttttaattaataaatatataaaaaatatatctattgctcaacttattcttaaatataacaaaaattaaatatatatataatagataatatttttcaatatcttttcatatatatatagggaattgctattataggaccaagtgtaattaatctatagcatagggtgcttattttaagagtattgttattgagcatcagtggtgcctagcacccttaagacgtgttattttgcgattggctagcgatacttcttaaaaactattatattaaactatattgggacccgatacttaattagactaatagtaatattgacatgtaggagggtacttaacactactggcgactttcaacatttctctttttttaaccaattaaaactttaaaaaagactatatgcatgtagcctatagttgacaaatgtatcagattacgtaatatgtaattatattttattttttccaaaatgattaaaggaaggacccctactctcaagtagagatggaaattgggcggttaatgtacaaggaattcgatccccgcccccatccccgctacctatttatacccccatccccgccccattcccgtctaataaccaacggattcggggtaggggaatacccatcggttatgg

SEQ ID NO: 391745 - DNA, 534 bp, Cannabis indica
ctatccttaaatttaactaaggttgttcgctcagctttaagaacagttggagaccatccacaaacaccaaaattattaactcgggaggccacatcttcagcttcctgaggggttgaattattctgataatggttgcgagccacaaagtctctgtcctcctcgtcggcaagaactggaactcgttgccagtctgaaaattttggaaccttgaactctcaagattgatccttgccgaaaagggcgcaagccttcaagttgttctcgtgaaacaagaagtttgtcgctcagaatccaaaaggaaggccaagaagaatcatgtgccttgtctcaattttagaagttggaataggtctcttagtgatcgttgtgaacacaacaaaataaaaaaagttagtaaagtatggccaacttgcattggcttaaaactcaaaataaaatttttaagaaaagaaatacatatgtatgatataaaatgtggtggtattgatgagaaaaagacccgaggtcaaaaagaagtcatccttgaactctttt

SEQ ID NO: 391746 - DNA, 662 bp, Cannabis indica
aaacagagtacatcaaacttttacaatatgaaagcatggtgaactagaaaatacagaagcatacttagcattttaacttcaaattagggtatctcggtaaaatatactaaagagagattaataagataataatgaaccataaataaataattaataaaaaaaagttatctttgatactacacaattattaaatcacaagcgaactacgaataaacaagagattgattaattagtgactttcataaatataaatgaaagtagtaacaagaagcttatatataaatttacatatacatgaaattagcaaagtcaattcgattgaaattactaaaagtagaagataagtactcacaaattacaatgaaaaagacacatcactactaacatacatatttttaatcaacatttacaagagcttggcagtataacagaccttgatagcaagtcaattctattgaagctactaaaagcagaggagaagtaaccacaaattacaatgaaaaagactcgtcactaacatacttacatgtttttaatcaatatttccaagagcttggcaggataaaagacctccattgtgaaacttttaaaaagtgacatttggatatagtttttgttacgggtgttcacgaattggtttggttcggatttttaattttttt

SEQ ID NO: 391747 - DNA, 574 bp, Cannabis indica
ttaaatcttgttttgtctaaaatggtaccaaatagaacttgaactcattttttgacaatattttttaatctaaccaacttgaaattaatttttatcatcaaattaatgcaaaaaaaaaatgtaatcactagttataacatcattaattgaattattattgaaaatgagttcaaaatactatttgtaccaaatatatgttccaatcataacttcctaaacttgttttagagttgttaatttccataaaaagagtaatcttttagaaagaaacaacaatattacgagtgcaaccaactttaagattaaaatcttttaatatgtacagctaacatagttattacatatgctagttaatatgtacaactaacatagttatttgttgtgtgatgagttagacaacgagattcgtaaattttggtggattggggggttgaccgtacccattttcttgctctcattgtattgctcatgacttatcagcttgggctacttctaatttacatttttttattctactcattttgtttggttgcattttaagtattggaatgacattccaatgtaacaagaaaaa

SEQ ID NO: 391748 - DNA, 1127 bp, Cannabis indica
agtaataaacataaaagtatagaaaatttagctgcaaattacctttaaaataaatgatgtttcctttatcaaaataaataaatgaacaaattttatcaaaaaataaaataaaataattaaaacatttgtattgataatcattagtaccaaccttcctatcaaaaacattggtcagtgagaataaccaaaaaaaaaataatacattttgtgcaattaatttgctgattgaaaataaaatgtaactaatcacattggtaacactaagaataacttttacactcatttcaaaaaaaaaaaataacttttacactcattatcttaaaaaaataaaaaagtactaataataacctcttattacaacctattaattaatctctacgtctgaaatcacatggtagaatatttatttttcaagtttttttcatatcgatattcgttatagttgcaatattatcccaataaaattttgaagtaattctaataatttaccgtatcaaaaataaatttcctgatattctagcttaccaagcctattcaaaatattttaaatctattttcaacacggtaaactatttaaaattttttaaaagttacatattgaactataacgaataccactatatatgaaaaaaaaaaaaaatgtcccgacatgtatttttgagctcgaaaattgattaaaatattgtaatagaagattgatagtaacactcttctttaaaaatatatcactaacagtttttttttttttttatcaaacttttacattatttatttatttaaacaaattaagaaaaacaatcttgagagagagagagagagcaaaagtgggaagaatgaattcatttgtttaacatatcaccctagatgtagagaatgtttacaaattatagcttttttaaataaagaaccattataaggtatctattacagtaaagttttggataatgtttgttcaaaattttcaatacataatttgaaggagctacatattgtctgtgctctaaattgagaagaattttgagtcttaataatataataataataaattaataatgttgttaagaaaataatattatcaatatcaattgttgggaatattttatgaggatcaagatttactaacaagt

SEQ ID NO: 391749 - DNA, 1681 bp, Cannabis indica
tgatttcgattagaacaccaagtaattctaataatgcctcaatcggttaatgaagtttcttgctttaagaatttgtcaaaccttcgaagtttgaaatgcattaatttcaaacaaaattgcatcaaaacacagtataaatacacacaattttatacttagaaaatatttcaaccaagtaagatttgttcccatacaaaactagataattgtctcaaaatgcaattataatataaactagtcttaaaagaagtagcgactagacaaaatgaagctttcacccaagaagtgtctacaagttcaagaagtcgcaatattgttgttagcaatgttctcaccaacgttctcctcgacaaccttagcaacatcagaatccacgccttcattaaatgggtcttgaccactccttaagtcactgtaggagacatgttgcaataagcatcgacaatgtccacaactttcaaaccaagtagcaagaagtcaaaagtaggagcctttgacaaagtcgtgttaatatagtcatttacacctttttcatatgattgattcttctcctcctccatttgagcctcgaggatttgattctgcttggttaaagtttcgataagcttgttacttctctccttctcagtctctgcagccttcacttcactgcatctgtcattgccttttccttgtcaaccaatgacaacttcaattgcttcacttgttcctgcaacacaacgatttgcttcttgaacaactcattatttttcagcatttactacatgtctataaatgagcgagcatacttagtcaacccattgatcatgtgctaagaataaccactccgtgtactcaaattcttaatattcaagtagtcaaatctattacaaacattgtgaattatagctttacaagtaatttgaacaattggcaatttttaattccaaagcacattatatctagcataccaattgtaataaatcgtggctgcaatggtactaaaaaagatccttggtttacctcttgtttgtaactttgctattttctgaatgttgatacccacccaactataaagtttctgcaacactttgctgctgtaatagcagccaaaacacagatgaggatggtcctccaaatcattcccacacatcaaacaatttggtgagatgatattaaaaattctcttaaattgttgatattattagatttaaagattttcgtccaattttgtttacttttcttaataaacgcttaaaattgacagaagtttggagaattcggtttcgtatataaaagtttgatggacataatttagtacatggacaatcaccgctttaataattaaattggacagaagtagacaaaaattcttaaatctaacaaaaagaatagttcagaaattttttttaataaattgataaatttggggttaccacttgataatgaataaaattgaagttttgttgaatatagtctaagaatggagaaaaataagaaaccaaacagaacataggaaatgtaaagggttgagatgcaaaatggccctcaatttggtaactaagttagtaaatgtccattttttaaaaaaatttaaaaaatggtcaaatctaataaattagataataaaaattataaaaatagatttatcacatatatttttttttaaaaatatatataataacaaaattaagttacataa

SEQ ID NO: 391750 - DNA, 995 bp, Cannabis indica
  modified_base (99)..(99): a, c, t, g, unknown or other
tatataatatatcaaatcatgataattagactgttgaatagtctattagactacttgttagaaagacatggggaaaaaataaatactatatatgattanatctatttgacaattgcaacacatgatgaagttgtcttgtacctatatatgtccacatcattaaattgataatgacgaaatataaaatttgataaataaatagtgactcttgaagagtgtatatgctttgaaaaataatatgattagtttattcgtgtatataaatataaaacttataatgattactgatatattgtagtgattttataaattatcctacgaaagttttattgaaatataaattatagtgaaccctaaatttatgaattgagttattttgacatgatcaattatacgcaataaattataaatgatttgactaaattttattgaagaaccagaagattctttccatgattaatttataatgctcaaaagaagaatatgcatatattttgcacataaaaaaagtgaacgtacattttaacattttcttttaattttaaaaataatatatctataatttcatttagttttttattatcctttgtaccgtgacgtgacattgagttggatgacacgtgtcctacattctcttacctgggcggaagaaagtactcctagcagcctaccaaggttgatataaatgtctatcgtcagcatatagcaagatgtccgagcaaaataatcaagagacatccgaccaaagtacaatcttgtgatcaacccacatgcaccggacataatatgtgagttggcaattttagagataagtctcgccgtattcaagacacgaagataacccctatattcgtgggattaggtcaagaaaaaatgcaatacgccttagtttcctattctttacattgtaatcatggaattaatatagtttcatattttatttattatagattaagggaaaccactcttcatgtaataagctcctataaatagtg

SEQ ID NO: 391751 - DNA, 705 bp, Cannabis indica
gttacgtttttatattataaggttgacttgattgtctttttcttggtaatctgtaagtctaagaaaggattttgtgatgtgtctcgtgctccagctaatgcagtggcagtatcctagaacaaatcattgaacacattaaataaacaactaattaacaattaacataaataatcaaaagaaaaattaaaaagttcatttaaactttctttgggctgtagcccatggctttattgggcccaaatcgagtaggattgcatcgttcacacaatagaacccaaatcataagtttgctggattaggtgcaaaatgctagtgattttcttttcttttctttcttttttgttttcgtaaatttacacaaaatacagattttttttttacatttctaagtttatatgtatatctgttttttgagaaataaagcattattttcatgttgcttttccgtaacagcaacggaaaaacgactgcaattttgttaaaaaaatctataaaaatgtaagtcttttgtaaaattttgggtatttatgaaataatctttttttttttttctctctcaatttatcaaaagtgactttacatcgatagtgtgtcatagtagcccgtcaaaaatatatgaattgtcacgccgttctacttataatcagtacaaaaaatttaacttttaattcacaacaaaactacatgactaaaagtaaaaaaatt

SEQ ID NO: 391752 - DNA, 1025 bp, Cannabis indica
tccaatattgcaacttcgccaaatcacagatatcttttgatttaattcatcacagaggtcaatcgagcaatgatgtcgacgattttagactgaagaagcttgcagctttccaaagaaaggctgtggagcacgcattttcctgtaagtatccatttagctactacaaatctcttgagaaagagctatttctattttctagtttcctacttaaaaaacgcagctgcttctacagatatgtgattcgagtcccttgggaaaacacatatcacacactcggcagcttataatcagtggagagaatagtctacagcacttgctccatctacgaggtcgaaaactacgcaatcatcaaatcagttctgtctctggcttcttcttttggattccaacttgaagctcccattcctcaatggccttccggtctctgaaggctgtaagtactctctcattactatccttccacatatatacacagatttttcatcttttataactggcaagctctatctgggtttgtgagtgagacaaagaacgtgttaacattggaatgttaagattcagaaacaggacctaaacatcggcacccacaccataccacaccaccaccaccactaccactaccactaattctatctcagactcggtctttactcccactcgacgcggcgctcctctcctcttcctcactttgatctctctaaactctctcttccttttctgctttctatctgatgcgaaattgattctcagctaaaaatgtaagacatatatacacttttctgttattgtgatgatggttgagtaagtcttctgcttttatatgtgaatctgtgtgcgtaaaataagctttgattaagtagcgaaatgaaaaaaaaaagaaaaaataactagagagaataataatattaagaaaatatcgtgttggtctttgtaacagttcatagggatatagtgataatttcaataagtttgttcttatttttaccaaatgtttcgtttcagactgttgagactgtattctattg

SEQ ID NO: 391753 - DNA, 1382 bp, Cannabis indica
ctggaacaacggtttgcaagtcaatccaaggcccgattacttcaaatcaagtcccaattatccacaatccagaaaggtaatctatccattaatgattactatgacaaagtgaagattcttgctgattcattatcaactgctagtcaccctcttgatgatagtgatttgataatgcatcttttaaatggtttgggacccgaatacgatcctgttgtggttcgtgttacaagtcttgtggataatttgtctttagaatctattcaatctttgttgctaacccatgagagcaggcttgaaattaagacactatacattaagtgattcttcatccaagatgtaagcaaatctctctcgatacactcctggttatcgttcttatgctcctcaaggtcgtggcactgctaccaacaacagatctcagggtcgatcctttggtcgtggccacccctccattccacgcctactatgtcaagtatgccacaaacctggacatactgctgccatatgccattaccggttcgatagaggctttgttaaacccaagataagtgagccaagagcctatcttgctgagatagatgaagatgatgaccctcaagtgtactccagctctgtgctcctcataaatactaaataccctggtgctattaagctaatcaagcctagggtaaaatggtcaaaaaaccacaacgccgttcaaactcggaattctattttctccaatatacatcacaccaagaaataaggttctagacttacccatgtggttaaaatagtcatccattgcattttccgttatagctgaacaaaattataataataatataactcaaatataactcaaataatacctatagagtttcataaaatctccaaaaatcgagaaattatctctaatgcccatttctaaaaatgggactcacaatataataatttcatgcataattatgaaaataccaataattaatgctaattgcctttactaatccatattctaatatgcagtcattacaattatccccctgttaaaaggatttcgtccccgaaatctaatatgaatagctctcgattttgagttcttattccaaagtcttattcccaggtggtttcctccaccttgctgttcttttcagaggatcttgaccaaacctatgctctaatattttctttcctgtcaaggaattaaattggatattcgacgtaagataagtttgactgtagttcagggcttcataactaagctatgagtcgggtctaaaatatatttcctcaacattgaaatatgaaatacattgtcaatagccaataacgctggtggtaaggctagccgatacgctacctgcctgaccttcacaagtatctgaaatggcccaatgaaccta

SEQ ID NO: 391754 - DNA, 629 bp, Cannabis indica
tattaataataaaaatataaataccatttgtaaagtctacacctttcccataaaaagtaaagctcaactttttcttaaggctaatacatcaaaacggtaatatcctctacaaaaatttaaagaatgtaaataaatttattttttaaaataattcgacctcattaactcttcttgttacaaataattgaagctcacatgttatcccaaaaagatagtaaaataatatcacttcactgaaaaagaaaataaaaatataaaaaaattattttataagtgtgtgaaaatagacaatttgaatatttttgttggagaattatctcatatactgttttttaatctttttttttttaatttacggtttgggtttttcaaagtggtcgcaataggtttttatatagaattccataaaaatgcaaaaaaataaaaattattttgaagtgtagaaataaaaaaatcccttttttttaatatttttaaattattttaaatgagaaatgttacactcaatctcatattacaacttctaaattaatctatgtgcttgaaaacacacaccgaaataattttttttaaaaaaattcatgaatgtatttgttatagtttgaacatcattcatgtaaatttttttt

SEQ ID NO: 391755 - DNA, 915 bp, Cannabis indica
atatatatatttttttttcatctgttcgtgttatttttttttttaagttagttatattaaaaaaaaaattgagctcgtggttctattttaaaaaatacagcgtttattttataattcaataaaataaagagttctaataggtaatttttataaaaaatataatccaaaatagtactaaccatttttctagggcgttgtaataagtgaaaagccaaatatatatatgatacatatatttgtgtatatattattggaaaattttataatgtatccttaaaagaaatgcattgatatactcttatttgatttggtattcgaaataaatttttaatcaaattttttctcatgctcgtgtacattatagatctttaagagacatcttgtaaaattttaagaaattcagaaagatttaacacatgcaccgaaaacatagttcaaataatatgttgcatgcgtgactattttattttatgcccgtgtgaaacagactctttgaacaatgctttctaaattgtaaattattttaaatttttaaaaattttgtaggatatcttaaataactttaacgtacacaaatataaaaaaaaaattaaattgaaatatttttaaatgttgaaatagataaaagttatatagtacatgtattttgatggaactgttaacctatattatatattatataggggaatttgcggcaaaagtccccaaaaagttcacgttgatacagattagtccccaaggtccaaaaatagcgacaatagtcctcaaggtcacactttttatttgtcctttggtctccaagttaacagatccgttaaacccaattcaaatgccacgtgtcgaaatattattggtggatattattattttaatttaaaaaaataaaaataaaaattaataaataattttaaaaaa

SEQ ID NO: 391756 - DNA, 792 bp, Cannabis indica
aacacattaaacaagtaatgaaagaaattattttttttattgataaatgaaggtcaagattacatggaaacagagttttatttagggcacaaaacccaacaaagtcctgtttatcataaacaagaaacgggtaattgttacacaaatattgacgatgccaatgaacttaagaggaaaattcaaaggttggagaatttctcttaaaaacttccaatctaacatatcataagctcacgttcatgctcatgcctcatttgtgaagaaggtatacataagctcatgctcatttatttttccaatgctgttactatgagtagattattgcaaaattttgcaatgaattggattaggctctcactaatatagattggattgattttaaaatggatgaagcgctgcatccattgtcgaatacgaaggtgttatgttgtaccaataaatgttgatgtgcatatctcatttaggcagccaaaaatgaagcactttagaaccataatgtacatgtaatctctaaagttgtaaataatactaaaagagttgtaatagatagattctcaaattaataaagagaaaatttgttaaaggatagagcttggatctgcaatttgtagctgttggataaattcccatactattgtcccataaataaagttacaagtaaaataaattagacctctttataaagcctcaacagaccattataactcatagagttgtcggttctgttttcctaggcttaggtcttttatttctttacaataaaaggaagcaaataaatatctcaagactcta

SEQ ID NO: 391757 - DNA, 773 bp, Cannabis indica
ataacaaactttacatcttaatactaaatagcatctttaatttgaaaatctaagaattaccaactatacagtttaacgattgttcatagaaagttccctattgtatttcctgattttcccttacttcttaataagattacaatgttaacacttttaagctaaatacaattaattcttcttttaacttcctctttgatcttacacaccaattaacctccacttgctctagccaaaagctctaaggggccaatactgattagcccaacctgccaaaaccaactactactacgctcacaatccagccacagatgaagaaggttaaagagatgctcaatttatattaggattgcttaatgcctgaggtcaacgagcagcttactgggacggaggatatgcttgtgaaactcttggttggtagagttgtgaaggaggttaccaaggtaagatttttttttcttgaagttctttgtacgggttctacccattgggcttaaagaagctcagacctagattaagcagaggccaccacaaaaaacagttgttgagatggattgccttttgatattggtgcaagcactttggcatcatttgtctactggggatgagtgtcgatcgcatgtcctcttattctagtttgttggttgaggattgtaaaatgttgttacaaatcctaacttatatgtctttaatttttgttaaacggtctatgtgatggggttgctcatagccaattagcaggagcattttatcttgtttttgattgtgtgtttcaa

SEQ ID NO: 391758 - DNA, 563 bp, Cannabis indica
tggtacaaaactgtaaaaccagtttgtggcatgacaaattgtatagttgaagtaattttactaacatagaaaaatatattttctaattttttcattctaattttctatgggaattttgactttatatacatttattaagttaaaatttatccctaatcattagtgtaccaataatgttaaattctgttcatttttatcaaacccaaattatctctcttattttctactcactctctctctccctccattcttgctcactctcttcaacaaaaccgaaccgccatgaccatcaccaccatccaagaccatcgtcgctaccatccaaaattatcgtcgccatccaagactactaccactatccaacaccacctccaccatccaacaccactcgatcgactaaaaaaccaattagaccaaccttctcgactccatttcaatccgttcgagcccatgtcaatatccgtcctcaaccgcgaacggagagaccaacaccacgaatggagaccacaaatgcagatcacgaacggaaagagcacgaatgaagacgttctctgtaattttct

SEQ ID NO: 391759 - DNA, 1109 bp, Cannabis indica
actttagccttccttcatggaaggcgaatcttgcttcataaaaattcaacatgactcttgcttattgaaatggacctcagcataaggaaaattgtctacgcaagaacgcaggcccaggtttccttcgggaaaccaaaagcctaccatgctgtgagagcctagattttcccttacaaggtccatgtcatggagggatcatttggggccagtcatacaaccgggttttcaactacaaccccacgactttttctcacagatgtcaggagattactgctaaactttcaagaattcccctccaaatagtcacagagtggaaagacatggcttggatgaatagtatgcttcccggagcaagacaaaactctactcagacctcctcctcaaaggacatgagttagattccaagaaaatgaccgagaatttgagaccaaaattcccagctcatatggggggtatggtacgcccaatttttgacaactccaacttcttatgtccgtttgccaaggttactagctcaagtgtacacatgcaaccaaaagtaggaaacattttcaagtaagtcttcccaagggaaacacgcttgaattctttcctaaaaggctaaacttgagtatgaatctgggggtaagatgcatattcggccaaaattcttgaaaagaaacatccacccgaataccttcttacaagtctctgtggatttcctaaaagtttagtccatcgggttgcataattggcaaaaactttaggctaacaaggaccaaagtaagaaaaatgcctacaagtctaaggcagtcgtgggaatggctctaaggactgaacctcgtaaaagaactaaagggtgaagaagatgtgtgaaaaagcgaaggctccttttttgcgaaaggaaaccatctctgagctaactctaaacgagtggctttttccaagctagaggttaaatggcacgaaaaagcattacagctctaggaacaaaagggtaaaaccaagaaacgatccctagatcgattgagagatgattaagactagcacgaaaggttgaaacacagatcgttggaactagatgtttcaatgacataaccagcccctaaaaagtctaccaaaataaatct

SEQ ID NO: 391760 - DNA, 874 bp, Cannabis indica
tatgaagatcatcttgggccataattattttgagtttttctaaattgggcttttgtatttttctttctaccactttgtctaaatttgaaaaataacacaaaaattaaagtaaattaaatatttctacttaaatagattttaccattaaaaataaagaatatttaattcatattaattatatgtgcataaataaagacttaaaatgtacaaatttgagcctcaatcaaggtgtagcctaaaaatccttgcattaatggtcatgcatgtctatccttgtatagtaaaaattctagaactttttcccaaagttttatagaaagcagccccacttccacattcacataggtcagtctatcaagagtactcatgtacctcagtactccactccacttagagtatagaaatcattaagagcttctattaatttagctttaaatcgctccacgaattcatgcttctctttttgtataatgatagcatgatctcatttttatcacttcttaacttgttattacccattgaacttattttttgggatttccagtctataggttggttgccattatgaaggattcatcaatccgagggaaatagtctcattcctttcgatattttaatgactttctctctagcaaaacattttatcaaaggatcagctaagttatcatcagtgcatacatgatccactctaacagctcctattgagagaaactctcaaacaatgttgtgttaatgacgtatttttcgtctcttaccattgtaataataattttgagcttttgctatagccacgacactattgcaatggatcaacatagttggaataggtctttcccataaaggaatctcagctagtaggcttctcaaccaacat

SEQ ID NO: 391761 - DNA, 1676 bp, Cannabis indica
tttttttttaatttttatatttaatcatgtaatgtagtttttatttaaaaatatctattaaaatttagtacacatacacatagtgtgcaattaaggtcctaatcaagactagaatattcaactttgattaattaattaggatccgtacctcaaccaaaacaaaagttattcaaaattttgtttttattctttattttaatattaatttatactttaatatatattcacttaatcaagttaaagagtaaagataaacctaaaatattaaaataattaaattaaagaacataaagataaagattgtgattacagccatgaaaaacttaaaaactctcacttacaaatggatatagtttttatatatatttatatattaatgcaccaacatgatatatagtaattaataatgtattactgttttcagcattgtttaggcatcagtgaagtcccacgattagttaacgatattctcacccgatacttaattataccaataggaatataatatcgagaaatatgctagacatcaataatattttttagcaattctctactatttttcacatggccaacattagttaagtgaattattaaagagaaatgttaaaattattactaatgtgtagcttttttctttaatgtcatactgctattgatgtaataaaatatcgagtctcatataactttaaaatagattttaagaaatatcagtaaccaattataattatagggcatcacttataaaaggtattaaaaaccactagtacccaataataatattctttattaaaatatattggaatataattaagtaataattatgaatttgggtaaatattgaatgacaaacacattaatggcgccattaataacatgattatatcaatataatctcttgacatgcatgcactaagaaaagtgaaaaaaaaaaaaaaaaaaacttatgttaataatataaattgtgaatctaaaaaggctaaaagcaaacaattgtaattaaaaataagagaattactctatatactgtttttttaacttttctttttttttcaaatttacggtttgagttttaaagtgattgcagcgctagttgcaataggggtttctatacgattttttgttgcaatttaagttgcagcgctagttgcaataggggtttctatgtagaattccgtaaaaatacaaaaaaaattgttttgaagtgtaaaaatgaaaaaaaccccttaaaaatatatatatttaaatttaattctaggttataaataaatacttaaatttaatttttaacggtaataatacttaagttatattttaagaacttctataagcagttaaccattaagtgttaagttactatctacacgtcattttcttatttatatatttaaatgaatttttaataaaaaaaaataatttaatgacctaaatcaaataagaactgtcatggaccattaacttaatatacatacgaaatttttaaaaatataatttaagtattattaccgtcaaaaattaaaaatatttctctataatcgagagttaaacttaaatatctacaccacaaattattcttaaaagaatatcattatatataggactattttcaaaaatatgggaaaaattattaaggttatgataaatgtagcataaaaagtaaatgccactaaatatggcat

SEQ ID NO: 391762 - DNA, 1309 bp, Cannabis indica
ttttaatcttttttttttccttttaagggaaataatcacacaattgctcctgaaccctgcatcaacatttactttaattttctgtctaccctttttctaattaaatttgttaatgttacagcttgtgaacgtctaatcctcctggaaaccgatgtgaaggaattgagagattatagcattcttctttacctttgtgggttttatgagcaatcattagattacctaaagctctatcaagaatccaaggtcatttctatctctcagtatggtattcattgcattgtacatatctagtttactgaaaagctcattataatattcccaggttccttctacacaaaaagaatcgccggatccagttagcaatcttgaggaagacgcagtgaataaattgatggtacgccttaatctcatttcaatggaagaaggttggagcaagccatcatttgctaggagtttcttaggtaataattccgaaccatggtagttttcctgtaaacttgacttgagacaaaagggttgaacttcattgcatgacctactgataggtctctaacagtaatagaatgtatcatgcccgagatttgttgtctagaattagtggttctgctcttcccagtgtctctgtatcgggtcattatattgtatataatatctcctgtatgtaaattgtttttgattatgaagtatcttctttcatcttggtaagatactcagaagaaatcactcactatcatttgcacttatattaacaggtaatacttagacttagatcactaaggtcatctctaatggcaccttaaaaacctaaatatgctgtagctttttcgacaaaatctaccaatcgaacagtaaaagtaacactaataaataataattttagtactatatatttttctattccaaccataacactaaaaagtattttagtgtagtcggaacacggaacactgtagacaaacttaaatatgagacatgttttgttttacatgatggtgttcatccaatttaatccgtattattttacttatagggcatttgattcacaccaagtgtggatttcatatttcgaatccaatctaatccgcacaatagctcaaatcaaattcaattcaatttataaaagtgcggatcgaatccgttattttgaattggttactatttaatattaaattatataatatttatgaaaaaatatttttttttttccacataactagcaacaaaataaaataaattattgttattttatatctccaactaggggtgttcataaaatagtcgatccaatccaatccgcacgatccaa

SEQ ID NO: 391763 - DNA, 660 bp, Cannabis indica
aaagaaaagaaaagacttccttccccacatgaatttcttgtgatagtgagtaataatgcctgttttctaagccaattataaatggtacgcgtagtgcaccactaaaggagtattttggtatactttatctgtttcggcatacaggaaaactttttagtttaatttttttttttataatcatatacattatagttatttaagagtaactgtaaatttttagaaaattttaaatactttacaatgctgaaaataaaatttacatattttgttaaatacgcgactatttttcttatacgtgtagttaataattatttaaattttatttttggcactatgaactattcagaattttttgaaaatttacaagtagtcttaatagatacaatgtatgtaaaaaaaaaaagactaattttttttctagataccgaaatatatagaaaatctagcactcgcattagatgatgtataagtgttttctttattttagagtagagaaaaaagagaatggataaaaaaagtgctacatccattgttctattataacgaactaaataaagaatgcaatagtaattctggtatgtagagatgtattattcattctctaaatatattttaatattactaggtgattgttacgtgccaagccacgtagtgttagtt

SEQ ID NO: 391764 - DNA, 1502 bp, Cannabis indica
ataatcttatatgggactccaaaccgacaaataatgaacttattgacgaaagagactacctgtttggaagttgtgtaccggcggttcagcttctacccaattggtgtagtagtccgctgctacaatggcatactttgcctctacccttcctgttggtagggctcctattagatatatctaccacatggcaaagggccaagggctggtcatgctggtgagctcagcgggcggaccccgactgtagtttgcgtgtttctagagtttgtcgcatattttagcaaatccttggcgtccttctctagagaaggccaatagtatccttgtttcaaaatcttacgagacatggaatgcccccagcatggttaccatattccccctcatgtatggcggacatgattggctatacttctccctcgtctacgcactgcaggaggggagtcaaaaatcctctcttgcataacactctgtcaataaccacgtaacaggtcaccttatataccaccctcctagcctcctttttatcggctggtaactctcctttcaagatgtagctgaggtagggggtcatccaagaatccccattagacactacgtatgcctgctcctcctctatggtaggcctttcgagatattccacgagtattgaatctaaggtatcgatatcccgagtcgatgcaaactttgcctatgcatcgacattgacgttgtcatctcagggtatctgttccatagtgtagttttgtagctactctagataaattttcaccttagctaggtacgccatcaacctactccccttcccttggtattctcccttaacttgaaacacaaccagctgcgaatcactaaagacgtctagctcggtgattttcaattctttcgccaaacgcaggccagctagcaaagccttgtacttaacttcattataggaagccttaaactcgaatcttactgcataatacatcttctgtcctccgggtgcaatcattaccactcccgccctagcgcctccatcattcgacgctccatctacatgcaacttccatctcgctgccccatctcgggcgtctccctccaacatctcttgacatttcaattcttcaggttgataggtgaattcagctataaagtcggtgagtacctacccattgaccgtcatccacggtacataagaaatgtcgaattggttgagttcaatcgtccattttagaaagcgtcctaaggtttcaggattgtgcaagacttggcgcaaagggtggttggtcagcacaactatggagtgagcatggaagtacgaatttagtttcctagaggccatcacaagcgcataagccaacttctccatttctagatagcgagtctcagcgtctactaatcttttactaacgcagtacactagttgttgctgctgttgggttttgtgcactaaataaaacccattttaatataatcagatttacttattaataaagattagaaataacattttatgttgcatggtt

SEQ ID NO: 391765 - DNA, 916 bp, Cannabis indica
tcttcaagcttcgaagaaatggaaatattcctaagggtaaactaaaaattactgtttccacaaagaataaataaggtaacatggaatgtgatagcgatgaaaaaatctcaacatttatggcaagtctattcactttcctttcgacccctcaataatcgtgcccaaaatgtgcatgagtggaaaaagtgtaaggaaatgacgatttccaaaatcaaaattatagggtgctaacacctggcccaaaatatgtgttcatagctctttagtttcgacccaatcaaactaattgactctacccgatttggagttgacaggcaattattaagctcaattattttgacccacatgtccttactaaataaggaaggtccaaggtcgaacaacaaaatagccaacccaattgtgtaagtcttggagagccgaatcacactaggttttcttagtctagacagaagcacgaaatctaattctgccactactgaaaaaatgggattttctgactatttttaacagttgggtatattattctcgtcggtttctaagaccgacgtctattcggccatcacaaaactgggtggaataggcgtcgataaaaaaacgtcagtaaaagttttttcgacattagaaaactggtggaaatactataagaagaattgtcgacgattttgcatagtcgcctacattataggctatgattttgcacagtcgcctatattataggtgtaacgccctaacaataggaacgtcatgcactgcgactaaatatgcactaatcccgctaatagacccaaaataaaatcactgaaatgagtactcaactatttatctctattaagccaagcagaaaaagtggaggttacaacattttttccctaatagacccaaccctcgtggtctagtgtaacaccctaactat

SEQ ID NO: 391766 - DNA, 659 bp, Cannabis indica
actcattttaataaggtgtattgtagtagcacccaatatattatacaactaaatactatttaaaattctgtggtttataaaaattattaaatgaatcttctattttaataaataacaaattacactttgtactttataaaatattactaaacaatatcttgaattgattttctgttaaagtaaaatttataataatctaatttagaagtgttatgacaaaactttactgtatttgttcttgttaaaaattattttcaagttgattatattaaaaaaaaatattaaaaattgagctcaaaaatcctatttatattggtgatctaagaataatggccatacagatagactcatcttactccaatatcctaaaacctccttgatgtggataaatgaggtaacaagtagtaacgtaagatatcgactcttattagttttcgacgcactctctttctcttatgagccatcattcataaatcatgatgtaaataggatttttgttacgcatattttcgttaattaaattaatagtctttttcgttataaataaattgcagaaataaataaagggtaaataccattttggaccatctattttacaaaagttaccaattggaccctgtgttttgttaaatgacaaaatggatcctgtattttctaaa

SEQ ID NO: 391767 - DNA, 1021 bp, Cannabis indica
tataaaaaaataaataaacaaatcaaataaatctctctgtatcccacaaatctaatatttaatttatttatatatatataaatatacagagagagtgagaatcgaatcgagagtaagaagaagaagaagaagaagacaagtatggagaaatatagatttgaatggaagattttttctcttataatgatattggtttcttatttgttgtttgtctacgttcaaagctataattccaaggttagtttttctaattcccttaattaatttattaattaattacttaataatctcaattaatatgtgtatatatataatcagtatatcacttagaagacgaatatgaagttttgttgatttcaatgaatatttatatattttttaaaaaaagaaaaactagaatattatattttttttcatcaataacatgatattatttaatatattcatgtcctttatttatctatttatttgaaagaacaacagaaataggcgataattactcatttctagttttttttttttattttattttatttatattacacaagtctttgaatacttttttttaatcttaccaacttctaagggggcgtttggtacgagatgttcaaaataatttgattgtagggaatattatgaaggagaatatgattatagggaaatgtgtaaactgtgtttggttgtgtagggtaatatgtaatcatattcctattaattaaattaaactgtttggttgaatacagaaatcttatatattattttgaaaaattaaaatagaaatgttttttatgtatttatttaatgttaattatatatgaaaataaaataattatttattaaagaaatttatttattaattagtataaatattaaattggggaattacttcacatactattttcttaacttttatttttttttcaaagttatggtttaaggtttctaaagtggttgcagcgctagttgcaatatgggttttatacgattttttatttcaatttaggttgcagcgttagttgca

SEQ ID NO: 391768 - DNA, 890 bp, Cannabis indica
tatagatgatgttctcattatactctttaggctaatgtaaattatatgttagagttaagtggagggtggagatatattgtgcaatacgctcacaaaagtgagtatattttaataaaatataatataagagtatttttaattactgaatacaaaaaagaaatatttctcaacttatcccaacagcgggacaaaggggccacgcccaagactccccaccaagaatcaaaaaatctattaataaaaatgtctcaaatttattttttaaaagtattatatcttgtattttcactattatttattaaaaaatatgactatttttttaaaaaaaaataattaatttattttttaagatacaatatttgaaatttaataataataaaaaaagcttataatatttttaaaatactatattttaaatttttaccactatatatacaaacaaaaacataattttttttatataaaaaagctcaattagattttttgatctaaaaccctcaattaacttgagacggacctgatataagttcgtgtttctagtgtccctagctcaaattgtgagttcaaaaatgaaattatgtgacatttttctaagaataagaagtatagtgttcgaagtgattatcaagttgccatgagtattattgaatttgttgaaacttcctatatgagaaataatgaatcatactatcagggcccgtttggtacgcatgactagattggattagacaggttaatttgtccaatccagtgtttgggcatgttagaagtctggataactaatccagttaacctcatctgtctggtattatttatcccatccagcagggtgggataaataatcccatgcaggtgagattttttttttatcgtttttttaatttaaattt

SEQ ID NO: 391769 - DNA, 850 bp, Cannabis indica
tggaccaatagcaatattaacacggaggggggtgctactgcccttagcatttctctatacacaatcattgtatattattaatgtctatcttctgcccttctttttctctaaataatgcctatcctctctatcttcattttcaatgcatatgattactaattactggcaagtcattacaagtttcaatataatgctaggaatcgctcaataatttatgtgccagagataacaattcccatgtgtcactgctagttttctttgtgtttctttatttttatttatttgttctcatttcctttctttaaatttttataaattatatatatttacatataaatttgtaggtacttttacaatgcatcttctaaaaatgatatactcatacactttctatcaatttcaatatttaaaaaaaaaaattaatctaattttttcatatttgtgtacgttataattatttaagatattctataaaattttgagaaattcagaataatttacaatatagaaagcaatgttcaaagtaatagtctatttcacatgcgtataaaataaaatagtcatgtatgcaacacactgtttgaaccttattttcagcgtgttaaatatttctagatttcttaaaattttaccggatatcttaaataactataacataaatgaccatgagaaaaaatatgactaaaaaattatttcggataccaaaacagataagggtgcatcgattgtagaattttcttaaatttttaaatgttttattaaaaaattctacaatgcacccctgtcttattcgacatttggaagaaattttaagtctaatttttttcatggtcgtgtacgttgtagttat

SEQ ID NO: 391770 - DNA, 1583 bp, Cannabis indica
atataaatatttatatatgtttaaattcattaaaaatcaatataagttcaattaatataaaataaataatattaacatttatatatatatatatatttaaattaatttaaaataaataatttactaacaccgtctaatttgatggactattcttatattcttaaaatattttgttaaattcacaaaaactgttacaaagccacatttcataaataaatatttttttctttctttttctttgctatattcttaaaaatccataaaaaaattatatgtaaataaaaatatgttttaaatatacaacataaaaaatgagaaaaaaaattacatataaaaatcatatgaaacaaatataatcaagaaaatgattgaaactaataaaaaaaaaatgtgacaaacttgaaactaatttctagtatgaacacatataaaaatataactagttttgtcataatatttttaggctacgttattagtaagttttaattcgataaaaattaaactcaaaatctattatttatactattttaaaaatacaaagtctgaattattatttaataaaaaaaggtgtctactcaataatttttgcaaaatataacattcaaaataatattatcacaattcaaatttgttattaatataagttggttgcaaatatcatcctctttaccaaaatagcttcctcaaaattttgagtgtagtcagcaaatatatttttggacaataactacaatgacatggcttagatttgatagcgtaaccactctgtacaaattttagttgtatctgaatatgttcttgatgcaaacatttaatcagatcatacatgagtgcttatgtaacttgggttcatttgtttgcatttaatgagaaaatttatgtgattcggtcatatttagacccatttggatcatttcctttttatttgttaaatccacttttttcctcttaatacaacttattcggtcggatgtgtgttgcacatttaattttttttttatttattcacaatttctttctctatatattatttacacatgtatataacatcaattcataccccatacttcaaatgaggtcatatctcatatctcttatttataaatatataaaatattagtaatttattttattgttttaatgtgtactattattgtggtataattcctctaaatcaaaaggtctctgccgacatcatttttggatagttgttcactagcaattatctgtccaagaaggagtcttgtggaatgatggtcgagtccggaagggagttcccggatgactatcatgtccactccgggtccagtcttaggaccactagtccttccctagaaaggagttttagttggctagttgtcactcctagaatgatagatttggatagtcaactccagcagattatatcctatccagaagcgtctccagcgacagtttgtcaccctcgagttcagaagatcatttatgttcacagaggctctattactttagatgacgtggagactttgctcaaaaaggagtttgttaagttagttatttctaactaacttaacgatcttgtttcttgcagccaccgactttag

SEQ ID NO: 391771 - DNA, 1204 bp, Cannabis indica
atcggatgaacatccctaattataaatactaaatactacacgtcggttttgtgagtatatgttatattttattctaaaaatataagtgcaacttgtccaattaaaaaaaaaattagtaacctgtctaatgaaattggtcagtttggacgtttaaccgctcaaaccgacaactaatgtttttttacatttaattattatattttaattaattttgatgataagaaaaatatatatagattgaatttaaagtttgaatcaactaccataaaaaaatatagtagtttgaattttataatttttaaatgcgtatgtaaattatatgttatgttaatatatataatatatgccattgaatgcattttgaacaaacgtaatgcatggataaatgagtgggaactaattggtcaggaattcttggaattttttaagggtattttctctggatctaacaatgcaaggttgctggattatggccatttatttagggaaatgatttctcttgaggaccaggttggggtggttgggtgcccctccctcgaagaaataagaagtactctgttcgccatgagcaatcataaagcccctgggcctgatggaatgtctgctttattcttcaaacactctattgggagtctgttggggaagatttctgtgatgctgtcgctgatttctctgacaaaggtagaatgcacaagggtgtgaattccacgaatgttgtgctgatacctaaggtgcaaaacccgaagagaccgaatcaatttaggcccatttctctttgcaatgtgacgtacaaggtcatctctaaaatcattgcaaatagaattaagcctatcctcccctcgctcatctgcccaactcaagctgcttttgtttcaggaaggaatattcaagataataatgtgttggtgcaagagattatccactccttcaataagaagaaaggaaaagagggtttctttgcgatcaagattgacctggtcaaagcttatgataggctaagttggaattttatagatcacgttcttggttgtttcggtttccctcaaaaattttgcagttgggtctctcagtgtatctccaccatctccctcaatatttgtctcaatggtgggccggttggtaagatctttccctcgtgcggtattcgccagggtgacccgttatccccctacctcttcatctgtgcagcggaagtgctctctag

SEQ ID NO: 391772 - DNA, 1144 bp, Cannabis indica
atgtatatatatgtgtgtgttattggtgattgagtggttttaaggtgtatggtaataaaaaaaaaagaagggatagctccacatagtggttctaaggcttggctctaattttgaaatctttggtggtgattcttgttggaaacattgaagcaaaatggctcatatcgatggattgggaggtatgtgcatttatttcacttgatactctaaataaatatttaattttggatttatgactatgagtaatgttggttggtaagtaaaatgatattgtttttaatgctcataaactgtgattgtgtttaacagttagaacactctttctctcaagcatttttttttttcatttatttatttctaaggatagctcactacttgtcagaagatgaatagactggatcaaataaatattctaattgtggttgatggatactgataaaaatttagaattaatatttgaagaactaaaaatgatggattttgttcgagtggtcgttctatcactgatactgaggtgaagatgctactaattgttgtgagtttatttttctttcagcttcttttttatatttaatcattaatttcacaaggtgattttgatgtcatatattcttttatacattatatgggatatagcaggtcctaaatttgaatccactcatcaatgttttttaaaaaattcaatatgtccattttattaagaaaaaagaaaaagaaaaggagaggtggttaatttttcctataataaaaaatctcctattttttttacttataattttgaattatatgggatatattggttttccaatgcccatatgcatgaatcgttgaaaaaatttatgcaccaataaattgttcttctcctttttataattttagttaattagtaatttttctttgttaatatataccaaattatgccctttgaatttttttggcagttaaaaattctccctaaattattgagattgttagatttaagaatttttgtctaatttcattcaagtttactatttcagtgattgtttatatactaaaccatgttccccaaattttgatatctaccaaattatgcccctcaaattttgatatgtactaaatcatgccccctgaacttttatccatgttagaatttttttactaa

SEQ ID NO: 391773 - DNA, 2048 bp, Cannabis indica
gtcaggatatgaactgacattaggcacaggttcaaaatcttggtaaacattgatttgactgatgatctaagctcatcactgtcaggatatgaactaatattaggcacaggttcaaagtctttggtaaactaatttttttctgatgacttaacctcattctcaggataggaggtaacatggggtacaggttcaaagtcttagtgaaagtgtttaatgtatttttatgatcggaacatttggttttttggttggaaatttttggtgtggagtaataatccgagttaccatcgagaccaataaggcctccaatcgcctttggcatcggctgttctttcatcacagatctccagtattctcctgctggatcctttcttgattcaatactctcacataaaaacagctgcaacaatagagacattatttgttaacatgtataatctaatagtgaacaaattaaatgactattattcataacaaatactgcataattaaatatgatcatgaattatatatatacatataatgaaattgaatattgggaagtgagagtttatagtaaggtgtacaaaatataatagatttgagatgagaatgcatactagaattagtgagaggacaacaacaatggcacatgtagatttcatgatgatcttcacaacaaatgtatgatttagttttttgttttgaaaatgaccaaaaatttgcctttatttataagcaaattgttatgactacgttgcacatagttcttgaaataattgaatatcaaacagtgattttcacgttttaattatttttttcaattaataattgtagaatttacatataatataatatgggttttaaaaattttcttatttaaatatgacagttttaagtttgatcattttttatggtattttttagctattttataatatttgatatgtcatatatttgtaaatttaattatcaaagctcatatttaatgtttagataaatcaattttagaaaaataaaaattttcatttcttctcctctgtcaaaccctatctccaccatccctcaacagttctacctatccactttcattcaccagttccacatctggcaaacggcgaccgacaattcacccatccggtaacgattggtcaaagcaaaaatcaccaaagatcattcatcaaaaaactaattttttatcaaaaaactaaaattttcaccagaaaataagtttcgattatataaaaataaaatttatatacgagtcttaagttttttttataatatctttttatcgatatgatgatttattttatattttcttatatatattataaaaaatatatatttagtacaattaaatttgcaaggcatacatatcaaaactttccatttttttcataagtttgtaaatagcctttagatggagccaaaaggggacatgaatcttatcaactcttccaccatgaatgaaatcacaataagaaacaaaattcttcatcactcttttgtcattttatatttatttaaaatcatttgtgaaacatgacaggtcctttttattttattaagtaggatatatatctagagtaacaagacacatttaggttaggtgtatgtttggtaaaaaaaatgtttttggttttttattttaaatataaaaggtgaatatatattttcttaataagtgtttactagtttatttaaggctaattagaatttttgtccttgtactttgatatgtactaaattatgcctcttgaactttttaggttgttaaaattttttcataaactatattgaaattgttagatttaaggacttttgtttaattttattcaattttgttattatgacgattgtccatatattaaatcgtgccccccaaactttgatatttaaaaaattatactccctaaactttaacatgtaccgaattatgctacttatatctttatctacgtcagactttctttagaaaaattgaacaaaagtccttaaatctaaccatctcaatagttcgagaggaatttttaacgaccagaaaaatttagagagcatgatttagt

SEQ ID NO: 391774 - DNA, 1314 bp, Cannabis indica
ttattttaataccgatattaatttaaaacacggctgtaattcttcatcattaattacaattggaaaatgtatatgtcaaaatcacaaattaattaatcttgcataaattgaatctcacttctaatttaacagcatatcatattatatatccaaaattgacaaaataccactattgacaaaatacagtaaaacatatacaatataataaaaataccaaaataattaatagcctaacttacatataaaaaaaaaaaatatatgactaaagttatataaaatatactattaaatttaaaagaagaactagaagatacaaaataatttaataaataaatatagagatgaagcataaaagaatcaatatcaatattaggaaaaaaaaatacaatagctacactttaatctcgccaatattactattctaatacactcatttttgtagataaagcttgctttcaaattactgaacttgtgtataaagtattggataaagtggcataaatactgatcataatggcccatgtaacagactactgggtgagaggagagggggattgcaagtctcaagtgttgaagggaacatcaagctgaacacgtggctgctggagaaatgcgtactcatgagtaagtgaagcagctgatggggcctcttgttaggattgttggagccgcatgaactgatcaacataatagttcatatgttagctaagttgggcgtacaacccatttggagataaatgtgatttgctcatttaatatttaagaaattttcacatctccacaaaaggtgttaattttggtgtgcctactaatactcaatttaccctttccttatttcttggacaccaactgacataactgttttgacagttatgttagttatgtgcttttgctgttacttgtgtgtatatatagcctattggctatctagttttgcgtaaccaattgtaataaagctaagtattaataaagctttaattctctctcaattctgtctaaattgcattcgagttccttggataggttcagttgttgaacctgagtctgttctggtgcatgaaagagacatctactggtgtgatcgaattggtgtttgctcaacaactggtatcagagctagggagggattaatctgtgttgaatcgtgaatcaagtttgtcatattcaaagaagtttgaaggcagttcttggagttcaagattcaggtgattgatcagcaaagatgggaaataccaggttcgatcttgaaaagtttgatggcaaaaataatttcggtttatggagagtaaagatgcgtgcactcctggtgcaaca

SEQ ID NO: 391775 - DNA, 580 bp, Cannabis indica
cacaatcacataggcagacactcattatttaatcatcaaaaaaaattatatattactgtcaataatctaagggatatcttgagttgagaaatacctcatttttttattcattaatcaaaaatatatttatattatgttttattagtttgtaagtagtttgtctaatatactcttactttatatttaagtttaccacataatttatattgacttaaaaggtataatggggatattatttataaaagtgaatatatcttaaaaaatatagaaataaaaataaaaattaaaataaataaagtaaaatgagtatacattgtaattttctccaaatttaatctcataaaatagttcaaaattataaaaatgccataaaaagtgtataaactttaaactatcatattcatgagagaatgtttcaaatagtgtaattttcatccttgtaaattggcccaacccattcttcatctcaaagatgagttgggccaggctttgaaagtaatgagttagactagatactgtttctgaaaaaaattacactataccatttttatattctttttttttaattttaccttttttt

SEQ ID NO: 391776 - DNA, 965 bp, Cannabis indica
tatttttgtagtgtatttattgctaaaagctattaattttacttaacaagaatatgcgttaacactaatcttttctttactattagtttaaagatatctctttacttaaatgactataaaaaatccaaaaattaaatatgttaattaaaacatctaaatgtataaatttaaatttgattagatacaatcgtatctattttctaattattaattaatagattttattttgtacattttctttttaaaaaaacattaaaagctacaaatttactgtgtataaaagtaagtaattaacttattgtttaattttttgggtacaaacctgctgggaaagatcatgattacaaatgagatatgacaataattttgaatgtagtctataagtgagatatgatcgtcatggcaataattttgaaatcacatgatgtgttttctatgaatttatcaattgttatattttttgttttgaatcttaagacctttttatttaatatgcttttaaaaaaaattaacacttttaatgtgatcaattttatagttagattttcatttttaattcactccaatgttaagttcataatattttggtctcgaattataatttggacattattgaaaatttttagaaattatttttctattctatttatttttcttattttctattctattttaaaaatttatacttacaagttatttgagtttaaagttttcacaatatttttttaaaagttttaaaatcacatgatgagtttttttttttttttatataaatttatcaattgtcttgctttttatatttatattttgtgtgacaattcggttctagttactattggattttgtgccctaaataaaatctatttaaatataattagatttactaattattaaagattagaaaccgcttctatgttgcatggttcacataatttatttcatgattatgtttaatgtataaattc

SEQ ID NO: 391777 - DNA, 875 bp, Cannabis indica
  modified_base (30)..(30): a, c, t, g, unknown or other
gatagtaaaagacgaaaaaaggtttttaanaaggtaccatttttactaaaaaaaaattaataaaaaaagttgtaaaaagcataaattgacggaggattaagagaaatgtttaaaattataggaaacattaaatcgaatataaataaatgaagatattgccatagttattatagaaaagttaaccctatagtaataattattaatattatatggtatttttctattttttttttatttttttattttttattggattatagtttttttttttttttttgacaatgaatttttttatggatatattatatgcatgctttcctacaataaataagtaatttttttctaacactgttaaaatattggtgaattgattaaagtatttaaattagagttggttgtttgggcagaaggaaaatgtcctcaaaaattaaatttattgctaatgttgtaaacaaccggcctagtagtgttctgagttgctgagcttgtcttagttttgttgtaatgatgtttgatttaatgagaatttatcttcttttatcaaaaacaaaaataaataaataagtaatcttatgttataattgattttttgttttatataatcaaatagttagcgttgtagtattaaaaaaatagaaatttttacatgaaaaatcctttttacacactttattacaaaattaccctcacacgcctattactacatttctacttacaaagttatttttattacacatttaccacttactcatcataccatgcatacacgtgtgctctccccatgtatcatcaatcaaatcatactctcttccctctcttttttctttttgttttcaatttcattttcgattcttcatttctgttctctaagttca

SEQ ID NO: 391778 - DNA, 1141 bp, Cannabis indica
attataatttttactccctgaatcttaacatactaaattatatttcttgaactttttgaggtcgttaaaaattcctcttaaattattgagattgttagatttaaagatttttttttttcaattttaataagaaaaatcaaacatggatgaaagtttaggaggtttgatttggtatattttaaaattcgaatgacatgatttggtagttattaaagtttaggaagcatgtttattaaaattgaatgaaactggataaatgtccttaaatccaataatcttaatagtttaagaaaaaaatttaacaattaaaaaagttagggagcaaaaattgtaattattatttttttaatatagatagactaatctgaatcataaatagacaacgttgatgtagaggaatatccagccaataaattaattgtctagccaaaatgtatataaagtgaaaatatgaatcactataaaataagcgacttatatatatgattaaattactcaaagtaacttgagaccattttaaaatgtatccaatctaaatgaacaaaagcaaatttacaaaataaatacattaaatagaaagttgattagcacactaaataaataaaatattaaatttttatataagaaaaaataacaaactattttcaaaggggttaagtaattatataagaaacagatttatttatttattttttttttaaaaaaaaagtgagataatttgcatctttaattgttatataattatataatttttgatttagtaatttagtaattatataatttacattttttttatcacgaagaagatactttattaatcaacaagcaaatacaccctcaagcctcactagaacaaaactgccctcaagccaaaaacaaagaaacaaattaattacattgtattctattcaaataggctctctcatgtctagtaatttgtttattatttacaagattcaatctatataaaactatactcttcacttcggcaatttaaacaaccttcaaaaacacacatgttcctatttacccaaatacagtagcaagtggctgcaagcatggctatattgaagcttctttgtaaccccgatcgcttgagagtgagccattttttccagccctcaagagagatcggccaggc

SEQ ID NO: 391779 - DNA, 892 bp, Cannabis indica
aagatgaaagttgctgcaatggatgatgttgataggcttgttaggcttactgttcggttcatttactctaaaataatataacctaatgcccatatatctgaacattgttcttgaattccatcttctaaacattccggagctcaatacacttttgttcctttatttacaataccagggagttatccaatcatcatatatacttttcgaaagtccaaaattcgatatttttagccacaaaatcctcatcttcttcttccttcaccatcaatatattttcaagtttcaaatcgcaatgaacaataccctttttgtgaacacactcaagtcctctcaaaataaattttgtatattgtctcacttcagtctcagacaatataatagtgctcataaaatcagctaaacatccacctcgagcgtactccaagaaaacattgtagagttttgcttttgttgttgtctgttgtgatcgctatgtcatatccaaaacatcaaaaaatgtaaggactaccaagaaagaattggagtaactttttctttttgagctcatcactataagaaccattaaacgtaatgatattatcatgagcattgctattaggcactagtagtgcctagcaccttctcgacatgtcgcgtttcaattggctagcgatacttcttaaaagctattatattaaattatatgggacccgatacttagttggaccaatagcgatattgacacatagaagagtgctaagcacaactggtgccctttagcatttctctattattagtggaggtagtttgatcatctcaactaggggtgggcatcatccaatccaatccaattgaactgaaccgatccaatccaatccaattacaaaaaattggatatccaattacaattaga

SEQ ID NO: 391780 - DNA, 870 bp, Cannabis indica
cattgtgtatgtgtgtgagtattttaggagaccagcagcaaaacgccccacgtgtttgttaaattgttatttgatgtatttggcaatacaacacaatcaaaagcaaacgcctaaaactctaaaagcttcattttaagacagcattttctactctcttttatcttagttataggaatgatgttagtgacctataaatgtcattacatctttcatatacactacttagacatattttttcaaatattataaatggatagatttaaaatattaaatcaatcaaatctaattgttatcaccgtatgaagtcatatcaatgctgtcatggttgtaattggctcgtgaaaaataaaatggtttggtttggtgcacgaaattgaatggtcgctgttatatgaccaaattcctgaaatttgacagtaccagttgggtcccttgataattgctcgacaacggcaagatatagaatatgttccttttttgtggccattacataagcctgacaatcagattggattggatttggaatgattgcccatttaattgttcatgcaaaataaagttaaaagctatagtcgtgtaatattggatttgaatttttttgcttctacttcaagggccaatacattacaaagggacaaaacacattcactacttcagtactaggtgggaatttttctcatcataacctataatagcctagagtaaacttccataacatacagcctagtgtaaattttcataacatattcttgtaactaggggtattcataaaaaaaaagaggaaattacactctatactcattttttgttttatattttaatttttaccttcattttactattctttaatttatacccacttttataagt

SEQ ID NO: 391781 - DNA, 1574 bp, Cannabis indica
atagagtttcttggactctttctttgttggaggcaagacattggaggtttctggtacatccacctagcacgggagcaattcttaccgttctcaaggctgccgacgaagggtataattttgtttgagttgtttattatcttacattttaaaatgcatattaatttttattgacgacttgttacattattgatttgttagggttgcggtagatttacaattggtagatttccaatcgtaattgactcccctttcaagacaatgggtcctttccaacataatattccactcgtgggcgatgatgttgcttagacaataaattatattttcaaccccagactccccgatgagtatgtccaccgtatttatcatatttatgtggttttattttctttccatgctgtacatgttaactaataaattggcactgtgaatttttatgttaatttaaggcgataaaatacgagggtgtataagtatttattttcttttaagaggaaatgtagtaggaatcaaatcacaacttttcatgttttttcatgatactttcttttttaagttgtagaagtgattaggcctgtcaaatatgatttagtcattttattaaataatgttggggctatttttatagtggttgtaattcatagaaaactagttttggttttaactttctattcttggaagttacttaaagtagttatgttagttggcattgttcaagtggttagtagcttggttttgtgagctattttctaacctatttaaacaccaattgtaatgtaatttgtatggaagagagagctcatgagagagtgattgaattcagagaagagagttgagagattgagagccaaagttggagacttttggtggtgaataaccatggtattcatggtgttctaaacaacttgatcatggaggtttgagaggcaatatatctttgtatgtatctctgattgatgaattctttattggtgtttgtaaactacattacatagtggagaaactccttgggggagagctggaataggactcacattgagatccgaactagaataatttctttgtctcactcttttatttttctctatttttctgcattgtttttgccaaattcatgttcattttttttttggtttatcatctggtttatgagcattgcattgtgtgtgtgtgtgtgttgagattgtgttgtagggatttataatagtggtatcagagcaaggttcttggaggatccaagactcaacaccaaagctgccaagaatcaagaaaggtttatcaatggaatcttcatcaaccagattcgacttagagaggtttgatggatcaggggattgcagcctttggaaagagaagatgatggcaatactgatataccaaaaactggactctgcattagaagaaaaggttgaaaaatcaagaaggagatgcaacgaagaagggtgaagctgaaaccataatgaagcaagctacatcagtaatcattatggatcttgctgataatgttctgagacaagttataggagagaaaacaggcttgggaatttggaaaagattagagcaactgtacatgg

SEQ ID NO: 391782 - DNA, 779 bp, Cannabis indica
agagagagagagagggcttgttcattgggatagtggactcattataaactgagtataaaacttttttgttttttttctttctattttttgataaataagtttgatatgaaaatggaagaaaatattggtggattgttaatagacgtccaagtttctatccaggcatttgtctgtcatttttctcagtggaacaaaagctgatgttattctatctcgttattggtaagattgcgatatgagtgagtgagcctttgaatctattccatttttattcccatttctcttttataatttcccacggtacaatattttccttctattacatatacaatattttctttcgaaacaaaaaatctaatatccaaagctttcttcccgaatatgttcttaataaattttatatgtttatatcagcaatttattatagttcagttcactacaacgaaaactatcattaacactcaattgggttctccaaagccaataaatgcttactccaattttgaaataaatactttcttttgtttgttgtcatgactaataatgattcaaaagtgacttgcttggttaattgatcaaattgagcccaaaaaattgaaaagatttattgacaaaataagagatgaacaaaagtgattaggctatttaattgcaaggaataaccccttgcagcagacggaaaaaaactcaggttctactgttcgaaaagaatcaagtagccatcgattattcgacaaatgcatagaacagatctattgttccaacagatgaccagcctt

SEQ ID NO: 391783 - DNA, 1884 bp, Cannabis indica
aatagttagaaaaataaaaaaaaatacattacaagaaaaaattaaaaaaaaaacaacaaaaaaaaaacaaaacaaaaggcatacaagcgtaattattattgtttaaaaatttaaggattttttttaaagaaaattatggatttgataattttgtaaaacaaagaaagaaaaaaattgagtacatgtgaaatgtggaaagtaaaacttatttaacaatttttatgttaaaatttctaattttcaacaatttagtttttagaaaaataataaatgaaatcttgtatttattattttttttttaggaaatgtgagttaaaacttaagctcaatttggaatagacatgcaagttgaaaggtgtggtatagagaagaagagtactatttctataacgtggtctcatttaatgtggccttcttttgcatcaaaagccattaatgaacccaaaccaaacaatgtcctaccaccaaatatattcttagggtacctttagaaaattatggtataattggataattactaattacacaatttgacaatttgatttgtttatttaattatgtaattttattgtacttataattgaaggtaattccaattatatcatggtacaattagataattactaattacacaattttgataggtttatttaattatgtaattttactgtactactaaaaaatattattttcttgtgtcactactaagggcgcatttgaaaatttaccgtataattgaatttgtgtacagttagagataattacataattttacatgtttgttcaatcatgtaattacactgtaattttgtaaatagaggtgattgggtggttataattacactctaattctcatggcctccatgagattagagtgtaattagactgtgtaattatcaaaagttttctattttaaatattaactactaagaaaatattattttcatgtataattatttttccaaataaaatattaaaaatttatatttcattactacttcatatccaaacacacatacattatatttttaaaatatagtgtaattactaaactgtataattatcactctaataattacacaattattttcatacacactaactattttgtcaaatataatattaaaaattcacgtataattattacatcatatctaatgacactttatattttaaactatagtgtaattactactcttgtagttacacagttacttctaaacatatatttaataatatatactctctctctctctcaaacagttttataaggcaactgtagtgtctaatacacttaatttatgatatatcatatggctattggtttaatttaataaattgaatttcacgttttttttttttttttttgaagaaaagcgaagcaatgtatattaatgatgaaaacagttagatctcgcagtcattacataataggtcgaccggtattgaggaaaccggaataacaccaaatgtcttgtgggtgaacgcccacttagccacgttatgggccgcaaaattacaggttcggctaacataagaaaaaacacaactagaaaataaaggagaagatctattacaaaaggagatgtagttctcaagcgcccattgagactccttcccagtaagagcattgatcaccacactcgaatcattctccacaataataaaattagccttaagatccaaagctgtttcaaccgccaagcagcaagctgctacttcgccacacaacacatcaacgaagtctagtctggccgttgtaatccgaagaactctgccaagatgatccctggccaccacagccgaacacatgctatccagccccactttgatatcacaattaagcttgatccactcggatggggggggcctccagtccagcaa

SEQ ID NO: 391784 - DNA, 2117 bp, Cannabis indica
tttttaatttgcaaactgtatttgggggaacattgtaactaggaggaattttcatgtaaacttcctcatgaagatccccatggaagaatgcattgttgatatctatttggtgtattatccaattgttaatggcatctaaggcaaagaaattttttaagtgttgaattttgcaacagctgcataggtttgagagaaattaataccttatttttggttatatcctttagccacaagacgagctttgaatagatcaacttctccagcttagttatacttgactttatacacctatccacagtcaattgctttgtggcctggaggtaacttggtgatagtccaagtttttttttctaaagcttgtgtttcattgtccatggcttgaagccaatgtttgaattatgaagcctcaacatagttttgaggttcaatgtgagtgtatgttgcaagaacatcaactttaaattgtgggtggagtttgatatatgacatgaattgttctatggggtgttcagtggaggccacataacatagtcttataaatggactggtttggtgacttgtcgacctgttttagtggtctgaggtttatggattggatgattgggggtaatcaaatatgtggaggctggtttatgattggtggttgctggtgcaacatgttgctgacttggaagaataatttgtgacaagcaatggtcaatctcggatgttgatgtggtggaatgataaggaaaaatattttcatggaatatgacatcacgagatgtgtagatttatttggactcaatatcaagaagggtataaactttcattcctgaggggtaatcaataaagatagagacacaactccttggggagaatttgtgtcgtttagagtccaaggtggaaccatatgccaagcatccaagagatctaaggtggtcatagttgggggatttattgtgtaacaattcaaaagaaatactgtctttcagtaatgcaaaggaagtacgattgataaatatgtggttattgcaatgagatatggccaataaaccagtgggagatgtgattggaaactcaatgcctgagccacatttaaaatgtgttggtatttcctttcaaccaatgagttttgttggggtctctcaacacattagtgataatgtatcatacctttggatgcatagaatgaagtgagatttaatttcttggcattatccgatcttacagcctttaaaaaataaaacaaatgaaactacaatgatcgtcggagttgtcactggtgccgaaaaaatcgttggagtttactgtcggtatcgaaaaagttacaagagtagctgccggtgttggaaaagtcaccgaagttactgtcgctgccagaaaggttatcagaatcgggattgttgctggattttcttggtgatttttctggtgacttttctgacaccgacaactacttcggtgatttttctggcaccgacaacaaacttcagaaaagtcgtcgaaattagcattattgctagaaaaaatcaccaagaaagtggtttcttcatcaagaaactggtttggagctctaaaacgaaaatcacagtgttggctccatttttggcggtgtaccgtgtttggagaagacgatctcaaaccgaccatttcgagaaaatatcagtggtatttggcttctttgagattctgggatccttgggaatatttcccaatcaaaaagacgcatcaaaacggactgtggacagagtttggagcttgccgccggagaagatgactacgctttcgtaactccgacgaccacaatctgggcagatctgaggatcttgttctcagcaaagaaattcaattaggtgcttgaagtagcaaaaatgtattctgaacaactaaggtaagaagagtggacatctgtgcacagggtgtatgttgaaacatacgactttattatgggtttgatgttcatgtgcttatgagattttatatatttttattgtgttagtattgtaagtatgtgatagtgataagggcttttgactgtttgtgtgagaatagtacttataggataggttttctgctgcttgtgtgaacatagcactagcatgatatatttgttggctgcttgtatgggtttactt

SEQ ID NO: 391785 - DNA, 900 bp, Cannabis indica
tagttatccagactttcaacatgtccaaacgctgaattagacaaattagcatgtctaatcctgcttaccaaacgaaccatttatggatttaatttggacattttatgtgtcatggtcttaggctttatatattcgtttattgtgccctcatactaatatgattgtgctttcttactgtagtattgaatttatcgttggtgctcaagtccatatatcatgtctttccaatttacatcactgttttgacacaaatctatatatattttgttgtgtcgcgtgtttgtgcctccaaactcatgtttgcaattggttcatgccttgtcaaaagttcgaaatgtttttgtagctctaatctaaaagataaatcttcgaaaaccaaatttactcggtcttttttagttctactaatatgatgttttatattctttgaagaatgaataaagagtcttaattattagttgggttattggtacttatatagctagctaggttgagaactaacaatttatttatttatttattaatttaattattttgaacaagagaacttaagacatttgtttgttataattgtacagaaattaattaattaagtagaatagcacacatacatgtatgtatgaataaataaagagttggagttgaaataaatgatacaaatgaaatagaatgttgtgaaataatcaatattaatccaaacaaaacaaagagttaaatacataaaagtaaatgattattacaattaagacaagagtattttcttcttcatcgaccgtcttgaattgaactctttgttacaacaattgagaccgaaaagaaaagcatatattagaagagactgaatcagtatcatttggtaatgttatgcattttgaatccaagggtgttctgcaataataa

SEQ ID NO: 391786 - DNA, 776 bp, Cannabis indica
agaagcagcagcagcagcagcagtgaccagttatccctccagtgatcgatcagctccagtttcactcttatatatatacatttaaataatatatatatattcactgcattagggccatcagtgtagatcacatcagattatctcgtatcttttatttcctttattactcaactcatattgattaagttttaggaatgcataaaagccagccatgagtaaaatccctaagtttttaaattttttagttaaaggtagaaaattgagctttcataagttttctttttttttactttaaaagaaaaaatgattacatatatattataatataaatagaacatatttttcttttttctacacaaaaattgaacatattaaagtttagaatatcaccaaatcttgaaatatttcttatggagtattagatggtgtatgtgtattttttaatccaaactcataaagttaaaatggtatctatctaatgtggtttaaatttagcccataaattgtactaaatttaacataaaatataaaaatagtcaaattttacaaaacaataatggttactttttttatttattttttatcacatattagtgcctttaataactgttcacattttatttatatatttaattagattttataccctttcaatcatttgttgatattttcttacatatttttgtcaaaatcaaaaagtaatttacgttataaatacttacctaagtttttacatgttaaataaatacttaagtttaattaatttttgaaggtaa

SEQ ID NO: 391787 - DNA, 1206 bp, Cannabis indica
catgaggcatgcgaggcacaaaattgatccaactaggtattgcaaataccataaggacattgggcacacaacagacaagtgccatcagttgaaagatgagatcaaaagtctcatcgctcggggccacctcaagcagtatgtgaaaagaaagggcaatggacataaccagcccagtctgcccaacaactcaaacaaccagggattagaacctcttcctgttgaaggagaggacatccttgttatctcgagagggccgcatattgctgtagagagtaataactcccaaaagagatatgtgaaagaaataaaaaatgagcagtcaatatttgctcctaaaccttccaagaaggtaaaaactgaagaacctccaatcatatttttggaggaagatgagaagaacgtgaggtatcctcatgtcgatccattagtgattactatccagctcgccaataaaaggataaagagggtgttgatagataacgagagcttagtgaacattttttacaaagaaacgctgaagaacatagggcttgaaaagaccaaaattgaggccttgcatggtaaatctttacggcttcactggcacagtatcgccagtcagggcataatcgagctcgcgctaaccttgggagaggcacccctatccgccatagttatgcaagaccttctagttgtcgacctgccatcggcttacaataaattattgggtcgtccaacattaattggactaggggcagttagttcgattaagcacctatccctgaagtttcaaacatcagaaggtgtgggagtggtacgaggcgatcagatgctagctcgcgattgctatcacatagagttacaacatagaaaagtcggccacaagttaatggcagtcttggtagagaatagcgaaaagaaggacgaggatcttgaccctcgggttcaagacaaaaggaacttattaaaaccaattgaagaattggaagaagttgttctcgacccatgaaatcctacaaagtgtgtttacaattggaagaacctagacaagcaattaaaatagcagctgataagtttactaagggcgaatcaggatcagtttgcctagagccatggagatatgatagggattgaccttaatattatctgccataatttaaatggcaatccaaactacccaccaaagaggcagaaaaggagacccttggattccgagaggcaatgggc

SEQ ID NO: 391788 - DNA, 1639 bp, Cannabis indica
atagtaatatgtgtagtaattattagttattttatttatttatttatacaaaatgaaataaataatactatttttaaattatagtgacaaagttatagaaaaactgatttataatataatgtaaatatgtgaagtaaaatagagtaagtaaaattgtgataagataatttaaaaaaataaattaaagaaagtgatgtgagtgcccttaatagtttggcaaactcattacttgttataaaaatatatgaaataattgttataattcaagaagaattttcacaggatcatagttggaggaagtagaagacattctattttgtgtgaaattataatttattatatattttgggtaagtatttcattcaactccactcctattagatccattactaatgtagatatagtcttgaatatgcatctggttccttaatttatgagtaacaagagaaaagaactctattgagtcaacaatagtgatcctagcaacccaaaaaaaaaccaatagtgataacaagaaattcaacctgtcctaaaagtacaaagtgggtaaattacagggttgcatacaaattgaaaaacatgttccatggaaatgaaattctggatgataagtaactccctaaccctttgaaatcttcctcttcaaaccacaaaatcaaatcccttccttcaactgtcgtcctctgactcctgttgcagtgcatattacagtcctaataaacaacggacatgttgaaatctgcattaatttattatccaaatatgttacacccatctatacgacgacactctcgagactcgaaaaattttgacaagatgaagaaaggttgtttctattcatgatacacatccagattttcatcatatcgagttcttggaagagtacaaatggacaattctttctcatgtgtgattttcgttcacgtgatttggaacttctccttggctgtccagcggcatatattgtgccattatcgctctgatttctgaatccatgtaagactgcaacaataatattcggaacatcacaaaacaaaacacttgggcttataaggaattaaattttatacatttctgctagcaggcatgcaaatattatttcattcctaattaacctgcttgaacattgactacattcaatgttttggcagagtaaataattatttagacagggaaagataatctattagaagcgattcatcgtcctccagactcaacaagtttggggtagaatcatttttcttgatttaatgattatgtacaaggttagcacatattgtagacatctttgtaagagttgcaaacagttgtatcagatcagtacttaatcaaagtctccccagtcgccaggaaccaaataataacgtacacgaacacacaaatcatatatgaatttcaataagcttacccttaatctgtatttgtacacgagatatgccccaccagcagccatactcaagcctattaaaatgatccaaacagcagtccaagcagagcgtgtctctctggcacttttacctgcaaatgatccaagagagagcacagaaaaagagaaacattatatgattacacattatgcaagtctagaacatatgtatttggttggattaggttgtcaaactcacttatgcaggtgtca

SEQ ID NO: 391789 - DNA, 600 bp, Cannabis indica
aaattccaaccccacaaccaaaccaaacagtaacttttaattgttaaagtgtatctcctcctattgccaatgtatctcctcctattgccaattcattttgagataaaactaataattcaccgaacatcctcccaaagagatgttcttagctaatttaaagtagttataggagtgctagctcaagcaagtcaataagaatgagcgaaaagacttaagtcaattaattatataggcattaaaaaaagtagttattttcttataacaaacaagaggcttgactttgagtttgactcaatacaacacgttataggtggaacaaaattacgaagacgtcttagttttgatcttaggatggaataatagatgatccaaacatcaatcactcatctagcaagtaaatattgttatattattttatataatataatatgtagattaaataattaagtgtgacaaagtattaattttgtcaaattgtaacatacattatggagttataaaatttgtgtagaatgatctcaaaataggagttgcaaatcctttaaattgataatcacttgaatatttaactctcatctcttttttcactcttaaattagt

SEQ ID NO: 391790 - DNA, 953 bp, Cannabis indica
tatatatatatatatatatatatatatttcaatctatataacttagttagttggctaattattattttccttaagttaaagtctacccttatattgttgcagaagacagaaaattattatatatagtttggtcgcagattatatatatactgaaatctctcacacacaccctctactatatatgaaggattatatttatttttattgaaaacaaaaaattaatctcatgcacattcactcacaataacaaatatagatttcatttaatagtagatgatatggggccacaaaaactaaatgcctcacctgcataatatattggtagataaatatatgcaaatgaatgatacagattctttaattatcataaatttatatttttataaaatacatgcatatatattacgtaattattaacagcaatcatgacctcataatattaatctatatgtaatatacattatgcattagaattgaaaaaagaaatcataaatattgttcaggtcaactttttcttttctgaaatgataatattcttgaaagaaaagttctttcctaaaaaaaaagaaagaaagaaaagttctttaatacaaataactctttgatactaaagaaaaaaaaatactattcattttatttttgttctaaagaaattttatttttaggataattacattgtataattattttaatttttactttaatttttaagatattcacttttataaatgatgtctttattatacccatttggttaatataaattatgtgctatatttaagtggatgatgaaagtatattacattattaatattaatattaaaaatataattatttattacatttgaaaacacaaatgcttattacttattattaatattaaataatattaaaacaatcataagatcataagaaagactgttttgattcctttgatatataatcacaatgtc

SEQ ID NO: 391791 - DNA, 1249 bp, Cannabis indica
ttaaaaaaaaaagaaaaaaaatgagaaaacaacttcacaacaactacaaatcaacaataaataaataataaaacaaacaaaaaaaagaaaaaaaaaataacctcattacaattataaatcatctgtaaataagcgctataaaacaaccaaaaaagaatattgaacagtttactaaaatccgtatttttgtgtaaatgaaaaatttgaaatcgtaaaaataaaaatttatccgttttaagatatttttgtatttttttttaatttttagtctattatctattttttttattattattagcacgaggacatcacttatgctcttgtgcgcctttaaaaaataaaagtaaaattaaatactaagttaattataaagataagtaatttgcggcataaatattaaagtttaacttctcattgcagaagaatacttaagtttaatttttgacggcaataatacctaagttatatttacagaactttcgtaggtacttggcagttaagtatcaagtcaatggccacgtgacagcccttgattggttaaggtcattaaatttttatttatcatttaaaaattaatttaaatatagcaataaaaaaatgacatgtggataatgacttgatacttaatggacaagtatctacggaaatttcaaaaatataacttaattattattactatcaaaaattaaatttagatatttatttataaccgagagttaaacttaaatatttacgccgcaaattattttatgaaaaaatagtttaatttaattttttgtttgtattattttttttaaataaattaatgtactttaataaaaacaaaattgacacaaatatactttaataattaaacatatattaatttgaaatcaattttttactaaatgaataaacaaaaaaaaatcatatttgataattctttttgaaggaacccgaagaattttctaaaacacgtgtatttaatttataccataaataattatataaataaattatattatctttaattaaataattgagattaattacacattaatattaactagaggcaacttatgtgtatttttatttaggccaattatgtgtaaaaccatgattttaagaaaaaccacttacaatcaaatataaaatataatcataaataattaaattaagcataaaaacacatttcatgacaaaaaaaaaaaaaaagaaaaaatagaaaacaaatactcataaggaagacaaatttggtttaatcttccat

SEQ ID NO: 391792 - DNA, 598 bp, Cannabis indica
ttagcgtaaactctagaaatactatataaaattttcaataggtataattctaaattttgtgtgtacgcatgtgttttaaatcatattattttctttaatccataacacatataatatcaaaaaatctttaaagtaataaaaagtctcaactccaaatcttcacatgtattgaaatatttaaaaagacgaagggttgtcactcttggagttgggaagatatattaattgacgctcaaatatagataaagatttttaggacaacaatgtaagcaattgttgacccatagataagctaaccaaaaaacttttaaattcaaatgacaagttatctttcagaattttattacagtacttatagctaaaactaaagaaataaataacaattttcttttgtgactaatatttacgaaataaattatagcaagatttcttttgattaattattttttttattattattaattttagagtgtctacacatttagtaccctgtgttttgtctaaatacaagtttggtaccctgtatttttaataattcttatttggtatcttgtattttaaaattatacctatttggtaccctaaattcaaatttttt

SEQ ID NO: 391793 - DNA, 1529 bp, Cannabis indica
aaggatcagctcaaacagggattcttgtatcaatagatggggaagtagctggaattctagccatatctgatccccttaaaccaggtgctagggaagttatctcaattcttaagtctatgaaagttacgagcatcatggtgacaggtgataactggggcactgccaattctattgctaatgaagttggtattgaggctgatttagttttggcagaagcaaagcctgagcagaaggctgagagagtgaaggatttacaggtacatatataattatatttataatataaatgtatattcaaatcctagtaaagatataatatacgcacacatatatggaatgtagttgctcaactcctggcaaatttttgtaagacatgtatgctcaatatgaatgtactataaactaccaaagcatgtgatttgctcccacaagagtctctgggcacctacgtagaaattgctatatagttttctgttcctctaatgaaaaagttggattgtttaaactcaattttacttattcacaggcttcaggccacatagttgccatggtaggagatgggatcaatgactcaccagccttggtggcagcagatgttggaatggcgattggtgcaggcacagacattgctattgaggcagctgacattgtgctaatgaagagcaacttagaggatgtgataactgccattgacctctctagaacaacattttctagaattcgactaaactacatctgggcattgggttataatgtgcttggcattccaatagctgcaggagcactcttcccatcaaccggatttagattaccgccttggattgctggagctgctatggcagcctcctctgtcagtgttgtttgctgctccttgctcttgaagtactataagcggcctaagaagctggacaaccttgacattggtggaataaagatagagtaggtattttggaaaaatagattcaattaggacagctttaataaaattgtattttggtgtgacgaaaatgtgtacagataatgcttgctcactttgtaaatttccttgtatataagtgaatgcattgaaatttcaggattgaattgacacatataaataataaatactgtcatgatattgtgtcaaaacctctctagttctcggtcatgccactgatgatgatggtgttgtgcctgatatcttataccttttgggctcgcttggtatgccgtatgagggtcgtattgtattaaataataaataacactacgtttcgataaagcaatgtattctattaattattacgaccaatttttttaatacaatgtatgttgtattatttaactagagaactaagccgcgcttcgcgcggtgttgcctaattttctaacttttatgtatatatattgtatttatattaagtgatataatttaaaatataacattttaatgtgtatattataaacaaaccaatatagtgttgaaactaaaaatatagtttgctattttaaaatatatagaaaagtaaaaattttgtgacaaatattat

SEQ ID NO: 391794 - DNA, 1559 bp, Cannabis indica
atacactagctaatgtttctcctgttacattaacgatattttaaaatttaatggtaaatttattcatttcaaattataaataataaagaaaattcgaatccatctaaagccatatagaatcattgttttaatttttaagtttctgttttagtttttaatggtgaattttattcatttcaaatcataaataataaagaaaattcgaattcatccaaagccatatagaatcatttctaatttttaagtttctgttttagtttttaatggtgaattttattcatttcaaatcattgttctttcttgtttttttttctttagttaaagatcttgtcatacaaaaaaaaaaaaaagttctgagtttaataaaatgatactatatagtaattattttaattttttttttgaataataatcgtaactttgcgagaaacagtggtaaagtttaaattaccggttgtttgtcaacatacaaataaattctgtacacaaacttgccttaaattattattagaaagtcacatgcttacattccattttctcatgttaaaaaaacacacccaaaagatcgataacaatgaaaacaaagacgtgaattcagtttcataaagtactaattaattattaattaagtttaatatgaggatcaacctcaactctagcaacaccttctctatcctcaaccactttaggcacctcaacttctccgatcacaatcccagcaacctcatcaacctcacccctcacaatcctctcctccgccacctcgtccacataattcgggtccctttcgtcgatagccgccgggataggagaaagctcgctctccgcaatctcgtcgggtccttcccacgtgtacttgcctccgtggccggacttgggtggccctcgaccgattccgatgccgttggcggggtggcgttccaacctctgaacccctttgtcggcgagcttcttttccacgtactttagggtgtctgggtcgtgagttttgagctcagccttctccactctcttgcgcccttcctcatcgcggctcaccgctttaatcgtcaccttgtcgtcgtttataggcttcatgatgtcgtttggggggttttgatgtcgttttagagtgttttaagtgtattgtatgattgtattgtgttttaagattgatgagaaagggtttgttttatattatatatatataagtgttagagttggttctggatattactagaaaaaggttttgatttacaaatgatgagtctaccgaagttgcgggatgtttctgccacgtgttttgttgtgtctttttctagtaagtttgagaaatttggggtttaactgagtgtacccacacttccaaacttataattatcctattattctttgtctctttacaaaaataaaaattagggaagagaagagggttttttttttttttttggttaattaagatttttattttttttaattttaatatgtattaaatcatgttctttgaattttttggccgttaaaaattatctcttaattattgagattgtttgatttaaagatttttgtctaatttcatt

SEQ ID NO: 391795 - DNA, 1108 bp, Cannabis indica
tagtatactatatataaggtggcgacttagtaagaagaaagggaaaaaaataccatagacagtattacattgtaaattttgtgacaaataatattgcagtttacttctttgtctttactcaataatatatatatatatatatatttatatatatatatatatatggttttaatgacaatcatacaaatgttttttttagggaaatgtcaagggcaatttaaacactacaaaatgtatcaaacactgtaagggagtatcagagcatctcaacagtagtaatttttaaggatgctaaaaatttaaatatcatctataatattttattttatctctttttcacattatttttgacatttttacttctaaaaacattcaaatgtataacactttttaaaactctttaaaaatactataattatgatctcacaaattattacttaatgtatatcctaatttttagctagctttaatttttatatataaaaaaaagtgaatagcatcaatactataacataatatcgatgtaaatttctagaatgacatccttttctctccaatggtatatcattttaatattttgagtcacataatatgtccacctcaccaaatattctctcaagttttactattggagatgctctcataacgcgttattggtgcattaaatcatctttaataggttcgacaaaattagttgtgccaatattggtcccactttatttatacttagccaattatatattttattttttaattcaaaaatattaagaggtacgggtacccatttaagaatcattttatcatttcactctcatatatatgccacataagataatgtgatctcttacgcttaatttaatattaaatctcacacattttaattttaatataataaataacataaaaaatcacattataggccaattcaattagaattgcgaaaattcaatccttcttattacacatactattcacaggaacataaagagtttgtttggctgtgtttttcaattttcagtttttagaattgtgtttttaaaagtgagaatagaaaatatttttttgtcattttaaaaatttaatagtatttgacacaaattttttaaaa

SEQ ID NO: 391796 - DNA, 648 bp, Cannabis indica
tctccgatcatcttttccttcggggacgagagagacgaccaggtgggattcttttttggtaagaatttatagcctttatgttgtcatctgagaactcttattgtgagaataagattttgttattcgatatttacgatctctttgaaggaaatttaaatgtcgaggtgcttcgatgcctgagcggttccaatatcctagaacactcagatttcaagcagttccaagaacggagggataacgctcggcaagctcttggacttgagcggctccaggatctgaacttcctcgaggtctgggcagcttcaaagtccgagatagcggtaagagtcattccttccttgcagaatatattatgtaatctttaattctctctatttgctgacatggaggttttctcaggttggggatgcttatttcttcgcatagatttgtggataatctcaaacggagatgtttatttgacttttctaatgtgaattcacttctgggaatttttgtgtttctttgaacaatgttgttgattgtctcttggttttggttgatctttgagtactgggggctgatttctgtgtatactcgattcatcacatcatgattctcctccaaaatcatagaaatattataaaacacgttcccacagatggcgcc

SEQ ID NO: 391797 - DNA, 763 bp, Cannabis indica
tttaaagatcagtaaacaactcaaaacctatatcttgttcaaattcaaagaaggcaagcataaaaatatgtgattacttgttcatctctttcatccagtcaggggatacaatacaatacaatcattcataaagaataacagtcatagaataaattgaaagcactcaaatctaccagtagtaactaaaatcttttgatttataatttaattacagaatctaagattaaacaagagttagatacttagatctaaaaccaggctccagtccaccagagccagatggttcaaaaaatatattaattattatattaatgaaaataaaacataactgagaaaaatagcagtagacctaaacccagcaaaatcggaaagatagaaggcttaaattatgaaaagcctaatatttcatataatatatgagatcaaactactgtgttctctgtgcagccaagcctagccatgagttgccttcagttgactttgatgcagctaattctgggatttggtatggtgctctggcattgattctgttaacaaaaaagcaaacaaatggttaatcccatgaaccaaacataaacacaaaaggccaatcaagaaaagaactacttccatttttggtcataaatattatggtacaaagccccaccatgatgctattattatgaatgaaaaaataggttgggtgtagctaatgaagcctaacaaaaatatatatatatatatatatatattttgcagattatgttttgatgcctacctatcc

SEQ ID NO: 391798 - DNA, 1599 bp, Cannabis indica
aaaaaaaaaatatgtattattataatattgtattgcattacaacattttaaagtaattagtataatagaacaacaaacaacagtactaggtctcatcaaatcaaatcaattcaacaaatttcgttgaaattgttgaacaacaatttaactttgataagcaaattcaatacaaatttctgaccttttgaccttcactcaatccaagctacaacaatgaaatcaaatcaactcaactcaacacacagaaattgagcaattttgttagtaattgtgttcttaattattggaattagcattaatataatgcttaacagcttctctaatatcatcaaattcatatgaactctccaaaaaccctaccaacttactcagttcacaatcgccgccgacatcgtcaacgaacgcctgaacaggaactccattctccggctgcaaagagtacgaattcggattatcatcgaagatcacagatcgcctcaaatccctacccaaatccgacaaatccttaacgagtctcccatcaacttctttgcacgaatcgcggtaaagccgatgagagatcactctgtttccgtcgagtttatcgagaacaagagaagcgtattctctcaatccagccgtgaaaacaacaacctcgaatttatcgtcgttttccctaaggtattcgagcagttcatcaactccaggtcgtttcaacacgtagaaattcagagtttctccttcgattctcggccgtacgacgaaatcgaagcgttttggaggcggatctggcttggaatgaaccagagtctcatctagatctaggaatatcgttcgcttcttctcaggggagatcagaggtgggaggaggaggccgccgaatgaggttattaatcgtcgaggattgggaattagggtttcaggggtttttttgaggatcttgtatcctttgttcttgcgacaatttgtaggggttccgatttgggttagttttgagaagagtttgatgaggcgacggtggcagttgaagaaggatttgttaatggtggaaatgactgttgaggctgaagctgttgatgatggtgattttttgactggggaagatttgcggcggtgtcgtcctcggctgtctttgatggacttggtcggagtttttctgatcaatctggacaccatttccgccggtagagagagagagagagaatggagtttgaaaatggtgaaagtaatgttttctgttatgagtttgttgtaaaacactggaaatgtttgaattttaggcttggtataacggtcgaccagcgaagccaaactaattggttcggaaccgaagctagtgttatagccaacttttgttgggccgaaagcccaaaaggatattgggatcttttaagaaaaaatacaaaaaacaacgaaaaaaattaataaaatatacagagtttttcaacatttttaccattttttggattttatttagataaaatatggtgattttttatgttattttaatattattttattgttatttttatgtgattttcttgtatttttataaaataccataaaaatatatatatataaaaaaaaattttaaggtaaaagtatatatatatttttttt

SEQ ID NO: 391799 - DNA, 876 bp, Cannabis indica
attgaccttatgaaagcgtatgatagaatgagttggaggttcattgatcatgtgctctcttattttggggtgcctcagaagtttcgaagttgggttacccagtgtattactaccacctccctcaatgtttgcctcaatggaggataatttggcaggatcacttcttcttgtggctcattataataaatataaacaccttgatatcaatgaatttttattgtgctcttttgatgttttggataaggattatgttaatattctgttctgtttttatttttggaatcaaaggaacaattatcttcatcatcacaatgttattctagcttctgacatttttgattggtgtgttagctactttttcaaatatatagatgcacaacacaataatcaccatcctagtgcttcaactcctctgcaaaacaggtcttcggaggtttctttggatggttctttgcaggtttacactgatgcttcccttgatcatcatagcaggaagcatagctttggtattgttgttttggatgagctcgacatggtgaaagttgggatatctaagccctgtgttggaagtgttcctactatcctaattgaagcaaaggcaattctgcatgatattcaatggattcaattgcttcaccttcctgtagatgttttaaaaactgattgtaaaactattattgacaaactttatttttgcaattagaatgttagtccagtgaatgatatcttaattagtatcaaacacatgttatctttcagtcctagtcttaatgttgttcatgtgtatagagactctaattaattcgctcataaggttgtcaaactatgattaggactaaataatgagttggtgtggaatggtcctttaccttccat

SEQ ID NO: 391800 - DNA, 1067 bp, Cannabis indica
agccgcacctgtggaaaccttggttgagttatgaatattagaatgctgctgaaaattgcagtaatatgcagcaaatttcgcccagatttgtgatggagagaggactggtttgccatgtatgtaattgttcctgtcagtccataaaaaccacatcgtgcgcaacatttgttccatttcagtagtggttttaagggtagatagcaaaaccagacaatcattgaacttcattcttgaaatcacatcataatcaagagggatactagcagaatgccaaactttcttggcatgtttgcaaaggaacagagcatgttctacagactcccaggcattcgagcatagactacatgctgcagaatcaataatctttctattgcatgatgaagcagcagtaggaatggctcgatgaaaagctttccaaacaaatattttaactttggatggtagtttcaaattccaaaagtatttccaccatgtgtgctgagtagtagaaggagtagaaagctcggagtcttcaaggtcatttgcaaggtgataacccgtttgaacggtgtactcacttgaattagtaaaatgccatatccattggtctgggacatgagatgaagatagaggaatggagagaataaaatcaatgtccacagctgagaagtcacgtgtgagtagttgcaggttccattctttgtccttggtaatatagaaagaaaccaaattctgggggtctcccgaatagtggagaggtgtgaattcagaatgtctaggaattatttcacaaatacacaaaaataacaaaaaaaagttataaaaatataattttacggaattttaaatatttttacaactttatttatagaaaatacggtctttctatgttgtactcatgttaatttgttgttgaattttattatttgtaagttattttttgatgttgttttaatgttatttcaaattattttatattttaaacctattcctttcttctatttatggattgtgataggttgggtattgtaaagacaaatatgataaatagggtacaaatcctttcagaacacttttttttttttttt

SEQ ID NO: 391801 - DNA, 1027 bp, Cannabis indica
cccctagaatcgggacccatcacccaacttgacaatcaacttgggacgctgccttcaattgctcagatgcaaaatttaattcgatcaatgaatctagaatggtcaaaacaggataggagaccccatccttaagttcaaaagtgttggaagtatcaaaatgagatctcggggaaaactcgggaatagggtacacaatggcttgatgcgctgggttctgcttatctgattctgattctattttgaccattcatatagtttttcacaataactagatccatgaagttaaagaagtcaaatttacaacttcacattactcgtttccaacatgggaaactcactcggaaatgaagacttttgagtctctcattttgcaaaacaacctctccgagaactggtgaccaactttgccagaacaaaaatatgctaagtgatgtcaaaatatcacttagacaccgtaaagtacatcccttggacgtttttacacttacatagtgtccaagttgatgtcatatgtcaacttgggcgctggatgtcaacctcggcattgggtcatgaactgtgcgccttcagtaaaacaaccataacttgttcaatattaatctgattaacgcaattcaacttgtgtttcaatgctaattaaatgctctatcaagtcatgtgtgacacttcaatcgtaattctgaagctattatcgtgaaatttaaccccatgggagttattaaaacaagctttgtgttgcccgtagcaagacccattaggctccaaaaaatatttatcaccaccaagagctaattttctccgttatccaatttgtattttatttttattttttgttgggcatccttcatctataaaaggagagctctaataagctcatttttttaagtttcagaaaactacccacaaggtcagagcttctctctctagaaattggagcttctaacacttagtctatttatgtaattaccatcttgtgagaaataaaaaactcgaggtagacgtatctccattactgtcgtgatacagg

SEQ ID NO: 391802 - DNA, 1046 bp, Cannabis indica
aataaaaatacaaaactcatcaaggggtgaaggagacaagacgtccacgaagctcaatcgttcaagccctctcatcggagctcctggttattcatcagtttttggccaatggaggtaactagaaggaagagacaaagcgggagagaagaaaaagggtcggggtgggaatggtgctgcctttgggaagggagttcctggtggtggtcagttgagtttggcttccatggcgatatgctttcgtcgtagggggtaggggtctggttgggggtgggggtggaggtagggtgggttggtaggggttgagggtgcgtctggatgaagacgatgaagaagagtaaataaaaaaaaaggaaaggaaaaaaaaaagaaaaagaaaagaaaagataaaaaaattaatttttttatgatttttaaataatataatttgttttttaaaattattttaattaaaatataatttggaccaaaaaaaatttcaacacgtggcatttttaaatgattaacggctcaaataaaaaaaagactaacagacttacgaaaaatgtcaccttgaggattattgccgctatttttcgaccttggggacttatctgtatcaaactgaactttttgaggaatgttatcgcaaatttccctaataataaaagaatcagttgtacgtaatacttgaaataatatttcaattgatttttaccacgtttaaatttttttattaaaaaatattaattaaatttaacaaaagtttactttacgtctttttatgatatctcttacctgtccaaacacaacgttttgcagcaacaacttactataacgacaatcaaagaaaaggtgataaaaccttttccacaaacaagacaattcatagagttaatcactccgtatcgtatctctaatagcaagtatgaatctgtgctttggaattgaaaatatatcccaaatgttcgcatatatatttccattttttcttagcaccaagctgcaacttaattagagcaaagagcagctataaaaaaagtgagtaaatagcggcataagtacttaaa

SEQ ID NO: 391803 - DNA, 532 bp, Cannabis indica
gaagtcaccatgcctcagatgaaaagaagcagaagatttcctgatgaatatgatcctcatgtggctcatttcgttagagctaaattgattgtgcctaaggctaagaacatagacaaggcatatggttggaaagtaacggcaactgaacttctcaaagttgtcattgagagtgatgactcaagagaccggacttttaagtttagacctcttgtatttagcaccatcattaaaaaccaagcacaattaatcagagatgattatctccttcctaaaactgtcatccagaagccacgatttgaatgtcctactagctcctagaatccttgtttcaatgcctcgttgaagttccatatgaatgtgggtgcttacttgcctttgcacctatggtttatatcaatagatgacttctttggagtttatgttagcctaagatatgtttccaagagggggtgaattggaaatttaagctgatttcataaatttaaaaaccccaaagaaaattcatgcaaatattcaagtttaatgcaataac

SEQ ID NO: 391804 - DNA, 1173 bp, Cannabis indica
caataaatatgtatttttcaccaccaatcagggtgttacaatttggtatcaaagtcaccaattgtctttcaaagatcgccacgatatgtacaatattcattagaggaaagctcaactcacggttcaataagccttttatgctttagtagtttgttctataagtaagtaatgagaaaagcctgttaaggagcacggtagtagcttgatagttaaatagacgcatgttttattttcttaagtaagcagtaaataaaatttaaccttgatcgcgatcggaccaggctagctcatggttttgcaggcttttctaatagaatagacgccaggcggaacacgagaagccatggtaattcagacagatccagtagtggttagggagtttagttttcccctaatgtttgtggccgaggcataggcccaagaggtagggcacgtagttggggtgatgtcaacccaccgcaggctatccaggattaggaacataagtttgctaaaatgcaagctaggattaatgagcaagatgaagagatttggtgtttgagacagtagggtgctcctacaatgcctgctcctgaggtgcagatggctccttcctctgttatgcaagtagggccagctttcgttgccaatcgaatggaaccactttatgaaaggttctgtaagcaagcacctccagtctttctaggaggtatagattttatgaaattcaagcaattgctaactattattaccaagattttgaattttatgggagtcattgacaatgatagagtggcttgtgcaatgttttagtcccaggaggatgccttggtctgaagggacatggtatccctcacccaagatgtcaccagaattacctgggaagaatttcaagagttatttaatgcaaagtactacaatgaggctatccataaggcaaaaagaaaaaagttcacacaattgactcaaaaggagaattagggctgaacatcgggcgggtttaccgggtttcgggttggcgggtttcgggttcacgggtttcgggttcaaaaaattgaaaccgaacccggacccaaatagggcacgggttggcgggttggcgggtcacgggttggcgggtttcggttggtcgggtttagcgggttggcgggttgacccagtcaactcagtcaactctttaaaaaaattattttt

SEQ ID NO: 391805 - DNA, 1044 bp, Cannabis indica
ttttcacaaaatgagttgtgagcttggggaccagtaccttatatcgtgaacaaggtgaatcacttgacgaaccttctccatatcgccaactaattagcaggttgctctacctcaccttatcgagaccaaatatcacctacaatcaacaatctcagtcgattcatggaaaaaccccgcacacatcatctccaagtcatccatcatttgatttgatacttgaaagggagtccaagccaaggtcttttatactctacctcttccactctgcacctacaaggcttctctgatttggattgggcatcttgcctagctactcgacgatctacaactagcttttgtatattcctaggtgattgttatgggtgttcgcggtgggagttgtaaattttttttaaaccaaactgcatatgcagtttttgtaatttctcaaaccgcaactgtaccgcgagatcttaaaactacaaaaatgcagtgtggtgcagtgcggtttgagcagtttacactatcaccattatcaaacattataataaaaattaatctaataaaattttaactgtacaaaaaaaagttcttgttaaacttttgatatcataacatatatactaatcattaagttattatattgagtcgtctctaaaaataatataatattcatatattacatatatttgttcttatatgaaaaaaattatattgtaaaaatttgtaatttttaataatatatatatataatgcgatgcagcttgaactgcaattattaaatttaaaactgcaaactgcaccgcactacgcggtttgacaaagatacaaaccacaattgcacagtaaaagattccgaaccgtattatttaaacggtgcagacagtttgtacggtgtaggctgtaacgccctaaataattaggcatgctacccaaaatacttatgaaaccctaatccactaaacgagattactaatcaaaatagcgcagaatttaaacttttatattaaacagaaagaaaataaacttgtaatatatttaaaacttttaaaatagttgggatcc

SEQ ID NO: 391806 - DNA, 1342 bp, Cannabis indica
ttttcatttcgcacagacatgtctcagaaaattcttaaagccttgaacaagagagttggaggaagttctggcctatctcctccggccgagaagtctagaggtggtgagacaacactgtccagagagaaggcaccagccaaagcagttattgatctctctgaggaaccaactgtcatagacccttctgcaccaaaggtgactaagtccaaagactctcaaggagggagctcggacaggccagagcagtgaagggcagatccgagctggtcaaaagcggatctaagcaaatcaaggcccgccccacctccagtgctgcatctagaactaaaagaggcaaagatatgctcacccactacatagctcagtcggtccctcaggtgaatgagccactggcggagctgacaatgacctttctctggaactggtgatgggaggagtcgtgaagaagtttacgagggtgagtctttcctgacagtttcttcttgtccttctttatttagctcagattttaatgttatttctctgtgcagaccggtctgaagatggcatatgctgtttcccgagctaagtcgactgcctcaaagaacactgccatgtccaacaccatgtaggcaaaagtggacttggccaggaaggatgccgacgaagccagagttcaacttggagccgtccaaatggaactgggagaagtcaacaagaaacgtcttgccgccgagaagaaagtggccgagctgactaaagatttagaggcttctgacaaacttgaagctgccattgcctccttatccaaagaagtgaccagcctccaaaaagaaagggaggttcttcgaactgtcttccataggttagaagcagagaagaagtctaaggaggaggagcttgaggctgaagttgagaagtacaagttagaggccgagcagcagagagctgaagtggcgaggctcggagggaaggtaaatgccttagagacagcgggtcttgagattttttatgtattttggaaggctaatcccatggaaaacttggattacttgggtgattccaaagccatgtttctcgagtattgcgcttctcaggtcacttatggagaatctgaggcgaccacttttacttccggtaaaaatgtagacatggccctcgctcagacaactgatcttccagctctaaccagcccaaaagacctgtacaaagagcctacgactccatccgtttgaatacttctttttttatcttctttttttatatatatttatcctgccataaggccttttttaagacaaagtgaccggccaagcggtctttaaacttggaattattttttattttttagacaacgggctga

SEQ ID NO: 391807 - DNA, 529 bp, Cannabis indica
ctaaaaagaaaattatcaatgccattatataacttcgaattaaaaacacatgacaaccaaaaataaatattaattgaatttttattgtgacaaaatatgattatttagaaaattatcttattttcacattgttatcttaattcgtataagttataaactcttactaaaaattaaaaataaataacatttatatctttcttgaagttaaatataattaaaattacttgaaaaaaaatctcttgatattatataagagaaaaaaaaaatataattttcaagatcatgtaacaaataagtttattttacattttatgcattattaaaatttagttttgagattgtattaatttgttttaataaaatgcataatttaagttattaaatattttattatagcgtatatatttttatattgtcaaacataatttatttttggaataattacataaggcactattttttgtaaaataattatatttttacgttcaaaaaatatttttttacacttttacggtttcacgaaaacaac

SEQ ID NO: 391808 - DNA, 1162 bp, Cannabis indica
tgtttaggctgcaaaatcataattaatgttatattatacaagtgtttacatgaagaatacgtagtagaactatactagaattaatggtctagcttattaactataattattttatatatatatagcttaccttgtagttttggtataaatatttgcagcagttgcatgagacaagagaaggttatgagcaactatgtaaggctcagtggctgagcttccagccttgcagaaagtgcaccgcccaggtgcctccaaacctaggtcgtagccttgtgtggagaatatatgaggctcgttgaaggtgatccagtgcttcactttctcaccaaatttctcaaagcacgtctcagcatatactgcaaagtccttgctatgtatatatatatatatgtatacgattatctgtattaattatattaacttctttcatgacttacaaagatcttaataacaaaattgaatcattatttaattttacatgatttgacgatcgagccatccattgtatttgtcctccaatgcttgagggagatcccagtgatataaggtcacgtaaggctcaattcctgaattattacactcaagttgaggtttgcaaatgtataacataatcatttttatatttatttagaaaaagagacagagtattaaggtattagtattacctttggctagtaaggaatctaagagattattgtaatgatcaactcctcgttgattgatttttccacttccatctatttatatatataattagtcacaagttttatcttatattagcgcacaaatatatataaatatatatatatatatatataaatacatattgttttgattgctggataagtttaattaattagtactatattgataactactcaagtataaaataaacacataaatcgaatgaaagaacatgatcaaaaagacctaatgtaaaatttgagttcacaaacaaatgattttttctaaggatagatcatattcgtccttaaatattgatcaagataattgtttgtatgaatagtacgtgggataaaataattattgaacaatgttgtgttgattattaaaaaattacatagtacatcaaaaatttaaaaaaaaattataaaaataagttaacacgacaaaaatttcatttttattttttgaatttttt

SEQ ID NO: 391809 - DNA, 1572 bp, Cannabis indica
gtatacaccctttttttaattagcttaaaaaactaagcataaaaactcaaattttttaattttaccctttaaaaatgaacacatataatagttatatatgcataataatataatatagcaatttatttttctaaaaagcctaaattactaaatcccaaaaccaatttccatagacaactctctacagccactaatgtttcgtaatgttggtagtcagaaactaacatgggcttccacttagtagaaattacatccaaggaatctctagtgtattctaaacatgattggaatcaattaatcaaagttgatctacggccgtgctagtgaaaaactgttcgtgaaattgagaatatatataccaaataattacgcaaatgacaagaaaaagtcaggatggccgagtggtctaaggcgccagactcaagttctggtcttcgaaagagggcgtgggttcaaatcccacttctgacacttttttcttcatatttcatttatttatcatgtaaaaattctgtttcacgacaaatgtacttgttattaattgtacaaagttagttcaagaagtcaggatggccgagtggtctaaggcgccagactcaagttctggtcttcgagagagggcgtgggttcaaatcccacttctgacattttatagagcatttttgttttttttaaacaactagagcatatcatattatgtactagaataacagagtatctctcatcaataaattacttacaaactccatttatgtatcctatatatgtattgagtgtaaaagctcttgaaaatagacgagtgtgtgttagctgcatttgacacactaaccccagaattagttagctactgaaacagaaactagctaatagaactaaccacttacatgggtccccagcaaagaaaaaaactaaatacatagattaacatctcacctcaaatttgataagtaggtagaccaattaattggctacacaagattctagggacaagaaaatgtgtttttgagtaagcctgccactttgacctctgatggaattaattgaaaataatgtccttgcacatgaccaattagtgaaaataaattattttcatgcaattaattcaatatttctacatattatccatgcgtggaagtagagatttttctgctacatgtttctcatctcaccttataattttgagatgtggtgatccattagatttctcgtctgatacaacaacatttatcttcatttattggtgattgataagtatttttggaatagtttttctattgtttcctgatggattgagaataaatttgtattagtttatatttaaataggtgtatatgaggaataagtgtttaataattgttatggtaattgaagtagtgatattgatgagtagttgttgatttagtatatgagaacagttttggcttagaagagagggttgtatgagaaggtagtaagctttattgatagtttggatgttggttgtttggtgtttattaccattggaaaagcttaatggtgttataaatattaataattatgtggatgtccaaatcttttatttattaccatgaa

SEQ ID NO: 391810 - DNA, 694 bp, Cannabis indica
aaatgaaataaaccccataattaacttgacttataatcttccgacttcatgatcattatcagaactctaatatgaatattatgcacttttttgttaacttttgattttttaatataactattctgtcaaaattaatataatggagtgcaggcatgcttttttttttttttttttttttttttttatgcgagtgacattatagctcatcattatgagtagtagaagaggatggtgattgagaattttggtggcagcaattggtggtggtacttaagctttgaaaccacaagtgatctgcctcgactgagtccaagtcgttgttacggtgccatgaccaatgtgcatgtgtctcattcaccacagtcaatctcccatgtccgaagcttgcttctctgaacaatgatagaggtgaaggaggattttcgaatctgcatatatttacatattttgtgtcactcataaaattacgtaccccaattaaaaagcctattgggcctcagtatccaataacatagtatatggaagcaacaacaaaagagctattttttattttttttaagaacaaccaaaacgtgctatttaaaaaaagttattttagctttttcaaaagaagaagaaattattatagagcttattttaactttatactttctaaatttcaagcaatgttcattttatttaaaataaaataaaa

SEQ ID NO: 391811 - DNA, 542 bp, Cannabis indica
ttaaattattttaataattaataagtaatatctattaaaaaacatttcatacatatattaatcaatcaatacattgggtggattttttagagttttgagttctcaggttcgtgttgagttttatgggtaccaaacccgcccatgtgagtggtcgtctgagtgggttgggctgggttttggtcgggatgggcctttgtttttttttaaaaaaaatatcaattttttatattattttcatagaagtactacacataatttcactttttttttttacatttttttaaaatatcacttgcttttacatttttttttaagagacgagggagtctggttgtatatatattaaaaaaaaatgggtttttcgggtgggtttgagtttgacccaggttttaggtgtcacaattgtaaaacccgaacccagtctggtgggtaatcacgtgtaacccgaacctcgcccaatagataaccgagtgtaacccgaatctcgccctataatttttcaaactttttttttttttaagttttctaaattttgagtcgag

SEQ ID NO: 391812 - DNA, 932 bp, Cannabis indica
ggacagaggcggaagtactcttccaccttcctgaagtaccggtggaaaggcaccattgcccgttgcttggtgtgggcacctgaccaggcacacacccccttcttcgggtttgtgcgtgtgatttgaggcagggacataacattcaagttcgctcagatagccagactggtccaaatcccttaggcgtgcctcagtgattttggatggaggactcatccatctagcacctaaggcaccttgccgcccgtgaggaactgcagtagtaagctcctcggtgacgtagtctacccctttgactaagacttcgccctctgcagacacttgctccccgacctcgttgtatcccccaacattttgaggttcagcctgctcctcttcctcagcctcggaaggactgcccggacggacattgtcctgttcctaaatttcctatacctgaatgtccccttcgggatccccctcctcctggatgggtagatcctgctcggcgctgggtagtgtggcgagctaggccacgtcagggtcagatgtgtttactcttcgcattgtttgctttgttcgagccatcatcctactgctagatggatactggggtgaatgccgagctaccgtgacaaccgaatagaaatgggaataccaaagttccatgaacttggacggccaacatgcagagtatcaacaacacctggctagacagcgtatgtccagtttgaaggcagatagcacctccaacccttcttcaactaccaaatgaagcaatcgtacccctctccagcgatctgctcggagtaatagttatgttacacttcgggttctggagtagaatagcatttactactcacctcccagtcttcacagcttgaattggaaagcccgtcacttgaagatgatggactggcacgaagacgaggatgatcctcgtacaaaagttg

SEQ ID NO: 391813 - DNA, 1313 bp, Cannabis indica
agcgtgaactatacatgctagtttacagtcttacttggtatcccaagtatgtggagattccaaatccccgagtgttcctgagcaagcaccgctaatcctagtcacacgatctcgggatttcaaaaataggatcaatcccaaattcaatttcacataaaacacataatttacattccaattacacattagtatatagagctcaaaacgagctttttaacgatatcaagaacgtcctaaacagagttccgagtcaaaagttatggcaaaaacaagaaaccaataattcctggggaaaacagggcctcgctgcggtgaggcaagccgtggccacggcgagggccctggaacccccaaaaaaaccatttttcatttcctttgaaaatcaatcccaaacatgccaaaacttacataaaaccaaacataaccttaaatttcaatacacaccattcatatccaacaacaacaaggattaaagcttaaaacaaagctccacatcaagtacaacaacaagaaattcaagcttataacacgcataccaaagttacacctaattcaaagcttgaaaatccaagcatcaaagcttcaaggaaaaacccagaatttcaagccaaaacccgtaaatcaaaccatatttttcaatcctaaaaacaacaaaaacaatctatatgcactactcatactcccaaaagctcaaacacacaaaaatcaccaatatcaccttcagtttcaccaacatgcattcaatttcaaatgaacatcaagaacaacattagagagcttcaaataacagaaattaaacacatacaaaaaggattagaagcttaccacaaattcacaagctttaagcaatgaatcacaccaaactcactccaattcaagctttaattttcaaaattggttaaaatttaagaaagatgagaaagagagaaagagggggtcgaccaagggttaaggaaactagaaaaatgattttttccttttttcaaaaatagtttttgttgaataataacttaagtggtcaaatgaccaaaatgcccctagggccaaaaataaccatatccatataatcaagggcattattgtcattcaatcacacacacatagcacattaatttaaattttctcatttatcatattaatgccacaaataaattctgaaaatgtattttaggccctgaacccgattcgacctaaaataccgggttgtgactatatcgcgctgacttctcagaaatacctactaggagtgtacatcaaaccgctcaaaccgcccgcaccacactgcactgcaaaaaaaactagcggtttgtaaa

SEQ ID NO: 391814 - DNA, 521 bp, Cannabis indica
actcttcgttcgttccaagtgcagcgcgcgcaaggccatgagctattgtgtttgaagaccggggaatgtgatggactgtagcacctggaaaagaagacaaagaggagactatcatggtgataagatcggagagggctgagcgatcaggagaaggcttgtgtatgcggtggaccaaattctggcagtcggaggcgataatagcgataggaaacggactgcttgacaccaaagtaacgcccggtggagggcttctgcttcagcaaagattggaggaagccctgaagatgcgggagccgtgaaagtggcaacgatttgaccgtggcaatctgagacagcagcgccatatccatgcttattagaagaaatggctgcatcaacagcaagctggaacatggatcttgggacttgaagaattgagggagggtgatggacttttgaaggcaatgaagaaatgcggttttgagcatccatgtattcctgcaagtaacaactgacagaattctccaaactgaaatcagtgg

SEQ ID NO: 391815 - DNA, 1159 bp, Cannabis indica
gaggaggtggagaccctgaaggacgatgtcctgacccagaagacattgagggaggaagaccagaagttggcaactgatacggagaagtccatgaaggagagtcaagacttaattaatcaagcttagacccaactgttggcggctaaacaagctttccttctaaaagaggcagacttatgcaaagtccaactggagaatgagagccttaagtcatgattgtctaagcttaaaaagagctttatcaggttgatttttattttttcccaatatgttgatggagctgaaggagcttcgtttacgtgaagcgactccatcctcggctaagaagaccatccaacttccttctccggttacctctcaacactgcgtgaagcgttatgaggacggggtttttgtgtgctagaaaataaataactttgaaccctgttataacttcttacctgatcttgaagccactataaagtgctttttggagaagagcaagaagttggatgtagccttagcagcgaagataggcgtgttagttttatggtactaaatcaggtacacagcgaaagagttgtttcttattatcattgtaccatatgcccaaggtcaccatatgtatatatatatatatttaactaaaagtaaatatatgaaaagaatatgtacctctcgaagtctatcagggcatcctcaagtcttttcatatattgtattctcggaacgataatgacaaaaactcacactttgatcttctagacatttcaccacacacaaagaatagtgtgggctagtacgataatagtgtattcgaagttcttgattatatctcaaccaatgagcaagaagtatcttttagtgataaagagaaaaagatttactagtaaaacatttttaggctttcaaaaaaattacgtacaaattctattgtttcaaaaacaaaatagaactttttatacagtatattaaataaatccaataaaggtttgtttaatgaattatttaaattcaaatttttatattaaatcataattaattattttaataagtaatataactaaattatgttatagatatttatattcgataacgatttagggaatctcttaaccacttaagagaatatctcaactacttttcaaatttaaatatttatttttgaattaattaatta

SEQ ID NO: 391816 - DNA, 765 bp, Cannabis indica
gggaccaacaagataacattcttctttcttggctccttttttcaatgtctgagaaaattctcactcgaatggtagggtggaatacagttgctcgaatcttgtccaaccttcttgaatactacacatcacttaatcgtgccaacattggaaaaggcaaaactcaactcataaattcaagaatgcaaggttctttgagtgatttttcgttaaagattgaaagccttgtatatttacttgcctctattggtcatccaatatcaggacaagatcacattgaggcaatctttaatggtttgtccagtgattgcaatatttttgttacctctgcaaacaaacgtctagatgcttactctgtagctaagattgaagcttttcttatggcttaagaagcgtgtttggacaaagatagtttagagcttgatattgctaaagtagagaaaaatttggctcacaccaaacccttcactgggggtagcggtaccttttcatcaccttaatggattttatattaaagaagaaatacaagtataatataaataacatatgttatttataaaaatataattaacaaatatctgaaaatttcatattcatatagagtgggtatgatcttgtaaggaagtacaagagaattaagtgttgggttttgtgctctaaataaaactcattttaatataagcagatttactaattaatataagattagaaatcacttttatgttgcatggttcacatgatttatttcatgattatacttaatgtata

SEQ ID NO: 391817 - DNA, 649 bp, Cannabis indica
taagtttgcttcaatttctcatgtgggatctgcatatctaaaacacattattttgtcaatcacatccaaacacattttatatttgaaaataaagtgtaattactgtattatgtaattattattctaataattacacaattacttttaaatatataaagaaccaaattatatgtacatacataagtaacatattcaaaaataacatctatcttgatattaaataaatgagaattgctaatatgtatattgttggtgtttagtatctttcttaattagtatcatataattatttatttaactaaatatcgggtcctatataacttaaaaaaaataacttgaagagaatattatcactaaccaatcattaagtgtgaagatattgagtattacctggtgcggaatatacttgagagatatattataatttgcggaattggaaactggaaagtgaggatatatctagccataattggtaccatctatattaatacttagagaaatgctaaagggcactagtggtgcatagcaccttcctatgtgttaatatcgctattggtctaactaagtatcgggtcccatataatttaatataatagtttttaggtagtatcgctagtcaatcgcaatgcgacatgtcgagaaggtgcta

SEQ ID NO: 391818 - DNA, 1473 bp, Cannabis indica
ttataccaagtaggcaagtatatgttggcttgtgtgatgatatatgattgagagttatcctaccataaatattgaagaaattgaatggagtataaaccattatttgcagagaatattgatggatgttaggtagtagactagtagttgttttttcttttttttttttttggaaatgtaagactagtagttgttgacataatgtcataacactaaattatacccaaaataaaccttatgtgtgaaaatttaataccaccacatgctttctcacttgtcaacatgtcaataaatgtatacacaaataaacttatattcatattatatagatctaaaaactaaaaaaaaaaaaaaatacaaaaatacaattaacacatttttttatttttatttttaaacttttttttatttacaaaatacatcttcaataaaacaataactcttttcttgattattttataatttatttatagttatattatagttatcttgagattctttttttgattattttttgttattttataatttatttatatttcttttatagttatcgtgatgttaatttctcgttgtattttagttgtttcattaattctataatcagataatgtgtgattaattgaatttgatgatgtgagtctactaattgttattgtgtggtaaattatatgattgttgttatcacttgtgactcacgggtgctatgtgttgcaggtaatatgtagagacatttggtcaactatgagttaggaattttctcaccaacaaatgtacatatcagcttgtcaggcaagtggtgctgagttataagaagctgtatttcaaatattctaaatttttaaatatattttataataatactgtaatggcataccttgtaatattttgaataggaaatccccaattgtaaaaaaggactatgccataattttattatttaaattaattagtaaaattttattataaatcgcattttatctaaactcctaatttatttctataaactattttataaacgcacaaatgtagcgtccttaaggattaaggcattacataaacaaatatgtaacaaatattataaatggttgtgataaaaaatactatcataatcttaggttatttcaataatattttaatgatttaaataattaataagataaaatagtaaaatatttaagaaaaatatttcttatattatttttctaatattataatttaaaacaataaaatattataaattaaaccaaatatgaaaattaaacattatggttagaatctttacaaaatattttgattaattatgaattttcttattatttaaatgacaaataaagttattaaaatatagtattttaattaataaggataaagatgccatctaattgaagtagatgtaatatagtatattttgaccttgtcatttaaaataggctaattagtaatttttccccctgaactttgacaagtaccaaa

SEQ ID NO: 391819 - DNA, 878 bp, Cannabis indica
atgtctatgcttatacatatatatatctatacagatgcatatatattatcaaggatggacacattaatattgatgtgtgggctatacccccactgacaaaagtactgcttttaaaaaattaaatgtaaattttttaatttaataattatagaccaaaatagtagaaaagtccccacaaaattagataaattttagtaagaatgattataatgtagctataaatattttttatatgataaataagtccccacaaagtaaaaattctcggtgtgtcactaatattatctatatgtgttgatttgtttatcatattatatattttttaattttattttcttattttatattttagtattttatgttctatgtgttatattttgttgtacttttattttttttccaaagcttgtgtatatgtctaatactttacactttatattggtatagttttcctcatggaaaatattgcaaaacttaactttaaggcacttgatattttgggaaaaaaatatttatcatggattcttgatgctaaaatctatttaaatgctatgggttttagagacaccatcaaagatcaaaatactgaaacaaaacaaaataaggccaatgctataatttttcttcgtcatcatctccatgggggttaaaatctgaatatttaacagtaaaagcttcttttgtgctttgaagatttttgaaagaaagatatgaccataagaaaactatcatactgtcaaaggctaagaatgattggttgcacctgaggttgcaagattttaaatcagtaagtgattataactctacaacgtttaatatcacttctaaattactattgtttggagtaaaaaattactgactatgaaatgttaagaaaa

SEQ ID NO: 391820 - DNA, 585 bp, Cannabis indica
tttaatcaacagttgctagtacaatttactaatgctcgtcattcggcgcaagcaattttaattcggattactgatgtagtttgacatcttggtaaatgtactttatacaatggatattatatatgataggactgatctgaactaacttgtctttatcaaactttctatttactataaggacctaattcaaataaaaaagttgatcaattagtagatcaatctaaatcttgagaattcctaaaatcctgttcatgttagtaggttatttgattcatttgttatagtcttatcgatatgagccttacaacttttatttagaaaatttaataatgtggatggttagaaacatgctttacatactcaggttagccttggggatagatgagtatgttggacatgtcaaagggatggagtgtggcgtcacccagacccaatctttcaagaccccatgccctagaagaaagaatatgagtaaagatagtgatcacatagctgagctccagagtcaacttttggagtacgagcactacaagaaaatgtcacttttactagcacagtttgttattgcgctggtaaaagtaactt

SEQ ID NO: 391821 - DNA, 832 bp, Cannabis indica
actccacctcgaatcaaccccgatagccccaagaccttcaccggagccactcgcccgagaagaccacgatagccacccaatgttcttcctctctctctccttctcttcattgctagctttctctctctcaccatctctccgtttttgtaggtggttggtggcgcatggtccgagcaacaatagttggtggcggcttctctaaaaatatttgatttgtgcattacacaatatatatatgataattttcatgtaatatatattgtgtaatatttgtatttacacaatatatatctgatttgtcttatttttcatttgatttgagattacaaaatgtatagtttttatttgtataatatatgagatttgtgtttatttttatttttgattgtgcttagatttgggttcatatgagttgggatgtgaggtttttttgtgtgactctttagtgtgtctgttataaacagacgggatgagtgtaaaaattattttttataattgtttgcgagtgttgaaaatctacgaaagtaatttgaaacgacgattgataaccgatgcaaatacagacatttttgcgtctactatatacacgtcggctggaggaaccgacgaaaaaacttttaataatgtcaattaaaaactgacggaaaatgtacttttgtagtagtgtatattaataaaattacagttttttgtttctaattttatagctatcggaggttgtcttttttttcttctaatcaagcctgccagccttccttgggcttaagtgcggcttagtcggagttgtattttgctactgcaatttgatttttgctactgcgattagtcttgt

SEQ ID NO: 391822 - DNA, 566 bp, Cannabis indica
ggattgggactgcttttttgctgatattaatgtcccactctggttttggaatttatcgttcaaaaattttagagttaatttgagctccctacagaatcagccatccatataaactcaacccatcaaaacccaccttcaaattaaagttatacgatgctagggttagggaacacatagtgagaacccaacaagaagatatttctagtcgctacaggcgcttcttgcaagaaatatctgaaggcagacgccgattcttgcgagaagcagcctggccagaacctcccaacgtgtcctttattcctatggaaaaacctttgtttttcacccaatgtcacaattccttttgaaccaggtgacttggattttgaaattatgcctcccaagccacgtacatctaaaactcctcaagatcccagcgtcacctttgaggttgagttgataaaatcgaaggtgagatctttctcaagatatacgagcgagatgcggaaaacctgtggaattgaacttgggcaatcatgccaagttagatcactacaagagggtgagttcagttgctaccccctgca

SEQ ID NO: 391823 - DNA, 868 bp, Cannabis indica
aataaaaaagtctcaatttaaactatattaatattttctctctattttaaatatgaatgcttgtttaataatttagtgttgatttaattaatgcttgtcatatttttaagcttttaacattaatttagactaaaattttttaatctttgaattacatatatttataatcaaatctaattatttgagcactaaaaattaacaataataaattttctctaatatatatatatattattgatggaataatacaataaattaggacttgagagaaaaaattgatggttgttctgccataccaatactaggacgatagaataaatttcacagtagttgaagctttaacactttaaattattgcttgtgatgtttagtgaccaaagtaccaatagaagaagtaaaggcaaactcaaagagaatagtattttttttatgcagaacaactattcatttaacaaagaaaggcccaaaagcagttacattagtagaaataaagggttctacctctctcataccaaaaacaaccagtaaagtttgatgaagcatcccaagcacctagcttatgagctacttcatgcagaagtctttgtttcttctgaacaaaaaggaattttattcaaagaacaaacaaatacaagctaggtaaaaagccacaaaaacacacagcggcaacatctgcaaacagcagcagccccaacccaaactccctaccaattttaattacattaattacatacttatttctggtacaatctttgaagggacccttactaaggatcctaagctgaactattttccttatctccatgctcaatctactaggagtagcacaacaaagatcaaagatgcaagtattcctatttttccaaag

SEQ ID NO: 391824 - DNA, 1084 bp, Cannabis indica
atatatataaaaataatatagatacctaataaaaaaagggcatctcctattcaaattcactcatcaaataaatcatgattcattctttctctctctgtcttttcctattttctcacaattgttgtcagatttttttttttccttttttcttgctcgaggtcagattttttttcttattagagcaattgttcttcttctatagcgtataggtcttcttcttgttcaccatattacctccacctaaaaagcaaaattaagaaaaaattagtttcatctgattaaaaaagagaggaagctaagaaacattgaattacattgtttgatttcttcaagcaattgtaatttcaatttatcttgtttttccactattgactctcgtgcatctattttgactatattcttaatttacactactattggtgtattgctatttaaagtttgactcgaataaaataattattttaataattgtaggtcatgaatattaaagtatcatgcattatagatattttaagcaatattttgaatttattgggaactaaattaaaaacatttaaaattaataagctaagtatgaagttatgtatttgtagtatggtctccaaaaaacaagagcaactctattctcctcttcccccatcaagagaaaaaattaaagaatcttaagtcttgtatggactttaatagtgagattacatattttatgagtgataaaaagttctaatatgcacaacttattttttggaaaaatttacaaggtagttgaattttaagttttgactttgcttccaatggcggaactatgttgctggctgcaggggccatggcccctcctcacattttgatttttaaatgtatatacatatatttataggctctctatattaattgctttttttaaaatatatatttcttgataaaaaattgactatttcaaaactcaaaagctcataaatgggccaatgattatttatgcttttatattaaaacaattttgtttagaattgtatcaatatcatttgcatcctatacattttatagttcactctttttgatttttttttcttttgaaagttctttttct

SEQ ID NO: 391825 - DNA, 2423 bp, Cannabis indica
aaaatattacaaagattaatgggtcgaaaaatcaacaacaccgacgggtttgataactttggaatcacataaataagagttttgtggatacctttcaagctagagaccccattcaggaaggccaaagttgctgaaatggtgtctggcctcacaaaatcctaattcttttgattatgacaagttgcaaaataatcttcacatgggctatttgaaaggtccatttggaaaagagcttctttgatgtcattaccaaaaatctttttgggaaccgagttaatgacctttgctaaagcatcattagggtggtctaaagtgaacagagtaggaaaacaatcttcaaaaatagccccaatttcttcttgtcccgacacctcaatcccttctctatttgaaagattcaaaattttatttttgccatgcctacaaaatgcgcacttgtggaagtactcaaaatttttgtcacccaacttgagcaatcattcatggccctagaagcccagtatttctctttccttctcattttcaaactccttttcaatgttatgaagctcctcacaactgacaatgtcaagattagcatccacaatagcaaattctttaagctttttattaatggcagtacaatgtctcttatgaatttccttattccaaacattaagttttccacccacatcaagaacattaagttgtgcattacgaatgggattaacatctttaaagttccaattattttagataatttccacacaatattttcctcatcagcctaagcattttcatagtgaaaacgagaacgagccacatggtttccattatcctgatgaacgatgttggcggtgaaaattcttcaactaacttgttggccagaaaatcaaactatgtttcaagccaagatctaagacgaaaggaaaaatgaaatatggatttaaattgttatcttaaaatggagaaaaaatgataaaatttctattgctctcaagttcaagttataagaatgatttttcaaccccctttcacacttgagaatgggtattgataggctctaatggcctgagttacatggtagtcctaaatagacaagtttttgctttaggctacacactacaggtgcaggaggttgtggtcttgcacctcgtacctttttttggtgttaggtggtgtccggtcactgaggtggtccctggttgcaggggtgatggctgtaatgcacccttggtcgggtcctcagaccttgcaagtgcgtcgcttccactacataacctccttgctcttagagcttgtaggatgcatggttgtacactttttcctagcacgccttgtcctttgattcctcatccaatgtcattcttgtcaatatgcattcaaatttcaccttcactcctcttcacacaaacaacatacttggcacttcataacactttcacgctaacgggctttgtgcacacacatatatacatgctagcatgcacacacatatacgcacgctcgcatgcatgctcacggatgcacacatgcacatgtatgcacgctcacatacaagcccgtcacagcctcgcagcctcacggccttgcatgtgagccccttgtggcctctcgtatgagcccctcgtggcctctcatgcaagctctttgtagcctcacatgcgagcaccttccatcctcaagtgtcagcccctcgcgacctcccatgggagtgcctcacacccttgcgtgcgagcccctcgtgacctcctgtgtgaaaccctcacaccctcgcgtgcaagcccctcacagcctcccgtgcgagcccctcgcaccctcacaagtgagccccttgagacctctcatatgagccccttgtagtctcacgtgcaagcaccttgtaccctcgcgtgcgagcccttcgtggtctctcgtgtgagcccctcacacccttgcatgcgagccccttgcatcctttcatgtgagccttcattgtacacttcgcacacgaatcagtacttacatcacaagcctaggattcacttggatgccccatcacttgcataaaggcttcatagctcacacaaatgctccatgactaacgataaatactccctgacttgcctaacagctcatgggcttgcacagtgcctcatgggatcgaacaatagctcatgggcttgcacagtgcctcatgggatcgcacaatagctcatggggttgcacaatggaacatgggctcgcacacccagttgtcacaattcagtagtcttagtgttttagccataactctctcaaataattcagaattggacaattcaaaatgcattggaaagatgagaaagagatctatggattttatgtttatgacaagatctaattctgaacgcatcattatgaaaatcttccaacaattgcaacttagaaagtggatcttactaactctactcgtgagttgttac

SEQ ID NO: 391826 - DNA, 1371 bp, Cannabis indica
ttatattgtacgtacgacacgtgtcctcatattctgaagagttaaagtaagatctgatccacgcgcgacgttgcattgtaaagtaattgtatgatatcaactgtacgaaatgacaggaatggccacttggcagtactattaattaatattaatttgtttttaaacaaccaaaaaatactataattaaaaatgtaccctctgaaaaatattaaagtcaaagggccattcccatgtggaagaagttctgatcctttgatcatcattcaattggatataataattttccttatcacaaaaaaatctatttattatttgtccatacctcaccttaagcgtacagtttgattagaaagaatggaaacccatgatcataataataataataataatgagatctccaatacaattaaaaatagaatagaaataaatgttaatttacataataaaaattatgtagaaactctgtgttcttccaaatatttaccatttagaaaaaaaaaaaaaaaaaacaaaaacaaacaaataaggtgtcatatagatggtgaaattttcggccagcaaattgttctatataaaaatatataatctattatattttaaatataaaataataaaataatttttaataacctacgaagtaggttgacatattaaaatttaaagtttaaaaatagattatttattagttcattattagaaaagaaacttaaagttacttataggtttattatttattagtttattttttattttggtcattttttttaggtattggcaaaaaaataaacgattcccatatatcaaaatgatcactttgaaagataaattgtaatgatataattttgagatcaaataatgccacacttgagctcaaccgactaaccatgtgcatgtgatataaaaaaagagagatgagtgggtatacattgctctacaaagcttatatagaatacaatttagttacttttcaaagacattcattgaaattgctctataaattaaagttaggtagaatattatctagtaagtgataaaataatttttagtttctcataaaattaattggtacattaaattttatttaaatttaaagtttaatcccataaaaaaatttgtaaaatttagtatgttaaattcattattttataatgtttaaggtactgttttgttttcttataagttattttaattagaaaaatattttataaaattaaaatataattttgtaacttttttgttgaataaaatcataagatctattaattaataaattcgttcaaaataataggactcacttcaaaggaacaatcctccaactgaagcacatgacctgtagagaaataagagtctcttgccaagcaatgagtcaac

SEQ ID NO: 391827 - DNA, 542 bp, Cannabis indica
aaaaaaaaaaaagattaatcaatataaggtgtttatatttaataatcgtgcaaacttcacaatgctttttatgtgacaataatatatgtcgataaaataattaggtgtacttatataaaatatcttttcaataacatatatatgagtattaattatttttttcatttttaaataataataataaaacaataataaataaataaatataaattacaccaaaattattgttaatattttaatataaattaaacaagaaataaatataaaatacatgacacaaaattacacctttatttttagtatttgaagatttaaagtttttattagttttaataatgaaattataatacctacttttgtgtgtagctttataatatttattaaattatatagggtgcattataaatttaaaaaaatcatttattatcatggatttaataaattgtttaatataaaaaatattgttataaaataatataaaataatataaagtagatgagaaaaaagaagaagaagatgaagagagaaagagaaagtgaatg

SEQ ID NO: 391828 - DNA, 1242 bp, Cannabis indica
tatagggtatgtctactccactactaatagttgttttgatatctaagaattatttttagtactaattttttttttttatgatcatgtactttatatagttatttaggaatcaaaaagtgaacttttacaaaaatcttaaaataatttacaatgtactaaaataaaatttaaatattttattacaagtataaatatttttcttatatttgtagttagtcatttgtttaaattttattttgacactaaaattatttaaaatttaataaaaaaaaaagattattagtgatcctaaatatttatagattatagaaaaaaaatcaattaaaaaattttttagatagcaaaacaaacggtttaccataaccccttaaacaatataaatagaaaataattatatttatttttgtatcctattaattggcatgattgagtcaattgacccattactcatatgtttgacaaattaattgattggaactagtaagaagtcacttaatttggtagttctacttcctattccatactcacgtaccttgccttcaccattcggcaatcgccagttcacctaccacaaattttcatgtttaatcttctatttggtctcttatgatatttattttgcttagaaaacatttagggggtacatttagggggcagcacaagcactttcttcggagtcacttgtactagttctactaaacgtatagaattataaggcatctagaaagcattttccaataataaaggtcctaacaaattttatatcatttaaaaagttataatattttattttatttctctttctcattatttttaacaacattacttctaaaagtactttaatatatagttagcaactgttatgcccatatttcgagcactatatataaagataacacgtgtcatatcaatgtaatagacatcataaaaaaaaatcatgcattaatgaatgaattacctcgaggagatagtaaataacgagtcatatttgtctcgcattatacattggtcgtagaaccacgagataagcaacgtatgacgtgaacataaaagatatgagtcttctcggatgtaacaactcaaagttgtattgtatcactggaaatggtagataataagttctttaagagcttgcaggttattaactagggttgttcatccgatccaatccgcactttttggtcaaacaacatccaatccgcactgagtgcggattttgttttttggatccaatccaatccg

SEQ ID NO: 391829 - DNA, 665 bp, Cannabis indica
tgtggccacggctacgtatgacaagtggaccaaaaggacaccttacccgagaattagttgagttgtatacaaacaaataagtgtagttctggaagtgagccctcagagaagtacaaaaagctcaaattccaggagctccatctcctaccattccccaagcaagcgggatacaattctttgctaccccaggatacaattaaagtctaactctagctcccgcattgtcacatcttggaacacccatgcgcaatccctctgggttgagtttccaaactccgtcccaatccgcaccagccaccagtatggcacaagcttcgcaaagctcccagagtaagagatcatcaaagggtagcacccagactgaggacaagcgacagcgggtataccccccagtacacacaatacacagagcttactgatactcaagagcgtgtatacttcaccactcgaaaaaaatacacattaccagaagcctccacccttgtacagggatagctttcggagagatcccaataaaaatgtgaatatcacaacgacattggccacaccacaaacgagtgcaaaaacttaaaagacaaaattgagaacctaatccgattaggtcacttgtatgaatggatcaaaattaggctaccgcacttaaacccggctccaataggaggccc

SEQ ID NO: 391830 - DNA, 518 bp, Cannabis indica
ggatagtttgaagcatatacccattaattaggtgctaattattatatattaatgcacatggaatatatatttattatatatatatatatataggtgcaaagaaataatataattaagttcctatcttacgtaccggacatatgagtgtgctgttttatttaatatataatatatagtccaagcttaagacttgatcagcatgcatacagtacagcctaacaggctattgtgattagtaataataataataataataataataatgagtatatatatagttatagatatttttaggcattaattaatggtggttttgggttgaagcagtgtcttctcatactcctcgaccgatttaaaaagctcagcgaaattaccctttccgaaacctccacaaccacccttctgctgcaccacctcatcatcatcctttctcatgcatcctaccctctgtattatctccatgaataaggtgggcctgcaatgcatgcatccacacattaataataattccaaacaaa

SEQ ID NO: 391831 - DNA, 2099 bp, Cannabis indica
ttttcttctttggtgatgaacctaggccttagtactcatatatcatgaataatatgttcacaaattgctaacctaacattgtagtcgatctttctgactagaacttatgtaagaactataatgtgatggaaagaggaatgtactcactttttgagtttgaaggacccttttggaaaccactggagagtgggatatctagaaacaccatacttactacaaatgcccctgtgctcgtcacaatccaccgaccacaaagcatcaaaatattctcattacagcttaaaacaatggcataaactataatacgaaagaaattggaataagtttaatattaaaccgcttgttgtgaacttcatgtcttcattagaaattcagaatagaggaagatccttcaaattatattagattacttaacaggtataaaatggctccaacactagtaaccaaaattcatttacatgatatatgaaaaaatcacctcaactcatggaataaatcaaaaccaactgacaatccttactaataaaatcaaatagtaaccatatagtatattagcaaggatacaaaaattggcagctcacctttccaattagaacagattttgctttcttaaaacttgctctaagcttctcatattcaggtgcaagttttttacaatgcccacacctgccattccaagtacaattagcacaaataccacactaagatataatcataataaagcacacaacaaaccattccaaatgaaatgaaatcaacataaattattaaaaacactaaaaattgaaaatgtttatagtttacagtaaaacttcaagattgtagcaaatactataccttaagcgcccaattcaaaattattaaaatttagtgtattatctcaatgtcaaaaattatggaacaaagtacactagccttcctatatacaatatagtcatacacagaacacaaatataaaatgaaatttcattataagaaaagctgtaattatttataatgcaattagcattgctgaaattaaactttgaagtaaaggcattatatatatatttatatgttggggtattaccaaggggcactttaaggtgataaacatacttctaatttgtgattactcttaactattaatattttttcaaatcaaaatcgaaacacgtgatattttagtgcataattaaggattacatggtgtattttattaaatgtacaaaataaaagtgcactttagtttatcttcagtattatttatacatgtgggcaccgcatgtaagataatacaccaagtcttgtccatagtcaaagaccaagtggttattgtagaaaaaatacaaggatgaggaaaaaattttaaatgacaaacaaaaactatcatatatatagagagtttgtgaattgtctttctactcatttcactacctatatatgtatatgttgacctcgcttttagccaacgacagtgagtcctattttgtaagctacaattaatttataacgattgatatatagtaaagcaatataaaggcacaggaattttatagaggttcagccccgagcagttcggtaatagcctaatcctcgttatttgtattaactcaagaataaggagaaagattcattttcttatagctcttacaacagtatctctgaatatgaattcttagataatatctctctgccagaatatttttgatcctttgcccagtgaacatgcatccttatttatagggctatgagcttggagaagaagtatttcccttctcgttacaatggatataagcagaaagcttgcataataaatacagaatacactgaccgtgggattcagacaacttgccatatctctgcaatctgatccccaagttatagggatttctttgatgactcacgatgcaaaagctgaattcgctaagtgttggtcactctgcgcggattgctgatcgttttgcctcaggcatgcatatgaggcatcctattcagactgtattctccgagcagatactagaagtcagttccacatgtcaccatcatgtgatgccacgtcagagtacaaaaattgggataacatttgcccccaagtctatacgagacttctgaagttg

SEQ ID NO: 391832 - DNA, 1102 bp, Cannabis indica
ctcatctatgttgatgatattctccttacaggtgaagatagtgtctatattcatcacttaatttctcaatgacatcaacagtttgctttcaaaaatctaggacccgtgaggtactttctcggctttgaagttaccagaacagccactgatctctatctcactcaagccaagtacacttcagaccttctcactcgtaccaatatggccgctgctactcctacaccaacaccaatgtgtcccaacaccaaacttgctacctccatgggaactattatggaaaatcctactctttatcgcagtgttattggaactctccagtatttaactttgacaaggcccgacatctcctttgctgtaaacaagttatctcaattcttaaaagctcccaccaatgagcattggtctgcttgcaaacggcttcttcggtacttgacgggcacaatagactatggtctccatttcaaggctgcatctcctctcaatctagttgcctacactgatgtcgactgggcaagctctattgatgacagacgatcaacttctggttattgcgtctatcttggccacaatttaatcacctggagctcgagaaaacaaaccgtagtggctcgctcaagcacggaatctgagtaccgtgctattgctcttgccaccacagagttaatttgggttcaatctctattcaaagagcttggcatacacatacaaagctgtcctattctttggtgtgataatcttggtgccacctctcttgcatcaaatcccgtctttcatcacaaacgaagcacattgaagtggatcttcacttcattcgtgacagagtcctagtccacgaacttgacatacgccacgtctctgccactcatcaaattacagacatcctaactaagcctcttcctcaaactcaatttgatcatttcaggaacaagttaacacttcgggaaccaagtgtaacttgagggggggggggttggttagagtagttaggcgttcagttaattagttaattttcttgttagtcttcttgttaatgcttcgtctactgtggtcgactgtaatattgttaagttacttcaatgtatataaatacatcttctctgct

SEQ ID NO: 391833 - DNA, 560 bp, Cannabis indica
ttgttcaaagtccactagagtctaagaccaaatattataatttttagtaattaaatataatatatttactttagtatatataaatttagaaaatatatagtttgattattattattattattattattattattattattattattattattattattattaataatagataaaatattactcaacccaaccaccaaaacacacataacacgccccatctattcattattattattattaattaacacatttttttttttattattaataacactaataatatactactatgatgactatgactattgagttgagtcatgaggaagagtaagaatgagaagggtatttttgtaatttggaaaatagaaaaaagaacactacatgtgcacctaaaaaattaaggtttacttcatttcaattttaatgattttttccattcataaagatataagagattgggtcactatactgtttttaaatttaataaaaaagtatatttgagtgtttttttttcataggaagaaacaaagatttttttttaataaagaaaagaagtgttt

SEQ ID NO: 391834 - DNA, 1708 bp, Cannabis indica
gagagagagagagaggcacgagaaaacgtggaggcagaggaaatggacacgaggggaataagaagaaagaaaatatggattagtggacaggcaaggagtcggtttcggtttgagttttagagcctaggaaaggtcaattcaataagcctcattacttcttccaaacggttaattagctttatcaggttcttgggttggttttcctttccttttattttcttgtttttgggttcaaatcaaagtttgtaactttgtaatactcttactggcctagatttcagtttttcacatgaatgtttttgaggcttttgagactaaatgagacaaattaaaataaaaaaacggaataaatgaaagtgggaagtaaccaaccatgcttatatatatgggagtttgagtcacacactcacacacatgagccttgaattgaaaatcttggcttttcagagtaaagaatcaaacacctttatttattaacataataataacaattatatgaaatgaaacctttattaacaactcaattgattctcaacattaaactactactactactacaaataccattgatctcagtcaattactttgccaaattaattaggcaacactggtgtggaatctacacctttttactttttccttctttccataaccttcccaactctcaatcagttaacattgtagtgtatacgtaattgttattacttaaaaaaaataaaagaggaaaaaaaacacatagacacacacaatgtaattgttatctaatatctaggcaaatccttccttaccattgccattttttatgaacccctatgcaaaataaagatattttttttattggtttttacaaaaatattaaattttgcagtaaaagtttacaattttactgtcatacaaaatcttttataaaaatactgttttttataaaataaccgcaaaacaataaaacagaatacttaaaacaacaacggaacaactaaaaaagcaactgtgaaaacttaacacattagagcatctccaatagaggtgtaaataagtttatattgactataaataagatttttactaaaaatagatcaaatgtaattaattatacatatatgatatggtttaggttcattgttttttattaaattacatactaacatttattttagatgatatggtcttagcaagggatagtgactttaagaaaattatgaagtagagtgctataattcagttgctactagctaaaggtgatccctttgactaattctagtaatttttagtgaggttctggttgcttaattcttgttatttagtaaattttgatcaatttgataatgttctaataaaagttttattctgattttctgttatttttcaagtgtatttcaatgagctaggagtgttatttgaagatgttataattttatttaggggtgtacatcaaaccgctcaaaccgcccgcactgcaaaaaaaatgcagtttgaaattcttcgcggtgcggttgcggtttgaatttttcccaaaccgcgtggtgcggtgcggtttgcggtttggaattattaaaccgcgattcaaaccgcaccgcactgcatgttttaaaattttaatttttatatttatttaattaagcccatacatatgagcccaacccaagcccataaatcttaggacaaaatccataacttttcacaaaccctctcttcttagcaacaaacc

SEQ ID NO: 391835 - DNA, 1161 bp, Cannabis indica
ccacgtgtaatacactcgtagtactatatagtactatttatattggtccacgtcgtcgccatattttttatatatatttatagacaataaactatgtaacagatatgatttatttctaatacttgcttgtttcatatatgtgtaatttctgtcctttctagatttgtttttttttctatatactatttttttttaaaaaaaaaaaaattagtctaagtgctgagttaccatatttcaattgttattttgtatagaggtaaccagttaccagattcttcttctgctaatcaattttattagtaaccattatcaactagttgttacttttatagtggcaacttgactaactaccttctaatacttcttaaatatatatttatatatatatatatatatatatatatttttgataactaactttttatttctaaatttgtctgactgtcttagtaagtaattaccatttagttgttattttgataggggtaaccagttatcatctcttcttctttctttagtggttatatcctgatctattctgtttcttcagatatagcagtaactaggtacaaatcattcctacatgtcagtaaaaattgataatgataacatattatatcaccacattactaaaaaaatttaaaataataatacattatattgtgtataattaaaaaatacataaaaataataaaaaattacaaaaatgggttatatggaattttaaatatttttacgattttatttacaaaaatacggttttttaatgtacttttatatatattgtattcttgttaatttattactgattttttgttattagtatactgttgttatttagatgttatattattatcttgtttcttttatttttatataattatttttattttatattgtttttataaaatatcgtaaaaatatatatatataaaaaaaataaacgtaaaaatgtacaaaatttacaaaaataattaacattttatgttaattattcctgattataaaatgtgtacaatttaaatttaagtgtgtaaatatctatttacaagtgtctttatatattaaaagtgcctatggcaattcttggtttaacgattcttttttttatttagccttacacgattaacttaactgttaacgttaaacgttaacaaataa

SEQ ID NO: 391836 - DNA, 1593 bp, Cannabis indica
cagatgacatattttagtaaaattacttttttatatttttattttttaagatttattaatttttattttttttgaaatcctaaaaataaaaatttgaaacataatcttcacccaataacacatgtcgtagtattttattttttctttccaattttttaataacgtgttcattatactttataacattatccttgtgaattttatgaagattgaataacttaccatctcacaaatatagttgaattttttaaatacccatggtatagctacaaaatatcgaaaactttgttataatgttaaaatttacaaaaataatgctataactataataaattctgtcataaaaaataattgaaaaattactctcataaatgtgagtttgagaaaaaagttgaaatataagatttatttatattaaaaacaaaaactaataaaatactttcaaaatttatttaaacaattttttaatcataatctatcttgtacatttgttttatcagttttcacttttcacttttcttttactttattttctctctcctcaccttaaaaaaattaccacatttttatttttttttcaaatatcaaaaaacaaaactaaacaaaaaaaaaataatttcaatttctattctaaaaatttaaaacaaacttcttataagcatttgttattttcggtttttgtttttcagctttgttattacctattctattttctaatcattacttttgcaggaaaacaaaaaactaataactagtaacatgaaatattttttgtagatcttgacaaattagagcctattacttttatatattaaaaaaaaatattcgtgctaaaagttcaccgtctttgtaacataatgaaaatctaatgtaatttatgttgtaaattaaaaatttagaaagagaatattttgggaatattaaaacccatttttgataataaacattcattctaaaagaattacagttgtagaatctataaaacgacaagattaatattttaatatattttaaaaagataatattgtttaatcttttcttcgatctctaatatatatcatattttatgaataataaattaataattatcagtcaataatgctacaacaaaaaacgccatataagaaagaaagcaacgtactaacaaataataataagttataaaataaacaattataccaataatgcatataataaaaaaaaatgcatcattgaaatcaaatatctcactctccttcaaaaaaaaaaaaataaatatacatatatatttcactatctctgaaaaataatatgtattaaatattaagtgaggacgacattataaattattattgtgtcattatatataaaaagcgtgcatagttagagtgtgtcaaaatgtattattccatatgagatataacgattactatgtaattagtttttttttttcttttccagtgtatttataggataataaaattaaataataaaggtcataattaaagtagcatatttacttatggttggtgaataatatggtaaaaattaggtagagtttggtaatacttttttaatcagttttctgtttttaaaagtggaaaagtgaaaata

SEQ ID NO: 391837 - DNA, 1310 bp, Cannabis indica
ttggaagactctgagctagttaatatttgagaggagatattggcaggtcgacctaagtacttctcaatctcgaataatggaatgttacgttataagactcgagtttgtgttttgaacagtaatgagctcagaaaagaaatactcgatgaggctcataatacgccttattcattgcatctcggaaccaccaaaatgtaccaacacttggtggtgcagaatgaagaaagacgtagttgaatacgtatcaaagtgcttaacttgtcagatgatcaaagtagaacatcagaaaccggtagggttattacaaccattaatgctccctaagtggaagtgggaagatattgcaatgcactttgtagttggtttacctagaaccacgggaatgtatgactcaataagggtcatagtgaaccgttttacgcagtcagcacatttactactggcaaaaacatcttatacagtggattaatgtgcagagttgtatgtgaaagagatagtgagctccgaaatccattgttttggacagagatccaaggtttacatcaaagttctagataagtcttcagaaggctgtgggtactaagctgaagtttagtttagctttgtaccctcaaactgacgagcagtcaaagagaacaatacaaatattagaagacttattacgagcctgtgtcatggactttgaaagttcatggagcaaacacttgcctttgatagaattttcttataataacagttattagagtacaatagggatggctccctatgaaatgttgtacagtaggaaatatcgttcctcgattcattaggatgagactgggaaaaggaagtatttgggtcctgagttagttcagcggaccaatgaaacaatagacaagattaagactcggatgcttgctttgtaaagcaggcagaaaagttgctcaaattctaagcgaagaggcattgcaattcaggttggaggacatgtcttcctacgagtttctttgatgaaaggtataaggcgctttgggaagaggggcaggttaagccctaggtttataaggcccttcgagatactcgagaaggttgggcaggtagcgtatcagatagccttaccaccagccttatcaattgttcataatgtattccatatgttttatgcttaggaagtatctgtcagacccgactcatgtcttgagtaacgaagctctagaactacaaccggatctgtcctatgaggaacgaccaattcaagttctcgataggaaggaaaaatttcttcagaataagaccattactttggtcaaagtgtgttggaaattatttta

SEQ ID NO: 391838 - DNA, 1556 bp, Cannabis indica
ttttttttgggaatgtgccgtgccagctacaactaaacaaaaaccaacaaaaacattaaaggaataaacctaaatttatagatataaaatagtttaagaaaataattaataatagtaataattagttgatgcgtgggatttagtgggatgatacttaatacatatggatgatgtgtaaccacgatagatttatgatgataataatatttagaagattattctaatatacgtaatgtatagggatttctttttatgtaaatgcattatttttgcttgtaccaaaaaatattttctttttctcgtataaaataaattataatttatttccttttatataataatgataaattacttttacacgcatatttttattttggttaaatattatttagatatttttgtattttgtaaaattattaattaaattttttattttgttaaatgacaaaataaattttatatttttcaaaataataaaaatagaactatgagctcaatttttgataattttattttttaatataaccaagttgaagataatttttagcacgaacaattacaaaaaaatgtaactaattttgccatatttagatcgaattattattaagttttattttaataaaaaaatcagttcagaatcttatttgtactattttaaaaataaaagatttatttaatttatcatttaacaaaatatataatacgattagtaacttttacaaaatacaaaattcaaaataatatttaccttttaatttttcccttataagtatatcattttttttactttaattattttctgtaaaaattaatgaaatatttgttataaatacaatatataatgtcaaaaaaaattaagaataatttttttgtaaaatacttttactataaaaacaaaaaagatatttttacctaaaaaaaaggctaaattaatgcatttgtttatttaaattattaataatccaatccaacccttgtcaccgcgcgcatggcatacttaaatatattaattaattatcattaataactttgttgtatactctttgtccaaaaaatatggttgtacataggataatgacatttatagcatttagttggttataaggaagtttccttgttagaaataaaataaaataatattgaaaaaaaaggcaccacgtgcctgtctcagcatatataaatattcatagagctggctaagccctaacggtgaattaataataatattaattttattattattatttaaaattagggtaggtggagaaaattaaatttggttaggacaaatacataaaagaaaaaaaaaatgacttaaacaacaaccggtgtaaatggcattatggcatagccacaaacaattatgaagactgatcattcggttcacatatagtaaaaaatgatgtaaatataaatagtattaaacttatgaacaagctaaatagcttaactattacattaaatttaatattatacttaaaaatattattttttattacaaatacatattataattaattaaattgtatatatatatttttagattttttttttaa

SEQ ID NO: 391839 - DNA, 699 bp, Cannabis indica
gtattgggctttcaaaaaacgtttcaaaggcgggccttggcgatggggctcgccaatcattatgaacattttgagttggaactgccgtgggcttgggccgccgcggactattcagttcctaaaagaccttattggtcaaaaaaagcctatgattgtgtttttatgtgaaaccttatgtgataaaaagaaggttgagattgtgagtaggcaattgggctttgaaggatgttatgttgtggaagcccaaggtagaagtgggggtatttctttactttggcaaaatagtaatgatgtcaaaataaatagcttttctaaaaaccacattgattgtgtggtatctctgaatgggttggctaattttcggcttactggcatatatggggaaccgaatagaactcaaaggaggcagacatgggacttgattcgaaccctcaaggaagagtccactgatccgtgggtgctcataggggacttcaacaatgtgctaagtcaagcggataagaaagggggtagaccatacccgtcttggctcatcgatggttttcatgaaactcttcaagcttgtaacctttgcgatttggagatgcggggacatccttacacatgggaaaagagccgtggcactgaccgttggattgaagctcggcttgacagagctattgcgtctcaattgtggttagatttatttcctttggctat

SEQ ID NO: 391840 - DNA, 508 bp, Cannabis indica
gtagagcaagctattttagtaatatacagtacatggataattccaaactctacaaggatcccgacaaacttgtcattctggtcaccaaaccttcatgctacgattttcaacttggacaagacaaatctattggtagaggaacttattttttctttggtggtcctggttattctgacaaatgtccaacttgatcaattttttttaaaatatgtagatataataagctcgtgatcttcatgagctgttaatggtatatatgataattcatcatataatctgctatgttttgagctttaatgtacttcttctcttctcatttaaaattttgtgatatttttcctagcaaatttctggtgttaaaaataatgaaattgttcattacacgtaaccttttgctaggccagctagttacttttctaatttgaaagtaggaagtaggaacaacaataaaataaaaagaggaaattacacttagtatgggattttaaaagttcttatgataaatatg

SEQ ID NO: 391841 - DNA, 1957 bp, Cannabis indica
aaaaatccctaccgtagagactgttatcccaaattgtgtccacctgacgtagtatgtacatagtcaaaacagaagacatgtggaattcagcctgtcaaaccggacatgagtgttgtacggttcaataatttccaagatgacaagattgccaaacagggtcaaacaaggaagagttaacaactccaaagaaccttggccgaaccatgatggtcgactaatgaatgttcacatgctggccggtcggtgatggttgtatgctggctaggccctaaaaaactaggttggccgacaagaatgtgcagacaacccccaaacaacttaacaagttgcggggtccataacaaggcttctagaatattctcaagctgacctacagttacaggacaggtccaacatcccatgaaaatagggattattccctcaagatattagtcctatattttaggaatttcattatccctttgtgtattttcaaataaaagataaaaatatgttaatatccctattttgaaggatatctcttcctttttgaattagaatatcttgtaagtcatacactatataaaagtcatagggcacacatgaaaatggatccagacccccttccacatgcatatagcttctctctctagatcctcacacaccacttaatgcctcttcgatattaagtcaggttttttcataagttttttgtaagatctcaccagttctttatctgtaacacattgttctcacaattataatactaaagaaagctatagatagaaatcacaaagttttaacctgtgatctggatggtattatctcaagagtgaatacaactaaaaggggagtaggtcattaccgttcatcaagggggacgaatctctttttattcgtgtgttatttttattatttattattcttatttgcacgtggtgataatcaacaattaataagactccgctgtcagttagctaaattttaagttaacattttggtgctttcattgagagccttttttgagtttcttcatctcattctgatcaatcaccatgattctaaccagaagaacggctacctcagatcctcctcaggctcccatgacggtagatcccaatgtttgtgttcctcccaccacagactgtcctactaatccagccaatcacgtgaatcctattgatcctgccattcctccaaggctggaaccgcccataggatctcgtacagaagagcagatcaacttggagcaacccactcatgatactaatgagaatgccccacaagtttatgcaggagaaattgggcctggagttggccaacctgctattggcgaatctcgttaacccaagatatatttccaagagaggggtgaattggaaaattaagctaacttctataaataaaaacttttaacacaaaactatgcaattaatcaacttaatcaagtaaatacaaataatatggcaagtaattatagagagcaaataatcaaaattgtaaagtaaagagtttaagggtaagaaattgcaaactcttgaattttacaaggttcggtagaactaagccacctatgtccttggtctaaaaagatatagacctagatttgagttccactatcgagccaagttaacaggcttgactaacccttacaaatgggaatttttcaccaaggtattttcaaacttcttacaatagttttgcaccgccaaggactatcaacatctttctcggattgttgtagtaacaatctcacttaactgggttgtttacaataccggtgccagccttaccttaatcacaatttgaaaaattgtttaaaattacaagcaaactcaatctagaagtatgatgaaacaatgaaaaatctagagtgattagcaagcacacttaaagaattaaacataaattttggctcaaaagtgtgtaaaaagtagggatgcacatttcccccacggggatggggccccgcggggac

SEQ ID NO: 391842 - DNA, 1216 bp, Cannabis indica
ccccaccagacaccatcttgcatcaacctcatcctccaattcagaaggattatcaaataagactcctccttcttcctcatcgatctgcaaatcatcccatcgaacctccaattcctctgcatctctgcttgacgaagccataacgaaacagaccacaaaacacaccagaactctatgtcaaacgatcaaaaccaatcaaacagtataaaccatgtcaatatagacaagacatattatttgttttttttccttgacctctttctaacaaatgattgatttaaaaaaaagaaaaagaaaaagacccataaatatacttaattacatatatattcaaaataaatgatttaggtaataaatcacttgatttggtaaataaagttaataattgcaaacttaaatttataacattatttttttttttttttgagataaaatttataacattatttgttaaagctatcacgattattaaaattatatgacctaaataaattatgtaattaattactaaattaaaaatttataattttaattaataatcaaataacatataaataccatatatatgtttaaatatagaatttatagaaagtaaatgttaacggggaaaataaataaataaacaaatgttttgttttttgacaatcaaatatttttaagttataattgtgcattagcgtccaaatgttacaggccgattcctctgcttcaatttttgtaggaattcgtgtttaacatatttttgtatttaagtatgattttttttttcttttaatttaacaccccctatctcccatttaacccttttattatattcaaaaactcacttgttagcaagacgagtagaacacctcaacatgataaaattcaacggccaagatcttcccaacgtgttgcccttttcattccacttctcacctttagcatgcattagctagacggtctaattcaatataatactatacaatacaatacgatgtaataccagaaacataaatttataacttgtgctttacatgctacacacgtcacgcgtatataattggaaaatttgattatttatgcttacattttgaaattccgtattttaatattttcagtttaattatttaattaagtgattaattaaatgcaaaataatgaaaatggtactgaaaacagtttttccgtagttacagaatacaactatgtaactccagaaaaacccagaaaaaca

SEQ ID NO: 391843 - DNA, 1911 bp, Cannabis indica
aaattattagaaaactaaaatttcaaaatttaacttttttaatgaacgggagaaaatttagtattggtcaaagttcagttgctaaaaatactaaattttagcaataaaagaaacaaaacctatcaaaaggagcatgattatgtaacaggtatattttagggagaatttttaacaaggcgtatgttttttcttataaggaattcaatctccctcttcaacttttgactctcgttggtgtcgtggccgaaatcattatgaaatcgacagaacttagacatgtccctcttgctcatctcttttttaataggaatgggattcttgtatgggaaagtagcttgagtggccatgtaaatggtctcaggtttttcagttaggagggtgaagcacgtgtacttttcctcgttctccttttggttttgcggcgtgggggaggtattgtaattcccctttttgacactgctccagccagaactgtagttattgcgcttgcctctagtattcttgctactggagggctggctggcactactagtgctgtcctacatgtttgtcaggtcttggggttgtacagcactctgagactgcctattgttgactttcctcctgtttgggcttctctgacgtcttccttcagttttatgatgttgtgtgctcgttcgaggaactccttcatgttgttggttgatatcctctggatgtctttccagaagtcactcaacagaaggatgcctcccattgtggttgtataatggccttcttctattaagcctttgaccttggttgcctaggccataaacctttagatagaatccttcaaaggtttgccttgttgctgtttgacctcaacaaggtcttctagctgtgatggtatctgtctctaggatgataattgtgtgtagatttctcataaaaattcattctaagaattgaatcttcctagagccagcttgaactaccattgttgggttgttcccgacagtcaccggaaagatctggcaccacacatcaccagtaactttttggagatctgtctgcatctcaaagtacttgatgtgtgcgagaggatcttcttgcccaatataaatcttccatactaacatcttgaacttaaggcattgatgtatgatgagaatggagagccccttgacctatctagttcaaggtctgatggttttgggccagctaagccctttatcatgtctcttatttggtccaactgtgcttgcacgaaaagatctgatgttgtaggagcctggcttagtggcccttcttggttgggatgtagccctgggttggccaagacctggccgaccataccctgggaaagggtatgttcatggtcgaccagccccaggctttgaatcggactctggtcagccaagcctgggtcagacaactggccatggccgactagccctatgttgggtagtgactgactgcttgtgctcccctgattggctgatgcaatagtgtgttggcagggggttgatcacattaattgcttgggtttggtggatccaattgtctaaagtgattgttcaatggtggaacaaaattactttgattctccctcctcgagttgatgttgtctttggtgtttccacccgttcccaaacctagctggataaagatcggccttagaacaacttgctcccaaatggtttagagaggaatctcagtttgtaggttggccagaggtgcactactaaatggctgttgaccaaaggtttgctaagtgggggtgttaaagagacagagatacctagacgaaccccacactactacaaatattacattttgcgtcggttatgacatcagttatgggcagacgcaggtttagcatcgatttttagagaattagcgtcagttgtgcaccgacgcaaaaatctcactttttgcctgagtgcacaa

SEQ ID NO: 391844 - DNA, 684 bp, Cannabis indica
aaatgggagtttcagtgtcagtactgcgtacgccctacttcttcagagcaagtcctctagacctgcatctaacaactttgggttctggaaagagttgtggcaactgaagataccaccaaaagtcaaaaatatgttgtggcgcaccttgactaattgccttccaacttgcttcaatcttgtcactaaacatgtaaatgtgtctattctttgccccatgtgtgaaacacaacccgagaacacctctcatgccttgattgagtgttctttggctactgcatgttggcagtatctcggggttcattgcccgtctcccccaggaacttttgcatcttggcttgaacaaacatttacttcttctgtgactgaagatatgtgtaaaattgctatggtttgttgggcactgtggaaagcgcggaataaaaaagcgtggaagaagcaatcttcctctttgaatgaggttatggtatcagcaaatacttctcttgatcattggaaaaaagctcaggatattacttctctctcatctatatttttaaacaatttaggtgataggaatgagctttgggtcaaaccggtgttggaaaccattaagattaatgttgatgcagcttcatttgagtaggaaaattcctacggtttcgggatggtggcccgtgaccatcttggttcccctcttcacattca

SEQ ID NO: 391845 - DNA, 501 bp, Cannabis indica
caaattatttcagaaacaatttaaatatttttgtttaattaattttaagagttaggcagctatctatgtggtaaaacctcataatattaattttattatataggatggtacaatgtaagagttaggcagcttcaattaactccaacacttagttagtgtcgcaactataacaattcaattctttacaaagttacttgttttgttttttatttttatgattggatttttacaaaacaaattaaattttaagagggtcaaatcattagatttgtgtacatggaatatctaaacaagagaatatgaattgaaagcgaatggcaaatggcaatttcatgtttgataacacaaaaaagccatacacaaagcctggacggtccagttagagatatctaattatctaataatgacaattaaagtgacacactaatcactattttggtcccatacatatcaaacaacattatccattgttgtaactaatttatattaggtaattccatc

SEQ ID NO: 391846 - DNA, 598 bp, Cannabis indica
atataaatgacatgtggctgacatgtctgttcgggaaaaaattctagcactttactcgggatgaatagcatttttcataatgtaactaagtcgatgagtcaacttctacgtcgggaaccgcagtttggattttatgaaaagtcagttattagtagttgctttttttacttcaccatatataaattgaaaaaggcacttttaatattttttttttattattcaaaacaataaactcggttaagccatgggctgcctagcataggttaggggtaaattataatttttattaaagtaaaatgagtaaatagtaaataagtaattaatgtttgtgtgacgcctgattttctaattaatgtatgtctttgttaattaaatggttttccttaaaaatcatgtctattatattttataaacatatatatatttacatgaattgagatcccgtgtttaaatttttacaatttttatcaaaatacttttacaaacatatcgcacagcaactaaaaaatatagctcaagtcatcccaaggctaaatactttaggtcgcgccgtctcgacatgtacaattatccctcgagctcagaactcactcttgtt

SEQ ID NO: 391847 - DNA, 759 bp, Cannabis indica
tagtcgtctaagtcgggctgctcctccgtgcgtaaaatataatcatgaaataaatcatgtgaaccatgcaacataaaatgatttctaatctttattaattagtaaatctgattatattgaaaaggtttttatttagggcacaaaacccaacaactatgtctccacttgaaatcgccagagcaaacttcaatagagcattgtccttgaccaaatctagaaatcgcagtatctggttcaatgaacagttaatgagattttatattggcattgtgtcgtagtttaaatttgagagctcaaagaagcaagaatgtacatacaaaagtatatgaattgtgataaaaataactcttctccattattgatatcattttaataaagtgaggaaaagcaacaatgaagaaagctcaccttagatgtatacataatggagtttcataaaagagaattcaaaaacgaaaaaggagtaagttgatttgatttgatttgatttgtgttttgtaatggctattatgtgctcgaagaagagaagatgattgaaatcatcctgccgtaaaaccatggctatgacatttcgatgagttggtatgggttgtgtcagaatattttgtcaaatattagaatattctgttagcattttgacagaaaaacaaataataacgtgaaaccaagagttctgttacatagccacaatttatggaaataagatattttaaaaaaaagtcacccaataatttctcataaaccaagaattcggttata

SEQ ID NO: 391848 - DNA, 1774 bp, Cannabis indica
atataaaaattctaaaacaataaattaacatgtaagagttcaagaaatctttcattggttgtagcaaaaacaatatgaattcttccatttatactctaactctttttctgtcacagagtagtaaaaaatgttgatcatggatctccttttttaactcgaaaagtgatactccactcacttttggaacacatttggagagagaagaagagaactttttctaaggttgaattacttgaaatcatttatctaacaaagctcttatctccttctttatatagccttcacttagggtttggttgagatgagatgagcttaaaatagaagacttgggcttaaaatcaacctagagccgaaatccacttaaggaaacccaaatttggctcaagatatagcattctgtcaaatttaacccacagttaatagtatttaaatatcaaccatctatttttcatatagtaatgacttgaatagtaactatattaagtacaatgggaagtggaaggatgaacatgggtcatataagtggtcgccaaaatataaggaagttatacctataactatcgatgattcgagcactacatttaagatgttattggataaattgtataagaagattgaagccaatcaaaatgacatcgaattaaaaataagttacttactcgtaacacttggagaaagcatgttgccacttattttatgaggggatgaatgtcttgcaacttatcttttagactgtggagagaacaaacgcaaaattgcactacatgtggagcttataaagaaagacatataaggttactggtaaagacaataatgccatagttgatttggttcaaagcaatgctcttgtcgtatttttgaccttgataaactttcttgtgtgcatgcattaacagcatatgaacaagctggaatagaagtacatgatttgtgctctaattattataagttggaaacttaggcattggattatagtgatacaatttattcagtgcctcaacgagaaaattgggatatcaatgaagttgaattacttctgaagatttttcctccaaatgtcccaatcaagcgtggtagaagaaaaactaatagaatcccatcagttggagatggcaaaaaatggattaaaaggtgtgggttatgtggaaagtctggtcactccaaaaagacgtgccccttaagagccacaacttctaaattctaattttttttatgcatatgcttatttcaaattactatggttaattgattcatatcaatgtatttgaatattttagtatttttgtatctttgctttagttagtgttgactcttaatttggtcaactgataggaaagccttatttatgactaacaatcaccacgtgtaaattgtaaaagcaaataataaagttgcacatcagtttatagaggttcgacctccttgattagcgggtaatgacctactcctctttttattgtattcactcttgaaataataccatccagatcacatgttaagaccttatgatttttagctatggctcttttcagtattacaattatgagaacaatgtgttatagatcaagaactaatgagttactatgaagaacttatgaagaaaggagaggtttagagcctaggaagccttggtggcatatgatacttaaagggagagaggtgatgcttgagacgtagagaaatatggttctccacgtgtgagaagcttcagggagcatgagagaggacttgtagagaccctttactgcttgtggaatgacttagccttgagaga

SEQ ID NO: 391849 - DNA, 904 bp, Cannabis indica
cctcaaacattatataattagttacattataaaaaaattcaacaatgtgttgtcttgtttgctttaatttatttttggcgttaattcgtttttttttttttttttgttagcaacattttggttatcttcaaaagttattaataaagtaaaaacacttactatatagtttaaaataaatttagtatgtataataattttcataatatgattaattatgtaaccaaataaagaattagtttagttaattttgactagttgttttaattagtttatgttagttataacagttagcttaactagttacttgtttactttgtaattgtgtttttttttttttttagtcatactttgtaattgtgtttgtaattcattctatataaataaactcctaagctcacaagaatatgtgaaacttctcttgctttctcttttctatttttctctgttttacctttttcggttttttaccttttggttcttaccattttcttgaagctagttgagcttctacatggtatcagtcgcctcccatagagtcgtccaacccctcttgtcctgcggtatcaacaggcaaagaattgctaagaaactttgtctcaatcttcgattccatctccctcactttggaatctgttctcaagttctttatcttcctccctcacaatcaaacttgatcgtaccaattttctgtcatggaaatctcaagtcgtccctactgtccttggtcatgacctagacaaaattttgttttgtgatagtcagtagtcctgtgatccctaagaggaaataccgggtaagctgtgcaatcccacatcgtctagggaaggtcaagtgtgatgattctgaggctgtgtaggtatgagactacatagttgaagagagcttaaatggattgattggtact

SEQ ID NO: 391850 - DNA, 641 bp, Cannabis indica
acattttccttcttgccctttactgttattgaaccatctttcccacggttgggtttcttctggcacagggtgacgacctttctagggtttgatttggagaaattgggaatgaaaggaagggagagaaaaagattctgtgcggctgaggagtatagagaacgatgaaacccaagatgggggtgggttgtggtagtggccgccggtgagggcattttgggaatttcgttttcttttgtgcgatgaaagagataattctggataacatagctggaattgggggtggagcacagtccattgtttaaaggggccggacttcgaattgggcttagaaacaattgggccttagtttcctataattaatagggaattttcttggaaaacttacaaaaatactgacttttggcccaatttttataaaaatactaccacgcagcaaaaataaattttagaggaaattacattgtatacccactttattttatttgttttaatttttaccttcatttccatattcttttaaaatatactcacttttatagatgatgtccccattatacctttatgttaatgtaaatcatgtaatacacttaagtggaggacaagggtatattaggcaacccactcataaaagtgggtaaatt

SEQ ID NO: 391851 - DNA, 794 bp, Cannabis indica
taaaactctaattcacaacctgacgctcaaattacaccccagaaatcccaataaatagttcaaaacgagtcgaaagaagagaagaagaatcagaagaaaaattaaactttactacgagtttgtttgttagagagataggtaagttaatttgaatttagccgtgtaaaaaaatttcaaaaatggtaggatttgttagagagatatgtgggtaagatattttttttaatttaaaaaagattgtttaattttttgggtttaattattgggtttatttatttgttaacgtttaacgttaacagtctgttaagttaatcgtgtaaggctaaataaaaaaagaatcgttaaaccaaaatcgttaaaccaagaattgccgttaaataggcactactacaaatttaaaacaatatataacttattaattattactagctatactgatctctttgattgtatattaattctttcatattattcatccaaaatattgtgtatattgcagtaattatatagatccactcagagaattgaaatgcatatatgatcatcaatatattatgtacaagaatttttattcatgtattaaattatactcattaaattattttaactattattgaaaatttaaaatttaagaatttttattcaatctcttttaattttactaattcgattattgtttatatgtactaaattatgttcttcaaattttgatattatcaaatcatatatatttctcgaactttgatgtgtaccaatttatgttcttgaacttttattcatgttaaatttttttt

SEQ ID NO: 391852 - DNA, 1361 bp, Cannabis indica
cactcacttttgaggacaacattctatttcaggttggggtactgtgtggggtgcagtgtggcttgcaattggtgtgtagtttggggtgctggttggggtgttctttgggttgcacattggggtcttgtcatcctcctaagtctctgtcttctactccttggtgactcatgtaaatcaaatattacacattagcattttcagattgtgtgtcttttacttatttaatgctttaaatctataaattgaatatacaataaattctaaccatttggtgtgtttgttgtgctgctattgctacaggttgtggtgttgtattttgagttgcagtttgtggttcatgttgagttgcagtttggggttctgttgcagcttcagattgtggtgttgtttgagttgcagtatggtgggcagacatcctccttagtctctgtcttctactccttggggactcctgtaaatcaaacataacacaatatcaaattaagttgtgtgtcttttacttattgcagggtttcaaatctataaaatgcaactccacaacttctaaccatttggtgtgtttgttgtgctgcaactgctacatgtacacttttgggggctgcttcatgctcaattttgggttctccttcggcctcatgttcggggttctatttggtgttcaggttgggattgggatgcaaaatcaaattctggaaactcatatgcaggttgggatataatgtctggttcactctcagatgggatttgatgttcagtttgcatctgctcacttgaaactgaatcatgcatcaccctcctctgcctcctctctctgagccttttgcttcctggtgtctcaaaaccttcatttacaccaacaatcacaacctctgaatcactagataacccacttaattcctgcaataccaacttattcattatttatcagcaatgaaaaacaaatttaatgcaaccaaaactaacaaaaatactaaaaaaatcaataatcctcacctgggcagctggtgcaacatctggtataggaggactttctggtgcaggagggggtgggaggatagggaaggttgggaggcttccatcatcatctagatgagctaagtgctcctcagcaaaggccatcatatcctgaaaatcttcatgatcaccctcatcagaatcatcctcctcatctccattagatccatcatcttgttcatcatcttcatcatcttcctcatcattttcatcatcttcatcctcttctccatcatcttccttagaatcagattcagatgatgatgatatctcgattgtctctggaacagtatttcctggttgggggctgcactcatgagaatgaacttcctcatccacccactgtg

SEQ ID NO: 391853 - DNA, 2257 bp, Cannabis indica
attcccagccaaatgcaagaactgcaaatttggaagatcggcgaaaccaagtggaatccttccatacaagccgccataacttatatcgacactcacaaggctgctgatgttggccaaccaatgaggtattttcgagttgatgttgttaaaactaaggtctaaaacagcaagtgatgatgttgaattaacaaaagaaatagaaggaattggaccatttaagttacatgaagacatatgcaactctgtcaaggatgggagattgtttagtattatcataatccaatctgatcccaccattgaaaggtcaactctgttcatcacaagatgttttaaagagactagacctttgatccattcaaaattatcaacatataataatcccaatgaatctaaatcaaggtactccaatctagagagatttcctatatttataggaatggaaccactaaaccctgcattagagagatttagatacctcaaatgcttaaaggatccgaaaaattcaggaattgggattcccttaaatgagttgaaactcaagtctaagtgtctcaatgacttgagttttgtcaatgaaggccttatttccccactaaggttccaaaagccatacctgttgggatatcggttatgaagatcaactgtaataactgctcccgccttgtcacaacctattccccgccattgacaacacttgcttcctttccatgatccaagccagttttgtggatctcctagaccagttttgaagtcaagaagagaacttttctcagactccaaacaagccacattcaactgagtccactctcctaaaataaacaagagaatttgtaacattagtggaaacattgtaaacacttcaaaaacagacttttgtgctatgatgaattattaaatctcaacttataatgattcacctccttggagaacaagaaaaaaggttctttttttagcataatttaatgaagttgtcatgacaggttgaggttggtatggactgattagtgacttttgaagcaaatcatgggaaaccacatagaaattaacaagttcatgataatgtaaatatattcatttgatattgattgagcaatagttttattaattttttccttaaaaaaataaatatacataccataaagtcttaatggactaatataaatatgtaaatggctgttcacttttcaaccttatatgctaattttcagagggaaagaaaagaaaaggtacttcatgttatggctttggatttttatataaatatatatatttataaatgttctatattatattatgaagactaaatttggattagctaagacagacaagataaccacacctaaaagtttatatttagaaaaaaaaggtaaattttttagattattttaatttaaaatctctatcaattataaatggggagtttgacaaacaataacatagttttatcatatttttttcacaaaataatttttttatttcataatattcttaacattttgacaaggaaaaaaaaactgttttacataacttgctggaaagaaaaaaaaaacatatctatttatcatatgtttttaccaaatactcatcaattatcctataatatttttgagtgatactgtgtgcattagaatgtgctctaaaaaattatatgtctgttagttttttcaagtaattatatgtatataaattgaaatttattattttaaaaagaacttacaccttaatgtataatatttttttgtacatatattatgtgcacaaaaaaaaattagaaaataaaaagaaaaatatgagccaccaaaaatttccgaaaaaattaattacagcaagaaaattttcaccataattatcttttttattacacattaattaaatataattgtaaaataattttaatttataaatactttttttatagtcaaagtctaaatataacctcacaaaatttattaaaattaaaatctctgatacacataatggaaatatgacttacaaaacttaatataaattaaagaataaataaaaaaaaagtaaaaataaaaagtaatttcttctatgtaatgtcattgataagaaatgaaagggaaatttcaatttttgaccctaataaaataccccatttcaaaatatataccctccactaatttatacaaattaattccactattactcatttgtacccaaaatacccctcaaatttaattttcctattcacactctctttccgtctttccctctctttcactctctctctctc

SEQ ID NO: 391854 - DNA, 1424 bp, Cannabis indica
gccacaagctatgttttaaacaattgaccaagaagttagagacgtccaaactttctagctcacttgggggtgctatcccaattttttcccacctgacgtgtcgtgcctacatgaaaaatatcagtgccacatgactgtacaaatcaccaagaaagagatcaagttatcacccttaccaacgggggtcccaacactcaaatgggtcgaccagtgatagaataaccaccttaagggggttaggccgcttctagatagcataaggccagccatcctgcatcgtgcaagtgtatggccagccaggattagacctggcaggatttaggtgcataaccttacacgtggactgcaagctagatagcgaattgggccttaatagcccaataaagtagatagaaaatacctatgtttaaggggcactttagtcttgtattttatcaattaaatatgtaaatatctacttattttatttgttaattagggtttaagttctcgtatataaatagccttaactcaaccatcaaaactctaagtcattaagttataactaagtgtctaagtcataaagctcttttacctgtgcacattttaacttttctttgtgcagctcaacttgaagatgacctacacctaccacgagcaaagtctacagccttaaagattataaaaaccaccaccagcttgaagagggaggtggaggatgccaagaaggaggtcgaggagaagagtgtgaagctggtgaggtgaataaacaacttttgcccgccaacaagcgagttgtggaattgtagcaggagatcaaggatatgttgtccactgttcagcttaaagcaaacattgaggctctgaccaaggatcttaattctttgaaataagagagggaaggtctcaggactcttctcgctaacttaaccaagaagaagcaagatatggaagagagtctcaactctgagaaggcagagcaggatgtactttagaaggaggtggataacttggagacgaccgccctagatgtcttctatgaattttggaaggcgaacccagatgcaaactttgattacctcaatgagaacaaggaggcatatcttagtttttgtgaagcccaaaaagccacagaagaatctgagaacaaagctgacccgtacaaagagccaaggactccagccatgtgaagtttttctatcttctctttttttttttatttcagttccgcccatgggccttttttcaatacaatgtggctgaccaagtagcctataaactttgtaatacttcattttgttttaagatgactagctgaccgggcagcctttaatctcgggtttatcgtgctttgttatcttttgaaatgaatattttcccttaagtttcaataattgcacacgcaaactattgtgtttgtttttttgagcttgttatttacctat

SEQ ID NO: 391855 - DNA, 513 bp, Cannabis indica
caccaacatttgggcgacagctttcatccttcacacattcattttcagtactcagaaaatcctttgcagataagcccttcacaacaaaatttctgttgccaaggtaaggcactacaatattgaccttctttcttacattcatcattactacttggaataatagtaacactatgtgctactctagtaccatagcaccatccaatactattaaccacaactagtataattattaaactcttcatcattttctattgatatatatttatatatgtgtgtttttctatgctttttcttgatgatcatatagtggtatttataggaagtgtgtatattattgggaccgatcacctcaatcaattattttggacacacatataacaacctaggtactataataataataaatgagttaatatcacgatcttctcttatctcttatgggcccacacacaaaatatatatatatatatatatatataattacataaaatatatatatatatattttttttt

SEQ ID NO: 391856 - DNA, 1104 bp, Cannabis indica
gagcatgtgtttcattaattaaggactatacgtgccaaacgtaaccaccttagactgctaaaagtacacttccccctccggtacctaacttcaggacatgccagaatacccacaccaccatggcagcttcttcctgcaaaccaatagctgcagaatttttcctgccatttataattttaagttattgtcattcattaatttattatcatttcaattaataagtactactactacataatattattattaaagttgcttaaaattatttaattgcaaatattgctatcaaaatgtcaattttatatcattttttcatttttttgattggtaaatttttttattttatttttatgttcatatataatatataggattccattttaattctaatcatggaccgatcctgaaataattgtagccattagactggcatactataagatttaagggctcatcatttcatatctcattaaattaataatactttataataatattatttataaaatgaaggacaaaaagaattgtaatagttggtttctaattttaatttgttctttgaatttaatttgatcagcctttattatttttcgtgcggttgaagtaattaagcttcacctactccacactcactctcttcccaatttcattttattctctctgcttcatctacacgaaaaggtgaaacaagccaaatcaaatcgattctcacaacttcatctatatgaatattattcttagcaatatagtaaatcgatatttttctttcttttatatagtttaaatttgtaagaattcgcttgatttgtatttttcggtaaaattgacgtattatcaatttatattatattgaaatttgatttgattttatgtagtataaatatcaaaaatttgtttgattgtgaaaagaaaactaatgatgcatttaaatttataagactttgtttatcatgcattttttatttttattttttatagttcagagtcttcattgagaatcttcactataaatagcatgaagaatgcctattatacttggagtgtattgttgggattttccagtcctatccctacacaaagtcaactcacacacacaaacataag

SEQ ID NO: 391857 - DNA, 768 bp, Cannabis indica
aacaaaaaaaaaaacagaattaactcttacttctgtttcccagcttttgtttgcctacacctttgatgagattccatattcatatttcaccaagtagttgtaacataagattgccataagtcaaatcaaaaccgcataaaacatttgctggtgctaagcattattaacacttgccatttctcattgttatcacttttcttttaaatatggcaaatatttaagtcggggtcctggttcgggtccaggtcctggtccgggtctgggtctgaggtccggggtacgggtccgggtccaggtctgaggtccaagtctgggtccgggtctgggtctgcgttcgcgtccggggtccaggtctgggtccgcgtccgcgtttgggtccgggactgagtccgagactgagtccgggttcaggtctgggtccaggtccggggttcgaggtcctagtccgggtctagggctgggtccgaggtccgggtcctggtccgggttcgggtccgggtctggggtcggggtcagggtcccgggtccgggtcggggtccggggtcccaagtcgaggtctgggttcgggtccaggtccgggttttgggtccggggtccggggtccgagtccgggtccgagtcagagattggtgttgaccccaaattctttgtaaacattataatacaagctaatacgaaaaatttattatgtattaaataatacaacatacattgtattaaaaaatttggtcgttataattaatacaatacattgcttaacccaaaca

SEQ ID NO: 391858 - DNA, 2606 bp, Cannabis indica
aaaactgcattagaaccagtggataatattgaagaggtaggaatatatgatcaggacccaactaaggtcattcgcttaggaaagggtctcgatccggaggagcgaagcaaaatcattgataccatcaaagtatcgacagacgtgtttgcatggtgtcatggagacatgaccaggataagtccccatatcattactcatcatctgaatgtcaacccagacatgcctctgatacaacaaaaaaggcgcccgctagatatggtgaagtctgacgccctggagaaagaggtggataaaatgttgtcaagcatttttatccacaatgtgtattacctggagtggttggcaaaccctatcctagtgcccaagccaaatgggacgtggcgaatatgtatagatttcacctaccttaacaaagctttgtctaaaagattgcttcctgctgcccaggatcgaccagatggtggataccaccttaggcttcaaattattgacctttatggatgcatattcgggatacaaccagatcaaaatacatgtttcaagccaagagtgtactagcttcaaaaccgataaaggggtatactgttaccaggtcatgcccttcggattaaagaatgcaagagtcacatatcaacgcatggtcaattaaatgttcaaaggccttctgaggaagaacatggaggtgtacgtagatgacatgctagtcaaatctaaaatgagtatggtccatgcagacgatctcatggaatgcttttaagtattcaggagtatgggatgaagctccatcccaagaagtgtactttcagtgtcaaatcagggaaatttctagggtttatagtgagccagcacagaatagaggcaaacccaaaaaaataggccttgttaagtatgccccccaagaagacataaagatgtacaaagcttgaccgggaggtagttgtcctgagtcgcttcatctcccattccacgaggcgttaaaaagttaaagaacacatggccaagccaccggtgtagtccaaacccgttcacggagaggacgatttacctatattttgttgtctttgagaatgcgtttagcgcagcactggttcaggaagaagaaaagattcaacactcggtgtattatgtcagtaaacgcatgataggggcaaaaattcggtaccccgtgatcgaaagctagctttccgtcttcttattgcatcaagaaagttgaggtcatattttcaggcacactccatcaaagtattcacaaaccacctgctccgacaggtcttacagaagcctgaagcctcagggagactcctcaagtgggcaatggagctaagccaattcgacatacaatacataccttgcatctcgatcaatggccaggcgcttgcaaattttattgttgagtgcaatgaaaccgaggctaatgccaatgtgtcagatctagatgtgcctacatgaaaagtgtatgtcaatggcgcatcaaacgagaatggattgggggccggggtagtaatgatatctcttgacagactgagactctaggccgccctaaggttcacatttccagcttctaataacgagcctaaatatgaggccttgatagcaggactaaagttggctagggcagtagcagccaacagagtggaggtgtacaacgactgtcaattggttataatcaaatgtcgggagaataccaaacgcgtgagaaaagatggccgcttacatctcagctgtcaaggaattgctacaagaattacaagattgaacggatttcccgagaaagaaatgctcatgcagattgtctagctaagttagcattggatagcgaggtagaaaagctggggcagtgccagttgagtatctcacggagcctagcattaaaccaaaagtggaagtagcgacaaatgagcaaacgccaagctggatggactttattattaagtacataatgacgggagaactgcctcaagagaggactatgtacagataggtacagtaccaggctcacaaatacttgatgaaagatggtattctttgccgaagggggctcagcatgccatatttaaggtgtgtgtcagatcctgaagctagacggattatacaagatgtccatgaaggattttgcggagatcacactgggggcccgagcctctccaaaaaaatcttaaggcaaggatatttctggtctaccatgaagaaagactgcatagactatgtcctcaagtgcgatccatgccaaaaatttacaaacatccctagagccccgccaaatgaaatcaccttaatgacaagcccgtggcccttcgcggtgtggggaataaaccttataggggctttccccacaggaaaaggtggggttaaatatgcaatagtggcactggattgcttcacgaaatggacaaaggccgaacctatgaaaactataacatctaagaaagctttggactttgtcgtaaaaaataatgaaattaaacacataagagtttataaaaccttacattggttgcagtgaaatataatgactctttcctcttagatctctaacccttgttcctttctgtcgcagagtattatcaagatctcagtctggatctctttctctccttcgggtttgg

SEQ ID NO: 391859 - DNA, 2459 bp, Cannabis indica
aacctatcacgaaaatagacttatatcgtcaacaaaaatctgtgttaacagtttggtgctctcattgagagcctacgtgaaaaaagctcagaaaaaaccctcctaagaaaaagaaaaatctttctccatggctgataacagagaaaatgttgatactcaccctgaagagactacttatcgtcctggaaaagagccaatgggctcatggaggcctcccaattcacgatctacacggtccactcgttcaagaaggacccaacatggccaaaatacactgtccacacgttcaagaaggaccatagtgagggtggccagaacccagaaatagggaatgaagaccccaatataagtgttggtggtgctcaacccatggaatatgatgatgatggtgcctatgatctcacgagatacgtgcctgttgtcgagttggaaaattgccatctcaggcaccgcctagaggaggcaaactgacgaaatacttagttggaacgagaggcagccgcgacaggggcagcaaaggaaaacaacgtaaaaaaccaacttgaccctggtgtgaggagaccgcgaggtagatctcgcggttcacgaaccaggaggtaggagacggctcagaagaatcctcagaacgctcaggaagaataaccttgggaaactgagggtccccctgagaatgaacaatcaaatgaccaaccaaagccttctcataaaaatgagaacagaaggcgacccgggaccagggaataagaaatcccctgtgagaacgagggaaatcctaggtttcaacttgggacaggtgggttgccgccgaggcattgtcaacgtccttcccgaactaacatggaaggggtatgtacaaaccctagcagggagcatacaacaacccataccgaagggagaaggccgggacgtgatgaggcgagtgccagctcgagacgcacaagaacccatagtggatcaacgtgaggaggggaaagaactcatcgcaatactgatcgagagagtacatgcacaagtagaactgaaagttactcaaggacgagatccatgagtaggacaagattcatgagtaggacgagatccatgagtaggacgaggtctgttagtaactataaccagcaacaaccgaatctccgtaatcacttgaaccagaagtgatccataaaaaacccgaccttcgccatcaactcggtcaaaagcaagaggatcctatccaattgcgaattgatgagtcagaggacaaattcaggaggtatcaagtcggggaatgtggaaagtagtctaaatacgactcagacgaggaacttgagcctttccatccagacattatgaatgctgaattcccttagggattcaagaatcctcacgtcttgtcatatgatgggattcggtctcacatttaaataattttaataccatcatgcgagccaacaatgttacgaataatttatgctatattttattccccactttactagttggagcagcgagcagctggttcaataaatttacccattattcaatcatctcttgggaacagttgtctaaggactttaaaaaatagttccaggcagcaagggataggcgacctgaggaatcctcacccactatcgtaaagcaacagccgagcgagatgctaaaggcctacttaagtcattttagcatagctgctgcgagggtgagaaatctagacgatagtacccagcttatactctctaggcagggatgacgcctgatctttccactactggaggcgagctatgggatgacttgaaatgtcgcccagtggaaaacatcagtgagttcaatgaaagagctcaagtgtttgtttgaaaagaggaagcaagagaagagatgaagttgttaaagactggattgggaggtaaatccagcactgtctcaacaagcatcgtcttgaccaaggctaataatgcaggagcctctagttcaaagatgaaagataactctaaggagtcagccaaggaaaagaaaaagaagcacgaaaagtgtgtgccaatctacactgtttataccaagcttaatgaaactcaggaaaacatctatctcgcacataagcacagagtcacattttgtaaacctaagcccatgaggcatgcgaggcataagagagatggaaccaaattttgtaagtatcacaaggacattaggcatacgacagaggagtgtcgtcaactgaaagacgagatagagagtcttatcgcgcgaggttacttccggcaatatgtgaaaagacaaggcaatagacaaaaccagccaaattcacccaataacccaggaaaccaaggattacaacctcctcctcttgaaggagaggatattctggttatctcgggaaggccacatattgtaggggaaagtaacaatgcccaaaagaaatatgtaaaggaagtgaaaaataagcagtctgtttttgctttggaaccttctaagaaaactaagac

SEQ ID NO: 391860 - DNA, 1198 bp, Cannabis indica
tggaagtctcaaatcttaattaggacaattcaaaattattataaatacaaaatagaactcccaacagaagtaatatttgttaacaacatttatataatcaacaaaattacactaataatttatcagttacattgatgaacagaaatacaagaagctttgataatatggcaaaaaaatcttcatcacatcacctataaatttcttccatctacactgttttatattatatttacatgtgaataatatttgtaagtcctaagtaggagtgagaaaatttccatagtggtgagtgtgaccatactgaaagtgaaagagaaaaccagaaaacgccattccaagaacaattccacaggccaaagcccctgagaatgagatcccaccaataatactattccctcttcttccaattttgatcacatcatcatcgtcgtcgttttcactctccccactcaaacaatcgagattttccaccgccttaaacgacatcgtttcgtgacgatcggtcaaactccctccgtcaaatttcaccatcattaacttattattgctattatcattttcactttgcaagtttttttgggcctctccgttgtcgtttaagcaagaacaaacggagtctcgataagaggcttcgagttgtttaattttgtgagacatttcgatcaagtggtctggttctgtgggttcgtgatgaagagtcagttcggcccttaagagagtgttgaagaaagccaatctctgttcgaaatcgacgatgtcggagggattatgatgatgatggtggtggtggtgatcttccgatgaattagaagcaagtacttggctgagttgggattctaattctcggaaaatcttctgtaaaagtttgtgatcatgtgccatttttgttttgtatttttgaagaaatgatttgaaaaattagaaaaggagtgagtggcggttatatagtaccggagaataacggttgcacctcttcccaagtttcttcttttttttacttactaaattgaagttttcaatttaatttatttttgttgggggtgtgttttatatgttgtttatcagttattaaaaaataaaaaataaataaaaaactgatttgaggatgatgctggttaacgtgggaattggagaaaaatttttgttttttttttttatttttagaaaaggtctgctattataaattaacaagagtcat

SEQ ID NO: 391861 - DNA, 1253 bp, Cannabis indica
ttaaaaaaaattaaaaaggtaacatggggtaattctactaaaataattaccaaatattattaattatttttttaagtaaaatattatttattaattaatataataaacaatttaaaaaattaagtacatttcacaattaagcaaacaatatagtatatattaaaatgaaataaaaataaatgaattcaattattaagtcataaaaaaaaacacaacaataatagaatatatatatacatatatatatatatagtgtaataaaatttcgtaatgtatgtaatttctaaaaaaaaattgtaatgtatgtaaaatataaattttcctattgtttataatttaattataaaatggaattataaatagttggccagatgaattttattgttccaaattaaatcatttactttacaaccacatgaatgtttacacttttttacaagtataggatgcccattgcatcaatatcttcactattttctaactgtaatcgcacttgaagaagagatgctcatgagattcaattttattatcacaaatcatgcagtagttctttttgatacaatcaaatttcaataaccagtctctagttggaagtatttctcacatagcaagctaagctatcatcatgtgttttggagtattcattctacttcaaatacttgcattccacttcttttcatggctccttgaataaagcttttagtaaagctttccaatagaaaaattctgctgcataaaatcagctatatatctattctatcttaataaagtgttttaccctcacaacttattttcaatactaattacgtactcccttgtgagacctcatgatgccataaattatcattctttatatatatcaagtgtacctaacgaagtcaaaggttatctttttttcaaatatatgtcccaaacatatttgtctatagctattagctattagcagtacacaatatatatctagtttctttttaacgtcaagatattgctttttatatatatggagcatttgagtaattgcaatgccatatttgtccaaaatagaataaaatataaaaaaaaattcaaaggaaaccacagttctgttggattttgtgccctaaataaaacccatttaaatataatcagatttaagaaatcacattttatattgcatatagttcacatgatttatttcatgtttataaattctattaagtccagtatttgttcataattatagtgttgtcagcacagtggaatataatcatgat

SEQ ID NO: 391862 - DNA, 951 bp, Cannabis indica
tactactactctctctctctctctctctctctctctctctctctctctctctctctctctctctctctctctctctctctctctctctctctctctctctctctctctctctctctctctctctctctctctctctctctctctctctctctcttagcctcacacgcacacacatattcaggtgtgtgtgagatcaaaaatcctaactcaattacagtgtctcatgagttgagtaccctgtaataactaaatttattcgtttaaataaggtctgatagccgactctattcctaaatgttgagattagcttggaagatcaaggtgtggattcttcaacagaaattcttagattggatgatcgttaattgtactaaaagatggcaaagaaataatgataggcttcaagaggtatcgtctttctatcattattctaggttaatttatatatattatgttgagatccttgggctcatggttcatatgggagaaaaaatatttttttatcaaattttcttttgcttttataactctgatatgaatcataaaaacaaacaattgatatcagaactatcttcaaaattatatatatatattaaataatgtgttggataattatgtatgtagtcatatattattttttgatgaatcaggaatttcattgcacaataaccttttatgttacaccctatggctcttcaaagagcaaacaactatacatcttactgtaaaaaaaaaacaagcaaactcttataaatcttgaaaccattgtaattctttttgttcgtgaagaagaaggatggatctatgaggatgtgcatcgactacagagagttgaacaagctgacggtgaagaataaatatccattacctaggatcgatgacttgttcgatcagcttcaggggaagacggtcttttctaagattgatctccgttcgggttatcatcagttg

SEQ ID NO: 391863 - DNA, 1076 bp, Cannabis indica
tataacatttttttttatgtatttaaactaaatttctcaattgaatttcagctagaacaagagatgggactaagaagccaatattggactcagacatgaaaaaagccacaccttttgcctatggtgccggccatatccatcctaaccgagccatgaaccctggacttgtctacgacatggaaactcacgattacttgaacttcttatgcgctcgtggctacaacgcaacgactattaaattattcgcccacaaaccatacaattgccccaagtctttcagcttggttaacttgaactacccttcgatttcaatccccaaacttggtaagcgaacgttggttgttactagaagagttaagaatgttggcgggccaggaatatacaaggcgctcctaagagctccagcaggtgtttcggtttatgtcaagcctgccatcttgaatttcgacaaagttggtgaggagaagacatttgagattgttttcaaggctaatgttgttggaaagcctaagacatacacttttggtgagttgaaatggtctgatggcaaacacattgtgaggagtcctattgcagtgaaattctaagttgatttatgtgaatgaaaaaaagtagttgtgtagggattgagcataaaattctgtacaataattttacacaaaatcattgtgatttcattgttgacagaaccccattattcaatgttggattttaatcaataaaattgtaaatttcaaggtgatgatcaaatgtgcattcttatgtatatattttaataaaactttccttaaatttactttttttaattattattattaaatgttaataacaaatccctttgttgtttcatcaattattaattttacgattttgtccttgagttttcgaaatagtagtgcaaaaaaaagtgtttcaaatcattgctatttgattcggacctgttgtaaaaaagttgagacattttgaattgtttgttgacacgaataaagtcacggaaaacctctgaaattatttcaatattggatcttggaatataataattccgaatagaatctttttagaaaaaaatcttttgt

SEQ ID NO: 391864 - DNA, 1373 bp, Cannabis indica
gactatccatattgatcttgaacttctctttatgaataaaaacaaaaaattttccacttgatacttcaaaagcacaaatatgtgagttgtaatactagtcctttaatttgtaatccatataaatatataaacgcgcgataacacttacatacatatccaactttattttctctatgcactacagtactactgttattttcactccattctttagctacttccacgaaagagaatcaattaattcacatggcatgtatatgtccacgtacgacgagcaacttatccaatcactcgtaagtaattacattaattatttttcattatataaaaccattttctctaactctagattatattcatgccggccactaattttatctagagggtttatttgtttatttatttatatgctctttatcaaaatacaaacactatactagcttgtatatattatgatactgagaaaaaagcaaatcttgaagtgctaatggcaattggcaactagtgttcgatattttactgttttattcccttattagataagagatagagtaattttttttttttttgaccaattcaatttggagttattgatttggttcagtccaataatattgttctagaaatggggtatgtaaatataacccatataaaaaaaataccttttaatcaactaaaccataataataactttcccatgagggaacctatatgctatagctaattataatgccatagtcatatctttgtagttgttttgtaaatgaacccatacttcatttaacttgtttaggtgctgtctttcattgcctcatcaagaaatcatgatcaaaattgggtcaaagagagagataaagaaaagaagaaaatggtagtggcagactttttctaggtgtcacttatcaaaacccaaaaaggtagctacatttgcactttgctcttactttttttgagtcaattttcagtctctctttaatgattgaactttcacccatcttctttgatttattttcttttattggaggtccagaactggagagagacccatgaggttgcataaaaataaatatacctctttaattagttaattactaagtgcatttagtttgttacatgaatttttaggcttgagatatttttgcgtaattatggaataattgtcctatctaaccagaaatcggtctctagattggttggttgtcattatcaaaaggcgaccactcccaattatttgtgttaatcattggacctaattttattattaagaattaagtataattacttctcatttctcaacaagtacattaaacgtacgtattaaacatggtattaaatgtgttttttttaagctatatgtatctattttatataaa

SEQ ID NO: 391865 - DNA, 885 bp, Cannabis indica
ggaaggcatttataactgctgagtggctgctttggtgtatcatatatggaaaaatcaaaatgatttcctatggaattcagggagattagcccatgatactgttgtacacgccacaaagtaggatgtaaagaatagagtgttgtgtaattagtcgaaaaaacaccagccagctcccgactggtttgcaaaatggtagctgtcttcttttatttgtttcagcttttactatagtggttgcccactgtttgtaaaaaaaaaaaacaaggaaaaggaagaaagaaagagtgatagattgtgtaattacattttattgtattgaatagatagtattcaggtcttcttattgaagatgctaataggttgtaaatgtttttggagtaatgaattacattgattgacaaaaaaaatatattagtttatgaattatttagatagatattttttaggtaaattttttggtatttttctagatatctttaattaataagaaaattaatatttaagttgatttgttctatacacttaaatatttgatatttttcttaaaatatttaattaaataggaaaattatatgtatgttgaaaattaatttatttaatttttgagcaacataaattagaatagttttttctagttttattttattttaaatagaatttagaatacatattattttaatacactggatttcaaattcaattgtatgtatttgtagaaaattaaatttaagttgaaaattaattttaattaactttggactaacttaaattaagtaatttgcataatatttattgcaaaatttatactaaggatagaaaataaactttatttttaagatctttctagggtataattttataaatattaaattaaactttattttt

SEQ ID NO: 391866 - DNA, 637 bp, Cannabis indica
ttccagtttctttctctctttctatcttctctcaactgctttcttcttcatcaaaactctgtaaataacagagtgtttcacagtttagttttgtttgtttaacttttaatttgttaataattgagttagcccataaccaattccctcttcttgtttctttggttcactttgcctatataaggctcttttacctaagttgtaaataacattttagattcaataataaagtctttttttttatgttctctattctaatatgatatcagaaaacaatcattaaaatttctcaaagctcttcaagctttccaaccatggtacgaactcgagccataacctctgctaccaccactgatcctatggtcaatgccattgctccaaacgctcctccaccatctcaaactcatagttccgctaacaatgtacatggagttccatcttcaactctatatcacaaccaaactcaaaacgatcagcctgcttataaagatattcgcagtccatactatttaagttctgctgatcatcctgaattggcacttgccactctggttctcaatgacaaaattttataaccatggttacgagatttcaaattatccactgtcgctcgcaacaagactccatttcttgaaggtac

SEQ ID NO: 391867 - DNA, 829 bp, Cannabis indica
gtggtgtatatgcgtgttgattaatttataatgaacacgtatctataaattgatatcatataaagataactatttattttttttcactcaatctgatatacaaacattgatttagaatagatccaattttgaaccactcaaaatttacataaagtcaaattaaggacttaatttaaaaaattcaaaaaatgataaactaataatgctagaagtgcataaaaggatttttcaagtcttatacttttggtagactcaacataaagtcatatatattttcatatatattaaattactttgataaccattgtttatttcttggaaaacatatcgttctgggccttgagctcgttttccaacctggaatttccaaaggcagttctttgttgtaaccacccaattatgtcagaaaatacaatatcaatgttctctggtggctccccatacagtaatccatgccacatttttggatacaacttgaaggtcttgtccttacttgaggctgtttcgtataacagtttgctcactgatttgtctgttactcgatcatcttctccatgtaaaactaggaatggaaatgagatctaaacaaacataaaacaaaacaaatcaaatttttaaatatatatatagattatagttattcaattaagacacacctaaattttaaaagacatgtgtgtaggttgaattatactaaatttctcataaatttgcaccataaaatttctttaattttttttatttgtcttcaatatatataaatataggtgcactggctattatttataaatgagtaatattaaaaattttgaatttttataattatttt

SEQ ID NO: 391868 - DNA, 1972 bp, Cannabis indica
agttcaaaatcgaaaatggtgagagattttgagaagacgaatgggtaggggacttctcactcaaggatttgtttccagacttggctagaatttctctggctaaaaataaaagcatgaagtagatggtgatgaatgaaggcttctctagctccaattctgggtggaataagaattttcttggtagggaaatgacaaaattgttggaattgttttgcattctagaactgaaaccagtatttaatcttatagaggattctgggggagttttctcttgtaagtttgcgttcaatgctctcacttcggggcactcagaagcgggaggttggtctaaacgagtctggaaaagctatactctgtataatatctaactgttcggatggagtctagctttagatatgaaaccttttcaagccttatccctaggctggtgtgtttgctgaaaaaattatggagaaacatatagacataggcttagtgtttagcatgttaccgcggcttccctctaccataacctcaaaaattctccttactctactttttcaaaataaaattttcattccttttagccaaattatctatttttgctaactaatttttaattcttttagttaaatcattttctcctagctatatagtttcaatataaattcatattcctttagccagtaactttatttttcaaaaataattttatattccattagttaaatcattttctcctaactctattttctcccagtcaaataaaattctcattcttttagccaaatcctctattttctcataataatctttttatacaattagtaatataactctattttttccaaataaatttttcattcctttagccaaatgctcttttttcttaaaataatcattttacacatatagtaaaatcattttcaaaatttggtttgaaccaattttgttccattttcttgattgccttttttttttttgttattgtggtcccatgtcctatttttttaatatttattttctaagaagttatgtttgttgtttcattgattcttctatgggtttttaagacatctaatttttttttttgttaatgtgtgattgttcttttggcagctatgttatgtgtttatgtttgaataatgtgtattggatggaatttatgtctatgtccatgtctatcatctttcaattttttcattctcatcttttacttgttttgtttaatagaaaagttaagtttttgagtttgtttttgtaattagtcactaattttgctgagttttgtagttaagtaggaattgtaagatatcttcttgaataaatctggtatttcatgttaatgtgttttatgtttgcaatggtggtttcaggacatccttttgcattatggatggagtgaaattgaagatctgaagtatagtctgaagtaaattatgctttgaaacaaattgcctgctatcctttaaataccgtgtgtgctgtgttttatgcagggttggtttcgttcgcggtttcttgctgaaatgagctcagctgagagtagagctttcagactttgtgattgggtatatttcaccaggagtccagatggtgaaagggggtgatgatccgctctgtcagtctctaatgatttttcatgtgtgctcttttgggtgggtggtcaatttctcaattgcaatggtggtgtggtatcttgtcacttttgtagtttgatctcttttatgatttaatattagtcttttactcttatatgattgttcattgttgatgttacattttaatttgtgatggtgttaaataatctaaaatcatctttgtgtgcatttaaattcgatatgtgtgattcttttagtccattggatggaagtttgttgctacttctgtttaaatatttaactgtgctcaatttattgttttagtatttttatagttagctaagagttgtattttagtgttcatttttttgactgtggctccatgggaaatt

SEQ ID NO: 391869 - DNA, 717 bp, Cannabis indica
ttctttcttcttctttttctgcagaaaccctctttctctctctaacccctttctctttctctctctaatcggtttcggcttggcgagacgtgatgctcaagggggtgatgatgcagttagaatgggtatcgccgagtcagcgcacgatagcgcagagaagaccttggaggctgcggtgcgcctggcgaaacaattggccaagaggaagtggaatggcgaggtttacgcagagataaggaagagtatgttcccggaattgtgcgcgtgcttggagttcccacaaaagttattgccccaaagctttgatggaaaacctttctggattttcaatcaattaaaaagttaaggttttttcattaaggataatatttcgtttcaatgatttcatatgcagattaatctataagaacaaatgccataatgttggaatgaaaaatgattgtttttctttggctaagaaacggaaatttcacttgtatttatgtatagatgatcagggattagatccctatggaagcttgtttgatgatgagcaaaagaagattattgaaatcaaggaacttcttaagcatcctcgccaggtttcacctttttttatttaatttgatctctttacgcaagtgtatatgtatctattctatataaaatgtgcctatataaccgaatttttagtttatgagaaattcatgggtgactttttatttatatttaaaataa

SEQ ID NO: 391870 - DNA, 841 bp, Cannabis indica
tttttttttttttggctaatgacctattttaactcacgaccggccttgacgaggtccattatcatttttcctttgattttgttttctatataattttaggttaaattattattttttttattattggaacgaaaatattctataataagtaaagtggacaaaatttattacataaatttgtagcttaaaaagaaaaatcaacaaaaaataagtttaacaagctgtttacaacaaaaaaaaaaatacaacaagatcttttttattaaatattctagcatcaattacctttagatttttttcataaatttctacataatattactcttgttaagattgtatttgattttcattacttaagaaagcataacaatatatataggacatttgtataatcatcattatattgtgatttatttcagttacaagtacaggagaagtctctgtagctctctccatgattaaagagcaaaagagtaaatttaaattagtaatggcttccattgacataccagagatgaacccatattcatttctcaaagcttcccttcaatgtggcattggagtcatatgtaagaacataatcccataattctttcttgttttgtttaaagaaatatttattctataaatgatatttacagcacaagttctcaaaattttaggtttgtaaccgatcgacaactatccaattatttttttagcgaaaaaatactcaaagttaatataatagtaggtaaatactattttaaacttgtattttgcaaaagttattaattagaccttctgttttgttaaatgacaaaatgaactatgtattttctaaactggtacaaataggacc

SEQ ID NO: 391871 - DNA, 1859 bp, Cannabis indica
atatctttttcatcttcaatattatgaatttttgattgttaaagcatatttcacgtagttattcattatgcaaaaatataatactctttgatgaaatatctttcattaaattatttacatctaattcttagaatatagtgttatattttttctacacgtagtttctttgattttgtgtagtttcattaaattggaacacaattaaggcttagaaattatacattttataagttaataaaaatcttacctttttgaaagaaacttgtgcttaaatagaaaatatattttgtaaaatatagtgtactttatttcaactatatatgaacttgagaattaatatacttataaatactattaaacttgcattttgtggattctaatatcttaataatcttactttacacattttatttgaaaactattttcatattcatttcattttaaatttttttattacgtctcatcaaatatttggaactaggttagaatattcttgttttatttaaaatagtttcttttaatgttagtcaactcctatgggttcgatctcgtacttacatgaatattatattccaaaacaattcatacacttgcgagtataaatattaaaacactcacttttaggtacaacactacctgactagttcattttttccagttagaaagagaagcagctcgaggagagaaacccataaaggaaaattaaataaagagttagggagggaaagtgttgagagaaacctttgtaaagaaaacaataaagaaaatctaatatatataatatatacaagaaagagagaaagagagagagagagtgattaccttgtcgatctgtagcttggaatctccacccttgttcttgtaatctttttatgttgatagtgcataattaagcatctctgaggcgggcttaacggagatataactctaatttagggtgaactctgagatcaaattctccctgtgatcttgtgtgttattctgtttatctctaaccaacaaagatcaatctagatctttatagttgtttcgttctattttgtgtttggattttgtaagttcaaggagtggttttgaagctgaagatcgagcttgaaaagaagaaaatgaagccttgtctgttagggttttaaagttgaatcgaagtgttctcgattcttcctagctttgattttatatcaaaggcttaaggtgttgttttgggggtgtgaacttggttcgaaaaggaagttttcaaacgtcttaattgactttggttttcatttgttggctttagttgatgtaggggtatttctagaattgaatttcctatatcatatatagaaaaaaaaaatatacatgaaaattattatatgctataataataatattaaaagtttttttcatttttacactttaaaacaatttttttttatatttttatgtaattttatataaaaacccctattgcaactagtgctgcaacttaaattgcaataaaaaatcgtatagaaactcctattgcaactaacgctgcaaccattttagaaactcaaaccataaatttaaataaaaaattataaaaatagtatataggataatttctctaataataataataacaataacgtattttgattgtatttttttaattgagtttttttttccctatcttttgtaatgtaatgaaatgctttgtttttagtgtgccactcgcttgagttgggctcactgccagcagcataaataaataaaaggattgctttgcttataagaagaccctatgtggctgtgggccaattatcaacagccgtgttcataaaaaaaaaagaaagaaattacactctatactctttttatattgtcctcttttactttta

SEQ ID NO: 391872 - DNA, 1896 bp, Cannabis indica
taagaattaatttacttataacatctcatgtaattaggtgatgcttagattatggcgcactttgcataaaacttttttttttttggaaacagaatatattgtaacaagaaaaataagagatgagtataggttacaatatatcaagatttaaaatattaccatttcaaataacccctctcaatagctaacttatggaaaacaacattaaattgtctagatacatgatgaacaataattgtaggaaagttagagagaatggacccaatttgactaaccaagtctaaaagagcagacttgtctttctatttatgcttaactttaccaattaacactttataatcactctcaacaacactcaaaggaaacttaacagccgtacaccagttgagagtcgaaaccaaggcttttgcttcagctaaaagaggagacaagttaccattcaatggagaagacaaagctgcaacaacctctcctctaaaatttctgactgtcgccccaatccctattttacttcagctattatccatggcagcatccacgcttagcttataataacctggtgcaagggtattaccatcaactggactgaaaccagcttgagttacatccataccagaaattatatcctgaactaattgattttcaatatgatcctgagcatcatcatagtcttgtaacaaagccccaacttgaaactcagtagaagaaattatagtctttttgtcaaacaaagcaacattacgtcgattccaaatttcccacaaaatgcataaaaagattcttaaatcatccttgggcagtttttcaaaacccctaagcatgaattctcaaacatgatgacagttattatttaagtaaaaagtctccaacctagattcactctactcaagagaagctctggaacactctattagagcatgagacactgatccggacctctagcacagaaggagcattgtggagtaaacaagatttttctatggaaaaggttaagagcatttggaagagcatggtggaaagccctccagatgaaatgtttgatttttagaggaattttaagattccaaagaactttccaccaacaaaccaaggattgactgttagaagtggcgggaaaagaagcagtcgatttagctaaatggtaggcagaaccaacagtaaaggaaccagaggaataatactcccagatttaactatccttaagagtaggatcaacaataggaacagcaagaatggaagagacaacgatcaaagaattccaataaacgatccttattccaacacccgttaccatcaataaaaaaggaaacagaaggatttggggctgaacattacctttataagaaataaatctccaactaggaatccaatatgaatgcagagtggagatagatttatcattgcctactttccaaagaagacctctcttaagaagatcccgcccccaaagcaaactttgccgagtaaaggaagcacaatgacctttaaaagtagagagaaaagaattatgacgaaagtatttggctttaaataacctagcaacaagggaatcaggcatagtgagcatacgccaagcctgtttagcaagtaaggcctggttgtgatgaataaaagaacgaaaccccaacccattatcccaagctttccaatggattttctccttattacccaaagaactccaccaaaattgagccataagactcttaattttcttgctaatagaccccgagattctaaaacatgacatggcgtaagaggcaagagcttggtgttgggttttgtaccctaaataaaactcatttcaatataatcagatatactaattaataaaagatcagaaattattttatgttgcatggttgacatgatttatttcatgattatacttaatgtata

SEQ ID NO: 391873 - DNA, 894 bp, Cannabis indica
tctctctctctctctatctcttagtgtgtaattatttggccatcatttcctctttttggtgcaaatagagaagttgtattcgttttggctgtgaatggggagaacttaattttgctttcattctattgtttcttctaaacatacacatgaacgcccacactcaatattggctctgtgtgtttgtatctatcctcataattgagaaacatagcattttgccattttgtctgctacataaagttttaaacaacccttctattttcttaattatgttaggctaattcaaaagtccttatagcgctaactacgtctgccagtactagatggggatgtgtgtacattttgttgggaaaaaaaatacagtgctacattattttatagtgccatttacaggcatgatttcattaagacacactagtaattagtgagatatatttggaggtttgtgttctcctacatgaaggcatgaaaatcaaatattaatatgatcaaatggatatggtttggagtgaatgaaaatgtcacaaaagataggccatataataaggaaaaaaatggtgggacttgtggtagtcctacaggaaaaaaacatagtactttatggtctgaacaatttaaatatgctttggtctttaatagagtagaatcgattaatgtcatctcatgttacttgtgattgtatatagttattaggctcttgtgagagtgttggccgtgaggtaagccctcgggccagatatctcaatttatttgtattaaaacttaggtgacttgtaatgggtttaattaacattttccacctaatcacaagctctctaagactctaagtctatactgttgaccgaggttttcaggcaactataaaatattataaagttactgagctgtaagaaa

SEQ ID NO: 391874 - DNA, 1352 bp, Cannabis indica
atatatataaaaaaaaatatcataacagttctagatcaagttattattaagttaattcgataaaaattatgctcaaaatttattttgtactattttaaaaatttaaaatctgaattatttaataaaatagagcatccaatcaataaattttacaatatacatagtttaaaataataattacctatatcaaaaatatatattgtctttagtaatgtctctatcaaaaataattatatatatacatataatatatatatatttattcactagcaagcaacatattacttttaaatgtttttataaatgtacgggggtgttcaacaataaagagctagtttaagacatagtggaggactgaataatatattctagttaatttcatttgtgtaaaattattatcccacttaacagtgtaggataaataatgatgtgagaataatttttatgttattttttattttgtaaatatatacttttaaaatttaaatagaatcttttatatatatacttaaatatatacaagagataattaattagttatggtaattagttttgtggtgaatttgatttcagcataacaggaaagtctataataatattgagttaactcttgagttcactgttatctggactatgaactaccttacgaattttcataacaaacagcaagtggtggttggccccccgttacggctgagagtgactgattctcgtgatggtgcttcacttgcaaggttattgggttatatgctctttcaacatccaaatgggttcctccctcctcgtgattttttaaaagtgaatacaaatactactcttaatttgataaatcattgcagtgggttagatatggtgatttgtgatgaattaggtgtggctaaagcctccactatttggcacttgataagttgctttgattcataaattgttgaagttttggctattccaaatgctatctctcaatatctctcctttgggcatgaaaacatcattattgagtttcattgtctgaatattgtgctcaaaatgaaaataaaatttctatcattacttttttgggtcttgttttagatgatattgataagctttgtaataggatccatgttgttaggtttattcattgtcatagaccttgtaattgtgttgcttacactttggccgaacttgctttgtcggcaagtaatagtattatttggtagtcagggaatctcaattgtattcaggacatgttgatagcgaatgctatccttgaataaaccctcacccccaacctttattgagtgctaataaataaataaataaaataaggggcttttttatttttacactatataacagtttttttttttttt

SEQ ID NO: 391875 - DNA, 544 bp, Cannabis indica
gtcactctactattaataacacctcatggcataaaaatctgaaacattcatcacaaaaatctgaagaaaattatcaaatgcaagaattgttcaagaattaccaaaattggataaagaattcgtgggaaagtgcagaccatgtcagcttggtaagcaaataaaaatttcacacaaaagtgttcttgatataaatacttcagagttcttgaactactcctcattgatctgatgggtctaattcaggttgaaagtttgaatggtaagatatatatttttgtgtgtatacatgcttttatgcttgaaattaaaaattgaaaatgattgtaatattagtgaaatagttcgcattaggagtaatcatgtaaaagaatttaaaaataccgtgtatgttgaatttcataaatctagtgttatttctcatgaatcttttgctcctaaaatttctcaacaaaatggagtggttgaggatccccactttcctgatcatgtttataggttagacaaggctttgtatggtttgaaacaagcacctcgtgcttggtat

SEQ ID NO: 391876 - DNA, 925 bp, Cannabis indica
ttgaaatttattatttttcccaaccagtggtaaacgttcaagagcgttgagattgtagtttatatttgtaatgtgatgatcttacgattgaatatctatatagtttcttgtatcaaaagtctacttgatattatggtggtcaagcaacgtgtcccgttgatgattattgctatataagatagagatcggtgtttagggcttgtgtcgaaagtcttcctgacaaaattgatagtcgggcaataagttccgttattgataccaaggtagttttgctgaaggagaggccacgaatatgtgttccttggtttgaggggatgtttgttggggtatcaacccaagtttcacatcaaaaaaataggcaagagttgccttgaatataagcattttgtagtaaatttagctctgatacatgagaattaacttccgtaattccagcttcaagatcacacttaaacaaacaaaagttaaatcaaaataaataaattaagagcaaaaaaccaacaaacacataaactagaaaaatataacacagatgaatctaaatggctgtcaaacacaataacacaaagatttatactggttctgttgctcctaaaatcgcccaatatacgtggaccagtcaggaagggacacgtggatcaaactacttaagaaagaactgctaagtctttgtatgacaccaggaagcgttattcacatgggtcccggaagatgcacccggaatacaaggtactcccggaagcaagcatagctcaaaggcactccgggatgtgtcaggtctctcccgagacatcaagtcgcatttaatgccgcatgggaggaagcgtgttgggactgtgcacgcaataaagtctgacggcacatcccccaaacagcagcgctacagtaatgatcatttaagtctagcgacggctactctgcgaag

SEQ ID NO: 391877 - DNA, 1419 bp, Cannabis indica
ttgaaagaaaatttatgagatatgactttcaaacacttcaaagattctgaagttctttcttcttagcattaaagtcaaagtttcattaaagtttatcaatattattagttgaaaaagttatctatatcgttaacgatttctaaccgttaacaaatctaaatggatattttgtcaaaaaaaattaggactgagatgaaagaataagatggttcttttgaaaaatggtgggtatacagtttatttctagataaagaatttaacttttatatttaaacaatacctaagtttgtaataaaatatggtgtgttatgttagaaaaagaaaaattttatttacaccctataaaatgataagtacattcaatatttaaaatttttttctcatattattttgtgttaaattcaatacttattttaatttattttcatatatatattttttaaatcatgtataattttttattctttttttctaataaaatttcacacaatatatttttttttttgcagaaaataaaagggatcccatgatgcaaattccgtctctaccccttcaaacgtaaggcaatctcgaggactacgttataggggtcttatatctcatcctaccttacttgggtcatcaatacatacacctcatgagaattcctatcccaaagatacaccacacagcaagtcagccttcaaggggcaaacataaatccctcacaattgaggggataagtgaaagtcgaacccttgacccaaataagggaggagacctgtaaagactttcctaccactacaccacgcaacacgtggtttcacataattttttttaattttttgttataaaatttgaagtatgatttatttttacttaataggaatattttttaagaatatgaattgaaaaaaaaaatctaaaaaaaaaatctaacataattaaagatatataaaaattattaaaatagagtatttataaatttttaaagtgcaaataaaactccccataaaaaaacttaaaataaaatggggtgaacatgtaaatccccaataaagtaggggccttcaatttagggtgaggagaaatgctaaaaggcaccaatggtgcctagtaccctcctatgtgtcaatattgttattggtcaaactaagtatcgagtctcatatgatttaatgttataacttttagtgagtatcactagccaatcgaaaggcgacatgtccaaaggtgttaggcaccactggtatccaataacaatactcgggctttttgcgcatatggtagtgcaggtagagcgagcctgcacgtcaccactcatagattaacaaaagggataattacatatgacaccatttcttgtaaaaaaaaaattacatttttacgtttgcaaattttttttttttttacatttgtttttcatagaaataacacgat

SEQ ID NO: 391878 - DNA, 682 bp, Cannabis indica
taaataaactataagacacaaaaacaaaattattattttactgaaaagttatttttataaatagaaaaattcaaagaatagaaatgaaattttttttatgttaattaatatatttttgtaatttttttaaaaattttaatttattatgtaaattttcttattatatttatgaagatatttcaacttattttgtttatttatttaaaaaagaaatcattgcttcccaacattaatttaaatcattcatttaaaatatgtacatatatttattaagagttatataatgcatatatatatattcatatatatatatatatatacaagatcgtgaagatcgtgttgtttatatttaggtaattatacagtatttatgtaattagaggtaattagaaaatatagtcccataaaaatatatatatatatattaagatcatgatcacaaaaccctaaacctagctatatatataagtatatatacatatgtgtgtgtccatttgcatgagaaatccctaaacctagctggatatataagtgtttctatagatgtatatatgtgaccgtgatgatcgtgagaaaaccctaaatttagctagttaagtatctctctctctctctctctctctctctctatatatatatatataacataattaatcacttgaagaaaagcttacacatcaaa

SEQ ID NO: 391879 - DNA, 752 bp, Cannabis indica
taaaatcttgtaaatcacaataaatattttattaatattattattataaatataatttattgatattaaaattatttaggttatatagttgttattttaaatggttttggtaagttttgtgattatgatattgagtatttaaaatgagttgaacatacccttaaatccaacttttatgttttatgtctctaagatcctctttgacctaactttcccaaaatattacattaatatacatttatatttatatatatatatatttgtaaaatgtaggtgtataattgaagcatgattaatggcaaaatttaatgaacatggtttattccaaggcaatcttagactaatcaaattatttgttttatcattgattgagaattgtaccattaacttaatgctcactctcttctattcatcactaaaatcaagtatcattatactagtagtataaaacaaaaacaaaaaaagaaaattgcattataaaaatacttatctttgtttaaattatataatatagtataacaacaaacaaaacaatactagtcaacactttagggcccatagtgttatttaatcatttttggcttgttcattttattaagagtaaataccattttggaccctctgttttacaaaagttaccaattggaccatgtgttttgttaaatgacaaaatggaccctgtattttctaaaatagtacaaataggaccctaaattgattttttgtcaaaataaagtttaattataatccga

SEQ ID NO: 391880 - DNA, 931 bp, Cannabis indica
taaagaaaaaattaaaaacttaatagaaatcaatacaaattatatgaaagagtatgaccctaaaaataatttagttgattctactggagtgtcttttataatttttaataaattttaaattgtaaaattaaaaaatgattaataataataattcgccaactttgtaaaatttaattagaaaaacaaatactatttttagaatttaatttattgattaactttttttttttgaaatgggataatttaactgtttctttctttttttttgttttttttttttttttgtgaaattcaatttcaactgtttccttacagcagatttctattataatgttttgtgatcattgtttttcttctacaagtaatttagatttaataatttaaaaaggaacatatattttcattttgttttttttttttttggatttaagcgtttatatattacaacatgtttaatttgggattcgaatccaggacctccaatactcacacacccacttatggccacttgagctagcctcaagtggttatttttcattttgttgataatatatataaaaccaaagatttcactacttttttgcaccctttaatttctggaggaagtaattttcttttctttctttaaatttatttgatgatatacgtgtctaatctattaccccatgccgaaaaagaaaatcttattacccatgagtagtgcaataatgacaaaaaataaattaaaatccacctcttctgaaactccaaaccatagtagacaatctggcatatactctattcaggccaaattgtataaagccacaaaacacaagggaaatttacatagaatactaatatttgctatttttttacaaaaatactgtgaggcggaattttttacttttttactgtgtttttttataagtttcatactgcagtatactgtatt

SEQ ID NO: 391881 - DNA, 627 bp, Cannabis indica
ccattaatggcgaacatggccacagtaggtcctggaaactcgaacttgcagtcttcacctcaaagagctcccacttcgaatcatcgaaatcgcaccagggatcaagaagacactacagttcacttcaaccacacgatttcgatcaagctcaacgatcacaactatctgctgtggaaacagcagattcttgctgcaattcgtggaaacagactgcagaaattcattgaagatcctcctccgatgcaatttctgagcgaatctgatcgggcgaattcgaacttcaatcctgaataccaaaattgggaagttcaagatcagcttcttgtgtcttggcttctatcatctatgtccgagagtctattaactcgaatggtgggctgcaactctgcaaaacagatctggaaagctctcgaacagcacttcaccttgaaggtctcctctaaaatccttgagttcagaaccaaacttcaaaagctaaagaaaggaactctgaatctcaacgattacctcctcaaagtgaagcagcatgttgatcttttagcttcggttggggaaattttgtctgatcgtgaccatatagcagccatcttcaagggcttaccaaatgaatatgatacttttatcatc

SEQ ID NO: 391882 - DNA, 681 bp, Cannabis indica
aaaaaaaggaattcctcaatttatcccttagtttaactacaacaagaccaaatgtaggcccaacaaaggtaatggatcaaatccactagttaagccaagctttctagatgaaggacagatgactcgtccaggcaaggtaagcatctagcctgacagacttttggatagcatcaagcagtgcctccgaaagagtgattagtgagcttctggatgttaaggataatatctcaatcatttattatcaaatcccccaatattaggactttatttccaagattgtgtctgagaattaaatattctaaataaagaaataaagtaattgccaatcaatcattaatgtgtctttaatattcataaagggggatacgttttgacaactattaacatgatgtggcatccacgtctgttggaattattttaccaagatctatatctactaataagtatatttcattaacatcctaatgtgaattactacaacaataaaataaacacataaggatttaagaaaaccttacgttgggtgcatcggaatataatgactccttccgttcaaatctctagcccttggttcctttctatagcagagcattatcaagatctgaacctggatctctttctctcattcttgagcccgattctccttctggttgattggattcttcacagtcttacacacta

SEQ ID NO: 391883 - DNA, 1432 bp, Cannabis indica
ttccaagatttgataaagaacaactgatttttttcattactattatctggtaatctgttgtaatattaaaaaatgaaactgtactgattgaaatttatacacgttatgtgtgcaaactctctcttatggacatgttgtgattaatgtagcgacttccacaaaagtttgtgaggctgcacagagagacattggcaagttctgtctctgttgtacttccatgtagtcatacatggaagttaggtttggttgttgaagatgataagttatacctaaaagaaggttggccggaattcgtgaagcattatcagctagcttatggacatttgctcgatttcacctatgtaggcagctcgaattttaatattgctatatatgacaagaccacttgtgaaattgattactctcctttctcttcaccaaatttcacaaatgaggagtctgattcagaaaatgaaggtagttcaaaactttaaatatcttattggtaattaagaaattttttagaaaatagattatttgtgcttgtgttgtttgtagacatgcccaagaagtgtgaagctgaagatcagttatggatgaaaaggaataggaggaggaatcaaggaccatataacacttacagacatagcaaagctgtcatagaagctcgccgtttttattcagagtatccccatttctacagagttataaggaccgacaaacacaaccgttataagcaggtaaggaatagtagttgaagatcgaattaatttcattacacagttattcattcaatctttatgcctgtttttttgcagcaacttccgaaaaaattcattgagagtcatgttggagtaaaaagtgaggcagtaacacttgaagtgggaagcaaagaatggagtgtgaatattgtaagttgcaattctatatgctgtttcagtggaggatggttcaactttctggctgccaactccttatgctcaggggatgtttgtgtttttgaggttcataaccaagaagccaccactacttcaagtctcaattataagaaatgataattgaatttgatgtttacttattaatcatgcttattctttatttctattatgaacatgacattgctaatttgctattaactacttccaattaactaaaagtttctagaactggactttcaattttaatattgtttagaactagcatatacctattataacacagcttctgttattttttgtattcctacctgtagaaaatagtgattcgaattgtatgtttatttcatagaatagtacatatttatatacaaagctaggagactaggaaataggaaactaccaacaaaataggaaactactaaatacaagttaccttaattcttttacacctaatatacagctaatactctaacactccccctcaagctggagcatagatgttaatcatgcccagc

SEQ ID NO: 391884 - DNA, 715 bp, Cannabis indica
aatttcattttaccagtgcaatattaaactttttcgagtacaaaaatgtgctggcaaaagtgacatttcttgtagtgacttttggggtactaagtgcatatagtacagtgattagtcatgctaccaatcttaccaacactagtacttttggggtactgagtgtatagtgatacagtaattgatcgtgcaaccatcactgccaatactagtacgttcagggtaatgagtgcatatggtatagtcgtcggttgtgcatagtcaagaacatttgagactcatacatgtttgatgtgggtcaagcttgtgaataggtgcatggcaacctatattataagtcaggttatatgctatattttatgttttttttactgagtttttcgactcgtgaatatgtacttcttgtgtagataaaggcaaggaaaaagctaaccaatagtgagtttggaagctcaatgaagattgtacatatctagatagtgattgactaattcatcaatgggcgaaggagacaagatgttcacgaagctccatcgttcatgccctctcatcggagctcctggttgttcatcagtatctggacatggtggttatggaggtaactagaaggaagagatgaaggggaaagaagaaaaagggtcggggtgggaatggtgatggctttggggtgagagtttttggtggtgggtttttggggtaggagttcctggtggtggtc

SEQ ID NO: 391885 - DNA, 840 bp, Cannabis indica
gagaccattttaccatgatcacttaagtctttttaaatgaaggcagagtgaactaatcagacaaagaaacaatcattcttaaataaaggcatagaataagaattcgcacactgaaaaaccagacacatttttaacagtcaaaatgatttaccatccaaaacattcatacaaatagagagcagtatgtcacgattcccattgattagatttgtagtactactactttccttccttcttcccaagcaaactaacactaaactttaacaccaaattctgatggtaacattggagaggtccttaaggcaacacatgctacggtaacaagggacatacatatcattaactaaggcatgcatactctggcaaggattattacctccgtacaggaggtacagcacctctaccagctgttccacgccctgcagcacgcattgcaacagctctgccccttccgactccaagtgatccgcccttacccttgattctggcatctagacgcttgaacattggagcattctttagcatatctggtatcaccataaacctaactttgctgcctcgtataaatacatgttcaagctgagagactttcccatccttagaagtgaaggtgatgttctcgagctgacagttccagttatcctcgcactctatcatacttcctctgtagagctcaccgctcttgagctccaccgtcaccacgtgcccagcagcttcatggagaagctttactggtattcccaaactcctgctcatggctctacttcactgctttccttcttcctcttcttctttcctttctctacaaaaaccgtaaagaaccctttaacctaaacctcg

SEQ ID NO: 391886 - DNA, 996 bp, Cannabis indica
tttgttttgggtcgtgtcattcatgatagtattcttatagctaatgagcttgcatgctatcactataataggaaagtatgtaagtgggggtgggctgcttttaagcttgacatggctaaagcttttgatcaagtcgaatgggattttcttcaaaatggtatgttccattttaatttccctgtccactttgtctcccttatctttaaatgcatgaccactgcttctatctctttctctgtaaatggtcaggttcgtgggaccatcaggtacacctgtggccttgggcaaggagatcccttgtccccttatcttttcattcttagttctcaaggccttatactatttttaggacattagggtaggggctccttcggggcattgccatttctcgaaatgctccacctatatctcacctttttttttacttatgataacattttgttttgcttagctgatcaagagtcttgtgaggccttacatcatgcacttactgtttattccaaagcctcaagacaaatggttaattttgctaagttttctattttgttctctcctaacactcatactgaagttagggatctgttctttcatacctttcagcttcaaaattggccttttatcactaagtatatgggtttacctcaatgtctttctcgtgtgaaataccttgctttcaacttccttaaatataaaattgccactatcattcactcctggaaccataaatggttttctagctagggcgagtaaggaaatacttattaaggttgtcctttaagctatcccctcatatgtcatggcctgttttcgtattcccactaagatttgtaaggaaattgaatccctgatctctaaattctggtggagatcctctggtgaatctcgtaaagtccattggaaaaactggcaaagtgtcagtcaatctaagtttgtgggaagtttgggctttcgatcattaactcattttaattaggccatgcttgctaagcaagcttg

SEQ ID NO: 391887 - DNA, 1260 bp, Cannabis indica
aaaataaaattattaaaatgtaaaaattctattttaatgttataaatattaaaattagagcaaaaataatattttataaatgttttttaaggtagtcaccacactttgaaaattcattacatgcttcaaaactgatgtatatgtaggtattagcaaagagtatgtataactatccctttttttttatttgtgccataaatatttataatattttcgatttcatatacttatatattatttattttaattttttaaataaattaaatacttatattagtctttttatacgtttgtcacttccaatccaattaaaaaaaaactaaattatatactatttaattaataaagaaaatcatttacctctctctctccctctttctttttctttttaattattcttcgaatgaaagtctaccaaaacataaaaaaaaaaaaaaacatatttatcatcttaaacaattaccaatatagaaacacaaactccctaaccctcttataaccagattttcaccacctcagccctaaacgttataattaatttcaataaaaaaacaaaaaaacaaattcaaaaccaattctaagttccacacaaaattttctacacaaaccataaaatgcctaggtttgagatactgaattagggtagacgaaatgagtaagctcttgaagcaagtccaagggatctaggttcgcaaaggcttgtttaccattggtctaaattcacggggatttgggcacgaggtataaaaattctaatataccatatacaccaactcggtacacactagagagaacatttatcgggcaaccgacaacactgttcactagagagaaaaacaatagagattcgaacaagaggtgtgagtatcataacgacatagaccacactatcaaagagtgcaatcggttgaaggataagatgaataacctgatcaagttaggccatctccaccaatagataaaggtatcgattaagtacctaagataattgatagtacaagggcaacaagtaagtcccaaacagtaaggacatgctagacctcctcagtgtgtggtcatccataagcttcgagagcacaagtccctcaagggatattgcctgttcaacaaacctaaacaatccaagttctgggacccaaaatcttaatccgctaaggatagcgccaccatcaatggatgcccatgctgtgaccatctttgagggtccgcatattagctgcactacctgaaatgcatagaaaaacttgttgggttttatgc

SEQ ID NO: 391888 - DNA, 1509 bp, Cannabis indica
ccacaaactgaaatcacccgtactatcgaatctttctaaatcgaaccttgctgatgaagaacccattgcagctgtatttctggtttgttatcacacgatctgagtttcagaagttcttgaatccctcctggagctctgataccactgttgtaaaccaacaacacaaactcaaactaattaatgaacaagtaatcaacaattaaatagtcaatcaaaccagaaactaaaacaagataattaaacaatcaaaacagagagaagaacacaagatttatcctggttcggatctaaaactttgagtcctactccagctctcccccaaggagatttctccactatgaatcaataattacaaacaccaatttcagtgcataaccatcaagaacaatcacagtcaggcttggctcttcaacactcaaaactagagcaattttagccaatgctgaacttgattctcttctgcataatctcaccaactctctttgtttctgtctctctctttcttgccttgctctgaatacaaacaagagcttattatatagttgatagtggctgacatgtccaacacttaacaacttgagacaagttagttattaaccgactaaccgacttcccaaataggaaagaacttaactgaaattaactgattttccaacaactttggagataaaaactggtttagtttagagtggattatttaccacaatatatatacatacatatatactataatgtaagatatgtaagatatatatgaaacattccattatcttttgggtggaattaccacaacatagggtagagaaaaatttttatatagaaggagatgtaaagaatgtttaaagaacacatataactttcttttcattacaattcatgaagacatcataaaaatgtataactattcatcaactccctaagacctcataatagttaaataggataattaaaattttaactattgaaatgaaagaaaaattgagaaaattaaaaattgggaaagaaactcattagtgttgccacatagactccctaaaacactcctttatatatattgattgataggacaatggggtagagtttactaggattttttatttttaaacttcaaaactttcttcttcttttttttttttttttgcatttttaccaatttctacatagaaattcctattgcaaatagcgctcaaaacagtaaatttgaaaaaaaaaagttaaaaaaatagtatatggggtgattccccttacttttatataatataaataaataatataaaaaatataaaattaagaaatagttaaagtttaaaatataagaaagaaataataaataaatttaataaaacttataataataagtttcgctggaaaatcactgttgctaaaaagtcgccgaaaagtttacggtaccgaaaaagttattgttgtcggaaatgcacaaaagtcgtcgaaaaagtccgcgtcaccagaaatttcgccgttgctggcaaaagtcaccagaagtagatt

SEQ ID NO: 391889 - DNA, 559 bp, Cannabis indica
tatattttttttcacgtagctagtcttttgttgttttgtttgttctgttaatttgttaattttgttttaagaataatctgagactcagattattctgagatatagattcattcaattctatagaagatgatttatacaataattgttagcagttaagtaaatttgttaaatgcatagctgtattatttattatatatagtattactctgttatgtttgcgtagtagattgttattacataagaacaaattgatgaattttacatgagtttatgatttattttagtttctcattcttttttttaaaatggcctctttaaaaagtgtatgtgccataaatgtcaagtaaaaaaaagtaataaaagatatgattaattactattaataataatatgatcacaataaaatttgtgactaaaaataaaaaagttatgactaattataaattattattcttatgttctgactaaaaaatccgtggctaaaatattagtcacaaaaatcacaatttgttgtgattaaatgtatttttagtcacaatacttgttgtgactaaaacta

SEQ ID NO: 391890 - DNA, 748 bp, Cannabis indica
tatgatcttgttctgtccattttcgttttttttttttgggtgatcttgccgatttaattttgagcatcattgcctaattgttagaatttttaaatgtgaccatctacaaatgtttttggtcaaagctgattgaggttgccccttagaagtttcttttgctgagtttgttcttacttcttagcaagatttatgttttcttaataattgatctacatttgtaattggcttggtttgccttacattgcataatatatctagatttgtgcatatttaattttgctttaacttttgaactttatcagttgaactatagtttgaataaaattcttcctctagaaaaataaagataccatagtaccatacaaccacatttattcaaagaaaatttgattttttatgcttaaatgattaaacttgactccataatactccatggttctagatagttatagtttcaattgaaaataaacaaacaacataatttttaagaaccattgagtattatgaagtaccatttagtacaacgaccgttttaaattaaataacataacttaccctcaaacactttcaattatacattgaaaatttatttttaatttcaagaacatgcttatatcaactatttattgagtaataacttatcgaatttaaaaaaaaaaaaaacaaaacaaaggaagaaccaggatgtaaataaacaaataaaggcacacaactcttagaaaatatcattaaaaaaaaaaaactaaaa

SEQ ID NO: 391891 - DNA, 742 bp, Cannabis indica
aatcgaccacaccgagattgggagcgagatatgaagagacaaagagagattggtgtgggataacaaaaaaattgaataaaaaaacagagagaaaaaaaaggactaaaagaagcaaaataggatagtttttaaattatacttaataaaaagattaatatagaattcaaaaacagtcattaaaaaatcaaaaccgttataataaaattaatatcaattattatgataataaaaaagtgagcttacggttatgtgaaaatcaaaagacacacattaactaaattaatattcattttgaaagttaaagatgataaataatttttgttggtatattagaataaaaattaaacaaaataagaaaaatggagaaaagagagattaggaaactatgctaattaagctgccacttggaaaattttaaactttcctttacatatatactaggcaactaatccgcgattataatattttttaagttgctaaatatttaaatcaataagtgatataatctaaagtatagcatacaattctgaattaacaatactttttaatggttggatctttttaaacataaagtttgtttattctattaaggttgtatattgatttggtacgatgtgttttctctaaatacaattttagtaccttgtattttataataatcaatatttatcctgtattttaaaagggaaatttgacaatatatgcttaaaaataaatagtacactaaaactatgctagcatt

SEQ ID NO: 391892 - DNA, 755 bp, Cannabis indica
cagggtgaggattctgaccctgaggtgctggacctgttaaatccatcttcatcggatttgatagttgggaagatttatatttcatgctctgttgaggtgcaagactagtaaccagttttgttaatggttttcttttgttctatattttattttaatacaataatggggactttatcctatttttattgttgtcacattattttgataaaaattaacaggatccagttgaaacagaaaagagttttgcaagacgcatcttatctatagtggtatgttctgaattatgtactgagaattgtcaatttttgttgttgctgattttattgacttgttcttgagtaagctggtaagtatggtgtggatagttgaaactcctcacatagagattaattggaaaaaaaatctgagcctttatatttcttacaggactataatcaggatgggatgctgtcattgtctgagttttctgatttaattaatgcttttgggaatcgactggcagctgaaaaggtctgaatttaaattcttgtttctaccttgtatgtcacagaaattgtcttttatagaaattacaagattacatgatggggttactagactgaaccatctcgtccttctctccatcccagatttatcaattggggtttttgaagtactgggatttacaattctattgcataggtttacttccagcccggcttacccggctctcattcataacttgaaaagaaaaataaaactggatttctaaatta

SEQ ID NO: 391893 - DNA, 692 bp, Cannabis indica
aatttttgcctaggaggcttgtctgatggtgccgcctttgtcttttctttttaaaaaacctgcaagtatttcacggggatgataaaatataattatttgttatcttcgcgacattctaaaatttaattaaacaatgtaatcattatcatagattgatcaaatgctttcaatctttatgatctggttgtcttactcaaccatattcaaaatcgatatttaatcccaaatttaaatgtaaaattagattatattattcaagcatcatgaagattctagactcaaacacatattaacattgttctaattagataaaattaaacaaatagaaaataaaaattacatcgcatgtaaattagatatgaatagtaggtaacccaccttgaacttctccgccgcctagacgttgtattgtcatcaatacagactttacctaaaatttgagtaatcaatttgaaagtaatttttcgacataatagcccttgggcctttgttgagttgaatgtcagcgatcacgcttgatcgcgctttttcgacattccgtgttgacaattcagagtcgacgagctctttaagatattatcgaaaactttagtcagtcgaaccacaacctatctaatgaagcgatctttacttatcataggcagatgcactcgttcatcgcatatcacaaatatgcgtgaccaacactaatt

SEQ ID NO: 391894 - DNA, 825 bp, Cannabis indica
tattagcactttttatgaaaatctaaaacccgatagattgactaattattacaatattccaaaccaaatcaaatctttttgtttcatatttttaggcataatatgatgaaatatctatatttaatttttcttttcacaatatttacaattgaatttctcattgccacattttgattccagaaaacataaactaaactacttctcaatctttctaaaaagcataataatattagacattgcacccttcacttgaagacaagtactcatctccaagtgtttggtctgtacatatataattggcctatgtatatacatcttatatatccagatttcttgaaaggctaaattaaactaataaaaaacaaatactcaattacgtactattatttatatatatatatatacatgtatagcttctcacacatcatgactaatcaaatagctcacaacttatttacgtagtacaatgaatctagaatatttttaataatcgtaaacaaatcatattgcgtatatagctaatatatattatatatagttacttgtttaattcgatctagatccaataaaattataattaatatatacatatatatgtacgtaacactcatagaatatacgaatattaataagttattggttcatatatatagtaacattcattctaacgtggtcatcgtccaaatacaatccctctaataaaccaaaaattaatatatatatatatatatatatatagagtccaaaatataataaatatatattaacaaaagttattagaccatatatatttagtaaaatgtatataaagacgtaaacctaact

SEQ ID NO: 391895 - DNA, 1177 bp, Cannabis indica
caaaaatttaactataaggcccattgtattattcgaccctatagttgattaaagcttaaatcttctatttcagcccatctcatttcaaacataacctaagtgatgagaatagagaattaacttaagtctcataattctagcttgaaaaattcaatgttagataactctctttctctttttctttattatttcaaaaatcactagtaaatctcaatcttaaaattgtttgaaaggtgatttgagtataaatccacactattgaagttgatactcaagcgtttgtggaagactgtgatgaacacaatcaaaggaagagaagatccaagttcaatttttggtaatactctatgacagaaataacaaggatcagagaactgaacggaaggagataatatattctgttgcaaccactgtaaggttttctaaatttttttatgtgtttatattattgttttatgttttctatatcaggatgttagattaattataatctaatatacataagtagtaaattaatatcttggtaaaagattttccaaccggttaaactttcccacttatgggtttttaacattgaggttccctttcgctaccatgttctgtagctgtaagagggtttcttatattttgtgtgtagcttcttcttgctctgacatctttctatgttgatctgtgactacttgccttactctcaccacctccgggtcttcctcgtagtctttatcagggtttttgtggtagtcatctctttggtcctcatttcatccttcttagtcatcttcctcaattggagtttcatcaatgtatttctcttagtggtggccttttcgaagcagacgactacccgcttttaacgtttcaccatcccttgcaatgtccatttgagtgtctactagagggggacagtttagattgtcatcagtaacatcttcatggtcttggcgagtatttggcttgatgaccgtattttgagtgacaacaatggagaatactttctttaactctcaatcaaagcaccaaaatatttattgatattttcaaaaactgaattaataatagattaagctaaggataaatttttaagaaatgaagaaaaaaataattcttatgtggttgggggcattagcgagccttaggacacaagtcaatattattgagctctttgactatgaaatat

SEQ ID NO: 391896 - DNA, 1346 bp, Cannabis indica
tattttatgttcattgaatctaggcacaattaattatttgatattctttatattgtcatattacgatttaccaaatttataatttcctgaattaattgtcaaaatattctaacaattaattgtggtagagactttgatggaatgtctcacctatataaatatagggtatcggtccctgagctgactactcattctgtaaaaatcatagtaatccatctaaaaagtgtagagagagctttgaagcccaattactcacactaatcagtttccttttcttttgctgatccaaagctagtgtgggattgaagctcaaagaaacaatggatggaggtagttcaatcctttgctcttagtagatatatatattcgattaattccgtatttgatacatgatcatatatgcttcatatcatacatataaatttctaacatgctgcctaaacacgatctgtagagaattcattatttgagatgcattctccatttgttcatgcgtcttacgtagaacatcatcgatgctaacaagcatgaagcgtttggccttgttgttggattgaattcaagagtgaaatctgtcccaaatattttttgaggcattggcagtaggcttctcagttaggataattagtggttctcacaaaccaacatcaaattcagattaaatttccatttcatgaaattctcaccattgaatttttcaagtgctagtaaagcagtaaggggaattggcatagtagacatgactgaaataaataaagatgacataacgattatacgtaaattataaatattattttggaatgactgtaaacgtgatgcatgagcgcatacaagtaaaacacataaaatattgtttaagttatttcacgataaaactattggacaattgatcaccgtcttaggatcgatatcgagtaaattttattgagcctatgaggctgatcacatctttataattttgaaacttaaatatatcattttcccttttcaaaatataaagtatcgctgtttgttcaagttaactactaaccacatggaagtttagttaaactttgtaaatgtaactcattatttcagattctacgacttaatttagtaacgccaccttagggttggtatcgcattaaatacatcacttcctccgatcttagtcaagagataaaccttgaacaacattatagacaaacaccttccttaggaggacgaaaacaaaagtgtctcaaggccactctatactcattcagtcttgactaataatagagattgtaggttactttgtcatgtactccatctcccactcactattttaagttaatgtatttattttattaattctcagaattaat

SEQ ID NO: 391897 - DNA, 2529 bp, Cannabis indica
taaaactctatagagtcactcaaaacgagtcattgaacctcatttttgtagtagtgatatcaacctagcttctttgctacttccggtccaccaaatttttttgataagagcatcaagagaattgataattgtgactgggagagaaaaaatggccatagagtaaataggaatagctgagatcacatttttaatcaaaacagttctagccgcttgtgaaaagagtttagctttccacccttccaacggagaccgaactttctcaattataaaattaaaatctctcgaactattccccttaacaaacaaaggatttccaaggaacttttcttcctcggacaacacttcaaagcccacctcctctgcaattctcaaatggatgtgctctccacgattctttaagaaaaagattatggatttatggaaattaatctattggcctgacaataactgtattttgccaaaacatcattaatatgcaccatattagaggaattaacttatgtaaaaaatatagtatcgtcaacacacataaggtgagaaatcgaaggactggagcatttgaatttgtatcattgaatcagcccttggttttctttagcaagaattagctgagacaaaacttctaagcataaaatgaaaagataaggggagaggggatccccttgccttaggcctctttgaggctcattttttttgtatcaaactgcgattcactaaaatctggaaactcactatagaaatgcattgagaaataagccccctgaaccaatcatcaaattcaatatccataagaacttgatcaagaaaacaccattccattttgtcatatgcttttgacatatcacatttgataccaacataagccatactcccctgctttcttttcatatcatgcacaatttcatgagctatgattgaatttttagcgattcatctcctcttgataatattgtaagagttttaagtatagatctccaaagaataggactccttggaaattttttcaaaaaaaaagaaacatccttaaaatcctcaaattagtgtttcttatgaggaaagaagggctactttgcaaaacaatgtcctaaaagtaaaactgacatgtcaaaataataacacacatatagaacgccattggggtatctctctctccgataatgacattgaatcagacttttcaatcgaagacaaaatatctccacatactatgtgtgcattacagccaggtttcgacttcgacgtcaaaagctgtgttagaattttcaacatagatacaatcaccactagtcgaccaatccagataggaaaaatgcatgtcatcctaataaaatactcaaggccaatcaaagtagttgcattttttgatataggagcataatacacaatcatgaaccccgacatcttgctcccaacactgtggaagaagaaaaagtagtatttctaagttgcaaataaccaagtactctgcaccgaataaattagcaagtcaataaagctacaattattccccggatgttccgttgtccaaaaagtcattggatcaaaactcctaagaaaggaactcatagtgggatttgacctttacacaaaaatgaaaaggcttagaatactcccacaagggttgacctacaagaatttcttcacccaatgggagcaaatttcgaattactttcacatgacgcaagacgtattttcatcaatcaaagaaaagctaatacagaggttatgcgtgattctcactccaaattctcaacgaagtgcaatcacccattatggaaaaataaagaattctacatctctctacaattcaaacagaacgaggatatcaatccaaccaaagcaaaccaccccagaatgaatcctgaacatcaacgaatggcgagcaaagaatgtcagcaacttaaatcacaagggctgattaatgacactgaatcgccgtgggcatgtcacgccttttatgtcaacaacaggacagagcaagctacagaaaaacaaagattggtaattaattattaaccactgaactattttttggcagataataaatttcctctacaaactaaaattctcttttttctagcatctccaaagcaaagatattttcaaagtttaatctaaaattcggtttttggcaactgaacatcataaaagaagttcagaaaataaaatattgtctttctaaaattcccttctgagatctttctctactatgatagacagaaagaatattaccattagctcaatattaccaattaaaagatatgtcaagcaaagtctttatagtaagaatcaatctcaatagtacaacctacaaagactaagagaaaaaagccaatgttaggaaaagtagtgaggttgattctgactatatagattaacgttatatctctctatcagtctatacaagtctaagcaagctttattaaaacatctaaatgatacacatatgaaacacagctccgtcaagatctgagattgctggccgacgacgagagggctacagcgccacatgtgtgtgtgtgtgtgtgt

SEQ ID NO: 391898 - DNA, 1805 bp, Cannabis indica
tttagggtccagtgtcagtagtttaggttgagtttgaggttcgagagggtctgggggtcaaggtttagggctaggggtccgaggccaggtttggttcagggtccacgactgcattcgcgtctaggtccagaagttcttgttttggggtagagccctcgtatcgtactggctgaggtgtggggttgggtctgggttttgggttcaaagtccgtgtcttggtccgaggcctatctaggttcaagtttggggtcgccgaggttcgaggccgaagtttggtgttcgagttcccgtccacatttgcatttgggttcggggtccaagtccaagcccatgtttggggttgggtcttggttcggttccagctctggtctgtggtctgggtttgatttagggtcaagtctgggtctaggtcccgtctgaggtcaggatcccggtccaggatccgtgtgttggcccgggacccaggtatggagccgagtccaagtcggggtctgggtccaaggtccatgtctggggtcggtctccaactctcggctggaccctttctaaatattataagacaagctagtaatacaaatcatttattattaggctgaataaaattatactatctttattacaaaaactcgttactaatctgaccccgaccttgaacctagatcccatcatcggtcgtataggtcacaaactttggcccaaaccccatccctaaaccacgaccttggatcgacctcagtctggggtccagggttcggtctgggattcgaggtctaggtccaggctcggggtttggggtcaaggtcagggtgtctaagtctaggttggctttgaggtccgagggtccaggtccaaggtttaaggttgggattcaaggctaaggtttaaggctaggtctggattcaggttccacgtacgtacgcccaggttcagggtccaaggttcgagtttgggctttagggtctaggtctgaggttagggttctaggctaatattagggtccatgtcatagtttaggccgagtttgaggttcgagggtctggggtcaaggtttagggccaggatccgaggctgggtctgggttcagggtccacgactgcattcgcgtctaggttcagaattcttgtttggggcagaggcctcgtatctgttgctgaggtgtggggtcgggtttgggttttgggtttaaagtctgtgtcttggtccggggcctatctaggttcgagtttggggtcaccgaggttcgaggccgaagtttggtgttcgagttcccgtccacatttgcatttgggttcggggtccaagtccaaggcccatgtttgaggtcgggtcttggttcggttccagctctggtctttggtctgggtttgatttagggtcaagactgggtccaggtcccgtccgaggtcaggatcccagtccagaatccgtgtgttgggccgggacccaggtatggagccgagtccaagtcggagttttgggtccaaggtccatgtctagggttggtctccaactctcgactggaccctttctaaatattataacacaaactagtaatacagatcatttattgtgaatttaataatacaatttattgaaatttatggtagtaataattaatgtaatacaaaattttatccaaacatagtatttcttattatttaataaaaacacaatctttatacggcaaacgagccgtaaatgtaatattttagtgtatatatatgtgcgtacaaattattaattagaataattatatatttctaaactacttcaatgttttgttttttcattttttctaaattaaa

SEQ ID NO: 391899 - DNA, 1006 bp, Cannabis indica
gtattgggggttttgccgccattaccctttcagatatttaagtctctattctgcaaatgcatcgtagcgaacaatgtgtggttcttcattttggctaacttgacagatggcctctctaagtttggctaactcgagattcttggccccatctcaccaattcttggctggctcaccaattctttgccccatctctccagtttaatatcgaagaccagatcctaccgtggtgctccatgttagctattccttcaatacgaggcgccagtggagggtcatccctaggcaatagaggttggccattaagaccaactaggttggtaatgtccacctgactagttgtggtggctaggtttgtggtgcctgtcaagatggcagggttggccacattcgttgggtttgtagagatttcagttatgactagaacacaaacatcaagatttgtcgtcatagggtcttgaggatgacccgatgagacaaaatttgtagccaaagttctccttgttttaaattatggcatttgatcagataaattaacaactctctctcaatgaaagcaccaaactattgaccttagatttggccaactgacattggaagtgtatttcatgttgatacttgccacgtgttccacaataagaatagaaaagtaaatgagacataagatattatagaggtcgacccccttagttagtaggtaatgtcctactccccttttggttgtattcataccagagatagtactactcatatcacaagtgttgtggaattcgtagtagctctcttaagattacaatgtatgaataaagtaggcaagtatgaagtgagagagagccttcaaggcatgtaggagagaggagaagagagagttaaggttttagacttagagttgagaggatagggagcttaaaggcttaatgtcttagggcttaagacttaatgtcttagggcttaagacttaatgacttaggctttttaggtttaggtaatgctctttatatagtagagc

SEQ ID NO: 391900 - DNA, 1146 bp, Cannabis indica
catgcatataattctcatatattatatccattattgtgtgtatatatttgtgtgtacgctatcaataataatagagaacactcaagcggcaagtgcaattgttctcttctctagactgacctcatcgatcagtattacacataattataattagggtattatttttcttaattattggagcggaggtgaattgtctcagtacgtacttaattatataaccgttctctagcttttagagtactctaaatttagctttcttgaacaaatgaaacatgtacatatatagttttagtcggcagtacgtacatgattatgtctggccaactttgcattaatttcttttcgtcatgttatattttttcgcaatattatacatacattacgattatatatatgtactctctcccccacaaaaattatttaagaaacttgtaaaaagtaattaagtagttagacgtattaatatgtaagataggattttgcaacaccgaacttttgtcaaataataacaatattaataactatatattattactatgtttacatacaatttaggaaaaaagtaattgtccaactatataaaataagagaataacaagttatggggcatctgttaatttcaaagagagaaaaagagaaaaagaatgagtgagaaatattaatctgagtattattaatgaaggagctgttagctcaatttatatatacactagttagttagataagttaattatataacagaatgtacagctggcaaaacaaactaatactaacaactttaactaacaaaaagaattactaacacgcccatcaaactcagtgtcagtgtggagagttaaatcagactgagtttgtcccttaaaaacttaaatctagtgctaaataatgcattaatcaaggtgtttgcaatctggtctaggagtatgtcagaacaagacactactataaaattaggttttagagggagtctttaaagtcttttagcgctggttttagcaaaatttgctactaacgctgctccaagtaacgttgtaagggttaaaaataactgacgctgtatggaccctatggagtaaattattatgaaataaccgactctataggagcttcctatatgaactttttcaactttaaaattttgtattt

SEQ ID NO: 391901 - DNA, 923 bp, Cannabis indica
taattgtttttttagagggaaaaaaaaatagtttttgataaacactaatttaatattaaaaagtaataattcaaaataagcgatcttatccgacttttgcaaattgagttggattaaattttagctattatgtagattggattggatccaaaatatgaaaattcccactatctgatgcactataaaaaaaaatatataatacggattaaattgaatgaacaaacaaatttaagctttatgatcatgtttattttttttaataaataaataataatgataaaatctaaaatattttagcaagccatatctcatcatagagttttaataatgaaataaacattatgcttagtgtgaattaaaaaaaaaaatctaaaaaaaaaaatctaaaatatattttttaactcatatcttttaaattataacttttattaaatttagatataaatattttatttttgtgaacgcaaaaatttggacataaatattactacatgcacaaaatcaggctcatattatttgattaaataatttatgattttttttttgtatataatatacatatttttagagtttattgcagttgcatatgattttgtttaaaagtttaatataatccattatattgaacatcgaaattaaagtttttgttaacctatattatatatgggtcaaggttgtgaagtcacacattgcagttgcataatgttgactaaatcacattggtatatcttaaggacaaaataaataatcacattggtataatataaaagtcataaatcaacaatattactaaacaaatatattattggtccattttgctcgatagtgttattgttaatagagtattgacttgactatcatattcaataatttttaagagggctgaacattttgagtgggtttgacccgaacccgagcaaccc

SEQ ID NO: 391902 - DNA, 1080 bp, Cannabis indica
tatatatatatataaaataaaagtaattaataatatataatacaaaggaggccggcatcaattacttattgtgaatggcaagttactcaaaatatatatatttataacaaatcctatgtgtcttatatattgtttttcatgtcttgtttattaaatatattttatcatcaaataataaaccatcatgatctcttgattatatttacagactactgcatattatcagtatttatttatcgtacttttctttccctatttataggtgccatttcttgcatgttaaccatacataacaactattcatttccaaacaaaatggctatacatagagttacaataagtgttgttttgttaatttttttgggtttggtgattggcacttacgcctctagagctctctttcatactgaggaagctcttaagggtgctttaaccgatcaccatgccgtaggcctcggtgttggtgttggtgtctctcgcggtataactagtggtgcaagccaagatgaaggcagtgctggggccacaagcgaaagtgtagtcggagaaagcggtgttggcggccgctacagcagtaatggctatagaggtggccccattcagtagccatatatatatagtggttatgcttcatgaaacaaaaatttgtgtacgtatttaaccgttggaggaagagctcattcttactcattagtacaataaacaataatatgagtaaagagttatatttatgatatcacgaatgccaacgttatgataaaagttgtatttttttctttttttttgtttgtattaattctacattgtgctatatatacattataagtttataaagaggtggttctgaatttgatcgaggtagtctaaattattttgaaaagctattctcatcgaggttattaattttgacctttttgatcccatgcaaaagtacgtagtacaatacatttaccttcaaaataatttaaaaaaatcaaaagaaatgaatactttatatatatcaatcgagactaataagaaaatatatatatatatatatatatatatatagaagacttcttaatgggtaatacccattga

SEQ ID NO: 391903 - DNA, 702 bp, Cannabis indica
taatctcctattttgactgattggctcttgccttgctgtaataatctcctctcatcggcagcaagggttggctcttattctgcttctgcgtgggttgactcttgttctgctaatgctacgacctcattttgatatccttgctcatgccatgttatagtcttgtgggttggctctcgtactgcttctactacgacctccttctgatatctttgttcttgccatgctgttaaagtctcgtgggttggctcttgttctgctcctatataatatttctctgcgtaatcattatttggttcatgctctgccattaatttttatctttttgtgttttgttctttatactcgctttcaattttattcttcaattcttttgattttattttataaatcttacataatacccaattatattgttgtagaagataaattgatattaataagttaccacatgtgtttgtactactataaatattatgcaaaaacaataatatatagagtgattaagtaggagtaggtagttacctgtgggtgattagattgagtcaattgatactcaatcattttccaataagtaagtgttttatttaggtccttaaaatccaaagtccttttaacacctatttcgttgttttgttcatcaaatattttcttctttgttgcatttccatgccatgttccacctttagcttttcgagtcgacct

SEQ ID NO: 391904 - DNA, 1125 bp, Cannabis indica
ttgataatagcggtcaaaaagtgcatttgaaggatgatattgctcaggttgtgcaaaatttattttgctgaaatgtttatggccacagacattgatgactctgccctttccaccacacttcaatgcattccaacacttgttacaattgaagataatgacagcctcacaagaatttttactactgccgaggttgaagttgctttgaagaccatggcagcagataaaagccctggagtggatggtatgtcagccatgttttatcagcattattggtctattgtggggggtcttgtttctaaagctatattaagtgttctgaatgatggagctgacccaacaagcttgaaccgaacaatcatcactcttctcccaaaggttaagaaagcacaacgaatgcaagacttcctattaatcagcctatgtaatgttatttccaaacttgttactaaaattcttgtggcaagattcaagcaagttcttccaaaagtgatctccgcaacgcaaagcgccttcttacccaactatttaatcacggacaatatcttggtggcctttgaattgattcatgccatcaaaaacaagacctcgagccgcaactgtattgcatctttgaagctatatatgaacaaggcttttgatcgagtagaatggagattcattgaagaagttatgaagaaaatgggatttttttctcaatggacatcgctgattatgagatgcttaaccactaatagcttctcctttctcatcaatggtgaggttatgggtgctttaactccatctaaaggactaaggcaaggatgtcctttatctccgtacctgtttttgatatgttctgaaggcttgtcacgactcctacagcatgaacaagacattgacaatctcaatgggttcaaactcactaggcgtgctacccctatttctcatttactgttcgcagatgatagcctcctcttttgtcaggctaatgaaagctcttgtctcaccattaaacgggttcttgatctttatcatcgcatttcaggacaagttctcaactcaaacaaatctgtaatgtctttttcccctaacactactttggctgcccaaatatttttttcatcggcatctcaacatgcccattag

SEQ ID NO: 391905 - DNA, 626 bp, Cannabis indica
cagctgttggggatttttctttgttgcaatcagtcattgaaacaagttttaagtgtattcaattcaaggtaaagttactagcatctttctctttaagttttctaaggctttcatttaaaaattatgcatgaatttgtgagtttaggtgttgtagttgtttgagtttattttctgaagtttaattaaggttagttttgtttaattgtagaggatttaagggttgttgtcatatttgagcaagctttgagtttaacaactcaagctttgctctttaatggtatattttgattttgtgcatgatgtggtgttttattgcttcggatatgttctttgtgatatattgaatagctctggaaggtttggttgagtttggggttgattttagtgagttgtgaattttttaaactatcatgcactgaactggtcgaccggttcaggggggcctataggaaatggtcgaccggttggtcctcaagaaaccccacagaacttgaattacggttgggaaaccgatctactggttggggatgttttgggaaccttagcttttcccgtttttacaatatttagggtattgacatgttattaaggatacttttagtttcaagtttaagacaccaaaaagt

SEQ ID NO: 391906 - DNA, 1056 bp, Cannabis indica
ttaatatatatatatttttttcagtcttcaacttatgttttagagaaccaattgaacacacattgtagtattgtacactctaataattgtaaaataagtttgtacgttcgtttaatcgtcagttgttaaaaaaagaaaaatggtatgatgtttctatatttgtttacataaataattttggataattctacactgtacccttttaaaaatgatgcattaatgcatttatacttgttttggcatttagaagaatttttaatcttaattttttcatattcgtgtatgttatagttattttaagatattttacaaaattttgatgaattcgatataatttacaatacagaaagcagtgctcaagcagtatattttacacgcatataaaataaaatagtcacactagcaacacattgtttgaatcttgttttcgacgtgttaaatttcttcgaattttttaaaattttgcagaatgtcttaaataactataacatacatgatcatgagaaaaaatttgactaaaaaattatttcagatacagaaataaataaaaatacattggtgcatcccttttaaaaggttgcattataaaattttctaataatttttctcaagactttgtttcctagctttcctaccaagtggccatttactcttggtattttctaatataactttcacatttatatgtgttgttaatatctattctatataaagtgtgcctgaaattcttggtttatgagaaattcatggtgactttttatttttatttaataaaataataaaatattatttatatataataaaataataataaaacaaatctcattaatatttgaattgatatttgaacagatattctagaatcacaacccatttaaaaagaaaacaaccggagttcctattctgctatttcctctttcacctcgtttgcttgtatgctctcgttgccccttacaaatcataatggtacatgttatttttatgttttgatctcatcttaacgatagaaaatgaattccatgattttatttatctatttttttatttacttttttt

SEQ ID NO: 391907 - DNA, 965 bp, Cannabis indica
cttttgaactcgatcgtacacgttcatataaaaaattaatttaagatataatatatttagggacacgattttgtcttttagatagtactttcacggaatgtataccgtagatgtacggcagcctttagatgacagagttatttgatttgagggtaggggttcatctcggagtaattagggttaaaaaatggtaacgtactctgaaactatcatataatatatcctaagacccatttaatgtatcacggaatacattccgtgaaagtacataaaattgtgtcccaatatttttttaagtactaaagaaagagatatttctatggataagaaaaataaaaagtagtcatgactacatgcttatgcttttaaatttctattgtggtcatgattattcatgaatggactgatgatgatgatgatgatgggtgaagttgcaaggaaataaggaaactaggtagtgcgtgtttagtctcttatatattatgaatatgaaatcttgaccttatcaagatagtttttcgttttatcactaaattattacaagtctttgttcaactcctggtctacggttttcttttcaacttattattatttggttttacaaaaagtaaaaggcatataattataaaaaaaaaaagaaaaagaaaaaagtgctggtggtgattataatcttctaattattatttgtataattaaatattaaattttatataatttaaaataataatttttaaaaaataatactaactatttgtaaaataacacaatattaatttatagtgaggagagtaactagcaagataatataattataggacaagactatggtaggacctagcaaaagttccctaccgataaggaactttttttaactattaattttagatcatgtggttattatgatgtaaggtgtatactcttacgataggactgcttgtatacaattaaaactttatacatattat

SEQ ID NO: 391908 - DNA, 730 bp, Cannabis indica
ctcatctgacggctgtcgtacatggattacaatacgtgaaagtacaataatagaacaaaatcttattcctatattattattagtataattaaatattaaattttatataatttaatttaataatttgtaaaaaatattataagattttatctataagtagtgttctaacaatagttttttattttatctatgaagtaattagtaagttattctcaaattttgatatgcatcgaaaagtgatcttaaactttgtaaaattaaacataattgagtttaaatctaacaatctaaataaataaaaaaaaatctaatttgctttcttttttgtcaatcaagaaattactaacttaattttttttttcttttataataccaactatgtatacaaaattaatttataattaaaaatgacatccaactattatagttgtttcttttttcttaaatttatttgattatacggttgttggcttcataatttgagtaggtcaaagtctgactattgcttgctttgtgtttaagatagattaacaactctcttttccttttccttcccttaagtataaaacaacaaaacttttttttctttcttcctttcatacaaaacaaacaaaacttttattattattattattattattattattattattattattattattattattattattattgtaatattaatattgttttttcttctatatactaattattgtagtggcac

SEQ ID NO: 391909 - DNA, 659 bp, Cannabis indica
aaaactctccaggcttgtttggctagcatggcttggttaaaactaacacgtaacaaaaaacctaaaccccaaaaaaaattttgaactacaaagaaatgactaaagtaactcatcagagcatatcacattcattgtttagttctcaaggcaaaagagagtctatctatacatggtagtgataataacaaaaactcaaaagtctaaacttagagcaaaattcaacaagctttcctctaaaaagttgcaaaatccactagcaattaatcccacatttagcaaatagaaaatttttctaagattccctacaaaactcatgtgcaagtgtactccactgagcatgacaacttgctaagatttcctaaattttttaactttaatataaaatctacttattcttgatcaactaacccaccaccaaccatgattagcaaataaaatgagtcattatcatatggaaactcaatcttccataaatcttacaaaaatattctctaacagaaaaccctagaaatctaaagtaagagaatgcgagagtaacaattactgtattcaggaggtggattatctactgttgaccgagattttcggcaactgttaaaatatgattataataaagagctgtgagaaagtgagacgaaggttttttacgtggttggggc

SEQ ID NO: 391910 - DNA, 733 bp, Cannabis indica
ttttttttacttttttatttgttaatttatagaaattgtgatgtaatatgatttcttcaaagatatagtctccatttatttaggtatagatagtgcattgttaacaagaccaataataattgttattaattgcttcatatcaagttttaagatatgcaaagccaaacttttattattgtttgttatttaaagattgtcttccatatcaactttaatttttattttatataatattgaaattaataaatatatatatatgaccattgtaagtcaataataaattaatggttacacattttggtacatattttttatcttgttttttttagaaaaatagaaacaaattaaataataattcattgtatgatgatatattatacaaagagtaaaatcaacaaatcatgagatttaaagaaataggaatgaaaactcattgaatcatcacagaagtacgaacatctttcaataaaaatttagtaataataattttattattcgatatagaacaaaaaatttacaatttagcccattttttcttttataaattttcaaagattgctactaaaaatttacaatacggaaaaataaagttcaaaaattttgttttgaattttttaaaaattttataagtgatcttaaataattttaatggacttgatttcttaaattaattaattataggctaattatgattttttctttccgaactttgacatgtaccaaatcatgctac

SEQ ID NO: 391911 - DNA, 1059 bp, Cannabis indica
ttaggaaaaattcaaaccgtaactgcacggtaaagaatttcgaactgtatattttttgcactgtagtgcggtgcgagcagtttgtgcggtttgaataatttgatgaacaccggtgtttattttcaccattaaatcatcatttacgattaaaaacagcctaaacatatttttttatatattttttgaattattttattttcatattataatttagtttcactaataatggataacctagtttgtatccaagctaatgagaataatttgcacatgccttcagaatttgatttgttagtttatgactacaagttttttgaataatcttagtaatatttttttatattttgttgaaccatatgcaaataaagttatttattggttggcccctaattcttatttctctaaaggatatatttttaaaggttacaaagctataaactgtcatatcactttctccatcaaccattacaacaattatttgagtgaataaatcattagtaacaataatgagtcaaattaagttaagttatggtaactactaggtaactcaatacacgattgttagtaacctattatatatgttcttttaaaaattaaatatatttttaaaaatatatgtaactgatcagtacataatataattttaacagtaacttttagttgaataattaatattatacccaaatttcctcacaacacaaatcacaaattattaagtacactaccatttgtttctactttctagatagtgaaaagttgaatagtagtccatatataaaaattaatgttactctcacaatatgtatattctaatattgaagcttaggtaagtaattgttatggctactactttctggttaaaatatgatcatttatatatataaatatataaaatagatattaagtttttggaatggttggtgactatctacatttctagtatagtacatattcaatagataaacatgaaaatgagactttacttaaatatatatacagtggaacctctagctatctaagaatacacttgggactaaataaattatattctaattgaga

SEQ ID NO: 391912 - DNA, 1389 bp, Cannabis indica
ttttttgcctagtgttctttcttcttcgtcttctttctatagaggtgtttctcggaggtttgagttgctcattggctctggattagatcctcagtagtgttaatcctcttactgtgttattttatttgctatatattttgttttattttatgttttcttttatttttaataagatgttgctataccaccttgttattgttatatggtagtatgcaagactttatttattgatggcagtgaatttaagtctaattttttttgggacattgaggaaatttcaattggctcaaagcatatttgtgctagtagcatgactaaccttggtcgtgttcaggtctaggggattctcaaatttttattggccccgtgatttattggacgcttgtttgctacgattgttattactgtggttggtttccttctatactaaatttaatagtaggcctggttgttattatccaaatttttattagaagatctttgcctgatagtcattgataggtgtgatttatcacatgttcatttggattagaaattgagcattctttgcgcttctttgatgcttcaatgctcgcgactagttgatattttagttaaatgtgctattaggattttcattcttatttttgtaaatgatacgatttgtctatcttgttgattccattctttgagtaatatattctcatataatagactactgtctaattggcatattattgaaatttctatttttctcttaataaataaatagatattttttttttgtttaatttataataaaatattaaagtaccatctaaaatatatataaactcaaattatttcctaataaataaataatttttcttgaattgcctaccaatatataattttagcacctaagtattcaatatttttataatttaattaactatttaattttaaattactattatgtaaaatatataatttaacgtacgtacattgcacagatgtatattatacaatttttacgagtatcaaaaaagaaatgttaaataacactaatggtacctagcaccatttaaaggtgatatatcaatatttgtgtaattaggtatcatgtcccacataatttaatttgagagtaattttttgctaaaccctcctaactatcatttcacttgtacttaactctccaacctcaaattttggtggtaaaaccttccaaactgctaaatcgttaatttaagagtcttcttcttcctttccaaatttgagaagttcaaatctcattctgtaacgtccccgcttcaagcttccattgggtccttgtacccactgaataatgactcttatacacgactacgccactctggttgcttcctggattgatgactgaccccgcagaccaacgcgagtgtttccagc

SEQ ID NO: 391913 - DNA, 837 bp, Cannabis indica
aaaaaatagaaaaagaaaagaaattataaattaagctataaaatatagaataatgtaatagttttaaaaatggcacgaagctacgttaacgaaactagtgatttcaccttgagttggctatgaatcttggaaaaattcctcttggggccaactttttttacatctcttcctcggactctaaaagtccttgagaggatcctcatgagagatacgctaggttactatttgagaggggcaaccatttagggtgcattattaaccttcgggttggttatcgtctttcgcactatgattgagtacttgacttgttatgtttgggcatggcactctatcactaaggctcgaataggtgaagaacaataaaagaggctcgaaatcactatagatggtgtctttcatctactagttgtcagagaatgaaaactaggtttaagttggttgaattcaattgttagatgagatgagagcttcatgttcctttttttatagtatttcaactagggtttaggatttaattatatggattaaaaaagaataaaataatgagcaaattacacactagtggtcggccacttaatgggcctcactagttacaattttgtcactttatttcaactacttaatcttctttcaataataccatattttccaatttcaatcatataaatgtcaaaactatttatttaataattataattaattatcaaataaaattaccatttatattatttattaattagaccatacaaagtctcttaattaacaaataaaccccaaaacttactttcttcacaattatcccttgtttagtaaaaaatcataaataagacatagtct

SEQ ID NO: 391914 - DNA, 1490 bp, Cannabis indica
aaaaacaaaaaaaaaaagaactacttacacaaatgaattattattctaatggggaagaaatacattataacaatgaggaatgaggacttactgtaataaaagttaaattaacttcattacccatatgttaacaagagtatctataatggtagataaatgcaaaaatattcataaaaaaagtatcggaaaggttttcatttatctcaatcttagggagtacaacttttttgttgatccccaaggaaaaatatatacatagcatttggcatagtttgccatattgcaaaattgtaacaatcattattgttaaaaaaagtcaacaataatatataatcagtgtgtaataatgcaaatcattaggcatttaatcttgaaatgagatcaatgaatgtatcttctgggcatggaatggtaagagctcccattggatgatcgaatccgaattcttcttcagcttgacttagcaactcttggaatgatggctggtttaaaattgataaagggatcacaaatctcttcattttgttttctccaacataaacagccaaatacccttttggaacaatcttttgaacttgaaaagggtctttgaatagcatgaactatgcttggaaatctaaatcccattcttgtatttgtgtctctaaagaaataggaagaaatgagataattaatgtcaaaggttttgcaaggaaattaagttgaatagttgagagaatgtgaaaagttgagatgataatgaacccaatctcatgtgtatatatatgtagatgtggggtgtattgaaaggaatagtcttttacaaatcacatggtgttgccatcctactcatcaatgcttgtgttctatgttctcatagctgtgtgggcaaaggccttcatatctatccagcttgttgaaaaagaaagcagagtaataccaagtccattagtctttttctgattggccaaataaaatactaaaaaagagtacagatgttagttgcaggatgtactatagcttagcttcactagaatcacagaacatgcagatgagtgttgaggtacatttttattcattatttctgctgttatgattgaagaactctctatctaataatgcattcatatttcatctatttttagacacaaaatttgggctataaaatctccaagacgtgtattgtatatttagaatagagtaatttgtggcgtaaatagttaagtttaattctcagttgcaaataaatattaagtttaatttttagagataataatacatatgttataatcttttgtagtacttagctgttaagttaaataaattgtcacgtgacaattcttgattagtccaagttattaaaatttttatttaaaaaaaaaataatttaaatataccaatatgaaaatgacatgtggataatgatttaatatttaacagtcaggtacctataaaatttcaaaagggtaaataccattttagaaccctgtattttgcaaaagttacagatt

SEQ ID NO: 391915 - DNA, 640 bp, Cannabis indica
ggttgccaaagagaagccatcatgtgacgcataacatcatagtcaatggctcttgctgtaagaaaccttccaacaatacataattccacattagcaatttcagttgcagattcttcaaagtcgaaagtgttgccataatcatcctcaccttcaatctcaatattagcatagagatcttctaattccttcactgaataactactagacgccatacttttagagacaagatcaaacactaggaattctagagaaacattctcaccatgtcagaagacaagactcctataataggtaatattagagattaatagtgtcttttagcttacgtggttgattttttattgtttttacatcaattatttttttaggttaaggttcaataaaaattctatttattttataaataattttatatactttcaaatccaaatgtttttatgcatcttatattaaataaataaaaaaaaactaaaaaaaaaatatgtgaaatattctactagtaattataatattaatgaatatgtccattatgttgtttattttttccttttattttttgtaaaggaaaaatagtatttaataaaaatatagtaaaaaaatgaaaggtctattactttttttgaatattttataattataa

SEQ ID NO: 391916 - DNA, 1047 bp, Cannabis indica
taaattcaacaaaaatgaaagtagtattttttgtgttattcaaaattgtgtttcataactgtttcttatttttttaattttaaaaataaaaacgaaaacatgttttgaaaatttccttttttatgttattatcaattatttatttaagcaaagaatagaaaaattaaggagagagaaaatagatcgagatttggcatcagagtttcgagagccagggtcgaggtccaaggactaggtgcgggtgtaagttccagggttttaggagctaggggtggaattcaggtttagttctgatctatgtaaggattgggtatgggttagttttctaagttcaagtctagtttcaggtccggggttgagagtcgaggttggggtctaggttgggccatggtagggaattggtgtccgagatctgggtttgaaggcgaggtccaagattggaatcgaactagagatttaaaatattaataaaaaaaaatataaattgactatgattaacaaaaatatttaaagaagtactggaagtattttttaaattttttaatattttgattccaattttaaaaattaaaaattaaaaattattttatagaacatacttttttaaaatatttttacttttttaattaaaaaataaaatactcattaaaaaagtgttagaaaatatgtcatacgtttctatctccttttaattaataattaaatgaatttgtgatcataacggtataatagtaactatattaaaatatagtttgaaagattatacttgtcactcaattaaaaaaaaatgtctccttatcaatttcatttattgttttttatcttatttattaagtgttagtgttgggagcatttttcactccacttatcaatgaactcattcttttctttcatggactactttgaaatagtttattgagaaaattacactttatacccttttgatattgttctcttttatttttatcttcttttttaaaatctattatttttaccttctttttttaaactattgtaacaattttgtccctgtcacttcaagatact

SEQ ID NO: 391917 - DNA, 722 bp, Cannabis indica
atgtgtgcaatttacaacataatttttgtgtgtgtattttagcgatttacattatattttgagcaacattgtgcgatatatgtgcgatttaacctaacattgtacatgaggatttttttttttttttgtcgatttatgttatattttgtgtgacaatatgcgacattgtgcgttttacaacataacatttgcatgcatatttttagcaatttacattatattttgagcgacattgtgcgatatatttacaatttaatataacattgtgcatgagttatatttacgatttattttatattttgtgtgacatgtgtgcgatttatcctaacatttgcatgcaagtttttgtgcaatattgggcgacattaattcaatttatattttcttgctgatggttattcttcaaattttgtaccctcaaaatcgggaggtcgaatattggaagtccaattatgagggtgatgtccccacgatagatatgggcttgaatgaggtagaaaaaacacaagttggtacacaagattccactgtatttcaaacccaagcaaaacgggtagccgaatatgttcaaagtgccaaaatcattccaccatcaccaccaaaagaagcaacatagccctccacatctgacactgtgcccccaacctcaactcctgtagccaatgacacccactacctattggaatttattttaccaggaacttagatctactcacaagtat

SEQ ID NO: 391918 - DNA, 1528 bp, Cannabis indica
gtcttacttatccatgactttgatcatgtgtccatccatcccgaactacaagctcactctttccgcttggttgtcaagatactctcccctaaaaccctcaaagctgactggatccacaaagtcatgaaagatgcatggattgtccgatgccctttctctatatctgagtaccactctggtatgttactggttcgatttggttgtgagggtgaccgcagaagggtgatggagggccaaccttggcattttgatccctcactcatgattttcgccatcccagatggttttgataccatacttcccaaccaacttcgtttcattcctctatgggtccaagtccatcttgttccttttggctctcgctcttatagccttgcccaatttgttgtcgatactattggtgatcttattgaggtgcaccttgcctctctctatgatgctattaccccatttatgtgtgttcgtgttttgcttgacacaaccaaacctcttcatcgtggcatgaatgtccacttccgaaagctatctatcaccaaatggcttaaacttctctatgaaggtatccagaactattgttatcactacggtaagctcgatcacactttcaacaagtgtgagaaatttcttcaccactctgataatcatccttttcccctcagccttagctacaaagatgctcttcgagccccagccaagtccgtgtacaaaaaagcatttttgagttgtccacttccatcccttttgaggaacaaccaactctatcaaatgctgtgaactctaatattcaggaggttgttgatcacttccttgtccccagtattgccaacactaccctcacttccatattccctactgttcaggccactatagttgcccccccccccaaacttctcttagacctactactgttagcgttacccaacataaccccatcccttcaaccatcaattgcccactcccctctcgtcctctcattacccccactgtcataacctcatcatccaaaggaaaagctccaatgtaccctgaaccccccaggaacctttcacttaaccctcaaccacctcaacctcgtagtcctatagctacttctaccaccaagaaatggtcctatacccgccacaactgtcaagtgggctcttctgttcgtagtatgctgaaacgtgcgcgtgcctctaactctgactttgctattgttccttccatgtctaacaatgatgaaccttaaaaaatgagtcttcttagtcggaattcttgtggattagggagttcccaagcattccataacttctccctcctttgcaagcaacaccaacctcagatattttttgttatggaaactaaacttgctgctcactctacttttgtttctaaagctaagatgtattttgctaatgttctagaggttcctaggaatggtttaggaggaagtctgtttcttttttggaaggatgatgtccatgttaatattttgtcttactcccttcatcacatagactgtaatgttactataaataataatattttt

SEQ ID NO: 391919 - DNA, 1318 bp, Cannabis indica
tttctagttgaatttttattctattatttgaagttgtaaaaggcatgttttgtttaatgatgctcttgaatgcatgtatgtgggaatttgttaaatggtgtttgtgtgtatgcatgattgtgttggtaaaatagtggatattgctcttggtatgctttggatgagattttaaagatttgattttgtgcatgaatctgattttggttagtgttgttttcaagcttgaggttttggttttggtgttcaagcttttgatgagggaaattatgttgattttagctcaagtttacagcttaccttgattgttgttgagtttaatctatgatgcatattttgttgttgattaagcttgaattggtgcttttaattccctactgtgatgtctttaatttgtggaatatgaatttggagtttgagcatgttttggttgtgtttgttgtgcaattgggcttgattttgtgtagctgaaaagtggattttttgggtttggaacccaagtgtcacggccccctctttgagcgttgcggcctgccccttgaaaatcctaggttttcaaccaaggtgtcgtggctcgctttgggagtgtcgcggcccacctattgttttctgggcagttttgaatgctaggtttgattgttcataactttttgatccggactccatttcgggtgttccatatatcgttggaaagattatttcgagctctacatttttatctatatttggatgccaattttatgattatgcgaaaattgatttaggaattaatcctatttttaaatctcggaaattgtgactaggattatcggcacttgatcaggagcacctggggatttggaatctccacgtactcgggatatcaggtatgatagtagttagcacgtacagttaagcgcggtggcgctcatgtttgatactatatttttgattaattgagcaccgagattagagttattaccctaaaatgagcggtcatgtggtctaaagttattaccctagtaattatatgattctaaatgcgatggatatatatgtttaaataaagaattatgtgctcaaggaataatttggttggattcggtaattagaaccaagataaactgttctaaggccttacagtaattagacgtgtgagcgtacacgttggtctatgccacatagacataaataggcgtgtggccgtaacacgcaggtttatgtcaaatagacgataaatgtaatagcgttaatttatatgtgatattttttactacatttatggatattaatactgttttgctgggcttggctcacgggtgctctactgtgcaggaaaggg

SEQ ID NO: 391920 - DNA, 1077 bp, Cannabis indica
ttttaatatataaaaaacattaagaataaaaattctatttactagacaagtcatatatgtaacctatgtctatataactatagtatattcaactctcatctctttaattttagattttaataattaaaaaaacatgcaaaaatagtgattagttattcacaagtattaagcctaaataatatagattgaaataaagaggaagaatcaaaagagcttcatagcaaaacaaaatagaaaattataataagaaaattagtgtataaaaattatattcataatcattacattcataattaaaaataagaacataaacgaaattaaagaaaaagaaaagttgctaactaagagttttcgagtctaaatctctaaaaaacatattaaaaatacaaaaataatatgtttatataggctaaaaaagctttttaaaaaaatactaaaagttataaattttaaactaaaaaaaacaacacacactcatgagccacaacttagggtatcggagccccacgactccacttgccaaatgcatcttttttccataatctttttatttatttgtttcaaaatttcctctcgaagtcatggctccctatagtggagccgcagccctgggtatttcttgctcattcatatcttctcgagtaatggctctgactggttagttttctaaatttttgatttcttgcttccattctttctcttgaacaccaccaaacttactaagacgcaagataactctattttagcccgttttccataaatttagcttttttctctatttttttttatatatttttatcatatttttttgaaataaacaaaaaaaactataaaactgacccaaattgacataaaagattcaaaaacatgttctaaagtaccctaataaacgagtataactaaacctaatttgacctactaaaacatgatctatgtataacaagtatatactcgacccaaacatgacctgtttaataatctatatataatataaaggaaagcacaacaagagtctatgtgtcattttattaaatttttttttccttattttttctaatttctaacacattttcttat

SEQ ID NO: 391921 - DNA, 923 bp, Cannabis indica
cacaacttgataagaaacaacagttcctaacaagactatgaactactttatttgtagatcgtttaataaaacataaaacaatatgattgcaagataataaaaagtcacaaacatcgtggactaacagaccaaattgagatgacaaagagatgctacttttaatacctcgaacacacaccaaattattagtttccaaaataacatgttgccaagaatgtcttgcaatccaactcaaagcctcctcaatattgattatttctgcaatttcaggttggactcgtcctaatttacccaaagtgtaagccttggctatcccgagccacacaactaacagcaaaacgaccctcttgctcaaacaaagctccatctacattaatcttgatgtgatttgtcataagggtaatttaatgctcagtccgtttttcaccatccaaaagatgagaaagagaaaaacctcttctttcttcagcatatttaaattgatcaaggcatgatcttagcaacaatatttgcagcattacaggttttattttgccagacgatatcgttcctggcttttcaaattgcccatgctaccatggctaactcttctagttcccttatttttctctgtgcgacagcaccagaagtcagctataaaaattactgttgtgaaaattaatatatgcaagtatacgcagttacacaagtaataaagtgataagtaagattgtctccaagaattgcaaacaaaatacgatgtaaaaccaactaattacaacttaaaagcaaaaagaaaaatatgagaatggttgagcaatgattcaaaattaaaatgactgtaattaaacttgctaaaattaatgctactattgctagaaaattgttcgcaagaaatgtaatatattaaaaagtgacttgaataactaattcccctagtcagg

SEQ ID NO: 391922 - DNA, 783 bp, Cannabis indica
aaaatgcaaaaaaaaaaaattaaaggagctaagatcttccaagtcacatataacaagtaaccgaatgtaccaacttgatcaatgtgttttcgttaccttccatagcccaaaaaaacaagtacgactctaggttatcagcaaaatttgatctgttacaaaagttctttctttactttttggctactgctgcatatatgagggtttgtgtgagcttatatttagctagaactgataagtgatataactactaaaaaaatataaaagaaatccttaacagaaaatgggtcaaaatattttcagaacaaaatcatcaagaacaaaatgttataaatatatataaattaaaatataaatatatatatatacattacctttgagagggggctggaggagcggagggagcagacgtagcaggaggagctcaaacaccgaatgggatggcggccaagctccgttcaaacaacaatgaacggagctcgaaaccacgcacagagagagcagagtgagatatcgcaagaaagggagagggagtgtgggcagacgaaccaagagaaagagagagggatgcgagaaagagagaaggagggtgggaagaggacttaaaaagggcagacgaacctcgcatgaaattccatcgggttttctgcggttgaagaagctcatagctggatcgaggtggaagagggaaaatgatgaaattagggtttctttacccaaattaatgtaatgagcttttgccaattggtactgaaaaaaaaataaaaaaaaataaatagtgtttaa

SEQ ID NO: 391923 - DNA, 501 bp, Cannabis indica
gaaaatataacaaatcaagtttaagtacttttttttttttatataggggaagttaaaagtgtaccattaatttacctacactttttgtaattttctttttgtttataaaagttttcattgtaatttaatgtaatccaaataaatcatgagaatattaatttaatttaatcaatttactgtatagtaattaattaattaattaattaattaagaagagaagacctggagctcagtggtgacggggtactcgtccatgtcaacgtagttcttgttaatggaagacataataagcttatcacactcaggctccatccacgtcgtcacaaacgaagccaaattcagcctaggatttccatccaacataagctcgtcgtttatgatctggtacgctgcctccttcgggatcgagttatcaggcattgtgaacctatttttttttttttaaaaaaaaaaattcacaaatattaattacgatgatccccaaatatatatatttttata

SEQ ID NO: 391924 - DNA, 2377 bp, Cannabis indica
aattgctctttcattaaaatattgatgattgttcatagacatgtctcaagtattcataaggtccagttgcactttttgctcatgaatgtgcctcacatgcagcgtaaatgatggtcctagtagattttgaaccaccatccactatgcaataccatggtgagggcatcttctcaatagatttttaaaccgctcacaagcttcatacagagattcaccatcattctagcaaaagttaatgatttctcccctcagtttagcagctttagaaggatggaagaatttagataaacttttgagccaaatcttgcctagtgacaattgaatttggttgtagataattcaaccaactttttcaccctttcatatgaatggaaaaggcctcattttgatagcatcaccattcacttcattgatttaaaagtgccacaaagctcaagaaaattagccaattgagtgtaaggatcttcagaagtcaatccactaaattggacagtggactgcaccatttgtaagataggtggcttgatctcaaaattgttggcctctactattggtagtttgatactgttttgtacccccgtcaaagtagggagtacatactcacgtaggctccttttagaattagggtgagcttggcctccttgcataactccaggaatcagatcattcccttcattatgtgccatcttctctggtttcttgcttctctcttattctttctattttgcttgcaggatttctcaatctcaggattcaaagaaacaaggctctttgcacctcttctactgggcatataatagattcaccatagataggaaaagtctcaaccaaacatgttagaaacaagagaaaacaataatcaaattagaatgaaaattaattaaactaatattaataaattcaatccccaacaacgatgccaaaaacttatttggtaaaattgatatgcaagtatacgtaatcgaatcaagtaatataatgttaactaaagtatcgttcccatgaggattgatcatcaattacctatcactatcattatataggcctagggtttgttagtgatcccccacatgtcagggtgtcgaactttcaaatctcataagttattctaaataatgaataaaaataggaataaataaatatccatgaaaaatatcctttattcctaggcaaatatcccacaaacattgggattgttgttgaagttggttatttcccttgtcttaaatctttcttgtgtggcgttgcgctttgaaaatgcaaacattggagaggagtgacaagggatgtcacctctcagctagaaatacacaaaattggagaggagtgacaaggaatgtcacctcttagctaggaattcacaaaattagagagaagtattttgggacggcacttcttggtcgtgatgccacatgggttgtggcatagctctccaaacaccccattgtagctctcacttaataaccccaactaatttccgagtaaagtgtgtcagtctatcttgtgagccaattttgagtccaataacttcataattgagctatgactatgagacacacttaaatccttcttgaaaatatatttccaattcgagttgaaccaagtcattttgatcaaaattgagagagttatgcctattttactgaaaggaattatgtactttttagctccaaatccaaccgtgccacgtccaagtggcggttcttggccgtgcatgtttctagacaactcagggtgtcttttgacttgttttttttttacgatgaatcatatcttgggagtctcggaaccccaaaacctcatttcaatgtccgaaaccctaacaagataccactgccatcagttggtgccaaaagatggcagtggtcgcacaaggcttatgggaagcctttttttttttttttgtttattagtcatatggatgctagaaaaatactttagccacattggttcttggccaattggtagaagagagcactgccatcttttgggacaccaagatagcagtggtcgcctataggggttgtacatcctttggtgacttttctcacttgtatttgatagttttatattggaaatatgctttggccaaagaaattcctcaccatttgttgtagtcgaccactgccactctttggaccacaaagatggcagtggttggccaagtggtttctacaccacttggtggccttcctcacttggttttgacatgtatatgatgaaaaattacttttggcaaataatctccttcccatttagtgtggcctctgccactcatttgtgcacaaagatggcataggttagctagggtaatttcttggtgagaaatagtttctttcacttgtgttgcactcatgcgtgttgagggaacatattt

SEQ ID NO: 391925 - DNA, 800 bp, Cannabis indica
agatatgacccagattcttgagcaagtcgtaactccaccagtttctcgaaccggcctgagaatcaaagaaagaagtgaaagcgtccatagttattatcaaagaaatataccgaagagaattttcataacaaattgcagacaaggaaagtcgataattcttttttcttgttgaataaatcgtatagataagaaagaagagaatattcaaatacgaaccagtgaaaaaatcaaaagtatgctcgatgtgtgtacagatatatatttcgtgacttaccaccatcaacagagagaccaccggagacgggaggaggagaagagaaatgccactgtaggcgactgggagatcgagttaggttactgagaattagggcttccttttaaaattagaattttgtttttgcaaacagggcaaaaaattagcgtatcgggtaagggtttggttttgcttaacaaaagggcgcaatttcaacgaggatggaggagcttcgaagaggacggaggagtcgcctctttcgccagagaaaattcgaagagatggttgagtgtgaggtcgtgaacagtaggcacttgattaggttttatagattttacttttttttgcgtcggttactatgtctcactattgtattttgcctcatttttaaaacctcgctaacacgcaaaataaaaagtaaattttaaaattttttgctttattctcgtttgtttattttttagcgtcatttaataaaagacgcaaattacatattattagtgtcatttttaaagagacgggctaattatttcagtactattcacgt

SEQ ID NO: 391926 - DNA, 757 bp, Cannabis indica
aaaagaaaaaagaaaaagggaaactaaaatagagaataataggaaagtgggggtgtttgggaagtgagaaagtgatggaaaggaaaatgagagagaaaaaattggagaggaaagaagggcgtaactttgaaaggggggaagccaaagaagaaggtggggtggcatcgcaatataggaagagagcgacagcaacactataaccgaattattattatttaaaaaaattaaaaataaaaactaaaacaaataattattgtttcttataataatttatgagttatgaccacctctgcttctcgcgcgtgttttccacatttttacatttttttttctttttttaaagtgatgtcagcaactttttttacgcaagtgcatgttcaattgttctaaaccaaaaaaaaaaagggttgttccttgatagtgttcctacagccacttcttatattataattttagtcaagtagccctaaattggacaatatttgttttgtttcgtttttttggtttttaaattctttgttattaaattttttaaataaacaattttttttggttggatttaagtgacttaaattaaatttaataaattgaaaataactctacgtgctagtcaactatataggcggtaacgatgtcattgtaaaaattgaagattattgacacattatatgattttgtgctactgggaaatttgattttctatgcttagaaaatcaaaaaatttgacttttaaaccaaaaatttaaaacctaaaaaa

SEQ ID NO: 391927 - DNA, 1042 bp, Cannabis indica
tttttttttttttttttatgagtgctaattggaatctgatattacaattttttaatcaatctttactttcgaaatcatgaaatattattttttaatttttttatgatgatattcgttatagttataatatcattctcgaaatttttaaatttttttaaataacttacaataccaaatataaaattcatgacattatagtctatcacacgtgttaaaaaaacttcaaaattatttcggcattgtaagttattaattttttttttaaaattataattaacaccaacatgaaaaaaaattaaaaaaatactccaacatataattttaggtacaaaaattgattaagagattataatatgaggctaacagtaacacttctctttttttttatatattcttagaaattatacataaagcattgataaatcttatcatatagagttatttatgatacttccaaacattttattcgcttcacactgagattcactttaccatgtgcaagtgaatcaattacctctcgaactaaaaagatgcaacaaagtcatctataggtcaagaggttcatcgctaagttatggcccctacattgctagtcagatagagcactagtgtagtggggatcaacttagcttctttgataaaaaaaatacaaatttgcgaatgctatttcttttcatgctatctagctacaatgatgatgtaattgaatttaatatctaatgaacaaaatcattgagtaaaccttgttggtacatcattgttattaattaattgcaactcacaggcctgacgacactctcaaccgctaaacaaagcttgtaaagttgttcttgaggtaccttcagttatttctttagtgagtaataaacactgccaacccatgaatctctggatgagtggacaagtgctcacacatgtaacaactccctaagatccatgatcaagaaagcccaataggatttggcatggcaaattaccaatgaaggcatctctacaatcactctgggggcaaataagacatagtatgttggaaattatttta

SEQ ID NO: 391928 - DNA, 922 bp, Cannabis indica
cttttgtactttccatgggttaatgcatagattaattataaaaaattgttaggtgatgttaaaataggaaaacttatttttttaatacttttttctgtatatgttatgatatggaataatgtttaaaatttattgatcaatgtaggtatttattttaattatgtgtgattcattaaataattaattaggcttaaattagaataaatagtaaaaaaattgtatttactttttggaaactatcaatatgatgttacaatataattttggtgtatgaaattaattcaagacaaggttgagatattttgttatgattggttaattaagtggtattttatatacaatttaaaataaatttagtacataaatatggataataaattgtacgtgtttctaagtaagttaaatatattttataatctgtataaatgattaggaaatatgatagcagctaattttgataattaaatacacaattatttatttggtctattaggtgtaagtaaattgataattcaaaataaatattaatggcaaggtaataaatttcattctaagtttattagggggttgtttctagcgagattaaatatttagcatgtagttattggatttatttgctattttgtactaaaatagtatttttaaaaatttaatgtaaaaagtatttgtatgagttcatctgagtacatgcaatgtgtttgtgtgaatcaaagtgataaatgattgtgttttgtgtgtcatgcaagtgaaattggtctacgtgctgtgtagtttgacgaaatatttcattgtttaatcttaggctatgcttgaatatttttttaagtgtatttgattaagatcttgtcctcaataaagaaactcgacgagaggttcgagggagagaaaatgatatacttagcaactgaggtaagaagagtgg

SEQ ID NO: 391929 - DNA, 897 bp, Cannabis indica
  modified_base (873)..(873): a, c, t, g, unknown or other
atagctatttaagatatcctataaaattttgaaaaatttggaataatttacaatatagaaaacaatattcaaacagtctattttacacgcgtataaaataaaatagtcacgcgtgcaacacactgtttgaacataattttcagcattttaaacttttctaaatttcttaaaattttgcaggatgtcttaaataactataacgtacatgaccacgagaaaaaatttgactaaaaaattatttcggatgctaaaatagataggggtgcatcaatatatccattttaagggggtgcattgtaaaattttccaaatatatatatcaacccacaacaacccataaaaaattaaaaaaattgacataactttaaaataaaaaaaaattagaaaaactaatatagatttaccgtaataatttacttttaatttttaaaaggaataatgaaaaataaatattggttttttttttattctattactatttaaagaatgaggaatctctacatttaacttttgaaaaatgactagcaattataattaacacatctatacttattattattaatccaatatatataaaaatgtggagtagatatatacaaacttatcgaaagaagacaaaattgcagttctcaatctctttcaagtttcaacttaagtttatgtgccacaacaacatatattgatgtatatatatgggtcatacggctatatgcgccctaatccctatttatgtacaattcaatagtgttgttattattattattgagaaagactaccaccgatacctagtccacactaagaagacgtgtaatgttatctaacaattgtccattgagatattctatcctatattactttttttttttttttttntttttttttttttttgttttaagg

SEQ ID NO: 391930 - DNA, 872 bp, Cannabis indica
taattgtgggattcaatagttaatgaatgtgatactgggcaatttgggagccaaatattttctttgtagaagtgtaccaagcatcttttcttttttttaattttaactaaagatacaagtgttcacgaagagaatgtgagatcatttaagggctaagcatggtcataacgcccatattgacgtgggtgttgggctttgcgcccaggttaacatacaacttggttcgcttatttatgctcttcaaacatagtacgtaattcttcttattttggtcaaaaaaggataggatacctcattctcaatctcaaatgtcatagaagtaccaaaacgagccccggaaagctctccgaagagcacccaaaccctaggatgacatatagcctagtgcattgaattcttattttatgtcttgaaatacatcactgacatcgttaaatttgtaaatgctcgcagattcatagtttaaaaaagtaattttttattattttatttattataataacaaacaatttaatatatatatatatactaataaaaatttacttgctctttttataatttgggagagtcgcaatatgacgtaaaaaatgacttgttaccgttacaacaagaatgattaacaaaattaattggagtaatttacgatgagtagaaaactcatataagaatttattttagggaaattaccccatatactattttttaacttttctaaaaaaaaatttacggtttgagtttctcaggtggtttctatatgggttgctatacggattatgattgtaatataggttgctccgttagttgcaatagatttctatgtggaattccgtaaaaatacaaaaaaaaaaaaatattttgaagtgtaaaaataa

SEQ ID NO: 391931 - DNA, 1348 bp, Cannabis indica
cgaaattcttatattcaaattcttaaaaataacatattctgaactacatggcttgatccttcataaataaggtatgtaggcagctcagttaattaaactactgagttgaattgcaattctaaattcgctccaaaatttttccaaattattctaattatttaatatcatcgtaattggaatcaaaaagtgtttcctttaaataaaatgattgtaattaagagattattcttataatctttgatgagtcgaacttatattagtaaactcttatgctataaatttagcataagtaaaattgtattttgtatttatttttaatactttaaatatgaaagttttgctttaccctaccgaaattgataaccataaagagtaatttatttaaatttcatttagtttttttcagcagatgtttaaaaatgcttgtgtttatcccacatagcttatttgtgagtagctatcaagtcttaaccttatataataatagagttagccataataaaatcaaaaattaaaaaaaaagaatatttaaataataaagatcgttttacttttaatattttagattcatcttaaaaaagaatcaaaaatcaaattaggaaaaaaagaaaggcagattatgttcacacctacctagattaatttaaaataaaaaaagatttccttttttcctacaacttttgagcaacaatgcaataaatatatatcatttaatgttttccttatataattgaaatagaaaactaaaatgataatatcacacacaatatcttaaattttaatttcctaaattaaatttaaatttgagatattatcaaggaagaaataaataattattattctctaaattttggaataaataattaaaataccaactaaataatccttttttaaaaaaagataataaaaggattttaaaactcaaattgtcacaaaaagtggtaaaattctaaagtcatacaaaatgacacaaaattccaaatgagttcatctaaattaattggaatattaaagaggtcattcacctcacaaaatttcaaagaggtccctaacctcataaaaatctaaaaaaaatggtaatattacctcaaaattcaaaagtaaaaaatgacatcccaaaaagaggtcattcaactcttaattatcaaagtgtcataaaatttatattggaactacgtttgacttgatttctataaaaggatatagttgctaagattacgtgcagtccccgatactgtaaaatggtataaaacataaatctcaaaattccatgaaattaaggtcatacacctaggaatttttctaaattttcaaatagtaaatcattaccatagctctgaggccagtt

SEQ ID NO: 391932 - DNA, 2916 bp, Cannabis indica
cccccgggtctagatcaggatcacagtctcgagtccaagtctagttccacttcgggtcccaagacctggtctgggtccaagttcagggtctgggttcggggtcaggtctccgaagcccgagtcccgggtctaggtcccccaactaggtctgggtcctaggtcccggtccaagtctaggacccggtggagcttcaagtcgtagtcagagttcgggttcgggttttaaatctcggtcagggtcaaaatctttgttttgagttccaagttcgagttcagatcttggtgcgggctcggatctcgggtctaggtcccccatccagatctgggtcctaggtcctagttcgggtcctagtcccagttcttatttcgattccgtgttcaggttcaggttcaggtccgggtttgggttggggattgagtcctggttcaagtccagagttgggtctgggtccaagtttggatccctgtctgggtttgggtttgggtataggtctgagtccaagtcttgggtacgggtccaggtttgggtctgggtctcggtccatattcaagtcccacatgttaatctcggtctgggtatgggtccgagtctaggttcaagtcaaggtttgtatctagatccatgtctaggtccgagtctgggtctgggatcgggtccctagttcaggtacgacccgataccggacccagacttataaccagaatcggaccaggactgggactgtaacaggacccaaacctaatcccaaactcagaccagaacccatactgggacttgaactagaccagcacttgtgacctgggacctaaactaagaccgggacctggaccaagaccttaaataggacctagaccaagaccccaaaactgtggccgaacccaggacccaagaaccagactcggacttaggacccgaaacccagagctagactgggactgggacccgaacacgtacctgaaaccaaactgggacctggactcggactggacccggacccgaactcggaccgggacctaggacccgaatatagatgggggaccctgacctaagaattgggccccaaaactaggcctagaacatgggccttagaacttggatcaggatcggggacctgaccctagacccaaacctggacatagcacccccctctggacttgggatctgggactcgatggttggacccgattcattgtcgatgtctagatctagcacttagaccagaacgcgaacccaaactcaaactcaaatcaggacccggacacataccaagacccagacccacaatggggaacaaaaactgaaacttgaactggaaccagaccaagatctttgaacgggactgagacctagacccaggcccgaacccggaaccagagccagcctcgaaccctactcgagaccgaaatgcagacctaaaccttgccccgaacctgtacctcgtgacttgaaactggaaccgaaactaaaagctgattaggacctaggacaaggacaaggacatggacccagacccaaaattgtaaccggaccaggatccacactcggacacaaacccaccctgggattgggtccaaaacttgaatccaaaccctaaccgggactcgaaacctagacctaaactcagactcgaacattgaacatgactcgggaccgacaactgggatcgagacctaaaattggaccccaatctcagtcctggacctagacccagacccagacctgggagatgaactgaaacaagactgggacacgtgattgggatccagatgttttcctgggatcagagaaatggggcttggaaaagacccatagtcgatgtcttgattttggactcggaccaagagccaaagctggatcaggtactggacccaaacccagaccctaaacccaaaaccgaaacttgaactagaatgtcaccaggaccctggaacaggatcaggaccgtgaccaagacattgacctgcaccgcgacccagaactagaacgaaccaagcctcggaactcgaactcggacccactctcggaccctgtcccggaccatgactaggactgagacttgaacccgaactcgggactcgatcccaaacccagaccaagcccttgacctaaattggtattcagacctggacatggacatgaacccagacccggtcccgaataccgacccagacaaagaccgggatcaaaacacgagacttggaccaggacccaaatgcaaacccagacctaaacttgggacctagaccgaggacctaaacctggaccttgattcagacctggacccagatcgagatctgagaaaccagtacccggactcggaataagacttgcaccccaaccccaaccttgacccaaacccggacccaaaaccaaacccagaccataaattagaactaaaactgtgactaggaccaggacctgacaccagaaccgaacccaaaccataacccaaactcagaccacaacttggactaggagtgagacctaagacctaggacctgaaccttgaccgggacctagacctcacctagtcctaaaccctcacttggtcctaagactcgcaaccctaaccaggatccagaccctgacaaggaccccaacctaaacccggacaaagaatgggattgacacctagagctgaactcggaccgagacctggactataactgatgaggacatcaaggaccaagtatcaagtccaattccagtgggtccagtgactagggcacgagctaagagattcaaggaagagcttaacagcctagtacacaaagtcttaaatcaagaagagaccgtggtcaacacgaaaggagaacaaagattggtcatactcatcaaagtggactgaattttgaagcttcattatatgtgtcacgttttatttaattttatgtgtcacgtttttatcatatggt

SEQ ID NO: 391933 - DNA, 990 bp, Cannabis indica
aaaaaacaaataaataaaaataaactccacaaaacaaactcaagataggaatggggaaaaacctttagcaagaggatttctggagaagcttttcaatgagtttgcggtcaataatattgtcatctacggccaacacgtgaggcacgtggtctccattttccattaaagacgccattgaagaagaaccagaagaaaaaccaccactacccatatatatataatatatatatatgtacaccccctttaagaaaagccctaccaagaaattaaatttgtatatatagtaatgataagaagaagaagaagaagaataaactcaacaacacttgacccaccactactctaacgaactctcctctaattattaacaattaataagaaagcaagctaaacacgtaagaggagaaccagaacagaaaaaaagctttatacatatattcataaacgctatataactgttctatatatatataaaaaaaaaagagtggactacagccaaatcgaatttattactaatattactacacaaagctactatatactaaagcacagtaaaacaatagatagaagaaacccaacagaccaaaaaccttttccttttctttaatttttttgggtctgacaacaaaatttaagacacaccctataaaaatgaaaagctcacatgatatgtatgaaccttataatgtggtctgctctgctctgtctttcgtttttatacattaagactagtaagtaagtaaatgcatattaaagaaaaagaaagagagagagagggagagagaaaattgagtaagataataaatatccaactcacagacatttcgtgatctatttttgggtttccctttggatttgattcagtccaattattattatttttattattattgttatgaatattaatattattatttcagccgtatcaaatctctgtctctttgtggaatcaaatatcaaaacaatcaatatatttgtaagtatcagtat

SEQ ID NO: 391934 - DNA, 1257 bp, Cannabis indica
aaaaaaactaattatacatatatagataatatcaacctaatataaatatatatatatatatataaatccacacacaataatatttggcagcctatatataaaatgtaattggaatggattgtaggtatagttaaggtagctatcgttcattttccagtacaatagatctgatgtgagcacgtgtgcatgtcttgagctggcaatggtaatgacatatatattgcaccataccacttttagttttacaccatactatactttattattttggcttccatcggaatgacatgatgagggccctatctatctatctatctaacttcattttgagtcttgagttgtgtcaaaaggataaacctagctactatatatctgtcaaaagggttcgtgtagcgtattgtggacaatataatttatgaaagaatttgaactttgaactgcatgtgtcaaatttaattacaagaaccattgctcttgtgcatgtataaccctgctcaatattcctaaggaatggattggaccaagcccaaaaggtcagactaaagcgagccgcaagggaatgactaaaacaacatcacaaatagaagccaataatctaagagaatcacaaggggcacattccacaaaaaaaagcccaaaagtaacatcatgatagtcaggatgataaaacactattattacaatagagataaaacgacaaacaaaaaaagaaacacaacccaaacaacatttaaaaccaacaccttcacaacaaaacgaacaagacatacacaacaccacatatggattctatccgagaaaggatacagtaccacattgtttgggagaccaacgagaggcccatagtgttaaaaatatagaaaaggtccaataaacgaatacaaataaagtggaaaatttaaaaactgtttttagaatcaatattttagcaccataccatgacattaacccatccgggtctaggttcgggtatggtttcgggtctaagatctgagtatgtgagcaaaatataaaatataatatgttatacaaaaaaaattgtttttaaaaattgaaaacagcattttgatgttttctgttttctagttttttaaaactcaatttttaaaaaacaggttttaaaaatttttgccaaacgactcctaatagtttttaaaaactgttttcagttttaaaaaacagaaaacaatttttaaactgtaaagccaaacagcctctaacttttactatttttttacaaaaatactgccaggcagt

SEQ ID NO: 391935 - DNA, 898 bp, Cannabis indica
gaacctcaaaacaaacttacaaagtataaaattaatattaaattctcgaatctcatcatgatgtatgtttgtcaaagccgaatggtaataacaatctggtaattaatattcacaagggattaagtgtaacatctccattgaatttacagtattcgtagagtaaaaaacacattctatcactgatgttcataaatatttaccttctcttttctgaaaataatcttcaattttggttttttattgtatttttcaaaaattcaccggagatcaagaacatcatgcttcatactcggattcattaagacgtgagagcaatgctcgtatattgaagttccatctgttggctcctcatgaggatgaaaaccacgttggtcacagttgcgaattactgacacgccacctgggtccgacaagtggaatatgccatgtggactgcaatggaatggaaaatatgttaggatgataactatatatttatagcaagtgactaaatgatatatatgctttttcaaattctatcagcttgatatcttagaatacttttatttgacaacttcatttgccaacacacaaagtctcagtgttcaccatatcaaacccccacatgttcaagcttctccatctatatttataagaactgttaaattgacctatctttcctctaatacaacagtgtaaaggttgcttattgctacggattagtggcgcaattatactacccttaggtggcgtttggttggaggtaatgaaatgaaattgaatagaaaggaaacaatttttattccatttatttgtttggttatattttgaagtattgcaatgtcattctaatgggatgatttttccatcattttagtaaaatgactattctattttgaaatggaaagaatgatcattc

SEQ ID NO: 391936 - DNA, 573 bp, Cannabis indica
tttttttttttttaatttattggtatgatgatgatgatgatcgaggacacacataatatttgaattttgtttctcattgttcattttatctttgctatatgatttgttagattacatatatatatgtaattaattattttcttatttgtgtaggttttgtttcatatttggttgagtaaaaaacccaatttgtgtaggtgtgtctcgtttctttgtgaagaaaacccaatttggggttatcctccttaagggcttcaagaatatgtggctcgatccttcttgcatccactctgactgagaactaccgccactagtggaggagctctggcgagcatttcaaccagccgtagccgttgttcttagagtttgagtttatttatttggatataaattatttactattcagtgtaattgtttgaattcgataaacgtgtgtaaattaattcttaaaattgtatatactttatattgaaaaatattgtaaacataataatttaaatttatatttatgattgtaatttctttaatttttgtttgtattattattttttttttaaatttatttataatatt

SEQ ID NO: 391937 - DNA, 597 bp, Cannabis indica
atacccccggtcgatgatctaaacatatataactaaatgaaagagtgaagattattcgtatatatacacaaaattctaaccgttttcactaaaaaaaatacatcaaaaaaaaaattatattttcaataaataaaattataaaaatatttaaaattctatacaatcgtatttttataattctttttattatttttgtatatttgtgaaataatctcaataataattttctaaaattaattcactaataaagaagtagggtcctaagtgcccgtttagtacaatttttggaaacacttaaagttgctttttaaaaaaaaaactgtgataaaaatgtgtttgttagacagtcaaaacaactttttgaggaattttttacagaagttatagctaaaagctaaagatgttccaacccaatttttagaaaaactatttttttttttaaggaaaatggtaaactttattagaatgaactttcaaccattacaatagataaaagatcagcaggagcattactctcactgaaaatacgatatgaatacaaacaagagctacgagcaagacagtgtgcagctttgtttacagaacgtttacaaaatt

SEQ ID NO: 391938 - DNA, 1308 bp, Cannabis indica
cacgggtaaagcttctatttccaggttggttaaactgacctgaattgttgctggtttgtgagtttccctttccaaattgctgtctgaaccttttccatgccaggtttgcctccatcaaagagtctgaatcattcgacaccagattaacactgagatctatctctttcttagacttttctattctggattctgaagctaataacaaagcctcgatctctcctaccgtgtattcctcagttcgagtattagtggatatgacaaaggtgtcatattcacttggaagtcccttgaagattgttgctacatgatctctatcgctcaagacttcccctacagatgcaagaaggtccactgtctgcttcactttcaaaagatagtcattgagactcaaatttcccttccttaagctctgcaactttatgcgaaattcaaggatcttcgaagacacttgcagagtgaagtgtttttcgagcgtggaccagatctgttgagctgagttgcaaccaaccatccgagtgagaagactttccgtcatggacgacagtaaccaagaaaccaagagctgatcttggacttcccaatccacaaacgcttgatttactctgttacgatcttcagcagtaagaaattcagctgggggagtatctttgatgtactttagcaatcgattccctttgattgcagcaagaacttgttgcttccataagaggaagttgtgatcattgaggcgaattgaaatactatgattaaagtagacaggatcttgatgagattgagcacgaggctgagcaacttgagatccattcaaaccaggtgtgttgttcgagtttccagcaccaccaagagtagccatattagcattgagcgaagggaagtgctttgataccatgttaaaccttcgagccataccaccattaaaccagaagaaagatcaaataatgaaaatgaacaaaggcagaaaaaaagagaaaggtaggagaagaaagaatgatctcattgatctaaacttctatacaaccatttatacacaaagattcataaggaaaatatctaggacagctggacaaaataacagaatgcaacagaaaggaataaccgaatgaacagactataacaaactgatgcagctgtaatgagctggcaccaactgtcactaactgtcattagagtccttaacatgccataatatataaacacctatttaacttaatcatttaattactattttttgttttcaaaattcaaaaacaaatagtggttatataacatattttatttttaaataaaattttattttattttgtaatt

SEQ ID NO: 391939 - DNA, 1199 bp, Cannabis indica
ttttttttttttttggattttcagtgtttctacgtccttcgttaaatttgtggtttatgtgaaataaaacttcattgttcaatccatatagcacaaaatagtgtggacattaattttcgtttactaattagctaattataatttatcgatattttattatgatgataattaatacatcgattagtcgtatcaacattgatcataattcatgcatggcaatgatgccatatataaataatcaatcatattatttcaatccaatctgctaagggtcatttatggatctagaaagattgcaaatccccatattgcggaattgagaaagtgaaagtgtgaaatgtttattgaatgaattgaagatttacagaacaaagcaaggctatatatatacatgagtctccactaacttacaaatcgactttagtgtaatgcactactaaattaggtacattattgtaattttaaatgtactcctttcctaattaaaagatttattaaaaaacgtgataaataaattaaaacataaatatataaatacatattacataattcgagatcccatttacaaaattacaaccagtttttcaaaaaatataagttgcaaaagttgttgtctagcgattgacaaaataaagcctaactgcttcaaagataaaacactacaggtctaaccgtattgatatgtataacctccatcttgtcccagctcactgttattcatcctttgatttgcctttacctacacatgtaatccatttctatgagtcgacaaactcagtaaaaaaaatataaacataaacatataatcatattaccacatcgtgaccagctccccatacacctaatcacaacctttttttgtgtccaatgcgtactaggtttggaaagttcgtacgactgtacaactgatcataaatatcaacctaaatttggtacactagtcgtaccgatgttatagtgtcaatccatactttgccaaacatatatttgtcattagtcagtgcaacactatgtacactaatattgttcttactgatatcttatctactaagcaatcataaaacatgtacactaaatatgtaagcatgcatatcattatactaattttacctcaatttcgaattaacgtgtgccagtcaacctaagtggaaacttttactcgacgatttaaatgcccctaatgttggaaatttatttta

SEQ ID NO: 391940 - DNA, 676 bp, Cannabis indica
aaaaaaaaaaaaataaagaacaaaggagatgtattattttagaacttctctattttttaaattattttatttgtataaatacgcaatatatatttaaaaatatattatttaaatgatatagaaaagatatagaaaataaatagaagagctaatggatgttgtgccgtaaacgattgatgtaaaatagcaaaagtagagttttggtaatgtataataccatttggccgactacgtgttttgtaaaaattacagattagacctctgttttattaaattatgatttagatcttatatttttcaaaacagtacaagatagaccctaactttatttttcgtatttttttttttaaatataaccaatctaaaaccaatttttatcacgaaaatgccaaaaaaatgtaactattcttattataatacatccaagtcaagttattattaatttttaatttgacgaaaatcaaactcgtagcctattatgtatcattttaaaaaaatatgggtctaaattattatcaaataaaacataaactcccttagctatttgtcccttaatttatgtattaaaaggaaaagtaagggtaaaataaaatagggattttttttttttatttttacactttaaaatagtttttttttttttttgtatttttacgaaattctacataaaaatccc

SEQ ID NO: 391941 - DNA, 1082 bp, Cannabis indica
aatgttgtttttcatgggaatatttttctttttcataaacttaacatggacaacactaactttgatcctttctctaatactgttattcctaatgctatgattcataacactcctatctgtgattatccaacagaacacaatatttctacctctttacctcaggaacatacagaggacgaatcaagggactctgccacatatgttgaaacaaatataccagacaacacactagattccagaacttcaacactagatcctagatcaccaacacttgctgctacttctaatcctccaagaagatcaacccaagtcactaaaactccttcttatctcagagactttgagtgttattcttcaattcagcataactcatccacacctcacaatctttccaattttatttcctattctaatatatctgatccttacgaagcttttatctttgcagttgccaccatgagggaacctcaaacatatcaagaagctgttcaattcgaacaatgggtccatgctatgaaccatgagttaaaggccctcattgggaacaaaacgtggagtgttgtacctttgcctccaaacaaacgcgctattgggtgtcgatgggtatacaaaataaaattcaacagtgatggaagtgtggaaagactaaaagctagacttgttgcgcaaggttacacacaacaagaaggacttgatttttttgacacattctcacctgtagccaaaatggttacacttaaacttcttctagccatatccaccatcaaacaatggcccatcctacaactcgatgttgacaacgcattcttaaacgttgacctcaatgaagaggtttatatgactcttcctaaaggactaacactgccctcttcttctaatgcagataccactctcgtttgcaaattacacaaatcaatttatggtctcaaacagtcctcgagacagtggtacaagaagctttctgatgcattactcgatgaaggtttcaagcaatcgcaggccgactacaccttgttcacaaagggagccaaggacacattcattgccctccttgtttacgttgatgatatcatcatcactgg

SEQ ID NO: 391942 - DNA, 513 bp, Cannabis indica
ctctgaaacacacaattaatgaactcgctttagttattgatgtgtgctcacttcctcttaaagcttaaagtaaggcttttgaaaaattttctgccgaagatatatgatcgcttccttccgaaatgagacttagaaaagtcttctttcgaagacccacactcgttcaaaacttctcttcaatctattctatgaacaacaagaaatcattacaagaaagccaaaacctaattaaacaccttaggtttttacaaagaaaaaacactcttctcacaaaactaagaaacaaaaatatgatatttgaagagataataaacatttggctgctctttacgttctatttataggacatagaaatcctaaagacagctacaaatacgttttcaaagatgtacaagtctttcttaaaaaaaatccccgatatacaacatcaaaatcgaattctactacagcagaatggaaaacttttcaaaaaggaccaagatcacgatttggtctttttttttttttttgttt

SEQ ID NO: 391943 - DNA, 1022 bp, Cannabis indica
agacaaaaaagtgattattaattgactaagcccacacaatagaaaaactatttcagtatgtttttcttcttaaagaaagaatttattaaattaagactgcaaagtcacacagtttacatattaaacagtcacatattagtctggatttctttcatccaacaaaatttactatttaaccaataaccaaaaggtagagatgtttacctctaaatttttattattttcgaatcagaccaatattgtaagttctttaaaattttaaaaccaaaacaagtaactaaatgcttaaaatacatcaaacctatccactttacgcttactaaccagtgttaagaatcagaataaattaatagagaaatgtaacggaataaataaacaataatcgaaaacaatatttgtaatatattatttactataactgtttggaaataaaatgatagtaatttatcctctttgctttatctaaaaatataatcataatgtctaaattgactaaattacatttttaagttaaactttcgtatatgataattattttgcaagacatattttacaggataaattgtcattataaatttaatactaaaaaataaaataaaaataaataaaagtctttcggaaatttatgtgtaatacataagaattaacctccgtaattccaacttcaaaatcacacttaaataaacaaaaattttatcaaaacaaataaatcaataacaaagaaccagcaaacacattaaactagaaaaatataacacagatgaatcttaatggctgtcagacacaataacacaagagatttacactggttccgatcctaagttcattgtgaacttagtcatactccagtttaaaagaattaccacgaatctttatcgataatgagaataagagatatcaatcccaggagctacaaggaaataatcacagcaagtcatccatggtgtaatccctcaacactcattaactcactaacctgagccaacataattaacaatattgctcaatacaatttctcaatc

SEQ ID NO: 391944 - DNA, 871 bp, Cannabis indica
gttccttctattggtaatgcgagaggtattagttctggctttggaaatcgggttctaattttgagtgcatatcttgttcgcggaatcacatttcggggattgtttacttcggacccccctcattcccgtggctcctttcttgtgtttatggccccccttacctgcatgcaaagaaaaagttctggtccaagtttctgaaagttagagataggtttggtgcgccctggcttattttgggtgataccaattttttcctttctgattctgagcgtgaaggctcttccggacgggatcctttcatcccagttatttctaatctgattgagaatagaggtcttatcaatatgcctatccaaggggacaaccttacttgggataatcatcggtcggggaggcaccatgtcaagtctgctctggataaaggcatagtaaatggggcttggattaatctatttccaagggctattctctgttctgcccaaactagcaactcgaaccataggcctctttgccttctctctggaggtgtggaacccagatttaagagatgctttaaattcgaagaaggctggacccgtgatgttcgaagtaaactggtagtagatcatgcttggaaatcggtctaccacgattgggccccggctcacattttcaagaaggttggtgccaccagggtggccctcctcagttggaacagatcccaatacggtaagttggatgtgattataaaagatcttgaactgaagctcaatgctcttcagagcctcctggctgggtctcgggactggaaccaggaatgtgacatccgccgtactctaaatgagacgttagaaagaaaagcgatctactggaagcaaagagcttgagtgtc

SEQ ID NO: 391945 - DNA, 1046 bp, Cannabis indica
catttcttacagaaactgagatttgagatgaactcatctcaagaacagcagaaacaaacgaaacacaaatcagagttgagaaatgaaaaatgagcagcaggagattgagattaccttatctgaagaaggaaatgcacaggttatggaggctgattccgttgaaagtatcagatggaggcctctctgtttgaagaactgagtagagaagagggagagagagaaagagagagaactctttgtgagaaagaccgaaattggcaaatttttcaaagtgaaaaatgggcggtattatagatcaaaattccttctccccctaaaaaatttcacgtgtgttttttctttttttttttttgaaaaaaatattcaagtgttgagtcgggtaataaggacacgtgcttttttttaatattttttttatgttattttttttaaattaaaattattgttttatttatttttttatttggtggtgcgattcaaatttcaaacttgatagtacgagcgggaatgtaagtaggtttataaaacagactgtgcccaagttttcctcagatttcacttgagtttataaaacagatttgaaaattacaataatgcccaaattcaaaataccccaactttatagcttttttgaaacttgacaatactttacaaattgtataaaaaaacaattttttaaaaaaataaaaataaaaaaaaatcattcattagtaatcatatgtggttgatttttaactaatgatagggatgttcgctgtgttggtggtgcagtttttgaccattttttttaaaccaacctgcagaaattgcactgtaaataatggtgcggtacagttttttgcggtttttactatcaccaataaataaactatcacaaatacaacacttgtcaaaaatattagggctttttttcataaatgtacaacaaaaaataaaataattacaaaaaatgtacaaaaaaaaaattattttaaaaaatttatacattttgtaaaacttattacatgaaaccatacattttttaatatgtttattaaacctcaaaa

SEQ ID NO: 391946 - DNA, 1413 bp, Cannabis indica
ctttactactaaaacccaaaaagaaaaaacaactaacttagaatggagagccaagaaaacttggaggatcaagaaaacacacacccttctcagagtatatatatatataatatatatttcttcatatgatgatgatgatgatgatgatgatgatatttttaacattttcatggcaaaaatctttgtaccgtaccataactgataatatgtatattttaggcaactgtattacaccatatcttactctcaaacttttacttttactatttttgaagtaaatttctttttctagtcacaaattttttggatgtattgtacttattctacctttaacctcataataattctcaactagtatttggtatatatatagtacttattattttcattttaataataatatttcaataatttattaattataatcaccacttttttttgtgcagattatcaagacagtgatatgatgattatgttcagaatcctagagacagatcatgatcatcaaatcccatctgggtacaaccgatttggatttggaagtgagattagtgttattaattccattaatttgattacatcgtaatcttaatctggtgctatcctacctgagcttctttctactctttcttcgttcaatctattgttttctttttctttcctcgttttgaatcttcttgaccttgtaagaccttttcttgaccttgtaagaccccgtctcgagttttctttctttctttattctcccataacacgctttatattaacatatgttgatataaagttgtgttatattttctcccgatttccgaccaactcaacttctccttccttgtctatccctcctgagcttttccctaaaacttattaagtagaaaaataggctgtttttcaaagcttatttcattatcccctttgtgcaagaggctgcagactgaagaacttaattagtttatttattttatttattaattcttcttgtagctagatataaggatttttccaacactaaatactatgtaataaatatatataaaattaaagttttataatatatggttggtgttggtccttgagctaagctaatagatttgtattactaattattgagtaatattgtttgacatgaactaaatataaaaataaggatagttgcagtaaattttttttaatatttataattattacatatataattttaattaaaaaataagtagtaaaaatatttattttataattttgttgtatttgtacttttttttagtcattaaatgtcaaattgaaaatacatacaatatattattagaatatgtattaaataaattaaaaaatatattatcatgtgtttttaaagtgatacttaacaataaaaaaagagtataattgtaaaaaaaattataaaataaaatattt

SEQ ID NO: 391947 - DNA, 1455 bp, Cannabis indica
agactttatgtccgccacaccattcccatgaataagttcaattgagcacttgtgtccaaagctaaaattaatgtattgtggaatagacttgatgtatttattatattattcttcaattaattatcaatgtactaatttgaatgtgtaacttttttacggataaagtttgtgtgcccacaagataattatatttttgtggactatgctgagtataaaatgtcaaaatatttgtgtgactggtaggatgatagtaagaaagagtggattgaaaataaagagtcacttgaagaggagagggcgaacaagacaccttcagaaggagtaactcaggaggtgtggagtgattacattgcttattagagcatagagaaagaacatgtacgtaacaaaattattaatctaaataatactttacgttatactcaataatacacaattaatttcaacacaaatatgttagtttcacgcaaggtgagcaaaaaacaaagaaagtttggataacatgaaaattcaaggtggatggggattaaagactattacaacacatattggggatgagaaaaccttttaaatttatttgtaattaataagtatttttttttaaattcacacttaattctacttaaatataggttaatcctgagataggagacattccaactgatgtggatactttttgaaagtttcacacttggcccaatgaatacgcgcaacaagtttatgtaagtttacattaatatttattaatttatgaacatttctttcaatttattttgcatttaactgactatgtaatgttttcaatctgtaggagaaaatagctgagcttgttgaaaattaacaagtgtccactattgattagtctcctcatgaagatataaacctcacccaagtactcacgagacctacttttcatgatgcaggtactgggtgagcagacgcgacatctaagaagttttggccatttaccaagactaaaagtagttggggccagaagagcacatgacacaccttctgctcttggcttgaagactgttactatggaagagtataaggcattacaatgacatgtgtaggaggcacagtaggaaactaagtattcaaaccagcaatatgtaacacaacaactctacctggtgtgattccaagactagtttgagtatctcttgcgggttgtttctagtttcaacttacctattgtggatccacttcaaccattccctgctcttcctggtgctgaatcatcatcatgccatcccccgactcaaaacaacgatgacgatgacattcaccacctgtagaaccatatatattttataattaactttatccaacaatttatctttatcctaggtgcatagtgaatggtgtaaaaattttggtggaggagagggatgataatggaaaaacaaaatagcagtattatggtgcccgatgaagatgaacataattttt

SEQ ID NO: 391948 - DNA, 696 bp, Cannabis indica
atagtggaggaaattgtggaagcctactacaaaaagctctttacttcgatgaagccaagagctgggatcattgactgtgttactgatgtgatacaaacaaaagcgacgaatgaaatgaatgagatgttactggagaaatttatagaagataatgtgaaagtttctgtgaaagatttaaaactgtcgaaggctctgggctcgatggtcttctaggactattttatcacaaatactagagtgtagtcgaagaagatgtaatcaaaaggtgtctgctagtgttaaacagagattttcccatggacaatctaaatgagacgctgatttttcttattgcaaaagtcaaccaaagaagattgaagaatttagacccaccaatatgtgcaacatagcctccaagattattttgaaatgcatggctaatcaattgcgtctcacacttcctgaggtaatttcgaagcccatagtgcttttgtgcacaataggtagatacgtgagcatgtgatcattggctttgaggacctccatactgtgaggaagaatagatttaaaaatggttcaaaagttgccttaaaaaagtaatgctgaaacttgggtatgatgagagatgggtaaggaagattcttaattgtgtatcctttgtgtcgtattcttttcttattaatggtgaggttaaaggaaaaattgttaggttttatg

SEQ ID NO: 391949 - DNA, 1220 bp, Cannabis indica
aggaccctgacccatacccggacccgaactcagggccctgactcgggacccgaacacggacccaaatttggacccagaaccctgactcgggacccggaccctagacccatacccgacccgtggttggtgttggggtcgagtttatttaaaatatattatagctttactcaatcgattaatataagtcaataccaaacatagtattgtattaaataatactaatacaaaattaaaattctttaaaaaagggaggggggggaggggaaataaaaaataagtcgagtcggatcagatcagatccgatccgaataagtcaggtcggatctgcgactacgcgggtatttgatctagcgggatggatcattacatgatctggatcaggtcaaattatagcaggatcagatccgactcgattcacttacacttctatatttcatagtcgtatgtcttcgcttacttcaacacttaggtcgtccttttatatatgctatttttctagttgtcagtctgttgtacacatgtctctattattttatatacagaaatagtctgtctgaacactattttttatactgtaaattattctgaatttctcacaatgtttaagggtgtcttaaataactacaacgtacacgactataaacaaaaaatttcctctaaatagcaaggggtgcatcactgaaatcagtgaagctcccaatatctaatactatatgtgttggaacattttataaatgaattatttataagtgtatataagagaaattgggttggactccaagcatactcacttttgtgaaagagggaggagtcgcagaaatgcatgattgcctccaacctgtgtgcatgcagctatttcaacaccatgttatcatatatttgataagatttctagtaatataatattgtatagttgtgtagaattacaaacatatatgatatatatatatatatatatcttatcttcaaaatctgacaattgagcgtggtagaagaagaagaaaacaaaaatggcaataatgtcctcctggcctaatttatatgatatatatgcatgtatatagaaagaagaagaagaagaaaagaaaaatggcaataaggctcaacagtgggttcaacatgccgattgtgggtctaggtgtttggcgtatggaaggaaaaactatcaaagacctcattatcaactccatcaaccttggctatcgccatcttgattgtgc

SEQ ID NO: 391950 - DNA, 1259 bp, Cannabis indica
agaatagacatgatatgatttcactttactaaattaattatgttgtttatattaataattatattgtacacacaatgtaataagtccctttgaattaatatggtgtagtcaaaatattttagagttgtatgtcagaaatggcagtgttgaattgatggcttgagttctttactaagtgatattagtcttcaaccgaccctagctaggtctagtacaaacaattacatgtgcattgaataataataggtaggattaattaggtttaagttacaaagtttaatttgttaactaaaaaaaaaaaaaaaaaaagttacaaagttaatttaataagtacttagaacctatatgtcaccaaccactaaaccttacatctccatcttaaatatgaaaagagcattgctattcagtacgagtggtgtctagcaccttctcgacatatcgcattgtaattgattagcgatactccataaaagttattatattaaattatatgggacccaatacttaattaaattagtagcgatattaacacataggagggtgttaggcactactagtgcactttaacatttctcatatgaaaaaaaaactcttttatattcatttcaaacttaataatactttgagaaatgctaaaagtatcaatggtgcttagtacttttttatatgtcaatattgctattagtctaattaaatatcgagttttatatagtttaatgtaataacttttagagaatatcgttagtcaatcgcaaaacaacatatgtctagaagtactaggcaccactggtgtacaataacaatgctctactactttaggtggagattgacttataataaggctacatttatggtaacccatgcatagctagtatatatataattggaacatatatatatatatatataatatgtatgtgtctattgtcaaccctaaaaagctatgggctaccataaataccataaaggctttgattaaatattggtaggaaggcaagagctagagagtcaaatttgggtaagctctattattaagtaaggtagatgttttggccattgcattgtgaaattataagaattcaaactatgcatgtgtgactttttttttgttcttcttttcctcaaaagtcaataatattgtaagaaatagcttctagaaagagattgcccaactttaataatgtgaaaatctcctcatgtttgaagagtgttactaatgaatattttttttttgtaaaataattttattaaggaatagc

SEQ ID NO: 391951 - DNA, 837 bp, Cannabis indica
gctctgaaatggacatgaatcgaagaaagggattgttcgggaaaccagtcccagaaccgattaactggttttacaggacttgacaaactagttaactgatttgcaccaggtttccccaaacaatccaaaacctactcaaaccatgtccaaacttcaccaaaacttccagaacacctatattgacctcccacaacatattccaagcaacagagttcaaaaattcacacaaaatcaaaacatgtcattattgagccaagtttgacttcttaaaactcaaactcaaacttgctcaacctaagaattaagcttccaaaccagtaaattcagacctaaaatatctttactaaacatcataaaccaaatacaacacaaacctaacttccacaacaacaaatcaccatttcatagactaaaactcaactttaaaacttgtaaattcatgagataaaggtttctagggttaccttcactttcaacaccttaaattcttgctgaattcaagcaaaacaatagaaatttaaggctgggttcttctagttgtgagggagccgaaccaagagagaaagaaagatgatctttctctattttgttttttcttttacttttcttaattgatgggaaaaagaataattgcttttactaactaataatggccagctgccattcaaagaacaggacacctaatcccatgaggttaattccaaaaatacccttggtgcttaaactaaagccaattaaagcctaggggtaaaatagttaaaaaccataaccccgctcaaactcggtattctatctatttttaatattttcccctctaagaaaaatgttctagactta

SEQ ID NO: 391952 - DNA, 1041 bp, Cannabis indica
gcgaagccctagaaagaaatttcgaaaaaagcaaagcagatagagagagagaatgagagagaaatacctgaaagagagaagtaaaccctaggaaggaaggttgagatagtggccttcggggttcgaggggtgtgtttgggtgagtgtttgctgcaaagcaaagactcagatacacgacgactatgaatttgctcccctttttctcactaaacgctttctttctaccctaaaccaaaaaacaactcaactaattcccaaatcttataacaaacaaactaaatataaaatatgataaaaaatattgcaccatcaaaattaactttaaagaacatttgtactgagttttatttaccgctctaaagacacaagcttgcttgagcactcaattattatgtaaggtaagtaattgtccactaacaatcccttcagtcgcaaataatttattatttttatccactaagagtgatttgacggcgagccatcaaagaacaaaggagaaccaacaacgaaacaaaacaaaaccatgtcatataaacaagactgaaacactcaaaatcatgtcacaagagacaagactaaaatactcaaaatcatatcataaagacaagactaatcgtagtagtaaaaatcttaatcaaaaaaaaaaatcgtagtagtaaaaattgaatcgtcatagcaaacacaacccctagcaagtcgcacctatgcacatggaaggctgggggcttggtcggagtgaaaagacaacctcatgtagctataaatttaagaacgagaaaccctaattttattttttttttaatctaatttcactctaactaatcgatctaatcattttaatttattaagaaaaggattatttattttataatggatctaactaaaaacatatttttttatagtgaaaataattttattttattttttttcaaaaaataaatacttgaaaaatctataagaagacagaatctgtaaatatatatatatataaaatttataattttttttaaaaaaaaatcaaatatcaagtgcattgtataa

SEQ ID NO: 391953 - DNA, 1245 bp, Cannabis indica
tacccctttatagaatagcatttccaaaatgatccagataattaatttatgttttgaatggtatttttatcattttaatatataaaatttaattgatgaagagttttgtactttggaaaaatacatgatgatttgatgaatgtctataatttaaaccaaatgtatcgaaccacgagatcttgattcaaccaggagttatcaaaggtaaggaaaatgttaaatttgttattaaattaacataaaaatgataaaattttaacactaaatattttttttattgtaaaattaaaagttacactaaaataatatttttctttattattatattattttattaaattataaatgaacacaaataatatatatacaaaaaatttaattattataaatatattatttaaatataaaaatttaataagaaaaaatttgatatagttatataattatttgagcacacaattatatatataaaatgtgtgttaattcattatataaatgaatcaaatgtatgtggtctattttagaataaagtttatgagttaatgatatgattatcgtaattttaatgtgtgatagcaaagataacttttgatttaataagggactaaattagaaatggttaaaaataattaattattatttttcagttattaataaatacgcatgggtctctatttttacaccttatcatttactcttgaattgatctgtcaggaggagattacgttttcaaagaaatttttaatgtaaaattggaaaattataccattttaaagttaattttatggatttcagtaagttttggctatatatttattatttcattagaactaggggtgggcatccgatccaatccaactattttttcctcatctgatccaatccaattagtaattggatttggaaaatcatcatccgatccaatccaattagacctcaaaatccaatccaattactaattggattggatcggttttttaattggatatccaattacacacctaaatttcaatattagcttaaaaatataaagaaaaatacgtaaaaaactaagtatcactttttatttaagtttaatacttcataaaaatactattcttacaagtgtattgtagctaaaagttttaaataattaatacaacaacatttctaagtaataaaatagaacaaaatatcatgaaaataaatacactaaacaatcaagtgttacaaattcaacatacaaaaaaaaatctaataaaaata

SEQ ID NO: 391954 - DNA, 534 bp, Cannabis indica
ttttaaaaagacaaattaagagagaagtgaccatttctaatttgcatggtaacattactataagtatcaataataaatataataataatgtaagaaaatgtgaactatttttttcaaaaaaaaaaataatttaatcatgatgaataataaaactggtttttttttttttttttaaatattgaataaaatgtttacattgtattctaaaaaataataaaatgaaatttgatgataagcctaactagtccaaatgagttggaaaccattttagacacatccacatatttgaccaagtggttactattcatttgggagaaaaataaattaaaaagccaaaattgaaggaaatttgtttttatgtttttttatattagatataggtttatatatatacaaatatctttatatatactagtaaaatgttacgtgcgaggcacgtataaaaatgttaagtgtgttttactttatataaaaataatacaataaataatttaagaaaaaatattattagttattgtttgatattattaatat

SEQ ID NO: 391955 - DNA, 1337 bp, Cannabis indica
gatgatcagctcgagtaactgacttcttgttcattcttttattctttgccatggaagagagaaagacaagagcaagagtactcttgttgtaaactttgtttttttataatgttaattatttatgttcttctaaaattttgctaaatatgactactgtaaacaatttcataaaataaattataattatataattaatttacataggtaaatgtaacatttaaataacataaaaataatatacaaataataaaaaaactaaacaacaaaaaaataataagagtagaatataaaaataacatgaaaatattaaaaaattatattttctgtaaataaaatattaaaaattataaaaatatttaaaattttgtacaatggtatttttgtaattatttagttacttttgtgtatttttgaagtaatctaaaaaaaaatctaccttaaataaaactcccgttaaatataagagagtaaggaaaaaaccaaacatatgtaaaatcagttgtatgtataaattaaaagatgttaaaagatatagtatatatgacatgattaaattaatttcaggtggagtgacgacaatgttaccatttctgaggaaattttttccccatctgtactaaggaataaggaaggagaaggaaaagccaccaaaccaaacatatactgtgtgtacgacagtcaagcattgacagcattcacatcttcactttacatagctggcttagctgcatccctagttgcaagccgcctcaccgccaccttgggccgccggaacaccattttattgggtggttgcaccttccttgttggagctgcaattaatggtggtgctgccaatattgctatgctcatattaggccgtatcttgctcggatttggggttggtttcactaaccaagtaagtcaatcaactatactaaactactatgggcaaaacaataatttatagagatgcggtatcagtactagagcttccacttaaatacttttcaaacattaatttaactgaaaacttaaagatatatttatttcaacataattacatattaaatacttaaatagaataaatgcatgaacttagatatttataataataataataataataaaaaaatatatttagtctttttggtctcggagaggtattgatttatgtaaatgtttatgtgaatttcctttttatattatatttaaatatatataatgtatgctcttaatgagtattatccatgtatgagtattttattcttgaccaatgaatcaaatatctaatggttgatatttataatcattaattaaatattaaaaaattaatatttcctattttgttattctct

SEQ ID NO: 391956 - DNA, 1396 bp, Cannabis indica
gtatatgactcaaaagaagaagatccaaaaccatgtgtaagaaaaataatagaggtacccttgtcaaaatattttagaatgcctcagaaggaactatatgaaggcaggacggagcccagggcctatctatctaaatatattcgattgatgcaagtggcaaaagcaagcgatgatgcaaaatgcctctatttttttattaacttcgtcaaaatctgctgaagattggtaaaaaaaatttatctcccgaatccatccgtagctagaatgatttaaactccatgttcgaaaagcaattcatagccacaaaggattatgacatggagatcagttcattgactaatatcaaacaacaactgggagaaagcctcaataattacatccaaaggatgatggatccaatagctatgaagaaggtcaatgataatatgaatttggtggcattaacttcatggatatctactggatccctattataaggagaattacaaataatgaggcttgacaccttgtctgatttcttattcatggcccaaggcttcataaacttagaagaagcttatatccatgcttttggagtgcctctaataccatcaacaactgccagtagttcaacttaagctcctcaattctctgcttcgactattgctccgttcgtaagtgtataacagtgtatggacctgctgtcttaggatagacaactacacataccaatttttctggctttagggtggaacgaatcgaatgtagtgttgcccccaaacaacaagttaacaaacagaagttttggaatcatatgtgagtcattctaggaacaagaggtatggtaagaatcctagctgaagtgaagcttcgaaaaaaggagaagtcatgaatcaagatattctgagtacaccagtttgtcgtaaccatcatcattaggatcatcgtcttgatattcttggtcaccttcttctttgatggggttttcatcaacatacttgtcattatgttgagtataaaaataaaaatagtgaagtggattattatgagtcagatccgaagtcatttgaatggccaaagagcttgatgaaataaaaaaaaaattgacagaacatgaagaattctctcgtcaaatgcgagaaactttagcaagattggaggccaggattgaaccaagaaacgaggctcctgaagaaaatttttgaatgaacctactccaaaaaatgataccacaaataaaggctaatcctacagatcttggaacttttgatcccacaagtgacaaagaaaggtatcatgagaaaacccacaaaaaaaaatgctcaaaattgtccaaggcacaacaagaacacaaccaaccaacctcctacgaaaaaaaaggttgccaatgctccagagccaggctgcctgattgatt

SEQ ID NO: 391957 - DNA, 2082 bp, Cannabis indica
tcactcaatattgatcatattgatacggttcaacttgagtattgaagctatttcaatgttctatgaagtcatgtctaacactccaatcaaaattctgaagttatcaactctaaattttgttctcaagagagttataaatttaaattacaggttacccaaagtgggtcccacgaacgcgattcaagcttcagaaattgacgactgacctctggagtcaatttcaccattagataatcatcaacgatcaaaaatagcctaaatatatatatatatattttatatattttgatgaaatactttattattatattaataggaccttattccctataaaaggacagctccacaagcttatttttttaagtcaaaaaagtactcataaggtcagtgcatttctctctagtttctctctctagaaattagagcgtccaaacttagctatttttttctaattcatctcgtgagaaataaaacatgaagtagacgtagttctattactatcgcgatacggggagtgaactagtactataaattagtgtttctctcttatttatacttaactcttaatacattctcgccaatttgacgagcatctgtggccaaatatctgtgtctaaatttttgtgtcaacataaataatgtatttgtatttttatataaatagtgaagtcatctcactattcaatggacctttttttgcattcagaaataacagttactttgaagaaatatttgtacactttttgagaattatcgtaaaactcacctggtcggaccttgtaatcttgatagttcctcataagtaacacaacaacaaaaaaaaagagtaggtcattaccgttataaggggtcgaacctctataaatattgtgtgtcgtttactatttttatttcatcattaattcctttacaaatatcatcgctttaaagaatcagtattgttgcctaataaaagcgaggtcaacacatacatttaacatgcagtttagatatttgaaagaaatacacaatttacaacttttgaaagttataccattgtgtttaatgtatttcaaaaattgaattaaatttctattagcaattaatttaaaatttaaaagcagagatataaatttataccaaatatttaatgagtaattattctagctttgaccgtcattaaaatactaatttaactctaagttcaagttaccttgataagcatttgtaaagaaggagattcaatcataattctattaaaataagaatccaacgatatcacatttaggtgaaagccaaaattattcttattttatgagttttccattgttttagtattgtaaatactagtctaagttgtcatctattagggatgagtcaactagatttcatattcacaaaatacctattttttgagatctaactcttttagattgtttaacggataaccatcctttggagatggtctcattaaaaacaataatcaactaagttagatcaatattggaattcgaaattgatactacataatttataacagaaaccaatgctttttcagtataaattcacacatacattttcaaaaatttgtaagcatttagcaagtaatgaagatatggaaaaaaatacaaaataaacatatctcaaatattttccaaattttttaactaaataatatacaatgtcctatattgggaaggatacaaagatatcaccagttaaatagagtagtcagctcatctaaaatagacattgttttcgcaaccttttattcgatcaaaataaaaattcaacattgtcttattttgagcgagagtcaaagtcaatcttattttatgagcttctaccatagtttcatagatgtaaaatcaattctaagtattccttaatgaaaataaagctctcagaaatgaacctacaaaatatttatctttcaagatcttacgttttttttttttgacgcggtgatcaaaatcacacaagattatcaaagcagcaatccacaattggcgacagcacctcctcgaaccaggatagctcattgtctaaccgaagggcatgctttgtcaaaccatgtgctacagaattctcatcccgagccac

SEQ ID NO: 391958 - DNA, 702 bp, Cannabis indica
gagagaaacagtaaagggaaagcaaatttgaggtgaacagtaatgggggaaggagcattaaattaatcactgggtaacaaaaattaatttcctaaaatcaaacaaaaagttttttttgggacaaagaaaagtattttaaagtaaaggtctttcaagagagaaagagagagagagagtcaacccaagaagagggaactccaaatctaggttgggttgaggcctacttaccaaactgtcctcattccctcatccccttccaaaaattattctcttttaaagccttaagctatgtttggtaggaatggagaagagaggatggatggagagtaaaaaaggtagagactttctttcgtattgtttgatattagaagtaaattttaaaaataaaaagtaaaataaatattaaaattattattttattatttttaatataattatatatttaaattataaataaatatttaaatttaatttttgggtaataatacataagttatatttttaaaatttttgtaaatacataactatgaaatgttaagtaaattattatgtagtaatttttgattgatgcaaattattaaattttaaattttttttaacaaaaatcattttagatagctctttaattttttttttggtaaataccattttagaccctatgttttacaaaagttacccattggaccttctgttttattaaat

SEQ ID NO: 391959 - DNA, 565 bp, Cannabis indica
ccgaccgatgtacagccctacaataaagagatcttctaagaaaattggatgaatcaataatatcatcattataatgatcttgtgtgtatataattgatcttgatataaatatatataagatggattttattctaggaaagtattataaatagtagagatgacatgagagactaaattatttctctcttttttttagtaaggagtatattatatattattttctgaatatgaattctattttatttatttatttattttttattttattttgattccgcccaatataaaagatatacgtaatcaatgataattgtttatagttcaacaaaaaaaaggaaaaattataattgtttatggtattttttcaatataaatatttgagggaacatgattaggtgttgattatgggctcgtttggaacgccgtattaagtcgtattgtattgtattgtattatattgaattgtattttatacaatatttttatgtaaaactatatgtggtattgacttttatggacacctaactatataatattttagtataaattaaagtttaacatagta

SEQ ID NO: 391960 - DNA, 543 bp, Cannabis indica
ttgcattttactccaagctgtcaggagataaacccaaccacaagacagacatgttatcaaatagtaagaccatatatatatttgattcatattttatttttattttttacaaaaaaataactatattattcgccaaatttgttgatgtaataataaggagcttgattatggaaattaaaattaataaaaaagaaaaagttgaaaatgaacatgatgataaagccttaattgttacattgtaaagttcttagttgttacatttagtaaatatgataaaataagttatgtttgatatttttgaaataaagttagagatttttcttggtgagaaaatatttttaaaattatgctaataagttttgatattttttttataagaatataagatttttatatttatatttatagaaattatatttatttagtttaaatattttactttgatttattgacttaaaaatcgtatatatcttgccgattgaattagaatattgttataaatattaataattatgtggatgtccaaattttttatttattacc

SEQ ID NO: 391961 - DNA, 1475 bp, Cannabis indica
tttttttacttttttttttttctaattcatttttatgaatgtgtggaataaagatttgtttgcccttttacttgctgacccatttctaaattttggattttttggttatggtagtgttcaaaattgcatttttgtgtactatgctcttggaatttggaaaatttgttattggggtttaatacccttattgtgtttttccttttctatgcaaaccttttttctgtttatcatgattatgtataaggaataagatgaaattgttaaggtaaaataatcccactaattgtttgagtttgttaggtaattagctaattgtgtttgtaaaacttgttaaagttatttttctcatctcctctcttattggatgctcaaacaaagtcctttgtgttatacatgaaaaattgtttctttatcattagtcatatgatcatgagtacttgaacatgttataaattgaaacaaacaattttgaagtttctttctttcttttagagaaaagacttagaaatctaaaaactagagtgtgtagtaatttgtttcctttatcagaaagttctttgcaaaatgatgatagttctttgcaaaatggcattcgagatggatttcgttgcgttttctaatttgttatgtttcttgttcattctaactctacaaccgacctgaaagacctaaacataaggaatctcaatatacaattaaaataattaacaatgtaattcccttttcgtttttttaattgacatagtctaagtcctcgagtaaaataatgataatgcatcatgaatggtttaggggtagcgtcaattggtagagtagaggattaaaaatctattactagaaatattaattagtatagaaccccacatacaaattctatatatagtataaatcatgatatatatttattccatcttagtgttgagaggtgcttttcgagggtgtctaaaaggttattttgcgaaaaatagagatgacctataaaatgaaagctattttagtttgatttgctatcataacatagcatcaattggtgttttgaaatgctattcttttacacaaatcattatattcactgatgtcttttgttatgcagggaatttacttcatgacaacaaaagcacaatcagcaatactaatctcaacagtggtcagctcagcaagaatgccaattctcatgttgaaaacaaaaccagcaaacacaaaaccgaaatgcttgtagagtttaatacctctaaaagctataacactaccaacaagagcaaccagcagaattattcaacttcaaactactcagtccccaaaagacaaggattagaagtagtttggggtgtgttggagtttagagctttagtatgtaaagttcaacaagcaaatgaagagaagaacaaagtagaaggagaagaactcaataatcgaaaagtacttcatcatcccacttatctcaatcttgatgagtttcgaaacataacaaagca

SEQ ID NO: 391962 - DNA, 1013 bp, Cannabis indica
ttttctttttctataaataatttgggtgatataaaaacattaaccgagagttgactgggtcaacccgttgacttggtcaacccagtcaactcaaatccgcagactgacaaacccacaaccttgaaacccgcaaatccaaaaccatttcactagtcgggtacaatattttaacccgaaacctacaaactcaaaacccagtcaacccgctcgatgttcagcgctagtgtactctataattgacatattctctccttgagccatgtgagtgaattctttcctctttgtactacaaactgcttcattgcagtacttagcattaaacagatcctggaactctttccaagaaattctggtaacatcccgagtaagggacaccatatcccaccataccaaggcatgctcttggaattgaaaggtggcacaagtcacctgatcgctaccggtgacacccatgaaatttagtattctgttgatagctgttagacatagcttagctttcataacatccaaacctctcaaaaagactaaaggtgcttgcttacaaaacctttcataaaatggttccatacgattagcaacaataacttgcttcactgatacaacaggagcaggagctacctgaactttgggatcaagcatcgcaggagcactgtaatgcctcacgcatccgttttcttcatcttgatcattaatcttagcttgcatttctgcaaacctctattctaatcttgggcaacctatgatgggttaacactaccccaccatgagctacacctctttggcctctgcctcagtcacaaacattagggggatactgtcttccctaactggcactggatccgactgaattttcttgacttctcatatttctcctggcatccattctattggactagcctgtaaaatcataagttagcttggtcagaccacaatcaaggttaaaatctaactgtcgcttactttgacttttagaacatgcgcctattcagctatcgggctactaacatgcttcc

SEQ ID NO: 391963 - DNA, 1409 bp, Cannabis indica
caaagtaaaaaacagaaaacccattaggaataaagtaagaaaaaagagagtttctaattttaaaggagaaattgagataagtagattgaaatgtagcgacttgttcgaggccataatcaaaactgaattatttgataggcacggagaatcgcatactgagtttgatatcgccaaccttcaatgcaaactgcgccatattattattattcgacgcttttgctctgcaaattggctttttctatttttattttcatatgtaaatgttaatacgaaaaccctagaaacaatagaagaatgaaaaggaatgaagaagaagggtttaaggtgcttatttatagcacttgttggatgaaaccctaccttctatgatactggcccaggcccacctaaaaacctcaacttaggtttgggccttcaacgctgtgctcgggcttttgtactacaatgtaaataaggtgtcatgatttaatattgattttgggataggaattttcagaaaaaatgaaatctaaagattgaactttcaaagttgggatgatgtttcgttgtagtaggaaatgttagatagcttttataagcaaaatagaaagcttaggcaaacaagaccaaatagaatgtttagtataacttttgaactacaaatttctatatatgtatgtatatattaatgcatagcacttgaactattctattgtaggagtagtaggacatgaaagagatgctgagaagtcaaagtactacgtcgatttcaataatagctcaaacacttgaactattctaatgtagactatcattaatcaaccgaagtattcatgtcacattaatattccattatacaccacaaaactcaattatccaaaaacaaagataatgtttacttggatggattttgcaatttttatcattgaaaaaaaagagtgataaatacaattttttagctaatattcacaccgagaatatatgctagaatatatataaatatatattttaaaaataaaattcacactttttgaatactatcaagaattttgttgtcgaaattgtaaattattagcttaatattgtaattataatggataatggcatgtaatattttcaaacacaaaaaattgattaagatattaaaatatgagattaagtttaagagtaacactccaaaaaattaaaattgaatacattaaagaaaagatgtaaaaccatccatctcaattagaccattgatcccatactaaatcatatgcgaccatattaatcccacgaaaaacataatgcaaatatgccttcaaaaaattagacagaacactaacaatattctcataaatcaaatcaccattctgttgtctcaatactcataacaccgaacaaaaaacccagacaagttttgtattttgtaatgaaaggagctaaag

SEQ ID NO: 391964 - DNA, 2255 bp, Cannabis indica
atgtctaaagattcaacaggatctagtggttttgtaagattcactgcctttagcctactctcagttttaggatctatttaatgtgatcaaagagaaagaagaagaaagttagagggtgtttgactcaataactaaatatttaattttgtttttaaaaacaaagttacaaaaaaaaaatatattaaaatttcaatggcaataaaattaaagttattttctttcaaattactttatttcattatttattacaaattttaaaaatatatatttttctcttaatatataaattaatttattatttacacttttttcaaaaaaaaaaaaaaaaattactaaaatatcaactaggcaccttttttgtttttccaatattagacaatattgtccaacatggatcaaatgtaaaaatattgaaccatatataaaaatatgggctactccactcattataattgttttgagatagaacctcatgattctcaacatctaaaattacaaaacttgtgttcttatcttttagaacacaattttaaaaacctacaaatacataattttagtgggtcataagaaaaaaaatatgtgatattttcaaaatcaataaaaaacaaatgtgtatttttgaaagagaaattttctttttcgcccctaagctaggtgggccttaggcacaagtttagtccacctatgcccagggctaagcttgaatacatgtatattagttaatgattagagttcacatgtatccaatgacatcacctgttttggtgggtggtctgcctgttcttcctctccgagggtaaggaaactcgctattccctccaagaattttacgagcaaagtcctcacctttgtcaggttcacccaaatcattgtacacatcgtagtcataaactctgtcccactctttacgctctccttttccatctcctctcaagttctgaagctcttcatttctgtacttaagcaatggtgctggtgttgcacttggaagatatgactataccaaaaaaaaaaaagcattgatgacttttatgaaatggagcatatttcttaaaaaacgcatttatactcagtgacggatttaaaatttttattttatcaagaggttaattattattaaaaaacatacctagttaaattattataactatatttacaggagcttctacactacatttttgtgtttaattatcaaataaaataaaacatatatattaaaaaaaataatacaatttttttgtctagtggattcgtctatgtatataccttgtttctgaaaaatacacgatcgtagtcgtatttgttggctgagtaaacccaagaataacaaatgaattgaacaacaccttcaccaggaacatcatcaagggtaatggtcttgaggaagagctcttcaacgtgattgttcttgaagatcacagcttcagggactccgatagattcgtcccactcgaaactcactttaaatactgagtctcccggtattatggttggtacagaagtaacccaatcttccaactttgtttctttaccaactttgttcgctgcaacaaaatttataacatgtgaaaaaggctatcaagaatttcttttcaaaagaatttaatatcatattttacatattttaatttaataataattataaaaaatcgttaaacaatcgtaaatctcttcgagtatcattggagatcatggaacttttcgcccccctagctagctagcttcatgatgctatgagatactcatggtacctagcaccactatgaaatgtagagatattttataaaagttattatattaaattatataggactcgatacttaattgtactataataataatataacatgttagagattgcaagacccactagtgtttttaacatttctggttggttaggtggggtccattttaattatgtgtgatcaccaaagttttaactttttaatctacttaatcaatttgaggtagttgaagaaaaataaaactatagatgattcaaaacgtgcactatctaacaatcttttcatatcaaaatgtcaagtgcttaacacttgaaagacaatttttagtatttcttttagcttaagagaaatgttaaggagcactataaaatgtgacatacaatacattagtataatattagtactctttctcttattataaatatatttatactagcaaaaaactacgtgcgaggcacgtatactaaattttatgctaggtttttttttatgttatttgaaagtgagatt

SEQ ID NO: 391965 - DNA, 2153 bp, Cannabis indica
ataaaaataattaaaattatgaatgcataattgaaaaataaaaaaagttgaactgctacatttcaaaattcaaaatcagtcccaagttagaaattgatgagtgaaaatctcatagcttatataactaagtttatgctttcatattaagttaatactattttagattctgtgttttataaaagttactgattagattttttattttgtaattatacgataaaatagatattgtatttttcaaaatagtacaaataagacattgaactcaatttttaatatttttgttttaatataacaccaacttgaaaataattcctaacatgaatatatacagaaaatataattaattttgtcaaaatacctttaaatcatattattattaagttttattttgataaaaatttatttcagggtactaattagtactattttgaatagggtctaatttatcatttaacaaaactaaaaattcaatcaataatttttacaaaacacagtctaaaatagtatatactattttatatttatattttagataataaatgggattggcccatcatattataatgagtctttaaaagaagaagaagaagctagttagcatcaattatgcgctaatacatgctagcgtcagtttacaaccacaaaagatcttaacatcaattaaaattaacataaagttgcgtcagtttacaattaacactaaattacttactaattgattgtgttagttttgaattttcaccgtcgttttaaatatccaattcaaaaagctattgagcggcaagagttcacccctaaaaagagtattaaaagcgacaaaagcagtcgctccaaaaagtatcaccaagtaccctaggtatcatgactagtgtaagtaatttctcaatcactaagaataagatagtggctaaaatctttgaggaagagaagatgaaaatttcgaaatcttatagataataggttattcgaaatttttcaatgaaaagaaaagaataaccaattgtgtattgtgtatacattactttcatctcctcttttatatagtcatttcattaggtttaagttaaacaataacaaaactttatgtatgtctccatatacacatattatatttataaaatatatataattaattaataataataaacctttatttaattatatgtatataataagaaaataattaggtataaagtgatctgaattagattttgagtgagatttattttcagcaactcaaaataatttaattatatattattataatatataatttcaattaatatttaaaacttttatatattatatttaaatccttattcaattcttaataattataaataattatacattgaaactttaaatacaatactttattaatttaacaacaatttatcgtaagcttatatatttatataaatatatataaacttcaaccatacgaaaaataatttttataataaagaatagataaagacttctctaaatctctctatttttttgttaaattcttttaatactttaaaaaacaacaaaatttgtgaattaaaagttaaaaaattgtgattagttataaattattattcttatgttgtgattaaaaggtccgtgaactaaaagtattagtcaacaaaaatttacaatttgttgtgactaaaactaaattagtgacaacttgtgtctaaatggtattttttagtcacaaataattttttgttgtaactaaaagtcagatttagtcacaaaatatttatgttgtgactaaaaagttgtcactaaaaatagtagtttttttgtagtataataatattttaatcaaaaatattattatacttttttattattttattcaattaatttatatttaacaaattctaataaaataatcaaacacttaactaaattagggagcatcattggaacaaaaataaaaaaaatggttccgtattttaattttttagttattttagctaaaatttgactaaaaatagagagtgtagttggagatgctctaaaactctatatatatcatctaaaaatataatattttattttatcacttttttttatattattttttacatttttacttctaaaaatattataatgatataacatcttttaaaaatgctattataaatatattattt

SEQ ID NO: 391966 - DNA, 712 bp, Cannabis indica
  modified_base (69)..(69): a, c, t, g, unknown or other
  modified_base (251)..(251): a, c, t, g, unknown or other
gggtataataatagtgatatgcgtgatataataatgttgatatttatcattaattattaatttttttanataataatatgggcaaaatattattattattattattattattattatagtagtgtacgtatattatagtaatatattgtatgtactagcaaaaaattacgtgcgaggcacgtacactaaattttatgctagtttttttatactttatttaaagtgatataattaaaaattaagaaaaaatnttattagttatgatattgccaattgttttgctttaaaaagtctggtaaagcaattgtaatcaagaaaaaaacttgccagactggaagaatgtaaaaagtatttttaaaaagagtaactgcattcatatatactgacaatctaacaaatcatatatatattgttggacaaatctttttgctgaatcaaaactataatcatcttttttcattcaacggatacattactttctcaatgttcgacaattaaacattaaaagtttcaagtatctttacaactaccccttcatcatgattgacagtgctcccaacaatatcgagaaataattggcctgctagcatttttacctctgccaagtcctcaaatgtagttgcttctttcaaatgtagctgcatttttatattcaaggcatacataccaactgagcaagccatgccttgtaatatccagattaaaatagtat

SEQ ID NO: 391967 - DNA, 1209 bp, Cannabis indica
catccattcgatattggatcgattggataattgaaactaattgtatcggatcgaatggtaaaatttaacatgcaatatataattagattggatctgaataagcctaaaaatattagatgtggtccaatgaatacctctagttttataagttgaaaaataccacttttattaatcaattaatcaaatttacctctaattttatatttaattgaaacatatctctttttatatgtattgtatcaaaaatatcctgacataagagagtcatggagagtatcttgaagtgttaggggcaaaattggtataatgtttaaaaaaaatagataaaaatgatagactttaaaaaaaagagtaaaaataaaagaggacaatataaaaaagtatggagtgtaatttcttcattattatgttttgttcaactcaaattttggggaagtaaagtaaatacccccgagtattctttttttaagtaaaattcccctcgagtatttaaaattggataatttacatctacacacttttttttactattatattaataataacttattccatttcagtaacaatttcattgtcgttttttaaattattgtactgataattatttttttcatttctctttttacttgataattatttttttttcttttatttgaacttagatttctacaattagcaattaagtaattatacatagaaaaaaggaattatttcacaaatacacaaagctaataaaaaaattacaaaaatatagtttcatggaattttaaatatttttacgatttttttgattttatttacaaaaaaatacagtctttttatgttgtacttttgttaatttgctgttaattttttattatttgtatgttattttttattgttgttttgatgttatttagatgttatttttatattacttttatgtagtttttttattattttcgtgttgtttctatggaaaaccgtaaaaatgtaaaaaatatatttataaacgtaaaaatgtaatttttaatttatctttggaaaaaaacgagtaaataccattttggaccctgtattttgcaaaagttatagattagaccctgtgttttgttaaatgacaaaatggaccctgtattttctaaaatagtaaaaataggaccctgagcttaattttggacaacttttttattaatacaaccaacttgaagacaatgcttaatacgaaca

SEQ ID NO: 391968 - DNA, 993 bp, Cannabis indica
aaatcaataaataagaaacggtgtaaatgaacaaagcactcaatcactatcagataagtacagtgcaggtataattgaggaagaatagtgagcaacatcatcctgaacctgaagattgttgaatataaaattccatagattttatgattgttcaaattggttagatgataagagaatcaaatgacacagaatatttgtattcatcaaaaataaatggaaagttatgagagagagagagtcatagaaagaacatacaaacggaagagtggagaggaaggagcgatgtgtggtggtggaggatgaagaggttagtagagagcaaaacattggtgttgttgcacctaaaccacccattgtcatgaccatctctttctctctgctgagaaaccattaactgagaaagtggtgtaagtgttttggttattagaaaatagaaagcgaagaaaattgtaacaacgaatcaaatcaagtcaacacctatggcctatcctcttctctttcagaccaaaacaaatggacgctagcctcaaatgtataaaatcccattttttattgttgggacccacactaagtaaatcacgaccccttccttggctcaataaaaatcttattaaataatgagtaatttgtgacataaatacttaattttatgtcgagtagcagataagtacctaaattgtattttttgcggtaaaaatactttttcttatgatagaataatcttagagtagaaatattctatcagttattttccaaaataaataccagtaataaatttttcaaatgatttttattctgaaaaacagtcactaagttacaatatcgagctttcgagaggctcgtctctccaaattctcaatcttttgagaggattggtctctccacaaagagtctactcttatctaattccaagttaagctaaatgaggttgctccctctgtatttataagcattggtcttaaaaagactaaggccacctaagattacaattgg

SEQ ID NO: 391969 - DNA, 1809 bp, Cannabis indica
atttcccatgtagatctagtttgagccttggaattcttgagtgttctacaaattagagagatcaggagtgagatggtgagtagcccctgagtccggataccagctcgagtcattgacagattctgcagtagcaaccattgcttgcatttcatctaagttggccgatccaccattgaagttttgaaagcactcaaggcctgtgaaagatttatcaaatctataaaaacatttggtgatagtatgccccaatttgtggcaaaagttaggcactgaggtttggtagttggtagagccttttccaccaggattagaggaacgatagccatttctagagggtctgatgttctgagaaaaggggggatacaagaggtggggggagaaggccatagttgttgtatagaggtgtaggataggatccaaacatggggtaatttgcacgaggattgaaagaaatacctcttccatagttgtttgtagttggttgtggataggcagaagcagttttaggcatggtggatttagattgagatgcaagatttacctcaggtttagaaatgtcaagatcagaatcagccatttcatttcgaacttcttgggccattaataaagattcgacttctgcaactgaatatacatctttcctggtagacaatgaggtaataaagacagagtattctcgagggagtccattgaagattgcttcgatgtgatcctgagtagagagacatgaccaattgaagccaatgagtcaacaagatgcttgatcttgagaaggtagtcattgagtgagctggtgagtttagttttgcaaagttgagtgcgaattggcttattttggctcgattttgagctgagtagtattcttcaagattggaccaaattgcagctgttgtgttacaaccaaccatcctcgtaaggatcttttttggacattgatgagaggagccaagaaaccagtagactatcttgaatatcgtattcaatgaattcttcggatacattgttggcgagttcatcagtagcgctgaggaactttggtggaacagattttgggtcaagaaacttaagaagacgatggcctttaatggcagcatagacttgatgacgccatggaagaaagttgttgtcatcaagttcaacagataacgagtgactgaaggagatactagttgttcttggcgacgaattagaggaagtacctcgaagagttgagctggaatcggtcatggtggaatgaaaggaccatttcaggcatctgataccatgttgaacgagagaacaaagagaacagagagaaacagagaacttggagaaagaatttctttattgatatttaaagtgttgtaattatagagtaaagaaacaacttatatacacacaggaaaggagaggagataacagaaagtcgttacaagaatgaataacagacaataactaactaacggtataaaaccatatctcatctaacactaataatcgcgttaagttttaattcaaaaatacatggcgacatattattagaccttgtattagagacgctaataaagaaatatgctattacgtatttttgagttaccacttaatagtcagaaaagagtacgattataataacacttttattttgcttgtacttaacccccgaaactcaaattttggcggtaaaactcccaaaattaggaaatcgttagcaatttgcagtttctatctattttaagtgttaagtgccatattaaactatccatatatacatctatgtggacagggtgtacacatgacacaattttattggtctacgtaaaaaaattattt

SEQ ID NO: 391970 - DNA, 1042 bp, Cannabis indica
cacctactgtttgttttgccaaatgattaccctccaccgtcgctgcctcaatctcgtgactatcatgaaggttaaagatttggctctaatgttgacgattttatggaatttagtggtcaagacaatgataattagtttttattttttattttaattaagacaatttaatatttttaattaagaaaattttgatattttgtagtcatattatggacgattgatttaatgttatggataaatattaatttcatgttaaaagtattatacttaaaaatatttttgaattataatatttatattttataaaaaaaaattatctgtaaaattgtatcgccggattaattggggtgggatccgccggtaataaatagtcaaactagtgtctgacaaaactcaataccggctggacccgcccttattgatccgtcggtaattattagtaataatgacggggtgtcagatagctgctattaattggctaataatctttaccgatgaaatcaccaattaatactggtggattggtccgcctctaatgcgaacttttgttgtagtgccagtttggtacatgctttgaaaaagttaaaattgctttctgaaaaggatgttctataaacgtgtttaataaatagttaaaaattaacttattgaagaatttatactaaaaattacagctaaaagtaaaagctgatacaacttaactttaagaaaaaattattttgataaatttgattaaaatactataataaatttatttgtactaaaatatatcaatttatttattatgtattactaaatataaaaatatttcacataaattaatattataataaaataaataatatgtatttttttattttgctttaaaaaatattttatatttattatataatttttaagtttcataatgttatgctaattaacaaatcacatgaatctagtgtttattatgatttttttacatgtgataaataaatgtggcatttggtaacactttttaatcagttttatgtttttaaaattagaaaagtgaatatatttt

SEQ ID NO: 391971 - DNA, 1105 bp, Cannabis indica
acaagattgtgtctcagtcccactcatgttccctttgcaatattttccacactaactgaaaggttaatacattcatcccatattaaaccttctgccttaaacaccgtggttaatggaattcataatccttaaaccttgcccacaaatacaaatgggtcctcaccttctagttcaagagttaccttttttctttcacaatcgataattgcattaaactttacaaatcaatccattcctaattcatcctcaagatcctctaatctcagctaaactaatacaaccaagcattcccttttttcctcaaaactctagaagggacttgaaccttttgctggagaataactagttctccagtaaaagtagggtaccggaaccactaggtaacacatccttaactttatacaaactcccaatcatccttctcgaaatataggaatacattgcaccagaatcaattaaaattattaacaaaatatgattcatagaagttcaacttatcatggtggaaagaccagcaccagtctcagtctaggtcaaacaaacacccaaacaagatctaaaatgtcattacccttctattctagtcgctgcaacagtaggcaacttcttctaaatggcctactaccccacattgaaagcatgctctcgtgtagcattcacattggtgatgtctcttacatctcgaccttacactcatggcaaaagaggttagaccaaccacctgagcttggaactggacaaaccctagttgctaaacaactatatcacattccgagcgatatactcttgccaccttcaactagattagactccctagcggccttaacagtcgcttctttaaaacaaaactttgtcaatccgtccggtttagtgtcattctccatccccacgctgcccaggatcgactatgtatattctactaccttaccgctcaggtaatcttttacttcatggcatacatttgctcttagtcttgcggtagtggacaaaaaattaatacccacgctaccaactccgagcctgctaagctcgccattatccttactagatcgccccaggtacaacttccagtacactcacgaccatttctttccatcattaaaat

SEQ ID NO: 391972 - DNA, 1466 bp, Cannabis indica
catcatcagccatgaatgatgtccttcgaaacaacagagaattcatcaattagtttagtttgattccattatatagacaaatataaatatatatatatatatgtatatcactatatcagaatagaaaataatgttagaaaaccaataaaaacactctatgctagcaacaattttcttaattttagcacacaaaatgaccaaaatagaaccaagtacgtaatcaaaaagttgttatacatatatatattatatatatacgcatgagatatatacataacagataagaatattcattttctgcattatgtgatggcttagctcttattaattaactatatatataacacattaaacatacatagatttatgcaaatttcatttaacaaaagcaaagcctcataaaaagcacaatatactaaagaaataatggtcaaacatttattgaacaaatatataaatgaattatacatgatgttaaacatttctaagtatttaccaaaaataaataaatagattccaaaagtgaaatttgatcagcatagagagatgaagaagtgaaagtttaaatttttcttacaaattttcagtttgttgaagtagaaagaatgaaggctcaaaattcaaagattgaaattgaatggagagtggagtacaacaaaacaaccgagtaaatatatatatgagtctccttcccaactaaaaaagaaaagaaaaaaaaaattatagaaaaattatcaataactacttgtaatgttttttcccttttttaaggtaaagttagtttccatttccgtgattttttttttctttttgaaaaaattatttggcttttatttttgcttttttatatataggaaaattcttaggtgtcattaattagctatagattatagtaggttgttcgttttttttttttttttgagtaatttaaggggtagaaaatatgattgtaataatggacttttacacaaatttttaacttttttactgggcagaattttttcaaaaatattgtattttttttaaaaataatgcgtaagttttatattaagttttcacagttattttttagttgttctactattgttttaattgttctattttgtttttttacattattttataaaaacatagtatttttgtaaaaaaaaatttgtatgatagcaaaattataaacttttacttatgatttagcatttttatgaaaaccccttcaaataaagttgtatcctgttttattttatacgagtgcacctaactattttaaactttatttttatgttgtaaattatttataatttctcaaaaacatataggatgcttacatatataacacactatcatttgaaaaaaaaaaatcaaaaatatggggaaaatattaaagataataaatatggcataaaaaataaagccactaaatatatcattatctaatcaatcaaactaaaaatatgattttttttaaa

SEQ ID NO: 391973 - DNA, 874 bp, Cannabis indica
tgaaaacaaaattctggtgaatatccttggtgggacaccgcccaatatcgaaagaacatttaaatatatacaaaaatatccacataacaaataaatttatatttttgtggtgatatttttatatatatcacccctcttaaccaaaatatcatcatttcaaaagccttatatttactcttttatcatttgcttaactccagtagtactaattatttagattttttcttttaaaaagagaggatttattcctaatgcttttgaccttttctcattcaatttccatatcagtttgtgcgattacaactaaacctacctagctaatgcttataagtgagtaattctgtgtttacatatatataagtaataataacacatcgttatatagcttcagttggtactacatgtagaaatcaaacataattactttgatttttaacattatcattacccaaacgattcaaccttccaaagtattgggattaacagagtattggggttcacagaggacatctaaaatgtttagacagtttcagttttaataacatattttttttatcgaaaaagaaaaacaaacttggaaaaataataaaaatttatatttacataaaacatatgcaaacttacattgtacagaggacatctcatcaatcttctacctggatttgcatcagtccaagaggtgaaaatcatagatctcttcagaggacaacaacgacattttataatcattttctttcgtgttcttcgttcttcccttcttctgctgaacttcatctccttcccctctatctcttcttcttcgtcttctctttctcttcttcttcgtcccctctttctcttctttttctctgttctttctcttcttcttcttctc

SEQ ID NO: 391974 - DNA, 1355 bp, Cannabis indica
ggacctccgaccatacccgggcccaaactccccccatgccctagcgctgaactccggtctctaacccgaacttgaatccgaactccggacctagaaccaacaatgaaataaaataactaaaaaataaaaaaattaaaaaaattaagtttacagaacactacttttattttttgacttttaaaattgaaaaaacaaattatagtgctacagaacactatttttatttttacaaaatcgaaattttagaaaaattaaaattttatttttatttgtgaattaaaaaattagaaaacaataataattcaatattcaattaatcaattaggatctttctaaaatatatatatatttaattatatacttatatatttttctttagatttatttttcattttaatatgtctaggatatattcgaaagacatatttttttggtaagatattccaaatttatttagtgtatatattttttttgtttatcttaaaaaaaaattatatttgttttatatataagatgagatcttttttctcttaaaaaaatgaaatgttttaccttaaaaattaatatatgataaaataattaagaaattaaactaataaaaaaactacaaattgattatttttaatactatatactggaaagagaattaatggtcttgaataattttttcttcgactagctctgtgatctgcgcttttgtgtatccctaacgaaaatttacaggagttaaatataattaatttactcgatatatatatatatataaaaggccatctctatatataaaaaaggaagccaaacagaaattatagttatttataagcgaaaaaagagaaacaaattatatatgttgaacacttgaatgattgattgtattttttcttcaggggattaattgcttgagtgatttggctaagcacacgcttttacttttgagcttgtaacgtataaaacacaataataatcatatataaaaaccatataggtatgcttgtggtggtgtccttttccagtataaaaatataattgaagagatatttgaacttataggtatattttgtacagataacagaatctgatcttctttggtgaaagaaaatctctatagtttaaaggcccattaactttcacaattgagtggtgggtggcccatataacttaatactaggcccactttttctgtccatgcactagatagatatggacccctatttcatttggagagggctgaccttaaattttggagaaaattaaagggaaatttacatgatatactaacttttgccatttttttacaaatttttttacttttttactgtatttttttataactttcatactacagtatactgtgt

SEQ ID NO: 391975 - DNA, 749 bp, Cannabis indica
attattttcattcaaaaataatttagaattataagtctatctccaactatatggtgtgaatagacaacatgtttgattgattagataaacgttcaccacaaaatactttcctaattatctacttgtgttgtccattgctagctgtatatatagattttttttctttctaatttgagaaaacgtaaaaaaaaaatactattggttgagtagagtccttaatttatctatatttttgttcttttgcatcatcttgacacatttacaaaaatttaacgtacatatacgtcatttgttttcttcttgttttactaattaacatgtgattattgctttttgtgaaaaaaaattattaaaaaatctcacgtcaatcattgactcaaagaaattcccaatttaaaatctaatatttctgccgctataaaaaattattacttttagtgataatttttcgatcacaacataatttttttatgactaaatatgacttttagtcacaacaaaatgttacttctgactaaaacatagtatttagttacaaattgtcactaatttagttttagtcacaagaaatattgtgattaataaaaatacatttagtcacaatcaattgtaatttttgtgactaatacatttagccacagaacttttagtcacaatataagaataataatttataattagtcacaattttttcacttttaatcacaagttttgttgtgactaaaagtaagattttttgtagtgtacta

SEQ ID NO: 391976 - DNA, 954 bp, Cannabis indica
ccattccacatcctttgcctcctagccaattcgatggctattttgcatttttctgtgaagaaatattctgtccccattccacatcctttgcctcctggccagcgtcgtaagaaggtcaagcgacctgtggtggatgaagatgatgaggaagaagctttgaatatggaagtggagcatgatgagcaagcatgaggcagttctcaggcagcccctatgcctgctgggagtggtggtcatgatccttatatatggtatctcattgcctaaaaccagtatatgattaaggcccagcaaggcatgaataataatttcaacaactttatggccttatgacatgaggatgagaggattcaggtagatcaattgaatgagttggtgcagaggctagtggtgagcccaaatgtggagaaatttttcacatgtctgacgcaatacacaccatactagtggccaccgccaccgccagccattttttgtgtatatcgtattgttttacctgtgaaaagaaaattgctaataactgtgtgcttggttaactatttttgagtttaatttaaaaagttctgacaggacatttttaatatgtttcacaaatacaatattttagactttacaatatatgcttgactagggttggcggcataatagtttaaatttgatagaacttgtattgtttggcttttgaggcaaaattcttgatgacttatgctttaaaaatgatttaggcaatttttttgaaacgtttgtacctttcaagctaacctattttgtgattatctgtagtttaactctttttgagtcttagaccgatttttttaatacacactttttgagctaataaaataattttgacccatttattatttttttcttatcctaactataccatgagttttcaaataagtttgggggaaaattataatgtgggtattgtgttttgagaaagcttaaaaa

SEQ ID NO: 391977 - DNA, 1856 bp, Cannabis indica
ataggacaattaattactcataaggatcttaatcttacattggaggaagatacaatatttaaataaaattaatatttaactgttcctcattatcaaacaatttacatgcttactcttgcgatgggcaagaaaataaacaataatagttgtcaacaaaaaatttatgcacaaaagattaaatataaatacttggtatgttgatcttgtgcattatagcatagaaatgatagagtactaaacttttagtgaaagaaatagaaaagggtccaaaaaaggaccaatcacgcgcccctattttttttatagcaatgtcgtacgaaatgtcgtttttggaaaatgacatgccgtctggtgaagaaacgacattccgcagggtccaaacgacccgttgttcgctgcgaaatcgggctctctttatgtgctaaatgacatgtcatttttttcaaatgacgtgtcatttcagccaacaaaaatgacgacaccagacgtgaactacatgtcgtttggcgcaggtcatccatgaccttggaaccgagcgcgcgggtcgacgaaccgggtcgacatgacccgaaatcagacctgcctgaaaacgacgcatccaaccaccgttttcgtcaaattttgtgggggttttcttccatttctaaccgtctattaatttgcaacatccatttcatccatttttcacaaaaaaaaaaaataaacattacccataaacacacaaatccgaaaatgggtttccaccattgataaactcaatgaaaaacttgcaatcttacaataaaccatacaataaccatccgaagaacaagataaacccattctaaaatatttaaactcatattatccgaaaataaaaaaaaaaaatatattcagatttgaaaaaaataaataaatgggttacttcaaatattatggaactctaaaatcaaatattctagctctgataccaattgttaaacattcacatagattatgagttatccaaacacacattaaacattattgctcataatcattaaattcaagaccaatactttatttagagcatcacaaaataagaaaacacatacctcccatattagcattttccattgttgctatgacaccaaaattcttcaatgtatctccaagagagtagaagaggagcttatgaaagcaaacccttttcttatcaccacatacacactactcatactaaacacatagtaaccattttatatccaacacctaaccctaaaaggtttattaggcttattgggctaatgagtataattagtgatggactataatttaatgggccaattatagttttagggtgctctcatgtgcctctaatacatttattaattattaaccatctcattatggtagtgaataaatatttggcacatagttaatgagtctgtttatggtattaagctcattattatattagtcaacaataataattctaacataatcttcattcttcatctaacatcaggtttatagtaaacttaagtcgcttaacataaatatcagtatatgaatcaattattaagtttttttcaaacagcttctaagatagaccaataaataatcgccatacatctactaatttttttgtattcaaccactaaacgttttccttttctaatttactagctactgcaaaaacaaagaaaaatccattccagtcccgtttgatttatttcaaccgagtttttattaatatatttttgttttattaaaaacttagtgatgacaaaacaaaacatatggaaagttcaaaaaaaatcttctcgcaatgtctaatagcaaagttgtaaaaaaaaaggaaaaaatagattggcagctgcaaagtccatttcaaa

SEQ ID NO: 391978 - DNA, 793 bp, Cannabis indica
agttttgtaggccataccctgccaaatattataaaactccaaaaaacttcaatatttcattattttctcgtatacacatattgagacagtgttgagctaaaatttttcaaagagtcaacattgtaacttacaagaacattggagtgcccataattgatgttgccattctcagtatgaacacacacatctgcttgtaaccaccttcatcaaataagcgatccccacaagcctgttgtggcttatgagacacagtggtacccacccattactgtcatgttggagtaagtggttgatggtcctgacagcggcagctgcggttgcagtgttgaacatattctcttctccaaaggcttagatccaccctttaccatagtttccaatcaacatcgctgaaatcgatcgacgggctctggatcttgatgtctgcataaacgcggctattaggggagctcaaggggatttctaatcaacatagctgaaatcaatgtgaataaacattaaggctttttcttttctgctcatgaaatttaggggaaaaaagaaaattgatgtataacagagtccacaagcaaggaaacaaatatcagggaaacgctgacacagagtaagctaaaagtccatggcattttttacttcacttagataagaaactaaatacgtatcataagcaggtcaggtaaataattctcttccagcaatatactgataattaattaccttggccaagcataaacttgaaaggaatcctctataatggctggaatttaacttagtcccatcaagcaaagttcca

SEQ ID NO: 391979 - DNA, 1473 bp, Cannabis indica
gttgaccgagcttcaggcggtagttcaaaagtcatggactcgagactaggaagcaggacataaattatggttttgtaccaccgggtgagccgtgtgtggacctcgagaggagcctgtgggactcgaagaggatcttatgaaacaccaagaggagcttgcatctaaccctgaggtggagcatctgaatgagtcctttgctaatttttaaaggaatttttgagattcgttggacaagcagcgagaagagttctgacactgtttccaagagcaatggaatagtgttgaagctcaggaagctgaccagaggtaccgaagagccaagctgatagaaggacagtgttggggagagtgtcatcaactaaaggaagggtaccttgtcttccaattggccatgtatgcaccaacgctcagggtgaagccttaaatggaaggaatgttagagctattaatctcgatagcattaccgctgctcctcgagcagctcgcactaatgtcccgactagggaagtgaaccctcggagagagtccaaaaggcctcagaccagaagtgagcgacccccaacttacgaagcaaaccgtcgtcaagagatcgataagcctcagaccaaaagtgagagaccccttaatggggaagcaaaccctcgacgagagtttgataggcctcaaactaggggtggaaaaccccctatgggccctccaccactggtggagcaagccaatcaagaccctactcggatcaatccatatcgtagggaaactagatcaccaccgagagctacctctcatgggtcttctggttctaggtcaccccgtgaccctgcaaagggaaaaggatctgcagtagaactaggaagggccactcagagaatcaaccatgataatggttggttcaaaatctggagggtaaggaccaacgaaccacttcccaatcgaaattatttctgggatgatcgaggttctttattttggtactttgccttaggacccgatgggacacaatatgaatattttttacaggtgcatggagaagagttgaacttgagtaatcagttcaaatccgcacttgctaccccaatgaagactattttgaaggaaatagtcactgcaacaccacaagtgaccgcgctggaagtggtcgctcgagagaagactttgtcatctttaagagaaataccataagtaaccagtttgagttattttgtattatttatttttatccattatgttatagaaccagatctatttttatttatatctgagacatctacttgtggtgacttttctagtgacttttccggcgactgtgatttttcggtgactttttcggcgccggtgacttttccgacgaaatttattattgttttgcaaatatgaaatttccacatttttttacaaaaatattacgtaaaaaagcccatataaatgtaaaataataataataaaaactcataacccatgatattatttatttat

SEQ ID NO: 391980 - DNA, 1083 bp, Cannabis indica
tggactggttgaagagcatggagggagatgctcaaatgttacctagaagaattggcaagcagtatagagagagatggcataatcatcttcgacctcacattaaggttttctagtttcttgtctttgattgaaacacttttcagtttttgtttattaagtagtttgaaaattgaagtagaaatattgttttccccaaattttaagaacagatagctagtatataataagtcatgttagacttatatacatgtttatgtatatagacaaaattttcaaatgggtagaaattgcaaagagattggcagaaaactaaaaactctattaaaaactattggaatgccacaaatgctcacaaaaaaattaagtgaatcttaatcagtaacttcagctaagtgaagttatcatttatattttttttgctatagagatcatttaggtttattgaatatgctctaactgcattaaaaacttggattgtttgatcttgctatcaagttattaacataacctactcactattttttgttaaactacttattctttcacctttttcataatctacaataaaatcaattctttaactatgtgttcatagtggcataaacataaatgataccaatagcagaagcaaccatacaccacagcctataaaagctcttcatctacaacttgtatatattttgatttcactatcaagttttgaacataatcaatacaatattttgtaaagttaaaatatttttcactcgcattcttaaccaattatttttctttacaagtgctaagtgctaaaaacataaatgaactcaacaacagaaaaaataataaacatcacaagcaataagagctccacaacatcactcattttcctaaccaataatgaaatcaacaaaaatcacataaaaataacataaatgagtctgttaaaataaaaagccttactttaagatcacatggtgtaattatttgattatcctagattaaaagtctaataagagaactaattgtacatccaattatgttgttaaaaccaatatacataatgttaggctttgtgccttaaataaaactttatttcaatgt

SEQ ID NO: 391981 - DNA, 1868 bp, Cannabis indica
ggcttatataaagatatttggtagcttattatttcttttattttttctatagatatgacacattttttcttaagaattttagtattattgttgttgttggtatagtgtggatctgagattgtttgcattattgttgtatgttggtgtggatctaaaaatatatctcagattaaatataattttttttatgtgtccgtttaaaaatcaacaacaatagtggctcactatagctaacaatttagaaccaacggtaaaggaattgtgagttgctctaaaatcgttggatatagagtgtttttgtcaacagttttaaatagatgggatatggaaaacccaattatttccactgatgcatgttcgatcgcctattccacctagttttgcattgacccaataagcatcgatcatagagactgatgacaataccattacccaattttttttaaacaatcaagaaatcctcttttttgagtggtttcaagatcaagttgagcgattttttgaccctccttgttaagaggttgagggaagtgaagttttgtcccaacgttactcacttgagtatccaacgtagcccaatgttttttgtttaatccttgaattgctttcttgaaatcctctcccaacaccagggctcagcataaaatccagaaaactaaaaaattgttcaaactaacctaccgaacacccttgaaatcgaaactgatggaactgaaaatcgaaaaaaccactaacggttaaaaccaccattgaatgatcatttttttttgggtattaaaccgaccgaaaaaaccaaaactgacagttatatatatattaatttattcagttttttttttttgctttatgtattgtagttacttataatatataataatatattattattttattaatattaaagttgaaagaataagataattagtttttgaacaattaatttgtatgtttatagttgtaaaatgtagaataatgtatttatagaataaattaaattatattttaaagaagaaaaaagaagttcggtttgggaggttcaaactgaccaaaccgaggttcaaaacggtcggttttaagataggttctagattgattggcggttttcgaattgcacgaatccaaaccgaaaatcaaattcgagatttttatatagaaaaaactagctaaaccgaacaatgctcagccctacccaacactactcgagctaggattcatgacaaaaaatcctcttgcacttgttggtaggttctcagcacaagtttccaaaatttgagaaaaatatctccatcagaagcattgacaaatttactcagtgtttccaatgtaaattcatcaaccacatgatctcgttcatggataatcaaaattaaagggagctttgtcttagcagcacgaattgcgagctttgagtttgttttctattttttttggtcatagctagagagaaaacattcatatcatctttatatcatctttaataataaagaattataatatatagaatgttaaaatattgacgtctaaattaatgtgtgacaattcagaaaaaaaaaatgtgtgacacatttataaaggtataatatacatacataatagattgtaatagtgatagttttagttatatcattttcaagtataaacatcatctttcattacattattattttttgtcttagttttatttttcttttagatttgtactatataataatatgaaatttcatgaactattgttggttgctattattatatgggtagtagtagaaggtgacaaattttttttgttggaaactagtactgtaactttaggccatacttatacactatattattattagccttataatatatacatatgtatattatat

SEQ ID NO: 391982 - DNA, 931 bp, Cannabis indica
tattaatacgtaaattaattagtcaattaacatattacatcaactcaaatgaaactaaaaaacaacgcataaataatccccaaaaaaaaaagtaaaagcaactactaaagactagtgcattaaaaaaaatatgtgctcatgaaaaattaaacatatacttattttatttttacgtggttaaacaactaaataacaacaagcaaacaattagataacacatggtgttaacaaaaaataaatacaaattatcttcgaaaacaatacaataacaatctcaatatatgtatctattaaaaactaaatagatatactcaactttttcttggttaaacaactaaataacaacaaataaataaatttacaataatttcactataatatgcaatttaaataggtatcataaaataacttcacatattgcatcaattacaaggataaataaagccacaaataatatagaaactaaatttaaaaagaattacaaaatgtttgtacaacaactcaaaaatatatgttccatgaaaactaaatataagttcatttttctcttggttgaacaactaattaataacgaaccaacaactaaataacaatttcactttaatatgcacattttttttctggagtatgggaattaattaggaattaatatccaagcagcataaaataaaatacaaataacaaaaatcaacaacaaataataagaatacaaaataaaaataacatgaaaacatcaaaaagaccgtatttttgttaaataaaatcataaaatcgtaaaatgttaaatttcgtaaaatcgtattttttaatttttttgttattcttattgttgctccagtttattttcaatatacgtggcggccgttatgtgtgacatgtggctgacatggacacatcacccggagatgagttgaagacttatctaaaccac

SEQ ID NO: 391983 - DNA, 510 bp, Cannabis indica
gctcaatattaccacaaaataaaatcattcatatccatccaaaatgggaagttaaaagaattccattcccactttctttccatcccatattcaagcaaaatatataatatataatcaaaaataataaaataaaaaataaaaaattatataaaagccaatatcctcccaaaaggtggataagagtgacccatatcataagttgatggtgtgaggttgtgtagtaagtagtaataaatattttgatgtggaactcacatgaagtcaaactaataggacccatttgtcaatttcacttactttttaaagactattagctatttctcaattcaaaactccttcaagggctcttgttgccccttcaaccactacaatatctacctagctattttggaataattaaaagagtaattttttataggttttttttactataaaaaatcttaattacaataaatatgtaagtaaaaagaaatcaagctaattagtatttttgtccttgaattttgacat

SEQ ID NO: 391984 - DNA, 1621 bp, Cannabis indica
taaattttaaaaaatattttcattgagcaataatctaaacaaaaagattgagcatagacaaaggtatttgtcaatttgaaactttgtgtagtgaatacaacttagaataaactagagtgactcgtagttttgaactcaatctctaatgatgtaccacacacaacctttctaaagtgtagtccaaaagtccattctttaatggtcatgcatgtctatcccaatatagtgaatgttctaaaaatttgcccaaaatttcgtaggaagcgacccactcccacattcacgtaggtgagtctagagtatgtcattaagagtttctattatctcaaccttctatcgcttcaggaattaatgcttcatatttcttataaaaatagcatgatctcattcttatcacatcataacttgttattacccattgaacctatttcttgggatctccagtctataggtcgggtatccattatggttgactcatcattctaaggacaatagtctcattcgtctcgaggttttaaagactttcttactagctaatcctttcgtcaaaggattagctaagtttttaacagtgtgttcataatccactcttactactctaatagaaagaaactctctagtagtactatgtttacgacgaatctgtcgtctcttacagttgtaataatagttctgaacttttgaaatagctgcgctactacagtggatcgacacaattggtattggtctttctcattaagggatcttagctagcaggcttctcaatcaatctgcttcttccctagcagtagctagtgctatcatttcagactccatggtggactatgccaaaatagtttagtttttttgatttccaagaaacaactccaccacctgtactaaaaataaagccactagttgctttggagtcatctgatgaagtgtttcagtcagcatcattgtatccttcaaggatagctagaaacttctgataatgttatccaaagttcatggttctctttaggtatctcatgaccctctcaatagcatgtctgatggcgataatcgtgacaagccttcattgcgtcaaaccaagcccgatcttaaaatccgtaaagatagaggtaaaaatcaagattccattcaaattttcaatgtcaatctcaaagtgatgttaggactaaccgtagttgcgttctttgttatatggttcttcatagttgacctcgttaaggccactaaagtatctcatatacctagggttatcactcatttccctgctccaaaagttaccgacctacctcaagtaattcttggcttagatatgtaaggccaaggtatatggggtctaaggcaaaatcaaattttgggaccctatatatagtttaactattattaaaatgatagttctagtaatttaggtggcgtgtggttagagataatgaaatagaatagagtggaaaagaaataattttcattctattcctttatttggttgcattttaaagtattagaatatcattccaatggaatagcttttctactattttggtggaatgactattccattttgaaatggaagagaagacgattccaatgcaagatttaaaaaaaaaattaatattttttttatcaatttttt

SEQ ID NO: 391985 - DNA, 670 bp, Cannabis indica
catgcgagccgtgcgtgcatgtgggagtgtgtgtaagttggggggggggggaggttgagtgtatgggagaaggatgccaagtgtaaggtggcatgggtgtatttttagagtgtgaagataaggtgagaggtgaatgcatgatggcaagaatgacattgggagaggaatcaaaagacaaggcatgcaagggaagagtgtacaaccacgccttctgaacattgagaacaaggaggtacaagtagcggcgacaacagacctgcaaggcctgaatacctgaccaagagtacattgcaaccactctccaacaccctataaccggggaccacattgcgtgcaacctgcaactggggaccgtgcgcatgtacctggagaccatcctcttgcaacctccaactgtggaccatgcgcatgtaccgagagaccatcctcatgtaacctacaactgtggagcatgcacatgtatctggagaccatcctcctacagcttgcaattgtggaccaggtgacactagacaagggtacggggtgtcaggcttcctccagtacctgcaggatgcagcagttaagcgacatcttgtccccatgggacccctttgtacgccacgccattaaagcctataaataccccccatctcagatgtgaaaggggttggaaaatcatttggtgtaa

SEQ ID NO: 391986 - DNA, 1520 bp, Cannabis indica
tgaaaaatgcaggggccacttataaaaggttgataaacatgatgttcatagatctcatcggtcgcaacatggaggtgtatgtggacgacatgctagtcaagtccaaaaaggctggggcatgtggagaacttaggtgagcgcttcacaatcctttgtagctgcgagatgaagcccaatcccctcaaatgctcttttggaataggcttgagaaaattccttggctttatagtcaacgccaaaggaatagaagcaaattcagacaagatccaagcccttttggacatgaagtcgcccataactatcaaggaagtacaaagcctaactagacgcattgctacactaagcatatttgtgtccatgtctatagacaaatgcgtacccttcttcaacattctcagaggcaacaaaacgtttgagtggacagaggaagtgaaaacacattccaagagctaaagaagcaatttcccaaccaccggtgttgtctaacccctagacaaccaagagctatgcgtgtacctagcagtcacagagcaaattgtaagtactatccttacaagagaagaaggaggtgtacaacaccatgtatactacatcagcaaaaggtaagacgacatagaaattcgatactcactcatggagaagctgaccaacagcttgctcttagcttcaagaaagttgagaccctacttccaagcacaccccataaaggtgtatactgataaaccaatgtggcaggttttgccaaaacctaaagcagtaggccaacttcccacatgggccacagagcttgcccagttcaagatcacataccagctaagaacacacataaagggtcaagcccttgcagacttagtggctgagtgcaccaactaaactcttgagccctctcaagactcaagaaaacaacataagccatagaagaagcaagagtaagagtagcaacaaaatcatgaagatcaaacatggaaactcgatgttgacagaagttgcactgataattttccagtgcaggcattacccttacaacacctgtgggcaacaattgcacggagcaatcaattcgactttaaggcctcgaacaacaagttgaatacgaagccctaatagcttgcctcaagctggttcttgtagtatgggctgaccacctagacatattctcaactagttgtaaatcaagtccttggtgaatacacagcttgaggtgataaaatggcggcctacttgagcaaaatcaaagacttgttaagtcagctcaaaggctacacgatcaagtagatccctagagaacagaatgccgcaacagatgcacttactcgcctagcgagcagtaccataggtaacaaagcaaacctggtacccatcaagttcctaaaagaacttagcattattgtcccaaaagaggtcgacatgctggatgacacaccaacatggatgactcctatccaagcttatctccaaaccagagccttgccggaagacaaaaaccaagcaagaaaactaagaagaaaagttgctaggta

SEQ ID NO: 391987 - DNA, 600 bp, Cannabis indica
atatatatatatatatggcaagaggtgtcgtgtgtgggtgggtgcatgagagggactcatcctcatgcatattattatataaagattcagagatatatacatggccctagctacgtacgtacataaactgttactacaaattaatttatttaaccaagtaacacaatgtttaatggtctgccatatgggctctttgaataaggtttatctttttacaaaattgcccctcatgcattaagtcgtgtaatttagttatatatccaaaatcaatatattattatttcaatttgataaattataactcctatgattatatatgtatatggtggtggtgttaagttgtatatacagatacgtaatgaaaatgctcacttaatgaagaaactaatttaatgttattaatcagggaattaattaataagaagagaaagttatgtgcatggcggagacaagtacgtacgactccatgtcatatatgatatggtattacatattactaatgttgttcggttggaaacaaacatatatttcctttttctattataaatcataaaataattaaacatttatactattaactatatatatatattattaatt

SEQ ID NO: 391988 - DNA, 620 bp, Cannabis indica
tgaatttatagtaatcagtcagagcttagtctacttttgaaaaataaattgtgattagtcttattcagatttgatcaaacacgtaaaattaaaacattaattatatttaattaaaagaaaaaacatttataaaataaataatggaacaattttgaccattccttatttaattatcaaatgggcacaactacctcggttgcaagaggtacttggtgacatatgaactcgcgagttcatacgagtcaccacgtatatttagttttgagaccattctagtaaaagtgcgactttcaattgggtgcgatggagaaatatcgggtcattgtatataatcagtatatgtcacaactgatgctcacttctctctaagtcctacttttatactcacattatgcgatgcatagtagcacacgacttgagtctgtcccagttgcatcttctcgtttgtttttagtcgaattactttatatgctattttttaacttttgtttttaaatttatagtttgagtttttccgatagttgttctgatgatttttatgattgttatatgaattttaattacaatttaagttatttcgttgattgctatgttgattttcgtaaaaataccaaaaaaaa

SEQ ID NO: 391989 - DNA, 703 bp, Cannabis indica
gacatgtagatagaagaacaaaaaaaaaaaaaaaaaacccattgtacctgttaattgctgaaagttcaagacttgaaaactgatgcagcataatcgaaatagtactcccacattttctctaataaatcaaaaaagagatttagctaatgaatagtgattaagggcactcttatgagatgcatcaaatctccattttctctataattcataagaaaagtaaaagtgggcaagatttaatctaatttaattgaatcaaattgatctaatctaatctaattataaaaagttggattttcaattacaactagattatattgaatgttaaaagttggatctaaattggattaaatcgattattagatgtcatcaatttcaaaatccaattaaaaatcgatcaaatttaattatatttagtgaaaattatatgaaatatgggattttgtaaaaaagttacaaaaatatggcatttataggtttgccactcttctatggcattttttcatatttaagactttttatggtatttgatatgccatatttttgtaaacctattatccaaacccatatttcaagtttttgtttctaacttaattagttttattttcttttagtttattttacatttacattttagggtttcttttaatttggaaaatttatactaaatactaatttttttattcaaatattacatttataattt

SEQ ID NO: 391990 - DNA, 1739 bp, Cannabis indica
ttttttttttttggtaaataaaaagtatttatggaaatgagttgttattgatagagttcttctaatagatatttattgtgtcaattaatatatatatatatatatagatatttatatatactagagaggatatgtggttgtatagctgtagacatatggagcttcaaattggggtaaggtaggcttcttatattaaaaaatgtatttatttttttaatatgtgttaaaagaaaatatgacgtaagtatataaacaaaattgttattttggtttttactaataaagaatggtttgacatgttgtccttttttttttctctttatatgaatatattttggtgctatgaaaaaaataaggtagagtttggttgggcacaccaactttgcctttcactcttgtttttttcacccgaaaaccactcaatcattatgtaatgctatgattcaaggccacgagtttcacatatggagagcttagctagtatgggatgctttaattttacttttttccaaattctccttacttaaagagctatatcaattttggcatttaagagaattgtgtaatcatttatttttttttttcatgagcatatctgttataattatttaagattattcgtaaattttttaattaatttacaatgctaaaaataaatttaaatattttaatacacataattaatttttctcaaacgagcgataaacaactatttgaaaattttaaactattcacaaaatttttaaaaatacacaaataatcttaaataagtttgatgtatacgatcatgcataaattttttttcttcataaatatcaaaatagatagatagaagttatcaaaatacctttttcttttagcactacaaaaaatagttacttttagtgataattttttagtcacaacataattttttttgtgactaaatgtgacttttagtcacaacaaaagttacttgtgactaaaatatagtatttaggtcactaatttagttttagtcaaaacaattattgtgactaaatacacatttagtcacaacaatttgtgatttttgtgactaatatttttaaccacggatattttagttacaacataagaatagtgatttataattagtcacaactgttttactttttgtcacaaattttgttatgactaaaaataagattttttgtagtgtaagtgtactaaaaaaatttctaattatatatatactagtcggggactacgtgccagaggcccgtaatactcgttaaaatttatatctcttattttcatcaattatatttaaataattattaaattaatatgtttaaataaggacataagtgtggtatatgttcgcttgttgaatgtaaagtcaccaatcatcccgtctaaatgtaagctcatatgattttctcctctattatctactaataagcaaagtttagaagaaaaacaaaattataactaacaaaaaattatgaagaaaagaagaataacaaaacaaaaaagattaatttcgtatgttcatataataacatatagtttttacactattatatatttactaataaataaataaaaaaaaaacttaattaaaaacaataagtaagtaaaattcattaaaaaaatgggagaaaaaagctggtaagaaatatacaaaagacttaaaaatagtattttaaataagcaaattgagtaaaaaatgagagattttttaaggaaaagaaaaaaaaagttgagagattaaaaaa

SEQ ID NO: 391991 - DNA, 395 bp, Cannabis indica
tacttgtgactaaaataaaatatttagttacaagttgtcacttaatttagttttagtcacaacatgtattgtaactaaaaatacatttagtcacaacaaattataatttttgtgactaatacattcagccacagctcttttagtcacaacataagaataataatttataattagacgtttagtcacaaattttattgtgactaaaagtaaaaatttttgtagtggaataaaacactttattaaagtagttgttctctgtagggatgaattcaagactagaaaagctcacttagaaatgaagaattttaatgatcatatgatgaactaattcctcttcgatttcatcattcaaataaaatattgtcttcttcattttcttcttattcttcttattg

SEQ ID NO: 391992 - DNA, 1721 bp, Cannabis indica
accttaagacacggactctggccttgatctcagtcccggactcagaccacggccctaactccaaacctaaagctgacttaaataaaataaaaaataaaagttatagaatttatgttttaaacaaaaatggtttagacttataaaaataccattatattgtttttctctcaattaagaacaaattgaaataacagttttaggcccaagcccaagcccaagattcactgggcttccatataacaatcattagggcaaccaagttcgtttctttatataaatcattcttcttctctcccaaatcaagggttaactgctagggttcttatttgctttcagtatgtgttttgcttcatatttcgattgtttaatgcatgttttgtctcgattttgaatgatgaaaaattcgcttacatgccaagtgacgcaccgtctttctgggtggtgctatgaatcggcaatttccacacgagatttctgactcatcaactcgtctttttgatttttgcttttttgattcgggttgttgttaattactgagatttatatctttaaggtttttatttttttataagaaaaacttcgattcgaaatcttagatattgctctttattttaattgatttcttgaagtgttcatttaccaaccctaatttccccaatttcaatttcaaaatcgggcataatagcatatctgattatataaatctctctgctgatacaattgaataatagcaaagagaatgagatgagatgcgaaatcgaatctcaaagttggtaccttcggacaggcaatttctctccaatcgttgatttttgccctttctcgtaggtcccacattttctcatcgcccaaacaaatctctaataataaattttgctcgatgatgattgattttgctttaaccacactgaaaagagaggattagggataaaggaagaaactttatttggattaagacacagaaagacttaaatcctaaacttgtttgtgtttggttttgctttgtgattctttttgtctaataaaagaggcagattgctttaatttagtgtttgcctctttggtttagagattgagaagaaggctttgccaaacacttctatgtttggattttctttgactttttttgtctcttaagtttgaagatggttttgaccttcccttttcattctctcaagtggaaaaacctggccctagtctgagagcattacttttttaagtctattgaaatctcttcatttgtatatttaaatcaacgagaattggtttgtttttacaagaattgagatttggaagtgtttcaagaattgcagctagttgtaatattttatgtcatcttttattgtgcgaattgagatttggaagttataagattatgatgtattataacataagcaatgggaatggattgtgataatggaatttatttcaattgaacatgttttcttcaccatggatttgagacataaaacccttttacaaaatccagaaaacaaaccaatagggacaaaaggtttgatgaaagagtttattgccataaacataatgtgcaaacatatatatcctacatatattaaaagagccaataagtactactattcatgagaattattcaccttttattccttacatgacacctatatatatacataaaatattaataaattattcaacaataaaaattactacactttccatattatatacccctatctcatcta

SEQ ID NO: 391993 - DNA, 1268 bp, Cannabis indica
ccaagaataatataaacgttacaacttcactttttcttccctgaattgtgtagaatttttactttttcctcaaatattctaagcttgcaaatgaaaagggctaaaacaaaaagcctatttatgtgcctttgttgacaattatgaattagtaggataatgatcattaagtcaaggactcgaaatttgaagaaatcgtcctcaaattggtggatgtactcatgaataacatctgttcatataccattcctcaaccagccatccttcagtttagtagtttattagtgtgagaagatatttggttgttagtgtgaagagtggtgacttttaccaaatctctctagactctacaaaattaccacacagttcttgattggtggcttgtttttaagaactcaattcagatccgtattcaataaaatacataggaagatcagcatggcatttggattgcctagtgttgttaagggcaagaaggctctccgaagatcctttcaaaaggcaacattgcagtgtatatatgttcgaaaggagcaaaagaagcgatatgtagtacctctttcatacctaaatgagcctgcatttcaagaattgttaagcatggccgatgagaggactcacaattccttgcagagtagacatctttattgcatgaattgattgtaaattacagaagaactaacataatcagcaatatacagtatcttgtattcttgttatacttagacaatggaagaaacatacactcaatttcttattacttaaagttttactttcctagtgtataatacattgcttacatattccatgtcaagaattttatttgcactgcaatattttgtttttaaaaataccaacaaaaatgaagaccaagggtgtacaaggattctatatcagaatcttaagaaaaaaaaaaaggttccaatcacataaaattcataaaagaaaatttcttaatattcacttgtatcattcttggagacaacttttatttgttaaatcccaaggaaaaaaatatttacaagaattgtaggcattgtctgcctaaaaaaatgtaacattaaatttggttagctgttgttatcatctattggtgtaagagctcccattggatgatagaatccgaacttttcttcagcttgacttagaaagtcttggaatgaaggttggttcaagtatgccacagggatcacaaacctattcaatctgctttcaccaccaacataaactgctaaaaatcctttcggtataccttttgtgcttgaaaaagg

SEQ ID NO: 391994 - DNA, 762 bp, Cannabis indica
aaacagaaaacaataccaaatatactcttaattatttttacactatacatacaccgtaaaattgattagtggggtataaaagtcaacaataaataaataaatacgagtgttttaagtagagaaaaagaaactaaaatttgattatttttattaaataagacaacaacaataaatttcaataatcttaaataaagagtcggtacgtatcttaattgtattaatcattaaatttttttttttttttttgtaaagaatatcaatcattgagttaaaactattattgtcatacaaatttgagccttaatttttttaaaatatatatatatatataatacaatttatttaaaacaaatcactagttaaaaagaagaagaagaatatatcatacaattgcaaggagagcagttggctcggcctattcttttgagttagggccctacttaattttatggagagaagaactgtgttaggctttgacttatattttatataaatttatatattatattttggtgggagctctatctcacttgctcccaaattggccatgtaattttattatttatatataatcaattactatattatatcttgattcacacattattatatttttcaaacaaatataatttaattggtcactcctcatcttgttatattattttataatataataataaagtagattaaaatgtgataaatatatgtgaataatatatattaagtgtatggtaaataaatgtgtaacctatgattttataa

SEQ ID NO: 391995 - DNA, 1509 bp, Cannabis indica
tactactactactactaattaatacataaatttatgttttgttgtgatatctagctcaaatttgttgcaattatatatataaatttggctttaaatattacaagggtatagtggtaattttgtttgcagttggttttgttgtatcttatgtcaattatttagagtccttcatatccaaaagttggtttgtgggaaaaaaacaaatatttttatatattataataatgtgttcgtgaatttgaattattgttattttctcttttcaataataataatattgatattttttgtaattgaaatatatatgtggttgttattaagttgagatatagctatgtaccatcagtactgattttatatttgaatgagttgtgtttttgttttattttgtgtctttttgtgtgtgttttttaatacttttagacaaaaaaaataggagttttttttttttatactttaaaataatattatttttcgtatttttatagaaatttacgtaacaattaacgaaataacttaaattgtaactaaaattcacatagcaatttatagagtaaccacaattcaaactataaattttaaaagaaaaagttaaaaataatatacgaggtaattttttttaaaaaaattgaggttaaattctaccattttcaaaatttacgcactaaaatagttttgagtatcattttttactttataattttggatgaatttggaataatttacattatatttaagaaattattagtagttaatattttataataattattaaattaatatttgtgatatttaatttatataattatacaatgttatgatattttgtgatagtgctaaaatccttgtacatatctcatagttaaaataattattaaaaggtaagacgagatttaagtatatatttaaaagtaacttacagtataaatatttaagtttaattttttattgtaaagatagatacttaagttatatttttggaattttcgtaagtatcttaccgtttaatcattattcacgtagtattttcttattggtatatttaaattaatttttaaataaaaaataaaaatttaataacctggaccaatcagtagggattgccacgtaaccattgattgaacacttaatggttaagtacctaccgaagtttcaaaaatataatttaagtaatactgtcgttaaaaattaaatttaaatatttatttgtaaccgagaattaaacttaaatattatacagtaaataacactatattaattaaatttaagtttatataaatatgttcaattgattaaacaaatttagataataagaagactttttaaaaatagattagataagtagactttcttgtttagaagaacatatatatatttatatatatatatgagacaggcagggtcggccctgaaacaaagtgggccatagggaaaaaaaaaaatttgggcccttatgttagaaaaaatgtgataattttcaaaaatcggtaaaaaaaatatataatttta

SEQ ID NO: 391996 - DNA, 1150 bp, Cannabis indica
atgaggtgtaaaaatctcattcaataattgtaaaatattttactaattaattaaattaaattaatattttaaataaaataataagaattttttgcggttaaaatctcttaactatcatttcacttgcacttaattttttaaactcaaattttcaaagtaaaactttcaaaatgattgagctgcttgcaaatttaagatgccatttatttttttatatagttaattctcaatatagacaacttatgtgcacacttttgtacatatgtcaaatttatattggtacatctaagattattattttaaaaatataaaaattaaccgaatgacaatttaaatttgtttctaattgattaggtgtataccaatataaaagtgtcatgtgtacgagtgtatacataccgcccatagtgacaattaaccgaatgacactttaaatttattattaattgattagttcggaaggtgttttattgttaaaatttaaatttagatgattaaatataaataaaataataataaaaagagttttggctgaagaaaaactcaaataataataatatttatagcatgaaacgtttcaccaacttattagcgtgaatggaatgatgtaagatgttgagagatgatcaacgtttgcttaccagtagcaatttgtttgggtaggtggaaaagaaaagaggggtaagatttataaactcaattgtaaatgacacttcttttctccgtttttattgcgtgcgtacgtactattaatgtatattattttggttaattttctagtctactataaatattaataaatatatgtatatgtatatgtatatatagagtttgtattgtatttttatttaagatttgtcgttgttgagtaaaagacacatgatttgggtcacccaagtttggtgggtgttgatgactaacctcagaatgataagatgatggacgatagtgttcaaggaaaagaatttgatgaaagaataataatggcacattgttaattattattgtattggctattacatacttttttagaacttatttggtatgttgtattgtataatattatattgtgttaaatattgtattgtattgtgttagtatgatttaatacaatactatattggagaattttcataaatatgggaattga

SEQ ID NO: 391997 - DNA, 569 bp, Cannabis indica
tatagacataaagtttcacttttctaaagtgattgtagctaaaggagaagttcaagccaaaaaaattaacaaagataaaaacctagctaacatgttgacaaagagtgccaacttgaccaagctcaagcattgcttgcatctactcaaaatctgcaagtgttgatgcatctaactcaattttattttctaacatgcctcatatcttttctaaacctaaaatgactaaactaaggtggatttgtggtatttagttcaaccattttatatttacttatgctaatgtgtcactaactatcttaacagtcaccctttaactaatccctactatcacttcaaaaaattttatttttagtcacaacaaaatttgtgactaaaagtaaaatagttgtgactaattacaaatcatcattcctatgctgtgactaaaaaatccatagctaaaagtattagtcaaaaaaatctcaaattgttgagactaaaactaaattagtgacagcttgtgtctaaatactatgttttagtcacaagtaactttttgttgtgactataagtcacatttagtcacaaaa

SEQ ID NO: 391998 - DNA, 1386 bp, Cannabis indica
atcagatatattaatgcttgctcctagttatcgatgaggtaatcgaaagtattgtatggggcaacaacataatgcccctctatcgccattactacattaagaaacataaccaagacccttggccctcccaaatttttaataataattaaattatagtacattttttataatttctatttgtttttgtttaaaattttataattgccccttttatattttctagccccaaaaattaaagttacttctgtctctgattgcattcatggactcaaaccttttctcaatagccttcatcttcaattggttaggaagcactatctcttcaagatttttcaccacaagaactcctattgagaaagtaggtaaatattttgggtagtcttataaaatacaaacgacatacaaaattaagaaagtcaactccttatactaggataactaaaattgaagttgttgcaccaacacgtacaaaaaaacatcaaaccatttatctctagcaacaatctcaaagataaacaaattagtatcctagagaaaagaaatttgattatattatgaagaccaagcccaaatatccatttcttcagcatacacatcgtggttagcttcactttgttctatgggcaagccaattggcaaagttgtaatagacaacacaatgattctcctaaattgccattattgagtcaaagaaccacaagcttgacttaattgtctctgacttaaaactcaaaagtaatcatagcttgtggtaagatcaaagaaccacattctcaatgtctttctttgatgttgttttctttaaattctccctcttgcacaacgattgtgaaaatagcaactacgactcctatagaggaagtgggtaactgggtttcacttagagaattgaaccctttagagcagtctacacttttattcttcttacaattgtgtctcatactgtcgatttctcaagaaataagtgtccttttgaagtggttgtatgcaaaatacgctctgactttttttattgaccttttgttgtccaggtgataaattaagggttctacaaaatgtcacaaaggcagatttgtacaaaagcacgattcttggttcaaatttatcgtctacctttcttcagtaaatctagaactcttgctatgaaggagggagagttggatgggaagtatattgatgtcaatgagaactcccatcatgaaggatgcgagccttttattaaaactagggcttggattgatattacataatcaattatgagagggaaaatcgtcaatctccctaaagtcagagagataagcactagattgaatttcggtatgagaatttccttattttctactcattacagtttgtttggacatccttttgaaaaatgtgttgctt

SEQ ID NO: 391999 - DNA, 619 bp, Cannabis indica
aaaacaaaaaaaaaaataaacacggcctacaaaatctctaatctttaactaacaaaaataattgacaatatattgaacttattatgaaactaacttgtatatttatagtattacatatatatatctcacacttataaaagactatagaccatgatatttctatatgttcttgaatgtcctaatatattattgtacataaaagactattttatagtttctattgacatttggacacttggaagaaactcaaatttagtacagtatagtctatttcaattcaagaaggagatcaaataaattgttgtacataataatgtaaataaataaacaattggcaccaaatatgtggtggtcttctttttctaatataagaatccaacataccagcaacatttagtaatcattcttctgatgttggagttaaagatcagcctataaagcttaatcatgtaagaaaaagtaagtccctctattaaaattgtataaaaagataaaaaaattatcttgaacagattaccaagattgaattttggctttagtatactgtgtttctgagattagaatttactaatggatacaagttttttttttttgtataatagcaatctcatcaaataga

SEQ ID NO: 392000 - DNA, 587 bp, Cannabis indica
catgttatatatttgttgggttgcatgaaatgcagggggggaatttgactaaagaattagtaaagacaaatgaggtcactttgacttactttatatatagtgttcaaaataagaaaattagaataaatatcaaacttgaaaataaataaataaataatgtcgtgattattcgaaaaggggtgacaatttgtgtttgtttctactcgaaaataacttatttgacaaacgaattagtcgtgttaatccaaacttcatgttatcgtatccagctcattttgctaaggtagaaaatattaagtatctgatgtgaagttgtatcaataactttaactctaatacaggttttccattgccaaatcataatttggtaaacgtatttccttatagtatgatagcaagcaagcagggaagaatgtaattgaacagcatttaataatatatacaggaaccatagcttccacctcaaccaactaagctatgaatatttgttgtttataatacacttaattttacttaaataaaacctaataattttttttatatttttattttgggccccaaaaagtatgggccctaggcacgagcct

SEQ ID NO: 392001 - DNA, 514 bp, Cannabis indica
aaaaaaaaaaaaatcctctagtcaaacaagttgttcattcatttgaagagcatacactgctaatctatgtgcagctgtattgattattcgttgtacatgaattagggatcctcttaaaaatctagaaaacaaacttgtaatattctctaacaaagaacccacgtcatttaagtaaacatgactattattaaaagtaaatacaattgctaaacaatcagattcaacaaatttcaaatcctgacgagacaatctaatctacagccaccacaattaccatacattctgcttataaaactaaaaaacttcctgcaaaaataaacaagaaaacctagtcttaataaataccatgacagaatacttaaatttaatcctcataatataaaaaaaaatatataaaaatacagttgttaaaaatagttatgaatacattattaaaaagatgtagtaatgtaaatgaaaaaaataattggaaccgaagagactcttccttggactaataaaaaatatatataca

SEQ ID NO: 392002 - DNA, 505 bp, Cannabis indica
aatacaaagtgaagaacttttagtcacatacgtatgtcgtcaaagtgtagtcactactcgacagggcctagtccaggaaaagaatttttttaaaaaaacttatgaaaaacttttagttattttactttcttcctcatttttttaaatatgaaataatgaaaagaaaagcgagagatcatgaaaagcttgaatttaatgtagttgggtatatcttactcgattaagagatgtatggtttgttaggcaattttgtcacgtattatatagaacgaatagggtgtgtaagatggagtatacttttattttatttttccctctaaataaaaataatattaattactaagaggataagatttatttattgaccaaattgcttttatggagtatatattatatataacagaattcttagtttaaagatagtttctacgttaattttaacagaatatcctattgattaacataatattttttagggaaaaaacagaaaaatacaaaaaaggaa

SEQ ID NO: 392003 - DNA, 680 bp, Cannabis indica
ttttttttttgaaagagtgtagggtttgatttggtttttccttttcgtttcaaatagtgtttttgaaataatatataattacgaaagtattatggctttcgataagaaccgctcaaacctcatctaattaaatactcttattatttatgtaaaaaaaaaaaaaaactcttattattattttattatttatttataattctatgaataatgttcgtaatcactaaactttcaaacgaacgctaaagattaaaataaatacaatatttgaaataattgccttaatcaaatgaatttacatgcactccaagcacaaacgaaaacataattgttaacaaaaaagtcacagtacccaattttttttctttttacataagtcacagtacccaatttgggcaaactaatatgcgcaaaattatgcttttggttaaaacattattgtaggacaataaccaataaaatccttatgaagcatattaatggtaagtaattagttagagcatttggaatagaaatacaaatgactgatagaaatgtaaaatatagtttattttgttaaaattttattctaataatatgtcaaattataatctaaatatgttactgttgcccctgattttgcccaatatacgtggaccaaccaaacaaggacacgtagatcaagcaatgtacaattcaaaaat

SEQ ID NO: 392004 - DNA, 1091 bp, Cannabis indica
agaccatctttaagagttcccttgagcaataccttccctgtttgcttgtccttgacaaagcagcatgatttgtgaaattcaagaaacacaaaattatcattagttagttgagatacactaactaaattcttggtaattttagggagatgaagaacagaatttagtttgatggaattagaattgtggccagataaagaagctaaaccaatatttgaaatgaaaagcttcttaccgtctccaacagcaagtccttcaaatcctgggtaggcagtggctgagtcaagattggcaatgtcattagtaacatgatttgtagcccccgtgtctacaaaccagccagagtcatccccgaagtcaggaatgaaagatgtagcataagcttgaggatcatactcagcctcatattcagtcatgaaggctctgggagttgagttctgagaattcgtagaagctcctggtttgggggtaacccaagttttgtcgaacctgtaatgacacacaggtgtcgtgtggccatatcgaagacaaagctgacaaaggggtcagccagagggattttgactcctgtatggtggtttggcaccattcttgaagaactgagggggacgataggcattgtttcttgaaccagtaaaagctatgttggcttgaagtttcatggcctgatcagtaagtgagttgtggtgttcaagacgaatctcatgagagagtaacaacgcctgaacttcttcaaaggtgagagtgtcactgcgggtagtgatccttgagacgacaggatcgtactccggtccaagaccgttgagtagttgtaggatgagatcttgatccaaaatcggagatccagccactgcaagagagtcggcaatggcctggactttgtcgacatagtccgagatggattgtccgccttttcgaattgtgaaaaactgattcttgagttgaagcaggcgtgctttggattgactcgagaacttctgttcaagagcacgccagactgcatgagaggatgagaaacttgcaacagatgcaagaacaccttcggtcatggacgatcgaagccatggcagaaggagttgatcctttcgtttcca

SEQ ID NO: 392005 - DNA, 655 bp, Cannabis indica
ttttctgatgtcccttggaccttcaataaatgatgataggagaatcaaaggttttctaatattagaagcatttctttctccgagagcaaatgaatcgacaataccttgatatgtctcaaaacaaaattcttctttgtagcgtcgataataatacaatctcgacattttaattttaacatacatatcaacgacatattattgtaatagtattccaaactttagtaagattgaattgtcattttctcgaatttgtagtttgtaacagtaatattcacgacatgaaactatttcactttttgtttgtttgtttaataccaccaaagtaaaacataagtaagttgttattaattaaaaattaaaatataaatcacattttaatattgtaatctaacctctttattctcttgcaattaattcatctgcattggctgattggtcagggattaatgattgatttgtttcatcataggtagaattgcggcctccactattccttttaatatcttcatgccatccaatatctccctaggaaaacaataatggatattgtagtggatcataacaaccaaaatagtattgcactttatgacttaaacaagaatgattatatacaaatatgtcactgttaggttttatgccctaaataaaactcttt

SEQ ID NO: 392006 - DNA, 760 bp, Cannabis indica
attatttcaaaaataccccaaaataataaaaagttaacgtttttacggatttttttttataacttttttatggactttttttctcttacatatcatttttaggttgttccaaaaataacgttattcacacgttgtttttacattgcatacatatagtataatattgcaacaatatgaaaaacaatgttatttcctaaaaaatgatctgtaaacaaaaaaaaaagtaattttaagtattttgcgtaaattttccaaaaaacaatcactttgcaaaaatattaatttttttctggctttccagaattaaatattttgaaattagtttctttttattctctaatacgtgatttacagttaagaacctgtggcatgcattttaatacgtaataataattaagatccaattatatatgttttagaactggttagacatagacacttcaagaagaaattacaaatttaagatcttgttagtatgcccagcccaggtggtattttcagggctataagtcactacttaagtaagcataccaatcttttaggcccaataattttttttgctggggttttaggcccagtcatgtgattttgtcatctttaattggctcttttttattattattattttttttctttctgaaattgtctcattgcttcttgtgttttatcgtgtttttaaggtagaaatattaactctttttatttttagttataatgctgaatagttttagtggtggtttggttgtattgtattgtatta

SEQ ID NO: 392007 - DNA, 723 bp, Cannabis indica
tccctcatgctctcatcagctgcgtttttgctcaatcatgctggcaatatgcacatccgtccctcaacaatgccgataacaccacggttggtaatttgctctacaataattttcttgttactaatattgataccagctgccgaattagcatgctttgttgggcaatttggaaagcaagaaacaacctcgtttgggataagaagccttctacaccacaacaagttgcttcattagcactagtttgatcaatggcgtaaagctcaagataaagtcaatttattgtcattggcatttgaaaccgatggctctaaagttgagcaatggactaaacccgcaccaaatacaatcaagattaatgttgatgctgcgttatttaaaaatgaaggttcttatggctatggaattgttgcacgagactcttttggaaccttgctagacacgtggcagcttgcaaaaatggttcttttgctactgaagtagtggaggccattggggtaaaggaagctcttagttggctcaaagataagaattggaatgaagtggagattgaaactgatagtatgctcaccgtacaagctatccgtgcctctcatcggatgtcctatgttttttatttggttattaatgattgtaaacttttactctcaaatctcccaaatgtttctttgcattttgttagacaatcagctaatcgagttgcccactatgttgctaggtattctc

SEQ ID NO: 392008 - DNA, 647 bp, Cannabis indica
gacttcacgaagagttaatcatcttcatactgtacaaagggttctgtaatatgtgaaaacaattcaaagataaggtttgttttactctacagaatctgagaacaggtttgaagcctacacagatgctgattaggcagcttgtgttgacaactagaagatcaacaactggattttgtgtgtttcttcgcaagacccttgtgtcctggaagagcaagaaacaacatattgtttctagatcctctactaaaacaaagtacaaggcaatgtcaaaacaacttgtgagatagtttggttactttccttgatgaataaattgaacattgagcatcatgaaccagctatactccactatgacaacaaggtagctcaataaattgttgcaaatccagtatttcacgagagaataaaacatatcaaaatagattgtcagcttgttagataaaaggtccaagagggtgtcatcaaaacatctcacacatcaagtaacatcaaatatctaatatctacactaaagatctacttccagcacagtttcatgttttaaaagagaagatgggcctttgtaatatatacactccaccttaagggggagtattaagtttgataaggtatagtgtatgatgttagttagttagtagttagcttag

SEQ ID NO: 392009 - DNA, 1568 bp, Cannabis indica
ttgcatcgaagttactgctgagctttgcatcgttgtggaggtttccagccaccatgcgatgagctatttccgtcaattgagcttgttggtagcgatggagaatggtcaagaagagcccaatcaaccataaagcttcttgctaagagtattgctttcatggattcttttcttgcgcatgaaccatgtcagagtagtgtgagcaattaatcatcagtttcttctttactatgaactaagattatagccaccaagaattcatacatgtcaaaaggtggagcaaagttgttatggattggatggaaaaagctacctttacaaagcatgaaaagtagactcatgggcagatagaacctttacgaagcatgagaagtaggctcatgggcagagattcaaggcaaaatattaaagttccaaattgtctccaccataccgaataacctaagaaattcgaggcttgtcctagtctggctaatcggcggctgcctaaaaccacttccattaacttttctacattatctttcaaaatatatcactattttttttacctcaaatttttattttacgccatatattaacttctttaaaaaatatattatcaaaactcttttttttttcaaacattgatataaaacaaagtttctgttgaaaattgaattaaagaaaacttgtcttaaaaaagttgatttatttcaaaattcattcaagcttacttttacttttgactaatattaatatctcaaaaaaatatctcaatttaaaacataaagaattgcatattagtagttctaaatcaatcatcttgaaaatgataattcacctacacatctcttagtctactctaagcagtgtttatttggttctttaacttggttgtttgtttgcttctttcctgtattagaaaaagaaatcaagtaatctctaactaattagtcatacctttatcattagtgacaaggtgaattaaatagagtcaggagtcattaagtagcacttgagttttttcttttaatcaatttggcaatattttaaagttgttgattgttttaataacgaggtttcttcaatagacacaattttgacattaatttatccacaaattctaaatctttggatgaaacttaatctaaaggttcaaattaaaacatatattaataaaaaaaaaatatagtgaaagcaagaataaagaaaataaatttaggtggtgtttggttgagaagaataaacatataggaatatgaatgagaatgagaataaaaataggaatggaataaaatttaaaatgtataaaaaaattgataagaaaatgattaaatttttttcttgttatattagaataatctttcattcctttttaaaatagaatagtcattccaccacctttcaaaaaaaaaaaaaaaaagaataagtcattccaccaaaataggtataaaggacattctattagaatgacatttctaataatttaaaatgtaaccatataaatgaatgaaataaaaattagtttcatttccatttctattaattttctattacttcctaaccaaataccatcttagtttttttttttc

SEQ ID NO: 392010 - DNA, 1656 bp, Cannabis indica
gaaatttgatatgtaatacaaatatttataaaattaccaaataatatcttaaacataatagaattagttacactatggaagtttttatatatatatatatatattaattttaaagttgacaatcaaaatgagcaatcaaatatgtatgggaaaaaaattatcttgaatcaatttttttaataaaaagtaactaattgatatattatttacatcaaaaatgacttttggttgcttttttcatatacttgcaaaatattgaaatttttggaagcagagatttttgaatttttttttcattttcgataattattttaaattttagtatttatgttgatgtggcatatcgatattcatgcaaataattttttaaaaatatttttataaataaaattaattttaagtataatattagaaacatctctaaaaaatttatactaaattttaccataatcttcctcatttatattattctgttatgtccattttatttaaagggttaacaagtcagaaagcataatattattttttttttttcttttgaataaaagtcagcaagcatatagttgaaagctgccaaaatatatttttgggaaagtgacaaaatgataaatcaaagtttgagagagcgaatgggtgaaaatcaatataactatagcatgatggacatcatcaaacaacacgagtgccattcattgctggcaaaattacatggcaatcaacaagcaagagtaagacccctacggttagactgtaccctatacatgaatactatatatatactttttaagggacaacaaaaagtgaccattttcccatcaaatatatcctcattgtatacatatatttcactaccatatatattccctacggttagactgtagcctatacatatattaacaagtaaaattttaggtaactctttgctgctcacggtaccaaaaaaagctaaaactcctaagcatactgtattttttttgttctggtttgagtccagtatgacggttaggagtgtggttggtgctccagcgatgtgcgtatggaccaatgcaaaaaatcctcttattactctttgacaagctatcccgtgagatttttgaattgatgataacaaccctgtggtggttgaggtaatattagttggcaacaactagttaagattggatattattccagacttagccaataaccatctagcagagtttaaggagtatgattggcaaggccttcatttgggtttgaagcttgtgaacccagtagtaaaccgagctactcgatagatgccacctcctcttaaatcctttgctctatcaacggatgtttcagtggttcagggaggggctttgttggtttggggaaagtgatacagaatgtagagggtgtggtttgtttggcgtggtcatcagatgtgttaggtaatttctctgctaatacgtggcggaactgcctgccattcgtctgggcttgactcttgcacatcaatttgatttcaatatctccattattaatagtgactctactgtcgcaattgactggattaataagcttttcgttaattttagtttttaatctattttattagatgttaacgcagattttcgttaaccaaatttcagcctcacgatagaaaaaataaaagctatagaaaaataatatatg

SEQ ID NO: 392011 - DNA, 548 bp, Cannabis indica
ctgcttcaatatcagcataagtgctctgttcactcggttgtttttagaatctgaaagtgttaccttaaagttatacaacaatattaaaattacattatagttaagactaactgaacttgaaaggtagaaaagtttggaattagactcatttcaggttctttgaaaaagcaaaaggaaaattccaaaatatattattaaaactaagtaatcataagagcgtgttaatcaagttccaaaaagagaagaaaaaaagtcattttcagcttgaagattctcaaatgggttcaaaattaaaaatcggatcaatcgaaccaatctacaacccaaatataaaattgtatcaactcagtattttttattttaacaaaaattatatatggaaaatcggactaatcaccattatatgaaaaatcaataactcttcaataaagatcacagtaacgaagaaataccttaggaagaactcgaatagtgcaagtcgccatcaatgattggaatgcttggctattattccagaattttccatgacaaaattcaaatttcttagc

SEQ ID NO: 392012 - DNA, 750 bp, Cannabis indica
tttttttttttgctatatttttatcaacaaagaaaatggattatgtggaatgttgggcttgaagtgattaaaaacttggccattgtgagagaatttatattgggccattatccattgcttgaagtccacatgagtgtcttggtcaagattagcccatggcctcaaatttcatctttacatcatttatacaagaaagttgatttgggtttgtatatttttattcatatattcaccaatattagtatgaaaaattacacccaatactgtatttttttttcttttatattgttatacagtagtttttacttttatactgtatttttttaaaaaaatttctactgccatatactaacttgttttaaataaaaacttacacaatttgttccatttaattattgtgtataagctaaaattaattataatattttttttattatttttaaactttgtaaaagttaaagttttgatgtgaccggtcatgtcatttttgtgataatttttctttttttttttaattaattaaaattaatgattaaaaaattgagaaacattctcatacacacttcattatgtttttatctttatttcacattttatcttttcacttagttttcttcatggctttttttcttttattttttaattgctctctctctctctcatgttcatcatcttctctgtgggtgtttttttgtatttcaaagtccatagttattattattttttttagttctttttcacttttttttt

SEQ ID NO: 392013 - DNA, 762 bp, Cannabis indica
tttgcaggatgttttaaataactccaatgtacacgactttgaaaaaaagtttgacaaaagaaaaattcctagatgctgaaacaaataggggttcatcggtgtatcctttttaggcggtgcaccgtagaattttctaataatatttattacatataatttttgaatacttctacaatgcactccaaaaaaaaagtatcgatgtatcccttactcttttgacatcgaaaaaaaaatattcatgacataatttttttttcatgatcacgtacgttataattatttaagacatcttacgaaattttgagaaattcagaataatttacaatattgaaagtagtattcaaacaatctattccacacatataaaataaaagagtcacgtgtgcaactgactgtttgaatcttgttttttgcgtgttaaatttatttaaatttctcaaaatatattctactggatgtcttaaataactatagcatacataactatataaaaaacttattatggttcacactgtcaataggttctcactatggtaaggaaaaatcccaacattgtcgctcacctaatcaatcgcgaccaaggtagcatgtgtgaccaaatgccaacactaagttgacgtgccaacgcctctagtcatgccccatttgatattgtccaaatagtctccctcatggcctaaggactagggggctgtacatcggtcggtttgggcggtttatcctatatattttctaacccaatctaaagttcgggttgctaaa

SEQ ID NO: 392014 - DNA, 654 bp, Cannabis indica
atttgataaatagaatgttactaattaagtttgacgacattaagtttagatatgtgcatggaatattctctccctagaagtaaactcttttgtttctattaaatcaatcttttttaatgtttaggcttaaattgtgagagctcacaattacaactagaaattagaattggaccaatgggcccatgggtccttcctggcttcgtataattccatttgtggaattttgaagttatggtagtagagtctctatgatccgtttggcatagggttctagatcttcatcctctgagttagagatgatcccactttgtttccttacaagcttggccagggcagctatttgctcttccaagtgcttggtgtcactattcgggagctcatgctcatggatcccgtcattaatatggttctagagatcatctccatgaggcctcccccttttgcctctagctttttcccattttgcatttaggtaattacggagatctacagtggaccaactatcttcaggagaaattaattccccaccttggtttacagaattgcatgggcagtttttccatccatgaacgacaggccttggtaccagagcactgggcctactattccaatcaaccctggcccgcggatcatattggtgttggaaattatttt

SEQ ID NO: 392015 - DNA, 1470 bp, Cannabis indica
agtatgttaacctgggcactgggaactaaacaaccttcagtaaaacgactataactctctcattattatcgatctaattgacgcgatttaacttgcattttaaagctccttcaaagctcttccaagtcatgtcttacacccatatcatagttctgaagatttcaagttcaaatttcatccccaaggcaagtgagattttttttcacaaattatcataacacaatccaacagacgagatctgagcttcaaaaattgatgatcatcatctagagtcatttcccattagatcatcatcaatgacaaagattaacctaaaaatatatttttttcatattttattattattttaataggacatcattcactataaaaggagagctccactaacttatttttaacattcagagaaaagttcataagattaaagcatttctctccctagaaatatagatattttgccttagtcaatttttttgtattctcacgagcaatataaactcaaagtagacatgtctttattaccgtcacgacacaaaaaataaactactataaatcttgtgtgtctctttcatttattctacttaatttctattcctctcactaatctaacaaaccagtgttaattagtttcctgcgtcaacttattatttttatatatagtattatatactatactatacatatttaaaggggatgaacctcatactaataatttccatgcggtgcaattaatttcaataaatagaaaaactagtgattaataatttcctggtttgaagttgaaacatttgaagtcaacccaaagtttccttgaattgggtggaaaagaaagttatggacgttagtgactcaatgatgatcaatcccattatattaagggggtgtttgttatgtagggagaagtgttgagaagggtgggaatttgaattgcaccccacgtttggtgtaacttgttaggtgagaatgtggtgggtatcacaaaattatatcaggttatttgtgagttggacttagagggagtagaattagagggtgcttattagattaaggaaaataaaattaaatattagaggggattaatattaccatcaattaaacttaaaaaaatagaacccacttggaaacacaccctttatggaaattaaaatttcatttgataatcctcttgagtttgacactaaactttaatttattaaataagggttaagttttgacattatcattcccactaagtctagtcacatataccaaacaccatatgaactaccttttatactcttgaatttcacattaccccatcctaactcttatcacaagttcctagaacactcagatagttaaaacaaacatgacactcctattaagaaaatgctaattaggatttttgtctcctgaactttgatatgtaccaaatcatgtcccctgaacttttaaggtcgttaaaaatacccctgaactattgagattgtt

SEQ ID NO: 392016 - DNA, 1575 bp, Cannabis indica
aaaagaaaaaaaagaaaaaaacagcattgtattgcattgtacctataggctatatgtctattactagttttctatttcatttacatttgtctcagatcatagcttctacacctgatcctgatacaagtgtctttacaacttttcactagattctaaaatgatttggaatctacaatcatctcatcatctactgtgtactgataattcttcctactaagataaaataactaccaaatcgaaaacaactcaattgatagtactaaaatgtaaggatgactgtagcccacttctttctctacgaagaggaatgttcgccattctttttctttaggacacaaggaacccacagatacaaagctcagtatttgtgtataattcgagtccaaattaaattaacaataaaaatcaaaacttgagcattttaatactatgtaaatccaacaaaaacaaaagggtctgatctcaccgtaatctttgataaatttcttgtggcgatcgtaggcgttgagtccgctaatgtgagcttggtactgcctgaagatataacatataaagtcacaaacacagaatttgatttaatgattaaaaatatgaatggtgagagtaataatgagagggaaaatgttaaaaatatgagattaaagtactgttttctctcttctttgccgaaaatttcagatttgagagacgcaaagtgcgtcatggctggttttgattgaactcccgaaaccctaatttgagtgtttggtgttactgtacggacactccgattgccggggaaaaggacgacatgaatgaaaggctgaaccttttacattcgttgtttgctttgggcccactggatttggaccagactattatgggccttgggcccaataaaaatatcttttcaaaaataacacattgtataatacaaaatatgatttacattatgtgtaaaatgacattttttttatatatttttactgattatgattttttttaatagatttcttcaatttacatttttacgagcacctttcaaattaatataaaaattaggtgaaaataatataatataaaaataaaacataataaagaaatatgcaaataatataatataatgtagtggaaatattgaaaatattatagattctcattaatattttttttgtcatttttttggtattgatgaaaatatcacttttaataaactttataaaaaattgattgaaaaatatataagtattttatatatatatatttagtatatgagatattcttataaaaaagttatgtcataccaaaatataataatttaaatgagatgaaaatttaaattttgtaggcaaaatggtgacaagcagaattcatgtaagaccaattcttatcaccctgtaagagggtggctgatggaagaggcactagcgtctggagggacccttggatccctcacttaaaaggtttcgtcccgagaccaaacagaagtgttgctatggataatatgtgtgtggctgacctccttacccccatgggtgggtgggacactcttaagctatctagtttgttcgaccaggaaactgtgtcagctatcct

SEQ ID NO: 392017 - DNA, 854 bp, Cannabis indica
gggaaaaaagtttaaaagagtttttttttttttttttttaaatttgaaacaaaaaacaaataaaaaactactaaagcaacatactaaaatagactctaaaaaatgcaataaaaataaacctaatataaacttttatgacccaactccttccattgctaaatctgcttccactcgcaaaggtggagatagtagctggaagaggccaaaattcgttgtatttttggagtatggaaagttagaacatgatcttcgtgggaaagagagatggtcatgaggaggaaagacatagatgggatctggtaggaagaaaaaaaaagaagaaaaggagaaaaaggaaaaaaggaaagattaattttttttttaattttaatatgatttatttttatttttttttcatttttaaaatattatttatatatcttttaaaataatgtaattatgtggaccaagaaaattatgccacgcgtatattatatacatataaacaatttcaacgtggcagttagcaactaaagtttgatgaaagtggtaaattactaacataatacgggtttagaagattttactgtcaaaaaatgagttacaaatatagtgacagttttaggagttttgtcggaatttagtttacaaaatattttcattttttttatttataataagaaagaaatcaaatacattaagggtttgtttggaaacaactatgtaattactatgtagtgtattttaaaatacaaggtgtgtttggatgtaagtggtaattacatgtgaattcctaatatcatgtttggtatgatagttagtaattacacagtaaattaatattataatatttaaaaataaatttcatcaattaa

SEQ ID NO: 392018 - DNA, 1304 bp, Cannabis indica
aaaaaaatcttttaacttcggttcgtaactgaagcagaaaccaattagcatcagtgcacttgttttttgcttcagttatgaaccgaagtgaaaccttttttttttgctttcggtttataactgaagcaaaaaaacatttagtgtcagttcgaaattgaagcagaaaaatcaaaatttgcgtctacggtaataacgtcggttgctcaaaccgaagcaaattgtttatgtgtcactttaaaacggaagcaaaagatcctttttgtagtagttctatcaccactaactctcaccaccacgaccaacacccaccaccaccaccacaacctatttttcatattcaaatcacaaaaaaaaaaataataataaatttaaacagcaataccatatctgaaacaagaacatagatttaaaatcttccaaatattttagaaaaaatacccaaaataattttaactatagttgtttattattaaaatccttcacattagttgttcgtttctcactaggaccccgtcgtaaagcccctatcgagaaattttccttgccattgaagctcaccacctctagcgaagaggacatgaacagagaagaagatggcacccttcatcagatttgatcgccgccaatgagcgtgttctctacgagagtttggagtattggtcctctctccgatgatgatgctgttagaaataatagagagattacaatggaggaataaaataagatgaataaaagactaagacaattactactctaaataaaatattacaaggacaatatattaaataaagagttacaatcccaaagcacaaaatacaaataaaagaaaagagttacaactcaaaactcaaaaatacaagtaaatgtaaactatataaaagtatatatatatgatatagaatatatatagtatgtatatataatatatatagtactatatagtcaatatataaatatatgatagtatacatataggagtgtttagaggagaacaagaaaataatataaaacttgagaatagaacaaaataagaaagaagaataaacacccaaagtggacatggggatcaccaaaagcttgaacaaagtttctacacctttgtccaagaagattatttccccctctatgaaacacttagggctttgtggaaatacttctagaaattatcacacacccaatggctgttaccatttcttaatagggtgtaaatgggattaaatgggtgatttggaggttatgggagttgctaaaagccatcccaatagcaaaaaaacgttttactattaatgctgaaaaaatagtaa

SEQ ID NO: 392019 - DNA, 1825 bp, Cannabis indica
atttttaacataaatattttaagaaattatccgtgcgaattaattagggatacttgtcaataatttgacactcagggctagtttggcacagctgtactgtgagaaaaaatagttgtagctgtgctgtgagaaaaaacagctgtagctgtgctgtgagaaaaaattactgtagcctgtgctgtgaaaaaaaactactgagtgtttggtaaatataattttaaaatagctgtaagttgaaaaaattgtatataagtatttgataagctagatgattgaataactattaaatatacaattaccaaaataagtatgatatttgttatctaatttatttaaataaattcatacatattaatatatttataattatttttttattttattacaaattacaataattttttttaaaaaaatatatataataaaataattagttagacttgtaccaataataataataataataataataaattacataaaaatgatagagaaagatatattcgggagaaaagaatcttcaaataaaatggtaaaaaaggaattttataattagaatgagagtaattttgtcaagtgaaacattcattaaaccaacaaaatagctttccataagctaatttcccaaagttggtgttggccaacttttgcaaaaagttagaattttttcttaaattcttaaaaaaaaactaattttctaattttaccaaacacattttgaatgatagctttttaaaaaagtgcttctagctttcttaaaagctatcccaaacgcacccttaatagtcttgtagttacaaaaactataaaaatataacttatatattattatatgcaagagcttactcttaattttttaattattgaagtaaataacctacgtaccaattatttcattactcgtttcatgataaaatttttaatcgaatagaatatgatagaaagattatgttactgtaaaagttatatttcaattgagtattattaaagagtttatactataagggtgtacaatttaatagtgtaaaaagtttagaaggtaaaaataataattattctttttatatagaataattagtatttttatcctctcaactttcgacactacttgaacttgccttttaaaatatatgtcttgttaaaatttcccctaaaactataatagttacatagttatgcccttctttgaaatggaaatttatattgcgagaatagataatcgtggaccgtaccaaccccgaccttggcggttaatggggcagtagtggggataatttcaatacccgaagcagggacggggcatgggcagagataatactatccgcactatacctggccccaatatatatagtttcattttatttttaatgtatatataatataataaatatttgtgagaatattggtttgatttaaatttaagagtttgtttgattattttaaattattatatatatattttttctattttaccttaatgaatactcgataggttcttcataaccgataattattttcctaccccaaattcgctagttattagacggggatggggatggggggcataaataggtagccgggatgggcgcgggaattgcattccccatacattaacctcacaatttccatctttaccccttatgttagattttatttcttttaatgtaaaaagttagtatttttactcttaaactttgaccaatacaaaattttatcctcttttattaaaaaaaatattttacacaaatttagatatttgaaaaaaaaaaacatactcaaacatgtgttcccataaaattttatttttactaaaaattaaattttt

SEQ ID NO: 392020 - DNA, 1219 bp, Cannabis indica
tttttgtgactaatacctttagccacggactttttagtcacaacataacaattataatttataattagtcacaactttcttactttagtcacaagttttgttgtgactaaagtaagattttagtcacaagttttgttgtgactaaagtaagtattttttttttttttttttttttttttttttttttttttttttaattgggcacatgatgcctgcccaatttttaataatttaacacaaacagatagagaaaatataataagttttgtccataacatctctagatcagattattattaagttttattttgacaaaaaattagtttaaggtcctatttgtacaattttagaaaatacaggatccattttgtcatttaacaaaatagaggatctaattagtaacttttgtaaaatacaaattctaaaataatatttacccttagtatgtgtagacatttttttttaattgtgaaatgtaattaattaataaaattttctctttctattcagcttttttttttttgaaaagtctccatccaaaatttaaatatacagtatatacatactagtgggaagcccatgctttgtgggccgctagtaattatcaattattattatttttttaaattatagttcatatgtattatatatatatttttagactaattgtaataaaattttatattaacaattaataatttttagagcttaaaatcttgtcaaaataatttactctaaacatataaaattatatatataattaatgatttggtgtagtattaaaataattaaattatttaataatattgtctgtaggattatttattttaatattataaattttttacattatatattttttacaattattttgaataattaatttaatatatttgtgtaatttatttgagacgataatagttggttttgataaactcaaacaaagtgttttttaagtttattggtttggatttatttcatgtgtaagagattattttttacgcgtgaaatgatagttagactcttaaaattatttttatttttatataagtaattgatttaagaaaagaaataaataaattaacaattaagaaaataaataaataaatagaataatagtattggaaaattttacaatgcacccccttaaaatagatatattgatgcactcctatctgttttagcatctgaaataattttttagtcaaattttttctca

SEQ ID NO: 392021 - DNA, 692 bp, Cannabis indica
aaaaccccttaaaaatgaagcttaaaagtcctatttatatacctaaaaactcatttaaacataactaaaaaattaatttttcgcaacttgtacagatgtcatacgtcctctggccgcctcagcggttcttaagtgtcgtcggggcaatggttgctggaaaagttgcgtcgtgctcatattattattttggccataactccttcaatacaattcgaaattagacgatttaaaatgttacgataaaagcacgagatctacaaattttatgttgagcttcaattccaattatgcatttaaagttattaaaatttgaaattatgttcagacagttaaaccgagctcttccgcctccactattttctaccaaaatatgctaaaactcctccaaatgactctaaatgcattcacaatatcctaacaagtaaaaattatattaatcaattatttaaagaattaattttaaaatattaatatataaattgtatcattttttaagacaaatatggacttaataattattaccctcgaaacataaattttacagtagcatggtccgtccatcatattctgtttaattttatcgtgaaacgagtgacacagtgaatgatagttgataaattgatgtaaagtaaatacctttcacacttttttacgattaaaaaactaaaaatataaatataaattattataaa

SEQ ID NO: 392022 - DNA, 999 bp, Cannabis indica
gacccaatgcccaagttgacatcggcactgggccccacaccaaggttgacatgcaacctaattcgcatagttttgatcctcatacataaattctattctgagcattattcttattttggtcaaaaatggtgtaagagaccccattcaaaattttgaatgccttagaagtatgaaaacaagtctaaggaagccacccaggatgcacataccgcccaagttaacgtatagcttggtgcgctgggttttcttatcaaaacttgattctgtctcgagcatctaactattttttcatagtaagcaagagccataacttctaaatagttaaattaaaactgtgatatttcaccctttagccaaggagaaatatcgacaaaatcaagaagtttcaagtctacctgatctcaccaaaaagcgacatctccgagaaccagtgaacaacttcaccagaataagtaatttgaataagtgatgtaaacgtatcacttaggcatcaaaaaatacaagtttaggatattttttcacttactcagcatccgggttgacgtcaagatgtcaacctaggggctagatgtcaacctgtgcgctgggttgtcaacatgggtgttgggtgctaaataaccttcagtaaaatagccataacttcctaaatattgatcctattgatacgattcaacttcctcaataattctttttaaagttatgtatcacacttatattgtaattctgaagattttgagtccaaaatttgttcccaagacaagtggaatttttccacagattgcctaaaaacgatctgacggacgagatctaaactctaaaaattgacaatttccatcaagagtcaatattcaccgttagatcataatcaatggccaagattagcataaactttttgtaggaaatattttaccatgatctagatttactaacaagtatgtttctattaacaccctaatatgaattataaaacaataaaataaacacatataaagttagaaa

SEQ ID NO: 392023 - DNA, 951 bp, Cannabis indica
ttaacaggagattttgattcatattgtatgcgcaatatcacaattttcaggacaaacaaacacgtgaaggaaagcacgaacccaagaactacaactgtctttctctttcatattatattatctaattatatctattgttattgggcactagtaatgtccagtaccttttaaggtagtctcttacaattatttagcgatattcatttatatgaaatctgatatttagttatactaatagcattataacactgaggaagatactagacatcaataatgcattttaataattctccttccaggaaaaaactggtttacaacaattataagttggaccatcaaatagagtagtatatgcatgtttactaataaataattgaatgaatggtaagttagctattcacttactttattaaaattaaaaaagagatcgagtgttagggtatcaacctaagtcctacatcagaagaataagtaagcattgtcttgaatataaatgttccacttagtatgaaatcttttggaaatgtaccttaaaacaaaattgtaagggtctaggcccaaacctaacaaggtgaaagaacaggaaaaaattacatttaagggtggcaaaacgtgtcatcgtgtcgtgttcgtgtcatattttatgtgacccgctttatatttcgtgtcaagcgtgtcgacccgttttttgactcgtgtctaattatctcaaccctaacccgacccgtaaaaaatcgtgtcgtgttcgtgtcgacccactgtgacccgttttgctattattaaagctaaaattgtagagaaaattaataaatttaagctccattaaaaaacttatatacatttatgtatatatagtttgttatatataataaaaattaatttcatgttaaagaaaaataaaattaaaaatttttaacttaacattgaatcactaaatatatatttatatat

SEQ ID NO: 392024 - DNA, 1077 bp, Cannabis indica
caaaaaattttcaaaatagagtaatttaaggcataaataactaattttaactatcggttgcaaataaatacctaagtttaattattaacaatattaatacttaagttatatttttagaactttcgtaggtactactttacacttaacgaccacttacctacataagttttacaaatataagtattattatcgttaaaaattaaatataaatatatatctttaacagaaaattaaacttaattatttataccacaaattactttacgttatattaatatcggtaaaattttgcttccctgtaaccccggccttgtctgttaacttatattattcctcactaagatacaaacaaattcatttagaaaagtaaacaaaaaatacaaacataattgtttagtataagccataagggccttccaataaccagtttacttgtataaaaatgtaattatttaatgtaaacaattttttttcattaaaattaatgatatcttaaaaattaaaattatattttagaaaagaacataactcagtattttaaaaaaataaattatatttacaccctcaaatattcaattacatatttaatttattgtaaaatgatcaaaataaatatctttattttttttgttttttaaataagtacaccctcacaacaacttattaaaaatcaatttgttaattcttttaaaaaacaaactattcgttcaaaatttgaaaattctaaaatcattcataacaaaattttgatattttatcactgaggaatcaataacaaaaataaattcattatatgtataatcttcaaacagtagagatttttatttttgtttgagctttattctgtgatactgaatggatatgcatgcctttattttatagatggttgagacactcgatttggtgaacgcagaaaacttaaagtgtgctgtgaagtcctcccgttctttgagggtaaaaaaagaaaatcataaatgagaagttttggagtgtactaaataatactcttaggaggtgccgccaccaattatggagtgccgtgtcgttaatcatgtgtgattttaatcactgcgtcaa

SEQ ID NO: 392025 - DNA, 1660 bp, Cannabis indica
taatcagcttgcaatgatgatgtatgatgaatgttctggggttcaagaaaagcttttatgtgctaaattcttcagtctcaagctgtgactggtgataactttaggagtaagaggctgcagaaaagatcctaagaccacccctctttttatatgtactgcagaataccagatttttgttattgtcataatataatttggttacaatttagttattgtcataatttaatttgtttacaattgatattttgatatcatcagaacaggtctactaaattactttgccattgccgtcgacaaaattaggatcatttatgtattaatatatgacagtctggtctgttgacctgtgttttctctctgttggttgtttagttgtttatggtgtaaagtggtattttggctactagcgtccttttgttttggtctgttttgactatgacagattcagaaaagatggatatcgagaatgatagggattttgtcatcctaacaagcggagatgaggatgatggagggttgctgtatgatacaaacgataaggagttgtctgattttgatgaccggtggtgcattgtcggacggttcctcactgaaagatcattggattttatggctatgcaacacaagatggcatccttgtggagacccggaaaaggtatgtttgtgaaagaattggaagaaaacttatatttatttcaattttatcatcaaatagatgtggataaagtagtagagggcagcccctggacgtttgatagggttcccttaattttctcaaaactgaaagcgggggagaatccaagatcagtggttcttgataagttagatttttggatacaactacatggattatcaacgggcttcatgtcagcaaaggtggttaaggattggaaactacatcggcatgttcattgaggccgacaagaacaatttcatgggaatatggcgtgactatcttcgggtacgtgtttctgttcgtattattcctttgaaacgaagaatgaagttagagaagaaaggaggagagctatgctatgctaattttaaatatgaggatctcccaacattttgtttcatctgtggaattctgggacattcagaaaaaattctgcccaagactatttgacacaccatctcacttgttgaagaaaccttatagtctagaattgaaagctatgccgaaacggagacagcacacaatcgggtccaaatggcttcgccaaggtctgttgattcgaggggagacttccggtgaaggatcgggcaagaactcaactgagaaaggcactacggctgggagcgctactgtgggcgagaatcaagggaggtttcaatcggttccacattcagtgggattggatggaggaatcagagatattgccttggatattaatggaaataaagcccatggtattcattcgggattgtcattaggaaatatggagagaattaatgctataagtgaggatatagttgatgatgtggatggggatttgatggtccttgaatcaaaaaaaaaaagagttgctgaaacaagaccattggccgaatatgagtaatgaggacaacatagttatttcaagaaataaacaaaaaactttggttagggcgggttctgtgtcacgagacccccaagcattatgaatgtgttaagctggaa

SEQ ID NO: 392026 - DNA, 610 bp, Cannabis indica
agagagagagagtgaagctatacctaagttcgctccaaagctaccaacgctaatactttccaagcaaagacgatagagagagagtgagagaatgagggcaccttccaatacgactcagagagagagaaagatagatttaaggttttaatggagtgaggctctccatttcgtggtcagattagaccaccggaggtcgacacgaacaaagtgctagagagggaggtgctgcatttttttttcaaagggaggaggtgctgcgatttttttcccatgcaagggaggaggcggtactttgtttttggataggagagaggaggcgctattctaaaggagaaatagtagggttttgttatttgatatttagggttgtgtaagagagtatattaggttttattttattacttaatgatggtacacgatttttttattaactcaaattatataattataatatggggacaatgaattagggctaagagattataattataatttttgtttttttaatatgaggctatatggggatgcacattgtgtgcatgcaaaagtgtatacccacagtgtaatatcccgataagtctaacaggaaataattagggtttatatttat

SEQ ID NO: 392027 - DNA, 1362 bp, Cannabis indica
agttttttattgctaaatgattgcattaaccaacaacaaagacattacaatgaaacctggtttattggcaacactttatctcgagtcttaagcctcccaaccactgttaaccaagtcataaatttgattattatttttgagcaattaataatttttttagaactatgccatgataataattgttggttcaatacattttctttattatacttttctgaaaattattaatatatatataacaaactttggaacttacttaattatgttatttataggcaaaggggagttttaaatgaatttttatttttatttttttgtttggtgaaaaggaggattaagtggattaattaagaattttttttgatttaactaataaatatatttcaaatattttttcttataattattttattaaaattgatatttaaataattagatctaataaatagaaaacttaaaaaaaatttgttatttcattaagttgaaattaagtgataaaaataaaattcaggggcattcacttgccggccatagaatagattatgaagccattggtcttttgtctagcttatcttaacctaaacctaaaaaaaaccctatataaagaaaggataatttttttaaaaaacaaaaaaaaaaaaataacaaaaatagtacaaaatttttaatatttttaccgtttcctagagagatagagagagtagtctctgtaggtatgagactacacagttatgcatcattaaatatgcttgacttgtgataattttaaaataaggtgatctcttgagaagttgcttgaaacagaaacgttacagagagagagtcctaaatctgacaaactaataagttagttgtatttatttagtatacctaaaataaaatttaaacaattagtaaaatttaaatttaaaaatttccagattgtttgatttaaggacttttatttaattttactaacatatgtttgacgtaaatgaaagtttaggggtgtgatttagtacatgataaagtttggaggtacgatatggtagatggaccctccccgcgttagtaaaattaggagtgttcattagatcacatctaataaatttggacccagccgatccaatccaattatttattggatattgaattttgtcatccgttccaatccaattgaattgagtcatccgatctgattcgattcaatggatgtattggattggatcagttccaaccattggatgcattgactggttttctactagattagattggatccatccaatccattttaactaccatttaagttgatttcattaaaaagaaaaatatatataaaaaaacataatttaaaacttaataatccaacatgcataataa

SEQ ID NO: 392028 - DNA, 2107 bp, Cannabis indica
ttttgttttttttttctttttctatatatggcaagttaagcataattatctagtcagaataataattttagctagaattgatgcatgattttacgtgagaagtttattaataataatatacaataatttcgagtgtttatacactaatccaatgcgaatcttttttactttacagcactaatcgcattgtcatttttcttaagtagggagtaaaaactatacgatactttgattgtagctaacatatatctatatagtactaaattaagaagttttttttcttagcatagatataaaataaatgccacatgatgtattcatgcgtaaattaaatatatattatcagtgtccccaaataatcagaatgattttataatgaactttagaagaaactaatttagtgtcacaggggccaaaagttgtaccatattaaatgattgacacgttatttataaataatttacataaacaataaaattaaaaaaaaaaaaaattatagttcaattagccaatttaaaatttagcctgatcatgaattattaaaaagtgaaacattgaatcaattaatataacaaaattcaaaattaaaaagcagtaatgatactcacacatttggttcaattagttcaaatcacattgatataatcaattgtcagtcgagtatattaatttgacatgtaacgtttcattattatctagctatctatgcaaactatatatctgagtagtatagcaactacaataaataagggatcagaaataatgtataatattatagatgatgaaatgaactatagctgtgcagcaatgtctgattttgggacagttatcttcctaaaaagtagtttatcaattatgtaaaattatcttagggttgactaaagatacctcgaatagctactcctatattatttataataccgagattatatatacttaaaataaaaacatctgaaaggtaatctggtaattaaggattcattcttaactaaactaaactatattcatagttttaccgtaattaacaaatcaaacccatcaaccaaaaaacaacgaatttaaacaaatcaccactaataaaattgactaaacaatttataatatataatagtggcacacttaaaccttaataaatgtaaaaacaatatctcaatgatatatataaaatatataataaaaggggttttgatggtaaagtataacaagttataattaaacatatacacaaaattatactcccatcacctccaaccatttctaccccatgagaaatctacaaagatcatcaagcttctctgatcatcagaaaaaaccctagctgctagttaacaaaaaaactcttaacaaatctccaaaacgggtaatgataatgaatgatgatatatatatcatcatcatcatgataatctgtaatacagacgaaaaacaacccatatagcatggaaatttcaaaataaaaaagaaaagaatgaaatttatatttatatatatatgtattaattatgaaagattgttatgacattttgggttggccatgtttttcggcgatctgagcaagcgactgaagattacaacgtacaatggtgtctacaaaaacgcaggtctcctccttagtgttaccttgtggtacgtcaacgacgtatgattcgacgacaactgtccccgtcccattggccgaaggatgaagtgtggtgacggatcggtagttattgagacggtgatcccctcccacgacgctgaagctcaacacgtggcgctcgtcgtcaagtatctccaacctctccctgctcgactcggcaggaaggcccgaaaccacgtggacctcgcggagggtgcccacgttgccatcaccgtcgatgacgtggcagctcttgagaaagtgtttgtaggcctgtgggttatcgaaccgtctcaccacggaccatacagtctccacagccgcatcgatcgcttggaccacgctcgagcagcactggttgggtcccaccgagtgggcgtggtggtcagccaccgattccggaactgcgaaaaccttgctgcgggaacgatgtgggattgcttatctggcatccgatcacggtcgggtttctggggttgattctgtgga

SEQ ID NO: 392029 - DNA, 2198 bp, Cannabis indica
ggctctttgagagttaacttgtccctgaagtttgcaaatggaagttgaggaagtggtttagtcaatatatctgtggtttggtgatcagttgagatgtgtcgaatatcgagtgtgtgatcaagaactttatcctttacaaagtgaagatccacttctatgtgcttggttctttgatgaaaaacgggattggagggaagagaagtggtgcctaagttgtcacaccaaagtatggggcaggagtgaagttgaatattgagttcactaaagagggactgaatccatacaagtttggtagtggcaagagcaatggcccgatactccgatcctgtacttgagtgtgccaccactgtttgttttcgagaactccacatgatgaggtttccaccaaggtagacacaatatccagaggtggagtcttcggtcgtctatggaacttgcccaatcagcgtctgtgtaggcagtgagttgaagagtggcagctggtctgaagtgaaggccataatctatggtgcctaccaaatatagaaggagcctttttgaagcaagccagtggtcatttgtgggactcttgagatactgggacagtttattaactgcaaaggagatatctggccgtgtgagggtcagatactgaagggcaccaataacacttcgatagagagttgggttgtccattggagtgccttggttagctaataactttgttttagacacatgggagtaggggttaaggctgctgcatccatgttggtgcgtgcaagtaagcctgaggcatatttagcttgagtaagataaatgccagactggttccttgtgacttcaaaacccaaaaaataccgcacaggaccaagattcttcaatgcaaattgctggtgtaattgagaaatgagttgatgaataaaggaagcatcttctcccgttagtaagatatcatcaacatagattaagagaagagtaaatttgccattctttcttagaaaaaatagggaattgttggcctttgagttgtagaatccccattgctgaagtgattgtttgagcttatcaaaccaagcttgaggggcctgttttaagccatagatggctttatgtaggttgcaaacatgagtaggatatttcagatctttgaaccctgttggttgagccatataaacacactcttggagatccccatttaagaacgcattattaatatcaatgtgttgtattggccagttgtgagtggctgctagagagaatattattcgtattgtaaatgacttgattatggggctaaaggtctcaaagtaatcaaggccaggagtttgttggaaccctttggcaacaagcctagatttgtatctgttaatggtgttgtcagggttgtatttaattcgatgaacccacttgttgtcaagaactgtcatcccatcttgaaagggaacaagagtccaagtcttgttcttgacaagagcaataatttcagattgcatagcaccaaaccatagaggatcttgaagtgcagctttgagtgtctttggttcaatactgatatttgaggatgttgtaagggctttgggcttatgtattccggctttggctcttgtgaccatggggtggttattgacaggttgagagataatggagggttgagtgtgtatgctgtcaactgagtgaatgagtggttcgggttcatggtcatttgatgatggtggtatgctgacagagatgggtgcagtgggattgtttgtagcaggtataggagagtgggaatgagtagtggtatttagtattggtgtaacaggatttgtggcttggggaacaatgacaggggctggtggtaaagggatatggaaggcatgagactgatttggtgatggggttattggagcagtaggttgttttggaaatagtgtattatagggaaaatgttgttcattaaacttgaccgttcgagctatatagactctgcccgagggatgctgttaggctaaaattagtctaagtttcaggtcatattttcggttagttttcactctttatttctagttttagggctattttacgcttgattcttttgtatcaggtccccaggtgtttaaagaaagtatttataagaatcaaggacaagtggtgaaagaatcgagaagaaaaaccaaaaattatgtcgctgcctgttccagtggcgacggggaacatgccagtcgcgacgggaactg

SEQ ID NO: 392030 - DNA, 789 bp, Cannabis indica
gatctgctcacgaatcatggggactgagatatctccatactcaagtccttgtttgactctgacacgattacgaatatcctgaaagaggggaggccttgtggccaggggaaagacaggtggatttggactaaggaaagcagcgaaaattctccactaagtctgcttatttgctgcaggcggaggagagagcccctgcctgtgtggtggcgccgaccttatggaacaaactttggaactccaaaattctcaaaaggcataaattactttggtggggtatcctctctgatgctctaccgacccgtggcctcctggctaggagaatcccaatcgacgacgacaaatgccccttgtgtggggaggctgcggagtcaatggaacacctgttcctcttttgtaactttgcttaccatctctggagatcctctccttggggagtgttcccgatccatggtttttggggtcgagtttaggattgggtgaaatttctgtggaacagaaaactgaatggggtggactcaaacaagctgttcctttatgcttctatcgtcgtggacacaatatggacaacccgtaataacaaggtacataactctctacagagtaatattatgactgtcattgactctatctctcactgttatacagattatgtctcctgcttactccctctgacggttcctacggcttctccagtttggacccctccgccggatgactggatcaaaatcaactgtgatgtcaaggttggtggagactccatgtgcattgcggccctagcgagagatcaca

SEQ ID NO: 392031 - DNA, 619 bp, Cannabis indica
gttgaagttctaatgctaaatgagatactttacatttgtagtgtaaagtcatagcctatgtacaaaaaaataaaaccaagattttatttttataagctgcagaaacactctaaggtggtctacctaactagcagccttaggcatgctcatgacttccatgactactgattcctcacctctagtttctcgttaaaaaatttcacttgatcgaatttgtttaacatcagtcgatattaccactctcttaaagatcgtgtgtaaggaaaattttgatcaaatgggtttaattgtatctcctttgatgcacattctttttagttggaccatgaaagaaatattatctgcatagtgaactattggtacttctttattaggtgttgttatccaaaagtttgcacatctgactggcacttacatgtagcataatctagccgacccttaatatgacaagggacttttgggcaaaaatgtgcctagcagatcccatatgaggctgatatgtgtggggttgtagattgcctttcaggaaccatctagccaaaccatcaacatgtcggccagagaaggggagattgactcaccttgcaaaaatgtttcacaagtaatcccacaagaaaga

SEQ ID NO: 392032 - DNA, 834 bp, Cannabis indica
ataccctacttgtcatttggatataggacattaactgcttgggttttctttccacttgtatagtgtctggtgaagatagtgacttcaagttggcattcgtgaatcttaaagaggttcttggagcgtcttccatggatgcacttcctatgcatgtagctcctgaagacctagctcctgaagaggagccttttaaagttgttcggactaaacggggaggaaaagacaagggaaaggcaaagcccatgctacatctctatctccccttgtacttaataattctatttaggaaataggttaaaggccaaatctgttgaggaattatggcatgttggaggcgtattctgctgaaggaggtgttcaaaatattttaggactcatatggcacaggatgtttgtccttggggaatcaccgtcccaaagtgtggaacgcttcaaagcatggagttgggttcaaatctcatgcagagctcaccttctactcaagacatactttggtcagttttgcatcaaaactggaatcactcctttccagctccttctagtaacttgtaaactgctctctgggtggtttgtattttgtagatcttggggtcagacctccccaaccccaaaagagatattgtactttttatgagctaaagtcgttgttggaaattattttaccaggatcttacatctactcacaagtatgttgattaacaccctaaatatgaactttctaaaatgatgaaataaacacatataaagtttcggaaaccttacattgggtgcagcggaattaaatgactccttccgttcagatctctaaccctcgtatcctttctgtcgcagagt

SEQ ID NO: 392033 - DNA, 720 bp, Cannabis indica
ttttttttttttatatgtgtctaataaatagtttaaagtactgacaaatattctagtttgctatataaacatatgtgtgcttttcaaataaaataattcaaatttaatttttaaaaatttacatgataatgttgtaacaataagagattatacatcatttcttgtatacatatatacaaaaataataggtatcactaaccgcataaaattttcactctaaaagtaagattatatattaccaacatttaagtgtcctcaattataaaaatttatttattttgttttttgcaaaattagaaataccaaccacatgtcgccattaaaaatcattattaatgaaataactattttttattgaggtaatttatcctcattaaaaagtatgattcttgtagtatatagggttatacgtgcaacttagtttttagttagataagtttagattgataaatatattttggtattagcacacctcacgcgcttaaattgataatcaattatgatatattgtaggggtgtaaaaagaataattattagtttttttggccatgcataataataaattaatcaaaagttgaagaagaaattaatattattagagttccgcgttgggtggaaacagtgacacagacccagaatttttactttgtgagagcttatttatcataaaaaaaatatttataactacattataattaatcttactaaatttatctaatt

SEQ ID NO: 392034 - DNA, 1261 bp, Cannabis indica
ttcacttcagttggagagtcataacaggttgccttcctacaaaagtccagcttcagactaagcacatcaatgtggatttactttgtcccttctaccatggtgaacctgagactatatttcatgtgctggtgctgtgccactttgcacattcttgctagcacagatcagcaatcagttatggcatgggtactgaagttgattttaagaattggtttgttaatgtgaccagtgggggaaattaatacaaggttgcagaggtcttaatggtagcttggcaaatatggaatgctagaaaaacaaactttgctgcaagtgtagtccttacggcaagatcgcatcttaatcaatggcaatgtgctcaacaaaaagggttagatcctttacttgattataatgatcaagttttggataaagagcactggacgaaacctttggctactacgattaaggtaaatgtcgatggggctatatttgaagcaaataactattttggctttgggattattgctagagattctgctggccgtatcatagaaggagtttccaagagctgtattggtcgagtgtcacctgagtatgctgagatttttggcattaaggaagcactaagttggattaaaataaaggattggcaagaggttactttggagacagactgccttgttgcagcccaagcaatcaatagtactgtccgtatgccatcaacattcggcctgctggtttcgcattgcagagagattttaaatgagttgaattttcttaagtttaactttgtcaaacgttctgctaacaaggctgcgcactttcttgcacgcagtgcttgttatatgacagatcgtattatgctttctaacaactgcccttcggagttgttaaatattgtattggttaattcattagtttaataaaatgaccaatctttaattcaaaaaaaaaaaaaataaccataaacgcccaatttatgattggtaacagtcaagagctttatggtggtcattcatgttcataagggagtaaaaactctataagtagaggtcatattgttcacttgtaggagatgtagttaaaattatttgttgtagttagaactttgtgaggatatgttcatccttagacactatgagtatatgaggttttataaatccttataagtatttctagagtttcccttagacgtcatatgaaggaagacatgacttttaggacaaaaggtcattgagccttggtcaagctttttgtgtgttattcttcttcttcttct

SEQ ID NO: 392035 - DNA, 591 bp, Cannabis indica
gttgatcctcgctgtgtgttttgcaattttgatgaagaaaccattgtccatattttggttagttgtcattttgcgcaatcttgtcggcataggtctagtgtggggctgcaattttctacagaagctacctttgtcgattggtttaaggcgcttctgacatgaggtagagtggctttggtggatgagctcgtagcatggggtatttggaaagcttgtaatgagcttatttggcagggccgttcttctcagactgcagatgtggttcagatggcaaggtctactcattatagttggttgttggctcaggcaaacaggttcgaaccgttgttgtttgatactactgttgctggtagcagtgtttgttgggtgaagccgcctgctgggatgttgaaaatcaatactaatggggcaatttttgaaccaacgaatcaatatggtacgagtatcgtcattagagattgtcatgggaagctaatcgaagctcgttcttctctgcatcttgggcagggccggccctgagggtaggcgggctaggcgtgcgcctcgggcccccgaacgctcagggccccgaaattgtaaaaaaaaaaatta

SEQ ID NO: 392036 - DNA, 769 bp, Cannabis indica
ccaagttaaagatggattaatgtcaattttagcatccaaaaaagagttattcttaaagtatcttggtttgagaacacggcttaagagggaggttgggtctaaaaaaatccgccaaacttgctttacgagtagagcttggttgaaatgaacaaaacttttgaaccccattccgccttccactttagcttgacataaagttttccaagttttccaattgatcccaattcccgaagaattggagccccaccagaacttattcatcatgacctcaagttgatcaatgagtgtattagatagcctaaaacaactcatagcataagttggaatcgattgcgcgactgcctttaagagtacctcttttcctccaatggaaaaaagttgttcttgccaagaggataaaaacttccaaagcttgtcttttatatcaccaaataacatttgcttgtcccttccagagtaagatggcaagcataagtaacgttcatggcataattgaatgggcatgtctaaaatctattgaatattcgcttccacttgcggaatcgtatttggtgaaaaggagaggacagattttacccatcggaccacccatctgctaccaattttttttttttttattgtttttgtacatacaaaagtagcatcaggtgaccatcggaccaccatcggaccccatcagactaccaattttttttttttaatgtttttgcactaaaaaaaagtatgggaaatttgagagggatatttttgggttttagataaagttgtc

SEQ ID NO: 392037 - DNA, 983 bp, Cannabis indica
gagagagagagagaaccacaatagaatctaagaaagattttattgatatgaaatttgttacattgcatagaatgaatgagaagcttttatatacaaagcttggagaaagaaaagttaattacaaataaagttagttacactgaaaataacaaaatataactaactgacaaagactaactaactctctcatctaacagttgtattatagctatcatgagattattcttgtggttgtttttggttgttttatagttgcattatagtttttgtgaggttaatttctcgtcgttttttagttgctttcttactttttgttgagcaaagtgtatttttataattttaaaacttttcaagcgtttttttgttaattaaaatttgtaggcgaaacaaagtttgtggacctattcaatatgatgggaacaagcttgaatctgtttgtttgtttgattttttttttttttgtgtcttaaaaaatttaaaaatttacataaataaccaaaaattacaaaaatacatcaacacagaaattttttaatttttacgctttgaacttttttatttacaaatatacctatccagtaaaaataataacttgttctttttatagttgtattacatttgtcatgagattattcttgtagttattttatagtttatttatagttgtattataattttgaggttgatttctcgttatttttttagttgttttcgtactttttgttgagcaaagtgtatatttataagattaattaacaatttcgtcccttgaacttttgagaatattgattttggcctctaaaatatacggcttgttaagaatttctcctgaacttttacatttacaaaaatttagaccttctgttaggttttgtcctattattccgtttaatgatgaagtgtctttgtcaattaacaattttgcctcctaaactttgacaactatcaaatcgtaccccctcaaaataaaaatgagaaagatt

SEQ ID NO: 392038 - DNA, 812 bp, Cannabis indica
aaaaaatgtaacgaaaaaatttgatcacactgatatagtattaagtacattatcgatatagacattaaagctacattaaaagtactaataacaagtacaaaaaattatttaaccaaaaaaatagaaattagaaaaataaaatttaaaaaaaaaatagaaattaaaaaataaaattaaagaaaaatagaattaaacaaaaaaagtaaaaaaaaaaacgaaacttaacaaaaaaaaaaaaaaaaactcgcaaaagacaagaacaacttgtcaaatatccacctttctatggatgttatagatattacatgtataaatttttgatttgttttatttatattagtggtgttcaaaaaaatttacaatcatccaacatagtcggtcctaggtataagcgggttagacttgtgcttaggactcacactttttaagacctaaaaaatcaaaagtcttattatgtttttatttaagtaaaattaagtatattgcaaacaataaattttacaatttagttggttggaatatatggcacattacgcaatgttgttggttcgagtctcgtgataattttttttcaatattttctttatatatttttgaaagtgaggattctaaaatttaaatggtcttaagtctatatattctcaggatcggctttgtctgcccaagccaaatcgaataaaccaacgaaaaatttagcccgaataacttaatgaaaattcaaaccgccaatgaatatgttggatgggttaaagattattctaaatctcctaatataacccaaataaaccgatttatgtatttttttttttaaa

SEQ ID NO: 392039 - DNA, 1104 bp, Cannabis indica
ttccgtaaaaatacaaaagaaaatattttaaagagtgaaaataaaaaaaatcttttttttttataatgaattgttattcattttgttttcaaatgtacatgtaataaattatttaaatatatgacttttgcatcgtattcatgttataaaaaaaaaaagttaataacatatctataaagctcgggtataaaacgatgacatggtagtttaaaatcgtttaaaatacttttatttattgttgaggtataagacaatacatattaacttgaaatcgcttaaaatacatttatttattctctccttaattttcacttttttttaatttttattaagtttataaatattaattaattaattaattaaaatattcatatacaattaaaaaaataattggtatttgtttccaaaaaaataaataatgataattggtattaaattaaaccatgaatatctaccgtacaaaaaaaaataataaaccctaaatatctataaaccatacataagagtttagatttttttatagcttaagtctgaatattagtggcgtttgccaatcaagggctcgattttagtttctattgcctaagtatagtagtatgtatggtatatatgtgccctatgaagtttggggtggcttggacaggttccgatagcgtttcaaggagtgcataaacttagaaaatcacattttttacccctaaaaaatcgttcaaccagtttcggccaactggtttaccattttgggcaacattaggaactcgataatcatattttttgctataattttttactcgggtgtccgttttggacattctatatacagttttgaagcttgcaacaagctctacggtatatgttttggagccaaaatgtaagtttcattttagtgtatttgaactacggagtttggtaggaaatcttaagttgtcctttgcaactattaagcagtgtattgggataaacacttattggtttattattgttatgacatagggctcgagatcattgatcattcttcaagcaggtcagccaacatacctgaaccgaaacttgaggtaagaaaagtatattatactacatggtacgttgtattgtaatacaatt

SEQ ID NO: 392040 - DNA, 1078 bp, Cannabis indica
tttttgacacgacacgaaattggcatgaaccctagagagatgagcacgaccaggcacgaaaaaacatgtgcttgagcacaacacgacacggtgctacgaattggcacgacacgacatgaacaatatgagtttggacacgacacgacacgaaaaatatagactttagcacgacacgcaacacgataaacccgaaaagtatgacacataagcacgaataatctattcttataattttaataatttaaatatttattagtaaatattcaaattttaatagttttaatgaatatattttttatataatttatgtgaaaaattgttgaaaattatgtagaaataattaaagctataaaaatacatatataattttagtaattatatcatcaattgtaaaaaaaaaagcataaaaaagtagagtatgaatataagtccgtataagaaaatgggtcggcctgagtaaagtgcgacatgacacgatccgtattttttttatgacacggtacaacgcggcccgtattttattatggtacgacacgtacgacacaacccatattcttttatgatacaatacgacacaattcgtattttcttatagtacgacatgatccgtattttttatagtacgatacgacacgagctatatttatagcacgatatatattttcatcactagtctcaactaacatgtacatacatacattattgcataattaatatttaaacatacttaactttatatttaaatatagagtattactatgggtatcagcatctttatgaggtgacagcttatgattagttattattttttaataatctttattaaagtaaaataaatagtgcttgatagtgaattcttaattgttaggcaccataaatacatgttaacgttcttttttattatctttattaaagtaaaataaatatacttacatatttatataattgtactcgatcgatgtttaagaataaaataactagcattggtgaatctaatatattgccaattagttgagactttttaattacactactacaatattagcctttagaggtagttttttcaaccccatttata

SEQ ID NO: 392041 - DNA, 2244 bp, Cannabis indica
acattaatttttatttttaaatatatataataatattataaaattaataaagaatattctattaagtgatagaatattctattaaagttaacgtatgaaactaaaaaatattattaaactaaaaattctgttacataaccatattttatatagaatagataatatataaagttgacaaaataaggtttattatattattttagtttgttttttattacacatgattttttttaaaaaaaaatatctaagccccacaaacatttaaataaaataaaataagttgccattaataaaaaattatataatttttgaaaaattaaagaaataattattgatttaatatagttagccccacaaatcttttaaaaaaaatgatatttaatcaatatttatataattagttagaaaaaaatattcaaagattgggttctcaccattatcttcactaaataattcatatactttaatcattgatcataaatggagcaaagatgtggttatatatttgtggcaacttattgaaccttattttttagatgcaaaattttatatgaaatacattattttatttttatgacataaaattttaactatgattcttttgggttttttttaagagaaagagaaaaataatgtgaaaattgtgtctacatatttgttttaatgggaatttacatttcttatattgttcctaattatttttttatatatatttttcaattttagaaagtttaacatataattctatgcctaaaaaaaaaaaaaaaaaaaaacatacgattctatgaaacttataatgggtaaaaaaatatgttataaaaattaggaataatggataaaaataaagtttaaatttctttatatacaaaaagtgactatttaactatttttattgattttttactcaaaaaagaaaaaaattatttttattgattcaacaaaatatatttttaaaataaaaaaaaattccattaaatttttaaggggtattgttagtactggttgtcttataaattcattatttaattaattcaaataatattattttttttttttttcaaaatttagttaaaataaatttttctttgagttgatattattaaaacaaatttagttaaaatttagaaaatttttatcattaaaaggtggattggtttgtgacccaaataataataagtgcaaaatgatgttattgttttatcatatataataacgttaatttacttcgacatctagattgtgttgcgaccattcattttaacttatgtatttctaatattatttaattagtataatatttgaaaaaaaatatgtaaattaatataaagttaaatatactataaatgtttaaaaatattaaatttcataaaaattaaaatattacatattatttattattcaatatattaattattatacaaattacaactaaaaaaattataaaaatgacactaatatattaaaaaaatataaacacgtacatattataaaaatataaaaacaattaaaatattaagcgagtccccgctagggcaagaggaggtgtcattcacatcccgccccgtttaacatacgggaataaaaaatgatcctgtcctcacactcggtccgtttggaacccctgcttcattaaagtgattctacgcaagggtattcttatagaaaaaatgtgcattcctaattttatatattttaattttaataattattataaaaatcactcatcacactaactagtgccacatttaattatagagacctctatggttagaaaatagtacccatatcactcactagtcactaccctttgtgatcttccaaaattatacttggagacaagttagttaaagggtgtgtagctatgtcggtagtagggacatatctaatattggtctttgaaattataacacatgtaatatattgctataattcatatacacatacattacttcattttatttaatttattattctacctattttatatacagtagacatgccaacttttcaacatacattaaattatatagtacacacacatatatatgtattattattattatagatcattatcatatactttattttccacaaatcattttctcttattttcctttaaaattaataaatcccatctcaacccatctttccaaatctctatataaaccacccccaaacctcccaattaccttacgaccaaatcaaaactactatcaatcataatatataaatatttctcatcaa

SEQ ID NO: 392042 - DNA, 890 bp, Cannabis indica
tttttttttaaaaaaatagactacaattttacgttgtcttgagccctaattttttgaggcacgaccctggacagagtaattataaattaatgattaatgagttaattatttataattgccaactaaattatcactatgtagtcactgtgtagacaaattttgagattttaatatcatgtacagtagcggacataagatttaaaataagagggggttgtaaaattttttttttttgcgagtgaggggtacaaaagaaaagttaaaaagaaaaaaaactgcttttagtaggattagaacccttattttctaatttaacttaaatggtaagtagcttaatcattagaccaaagttaatattatgcttgtaaatatcaccttttattacaaatatatgctctaactaattgaaatacatatatatttttttctctatttttttagaggagcgactgctctacctcgcttatatatgggtccacccctaatcacgtatatacagacaatcccaattaatatttaacagtataatttaattacacttcaaattgaggaaattacattgtatactcactttactttacttgttttaatttttacctcaatttttatattgtttttaaatatacccacttttatggatgatttccccattagactccttaagttatgtttattatatgctagacttaaagggtaaatactattttggaccctgtgttttgcaaaagttacagattggatcctgtattttgttaaatgcaaaatggaccatgtattttctaaaatagtaaaataggaccctgagctattttgtacaactttttttaatactaccaacttgaagacaatacttaataagaacagatacaaaaatgtaaacagttttgtca

SEQ ID NO: 392043 - DNA, 1718 bp, Cannabis indica
aaaaaaaaaaatttaatttttaaaaaataaaaaaaaaataaaataaaaaaataaattattatagtaaaataaatagatataattggtatatatgtcagtacactagtcgttatgtctcctcctcataaagtcattatatataaatatttatatatatatatatatcatatatggacccatattattatatttttgttgttatataatttttgtttttcttctgtttttttttagtcggtgagagatgaatttctttgttggtttattaatttgtgtcggttgcttttttgatttttattattattattattattattaatattttgtaaaatttttattttatttttattctatgtaactttataaagttatgtacaaatcaacattaaccatttacgtgaaataggtattttagaaaatatataagatgatagttactattttctcttttaccattatttttagaaaaaaaaaatctaattctaacgttattttaatcactacaaaatttgttgggaatgcaattaaagtttcatattaattaaaaatagaaagaattatgggtatataaaaatattgggcaagactatagtagcacctaacaaaagttccttaccggtagagaattttttttgaccattgattttagatcatgtggttattataatgtaaggtgtatattcttacgataggactgcttgtatacaattaaaactttatgcatattataataatatttattttttaagaaaataaaataatattaatatttaaaaattttattaatttttattttgaattattattatttttttataaaattaattttactaccatagttttgtccatatatatataacttttggagctagataataatactttataacttgatctcttattcattgagccaacatatagtgagggaaagaactctcaatttttttgttatttaaatttcttatcgaaaaaattattgtaacatcctttaattaaaacaagttgtgactataataattgtagcactttcaataaaaatattggttatgtctctagtccctacactaccttatataaatatatataggcaaaacgtaggacttagcataaatttcttatcgatagagaaatttttttaactattaattttaaatcgattgttaattattttgtaaggtatatattcttataatagattgttatgtattgaatttaaagatttatatattattttaaaaataaaataaaataatattaatattaattaatctaaaatattaagcctatatctatatttctctctttctcttccttggccaaccacacttactcttattcattctcttcggcttaatctttgcccaacgaaaacagtacaagagtttgaaccttatttaggtatgtttaaataaaatatagcaagaacgcattgaaattttacaaagtttagtaattagtttatctagtctataaattaatacatcaaaaagttattattttgtagtacaaacaacactctctgtgttgggaaaaacaataaacttcaagcacatcgaaataacaaagaaacgaagtaaagcaatttactcagtttggtaaaactaccaaacccacaaagagagatatatttcacttattacttcaaaattacatatactctctatctcaatctctctacccaaaccccaatacaccctttgcttcttcttcactctcac

SEQ ID NO: 392044 - DNA, 1035 bp, Cannabis indica
ttataatatttaaataattaaagaagaattaacatttttgtctcttgaaatttttacaatttacactaccaagttgtgcttcctataatacccctagaaatataacttttatagtaatataatttttccatcacattttattcaattttattatgaaatgaaagaagtggtgtatgatagttgataaatgaagacaaattaaaaacctttcactatttttatattaatggataatcaaagtattttatttacattcattatcaattataattcgtcgtgttacccatttcataacaaaaatgaatataatatgatgaaagaaccatgttattataaaaattatattttaaggaatattattaacgagatgtatactataggacacaatttagtagtgtaaaaaatttagggaaaaaaataccaataaacgatgtaaactagtgaaagtatgtcacatgtacatttgtgtacacattaatagtacaagttaatggaagagtaaaatgcttattttgtaccgcatatctttaaactatataggttttggtaagttggtcccaaaactttattgtttggcaaatttatcaccaaactatatacgttatgataagttcatctccaaactttattttttaataaattagtcctcaaacatttattttattaacaacattaagtccctaattttagaagttgatatttttattttttaaatttatttttaaattaaaaaaaaaatcttttttattttagtactttgataaaacaattatattaatatattttatttatttatttattttttaagtattcatataatattttatttttttaccaaaatattcaaaatataatttatttatatatactattaataaaacaaagcataaacaccggcggactcatataatgtctagaagaaatttagcccctcacatttttacattttagtatttataggatattttattagtgatatataaatatgtagtattataattttttaattgtatatatatttattaattatttaaa

SEQ ID NO: 392045 - DNA, 1932 bp, Cannabis indica
gcaagttttttgatgaatatctcgaatgctcgcatacacttctgaatatccaaaaatgactcgattaaattgttacctagctatttttaaccttttttttttgctggaatttaatgattcttaggggttttttagccttcaggttatatatacttttgttatgaaaattgtttgagtcttttaaatagtgggtgtgtcacaataacttattgctcatgtaaccttcgcatgttccttgggtcactgtgaaacacccagccatttgagacacgcggttagttttcatttttcttattttgtagtcgtttattaggactaactaggttcttcgtaatggtgggtgtgtcccataactcaatgttcatgcgaggaatgcatcgtcccgtttgggatacgtgggacctaacccccaaccatttcttgaggtacacagttagttttatatttgcaacttattttttgcgaggattgactgaattctcaaaatggtgggtgtatttcagtaccttaactttcatgtagcgacatgatcattatgttattgagatacacccatccatttttagagatgtctggccagtcctttgtattttttaaaattttatgcgggtgagggcactttgttattctcgcactttcaccacactgaaaagatcttttatctttcagatgagcgacttctcggatagccaaatgctcgattatagaggtgaggctttcgatgacgagctagaaaggagcgacaacttcatacccacctcaatatctgaggaggaggcccctgtttccatgacccgttagggctcgctatctatcgacgagatagataggatggttcaagagctcgttgaaccagtgacggtggaaatacgcgacagcgaatccatggtgtaagcttaggattatctcgttcattcgagacatgcccctgacattgaggttgaagaaatgggataggattttgaggtacctgatcgcgattctgaagaagaggggggtgctgatggaagtgagacagattcagtagataacacttaactaaacgagccattttcttgcaatgatctggtcttgcgagttacgaaatcagactttcacatgtttgcacagctgaatttagttcgtatagggactttacgtccttcaacatctcaacgacctcatcttcccctcactaaccctgcgatcatccccacgcaagacgtgattgtctcaattcccattttgcgatgcggggtaacactgccttttcataccttcgtgaaagccattctcaaacgatgtctctttcttccaactaactccaaacagttttcacgtaatactagggttttatgcgatgtacatggagtatgttcaaggggagccaacaatggaggactttagctatttctatgacataaagagtgttggccacgataacgatttttattattttagtaaatgggacaactctaaaattaacggggtacaaggtacggtttccaatatgggagattggaaatccaaatggctctacccgtttaaagtaccaagagttaggactgactttaatcgtcgacctagtatgtcgcataccctgatacttagtatatatttttattaccttgtatagtcgctaatgtccatttttatcaatcgtagatagaccgatatgacctgtaatggattctgctcgctgggagatcgctgaagttttaggtagcctacccgttcaagattgtgattggcgattgttaagcactactgcaaaattccaagaacataagatcatccccgagagcaccagtcttcaacaagaaccaatatatatggagccttttgagaaacaaatggaaagaatagacaagtgtctatctaaacaaacatcaagactgacatcaggtaatgtgtaaagcccgcttagttaatttggaaattagcagttgttta

SEQ ID NO: 392046 - DNA, 586 bp, Cannabis indica
catccaaaccatcaggagtggttagcctactatgagattaaggggtagtatccatctgcctcattttccgaaaggttgaattcaattggctcgcctacaatgatgctaatctttcttgttatataatggtagaagaggtcttcttccataaggagtgctttgaggcattacctgtactatacttctattagactaaacagatagcaaacacgcttcgatcccttttattatcctttcctatattctaaaataagtatatgccaacaacgccttatcaatatcaagtaaaataaaaggaactaaaagctgcaattctctcaaagtaattgtagtcacaagccataaatgtttaataatatatatatattcatatatcataatttagcacaacaaaacaaaaaaaaaaaaattgttttcattattaacatgagattagctcatattttatgttatatagagtgatattatagtgacccatataattcattagcaaggccactatcaaaatcaaaattgttctatgttatgcaattaaacagaaccaaaattggtcattttgattattatcaagaaaaaaaaaaaaaaa

SEQ ID NO: 392047 - DNA, 704 bp, Cannabis indica
tgacgttagctaataatagctgccagcctgccaagttaagccaaaaagagtaattttaatttatttgaagtttgaccgagattaacgaagaatggaactatcaaataatatatgtatacatacattgatacataaatattatgattgacggtccggtccgatcaaaccaaaaaaaatatattataaaccatgaccgaaccataatgctaagaacggtttggttcaatcggaccaccaacagcggtccctccggttacggtttaaaatggtttggattgccttggtccggattgaatccgcggtttgccggtccacatgaacacccctacttcaactaactaccgaccaatacacgacattacaggatcaaatgcggaccttgcaggctgaaatcgatggacgaaataggactcgacatcctcctcgagtaccaactacccactcgaataatcctcaattaactaattctagacgacgaactaaccgtactcccagggaacgaagaactggcaaggaggggttgaatcaaccaacattgagggatcaaaccgcacgaaatctcaatcgcgaggaagaagacccagagtgacgtaacccgcgcagtagagccagccgcaaaatgagataaatgatgtcgagtctggttcttcgtcttcgcaaagtcgcactctaagttgatgttggaatattttttaccaggatct

SEQ ID NO: 392048 - DNA, 716 bp, Cannabis indica
agtgtgtagtttagaaaaacaaaaataactacttaaacacactcaaataaatatcttactaaaaattagttttttaaaaatatatcttactaaaaaaatgtaagtttataaagaatcataaaaaaaatatatatatatatatatcttcaataattacctttataataatgctatacaaatatcgttaattttgatattcttattgatcgtggattcataggacatatatacttttgtgaaaactataaatgtaactatgttattgagttaattgtcataccatagtgtatttgttataccatttgatatgtagccattttggtaagtaaaaaaattcaaagtttacaaaatagcaacaaaactacctatattaatagagagtgtaacgccctaatgttaaggcacgttacagtgttttttcaattacagtgttatttttgctaatcaaagatttttctacgaaaaacatgtcaaattaatttttttttaataaatattaaactttataatttacaaaagtatttacaagttatgggatcccgttttcaaacttttaaacataagatttcaaaatacatgatattcaggtcgcacaacgactacaaaatataaccccagatgtcccgagaccgaacacttcaggtcgtgatgcctcgacatatacaacttcatcccagctcaggttcactcctatattcagcttttgcctttccttt

SEQ ID NO: 392049 - DNA, 962 bp, Cannabis indica
accattaattgtaattactattcctctccttaaatttcttaatctataactcgcatatttgtataaactagattgatgttacgtgcaatgcacatataattagttttttttaattaggttcaattaggtgatgttaagtacaatacacgtatgtttattttttttagataatgtattttttttttaatttttaaaataaagtttgagattttgatctttagaaaaaaaaaaattagctattgctacattagtgtgtcatttgaatgtgatgtgattatatatatacgtatttttaaaatttttaatttttttaatcaagtaacgtatttgataatgcatatatattgtaatttaccatatccttaactaaaattcacataaccaaatttgagtgtgtttatatataggtgtgtgaattggtttatcataacttaatcagaaaacaatcaattctttattttaactatttcaatttaaaatataaaataaataataataaaattagggtaataaagtgctaaaaaaatctctcttttctctttatttatttatctattctatcttatgttaaaataattatttaattattattaaataaaagaataaattatttcatatatataaaataaattttttttaaacacactcgtaaaatgtggattatttactagtttattattatttctatattttttttcctggacatttaaattagaccatattatcatcacaatagttctacttcactaatttatttaaaaaaaataagcaaaatgtaatgataatgatatttacaaagatttttgtagtattggataaaatattagttctttgagtccgccgataaaaatttggtttgcaatattttatttttgtactatacgaaacaacggaaaggataaatatcgttatcttactttggaaaatcaagctcaaccatggcttctacttccactctcctt

SEQ ID NO: 392050 - DNA, 842 bp, Cannabis indica
aaggatattcacaatctaagacatgtgatttgaggtttttttcccctaatttgatttcatgattgcttctatttttacatgaatattttacatggagattgcttctatttttctaggagaagaaagaggtgacacctgtagaatatattggcatgtacatgtgccaacacatttaaacagaaaatttaaagttctacaccattatttgactacctatcctgtaatccagcatatgttaaactatgatgaaaaggcatagagaaaaaaaaaataagtcaagcttccatgagggttgctgcactatgatctagcacaatgttgatatatatatgatctagcacaatgttgattaaaacccaaccattaaaagtatctttatttttcttttcttacatgttaacttgacctattaataatttagaaatgaaattttaatattttttttattttactcaaatttaaattgtgtatgctttatttttcgaacattgatttttggtttatttttgaattaacttaataacaaattacagttaaattatcaaaatttcttaaaaatttatatattgcattccctatttacttttaattattgataacattatttacattaattgaatatacatattaataatctcaaacaataattaataatatttttcttaaattatttattatatcattttaaataaagtaagagacacctaccataaaatttagtatacgtttgtgcgaggcacgtagcattctgttagtatatctattctatataaagtgtgactatataaccgaattcttggtttatgagaaattattgggtaactttttttaaaaaataaaaa

SEQ ID NO: 392051 - DNA, 1281 bp, Cannabis indica
tagagaaccggctggcctatcggttggggggagaaaccgctccctttgttgttgagcttttagaccaagtggccggaagcactttagaactacctacggaggtttaggcatcttgcagtagtgcacacgcctttgcactagcccattttcacgaagaggcaggccatcggagtaatttcaagagatttttttttgttcgccctgccctttgttcttgagactttagctttctaacttggccttgcgtttgaaaagcggcccagctggcggagagcaccactacggagggttgcgcatttgtgacggagttggagcaggtccgggcagcaaaccgcaacctagatgctaccaacgataccctccgggctaagcttttggatgccaaattccaaattggggttctgctgcaagccaaccaccagctggaggaggagagtgcccgccagtcccgcctcatctgaaatatgaaggtcgttcacgacctttatatggagactatgaggcatatgtctggtacaggcccatcttctccgtcgggtggtgtccaaccgtaatcttccagctgacctgtttcaaactttgtttgatgtttaatcataattggtgatttttaattttaaaaaaatattgtattatttaataattactaattaaatattaggaatataaattaatttgaaaaattatttatttaaatttaacatttagtaaaataaaatattatcttaattataaattataatttatgtaattaatagtttaaaattaattaaattaataattaattaatattaaattaatcattgttaaattaaaataataagtaaaattattatcttaatttaacataatattaaattaataagtgcataataatatattaatagttggtaaaatataataaaataataatataaaatataaaaaaatagttaattattactttaaataatatgtgaaataaaattaggagaaaataacataagatattgtaaaattgtataaaacaaaatttttatcttcacttaatctctttggttataaatcaaagatagatagaactattgtatttatattatcacatagtgatattttttttattattacttttacacatgcatgaaatagcttagacatgtttggagaagctgattcagtaaggactcttaaatatccttctccaaatctaagattttttttatccgcatagatagtttgggcttcttttatacttatagtttgatctattacttatttgattgtttcattagtagatatttt

SEQ ID NO: 392052 - DNA, 996 bp, Cannabis indica
gacgctcatatgtatcggtacgtaaaaactaaattaagagtgctacttacaatctctcttattctaactttcattgcgaaaacatatgttatagtattttttttatgacagtatttgttattattataacattatttttgtgatttttttgaaaaatctaaataaatttaaaatatttggtaaatgagaatatcataatttttttttgttaataatataaattattcaaaaacatttaaaaatttacaaaaataatattataattatagtgaacacaataataacagcaatagtacttctcatcacaattttgaatcccacagtttgtgttacatattttattttaataaatattataaaatttattaatcaattataaaacaacatagatacccaataattttagaaatagaatagtactaattataagataatgttaatttgttatatttgatgttgaaaattcagagcaaaagtatcggataaggagcatggacaatatggttggatgcacataagacagagtattcacaacccaaatatagccattaatatgcagtcatctcttcctggtggttgccaaacaatgactacagttttcaaacacaagtatgttaatttcaactatattatataactatatagcattatatatttctcatatacgccaaaactattcattaatcttaatcaatactactacaatacatttttttaaaaaaattaccgatgtatttttatttattttaatatctaggagaattttttattttaatttttttcatggtcgtttaacttatagttatttaaaatatttttcaaaattttgaaagatttagaaaaatttaacacgtcaaaaatagaatttaaacaatttgttgcatgggggatttttttattttatacgtatttaagtagactatttaaatcttattttcggcatgttaaatttaattttatttttaaatttattaaaattttacaagatgtcctaaa

SEQ ID NO: 392053 - DNA, 538 bp, Cannabis indica
taaaaaaaaaatccaaaaaaaaaccattaaaaagttagatttaacaatattaattggtaaatcaaataagtttagtcaactaccaatgattaccctttttttattaaatttttctaacactgtatatgctcttggccaagcaacatagcacccaattgcctctctcactttgtgatagccatgttgttcattggtgttatcgtaatcttttttcatctattgtgaacttctagagttttggttgtacaacttcgtgcctagttgcaactaggggtggctttttcatggagtgatcctccacataaaggttgcactttattttctacaaaaagacaattaatatattaattaatttcattataattaataacaatgcaccaacaaattaaattaataagcgaaaggatattaccttcttcgatataacagaaggtgttagtactggtggagtagacgccctgagaggaggcgatgggggtggagcatatgcccccacaagaggtgatgtgggtggagcagtgttggatatattttacca

SEQ ID NO: 392054 - DNA, 1418 bp, Cannabis indica
  modified_base (193)..(193): a, c, t, g, unknown or other
tactaatgtattgcttatttttcctcctaccaccactccaaactaaaactcctctcgctattgtgtcgtcccatgactcttagtttaatactacttgtttctacttccatcgtcccttttctcactctctcttcttatttatttttacaatgcttcttacaaaccaaataagaagtcataacaaaaaaaaaanaaaaaaaaaaaaaaacttagccccacaaaccaaaatgtcccataggacactagacaagtctaacgaaatcctcagagaaagaaaaaagaaaaacacacaaaattccaagatttttccaagattcagccccaatggaacaaaacaaacaaagaagatcttctttgttattctctagctcccaccacaaatcaatctccaccgtacacgtgtactcctttctttcttccacctggagacctcgagcagtgcaagtgttgcaattgggcctttgttggggcccaagcccatggtccccctctcctcctaccagatccagctcatacaatactgtatgtctgcacctacgatagtgatagctttgggcccactttggtttgctgacgtggcccatttggatattggattaagagactttgtttgtgtttcatcattttgggcatccacgtcatcaatcagaccaacaaataatgggctttctctcttttgaggcctctttgacgtgtggcccatgtcacatcctctagtaatgacttctcttaaaataaaataataaaaaaaaaaatcttaatttaatttgttgtttttgtcactttcatttagatttttagatcatatggaacaatagacaattagacatgtcatgtataaagatttgagtaaagagtgattcacaaaaaaatatgtataatataaaaaaaattaaaaactctaagaaattttatttacaatttttagtgaaaattacacattttatacaatttgtgcaaaaatatgattttttttttcaaaaattattttctgggaaaacataaaaaatatatacatggtgtggtgttacagtgttccagctttaattacaacattttttatatatattaatgttatatttattatttattaggttataagtttagtgtaatggttataatggtaaaatatatatagatatttatgtagtgtgctaaaattctattcttatagtattggttctacaccaataaaaaaatttgagtattattttatatttatatatatttttaatgtattgtggtacgaataaaaataatattattaaatatatatataaaaaataaattaaaaaaaacaacaacaaaaaaatatagacatggaaaaaagagataaagtcaataggccatatttgtatcatgcacttcttaaaattagtaaagtataggtgctatataccttaataaccaataataat

SEQ ID NO: 392055 - DNA, 846 bp, Cannabis indica
tttttttaattttaatagtttgataaaataattacatgaatatattttatttctttatttttatttttaagtattcatacaatatttaattttttatcaaaatatttaaaatgtgttttattcatatatattatttaaattttacatcaacgctggtaaaaatttatgagttcgcctctgagtataattaaaaataaattctataatataagttacttggtattttatagatatatattattttgactacaaaataatattttactacatatatacatagatttcatattaagatattttatatattaaatgattttcctctcatggtaggaaaaataattagacaatctaaaaatttttattgacttatatatagttattttttgtgtgcatgcatattagctatttgatgataacgaatatttgcttgcagtgtagaggaattattcggtcttgaaaatattttgtgtaagtattgttcataagaaaataatttattggtttacttgtatatatagttttgtaatgttcaaaatatgtcttgatttgatttaaaaaatatatataaaaattaaaaatatttatttttcttcttattttagcatatttaaaaaaatatgtcttgatttatttttttcttcttcttactctaaaatattttaaaaaatacatacaaataaaaaatgtgcatttttttttaatttgataaggtataccaacataaaaatatttaaaattaatacaaaattaaataaataaataaaataccatcatttaagaaaggactttatgtttccaagaaaataaaagtttggggactaaattgccaaaaaataaagtttgagg

SEQ ID NO: 392056 - DNA, 1086 bp, Cannabis indica
atatatatatattcgaaacgctataatgaaagtgtaagatctaagagctcttttgaactaacattatttgtatgaggaacttggtttggaacagcagcagcagaagaagtcccaacaaaagtagcagtagtgaggagtgaagtttggttagtcttagggaccttgaaatttgaagttggaataatctcttgtccattagcatttttaccagttatgaagtcttcatgttcaaatgaaggcttccaagagagagaatctggagtctgatgatgatgatgatcagtagtagtacttattggtttgatcaaacggtcacgagcctctcgcatgcttctaatgagttcataaaacttctctattttctcttcttctccttcctcttcttcttcttcttcttcttcttcattttccctcactactacatggctgagcttcctcttcttacacatgtttccctttcccatctccattttgtgtaattaattagtgaaaagtgaaaaataaggtatagagggataattaactaacttattgttggatttgtttggtttctttgataaaaaaataataaataaaaaaggtgattttttttttttaaaaaaaataaaatagtaaaataggttatttcttggatgcttcgtggttgcttctgggagactcggtcatcatctcgtgagagcgtgaaggtgtgagtacacaataacaactcgttttcagtcattttcattcgtttttctcgttggcattattttttgtttttgacaaacttgtataggcatcagctaaaataaatatacatggaaaaaaaattgtgtagattaagttttttttacctacaggcattttctcaggaattgtagcagactagcaggtatatattaaaaaattacctccacttatctatgaaaatattaatttgtaaattaataatcagtctaaattttaataagtgataatatatattgaataattttatggtagtgaattatgtttttgtccttatactatacacatacttttttaaccattcatgacttttaacactaacattgtgtaatttgtagcttattaaatttttaatttttt

SEQ ID NO: 392057 - DNA, 2270 bp, Cannabis indica
ggatcgatgatcttttcgatcaatttctagggaagacggacttttcaaagattgatctccgatcgggctatcatcagttgaaaatctaagaggacattccaaagatggcattccgcaataggtatgggcactatgaatttttggttatgtgttttggactaaccaatgatcccaaattttttatggacctgatgaatagagtattttaggatttcctcgataattgtgttattgtatttatcgacgacattcttgtatactctcaatcagaagaggagatgaacaacatcttcggatggttctatagcggctttgtgaacataagttgtatgccaaattcgagaactgcaagttttggctatctcgagtgtcttttctagaacacgttgttagtaaagatggaattaaagttgattcggggaagattgattccgtcatggatcagccgagatcgaaaatagttatggaggttagaagtttcttgggtctggcttgttattactattggtttgtaaaaggattctctaagatttcaacgccgttaatcgatcttactaagaagaatcagtggtctgtgttgacaaacaagtgtgaatcaaactttcaggagatgagacaaagattaatcatagcatcagtgctagcccaccttttggtaatgaaaagatcgaagtttattgtgatgcatccaaatagggtctggggtgtgtattgatgcaagccgattgggtcatcgctaatgcgtccagtcagtggaaagaatatgaacagcggtacccaactcatgatctagaacttttcacggtagtgtttgctttgaagacttggcggcattatctctatggagagaaatgtgaaatttatactgaccaaaagagcctcaattacttcattactcacaaagacttgaatatgagacagaggcgttggttagagttggttaaggattacgactgtgaaatcctttaccatttgggaaggccaatatagtggctgatgccctgagcaagaagggtcccagacaggtaactagtatgagttagatttcacctcagttggcaaaggacatggtcagatcaagcatcgagtttgttgtaggcaaacttcataacttgacgttgcactatgatatgttataacgtatttaagttgctcagtttactgatccagaattcgtgaagataagagaagtggttcaagctggtcaagccagagattttactgtgtcaaatactgggatgttgttgtttaagaccagaatttgcgttccaagtagtgtgaaacttagaaaccaaattctttaagaggctcataccactccatactccttgcatcctagcaccaccaagatgtaccaagatcttaaaccctacttctggtggagcaggatgaagaagaatgtggtagaatttgtatctcggtgcctaacatgtcagcaaatcaagtctgaacaacaaagaccagcaggtttgttgtagcctttgacactgttgactttgcttttagccaatgacaatgagtctttttgataagcgaaatgatatgttgtaatgagaatatgtaataaagcaataacaagacactggaattttatagaggtttagccccgagcagtttggtaatagcctaatcctcgttatttgtattgacttaagaacaaggaagaagtttccttttcttatagctcttacaatagtatctctgaatatataattcttagatagccttagcttacagcgtttcggcttataattttttccgtcctttgcccagtgaacattcctcactatttatagggctggaaacttgaggaggaagagtttcctctcttattacaatgcgcataaacagaaagatcgtgtgatcaatgctgaatgcaaggatcgtgggattgaggctgaatacactgataatggtatcatgtgtatgccacatccacgtaagttgatcattatagggattgagctggtcactcatcatgcgttaagctgaattcgccaagtgttgatcattctgcacggctcgttaagtattccattctggatatgccagcgaggcatcctgctcagcatattgctccgaaaagatactctgagtccacgtgtcaccattctcgtgatgccacgtcagagtgccaaatttgggataacatttgcccccaagtctgtacgggacctccgaggttgcgtgtagacttattccgagctggctctgcctttagatagggacacgtgtggagcatgaccgttcgagactcgatgtgaagctga

SEQ ID NO: 392058 - DNA, 2015 bp, Cannabis indica
aaaaaattataaaagttgaatatataacatcaaacaaagtacgacttagttaattagtatatatatatttatacattgaataatattatttttttctaagatgagattatagtattttactactatattatataactaagtattttattactcaatattattttaatacattagagcattaatgaaaatcagaaagaaggatcgaacaagaaattgaaaataaagcaaagtagaggcagaaagacaagcagttatttgtgtaataatctttgtgtatttttctcagtgaatatacagtgtaattggaccatgtatttatagtacaaataaaggaatatttctctaacgataaaatcttcccttgcacaatgattggctacaatagcaagggaattctaggataattctgacagctcataattggagaaatatcaagaatgcccgcacaccaagagagggttgtgatggtgaggaccatctttctatttttacatgcaccctcaaacttgacgtggttgatcgacgatgccgagttagtttttcagatatgagaattgttggatggacgtggcctttgtaaagatatcagcagtctgttccgaagtgggaatgtgtctgacttcgatgatgccttacttaacttgatcacgaatgtagtggacatcgacttcaatgtgttttgtttggctgtgaaaaattgggttagatgagagttgcttggcacctgtattatcgcaccagataacagcagggagtttatgttgaatgccaagttctttgaatagagaatggagttaggcaacttcagtagcagtttgtaagagggctctatattttgcatcaatggatgattttgcaactgccttttttttaacaccaatttatgagattgcctcccaaatgaacacaatagccggttgtcaattttatgtcatcgatagatccagcccaattggcatcactaaaacattcaacgcttagctctttcgattgtttgaacatgataccttggccaactgttcctttcagatatcttaggagacgttttcaaactttccagtggtgttgagtaggcttgtgcatgaattcacttggcttcttgactgtgaaggcgatatcaggacggctgagtgtaaagaccgcttagtttaatttacaaattagcagttaattaagatttaattatgataattatttatagatatttaaataaatatttatgttgatatatttgaattctgaatgcatttttatgtcatatagtgaaatttcataatttgtatattcggtgtccggcaacctggaacgcggtgtatggctcagtagaatcacaatttagtattttagtatagcggggcgatttattagacattgggaatgtcgggattagtcaggaatttagaatttcccaaaataccctttagtaccctttatgttattttagtgtggaggggcaaaatggtcattttgccccattgatattttgtcctttagtggacttagcattatgtgactatgtgtttatttggctgaattacttgggaaaaacctctctttagctcattttactcaaaattagaaatttggaaaaattaaagaagttcatcctctcaaagctctctctctctctttcggccctctttgagcagcaagaaaagtggtgttttccttggtaattcaagctggttttagcataaatcttgacctcaagttgttggtaagactcttgtaactccttcttaagtttcttgggttttaaagattagaaattttgcatactatggagtttttacttgctgcaatggtagtttgtatttgatgttgtgttcttggttttataaatgtttaatggagtaaaatagggtagattttgaagcatgctatttgcttttgttcaagtttagaattttcgctcaaaaactatgatttctatggaaaattgatgagttttgttgctgtgcttgttggggttgatttctgttgtttgcagaagtttagatatgcatatttgagta

SEQ ID NO: 392059 - DNA, 659 bp, Cannabis indica
gtttttatggtcattcttcaagacttttttcccattatttgaagtttttttaaaaaaatgttacatatttagtgtaataagtttttatgtccatatatatcaaaacttatcttattttcccatatttttgtaaatagcccttttgaattttgtcgctcacaatgtggccaagtgggcctttacccacagacaatttggtaacttaggaatctcttctattccgcaaaatttatttcataatgaccgtaaggtataattttatttattcaataaacgactaattttcaaaaaaaaaaaaaaaaaaaaaaaaaaaaaaaagaaagaagtctgatattaaaagaatgtgcaaaaattattatgaaacttgttggggtggggaggtgttcaaaaataactccactgagaacatatcatatgttagtaggagcaaacaaattttccatcacctaatcttctatctagttttttcttttcttttattttttgacaaatacttttatctggtcaatttgaaggttatttaacagcttttttgaaaaagaaataaaattgggaaattgggaaatttataaaaatattgaaatttgggttaacttttataaaaatactgtcacatagaaatcttttcaaaaatactgtatttttataaaacaccacta

SEQ ID NO: 392060 - DNA, 1583 bp, Cannabis indica
atcaattatcaaaatgtttttttttttctttttaagtcagtatgaatatattactcaagaaaacaattacaaacaccaatatctacaattaattacaagctatatacaatttctccacccatatctatactagaaattttctttgtatagctaaagaaattctattacagacagtactcaaaatgttgtgaaaaatttcttaacagtccacgcttcagatcccaaagggctttatttctagctttccatatgaagtaaactgtagctgagataaagcagaagaacactttatgtctgaattgggtctctttattatttttaatctagtttataagaccaggaaggctgaacactcactcctttaatgcctatcatccttgacttttttaagaatatgagtattgtagcagcactcaaagaacaaatgctgacttgattcttctttgcttaaaatgttgtttaatataaatatttgcagtgacatgattgctttttcttaattattatcataactttaatgaagtactctttaaatcctgtcttgttttttccaactggttttctaagtcagattttagtgagggttaaaaagtgagactttattctttttttttaagttgaatattattttatataactttctattttatctattaatttaatatcaattcctaaattaacatggatatgggttagcttggggatttgatgctcatggtttaatttcatctatctagggtttttttttttttttttttgaacgtcaatctctattaaaataaagttaataatataatgaagggtctcataataaatactttattgttaacggaaattttcgttaactaaatatataagcattttacgtaataagatatacgaaaataataataataaatgaatactagatatttttacgtatttttgtagttaaaatctacatactaactccatgagtcattcttattagggatgataactttgatacaaagtataattctctaataaatgtaaagtatagttttgtctttcaattttgtcgtctctagcttctttcctggattctgctcctatttataggtgtataggatgacaattatttttattagaatctaattatttacaactgctcatgaaacgtggacattcctcacgtttcatttttgtacacatggaataatacttaataactacataaccgctctttctctttatccttaaacgattatgctaactaagaaggttgtttctcgattaatgtgagttgtcctttttcaccgtctttataggaaaaaatcactacaaaaaacggctacttctagtgacaaatttttttgtcacaacataatttttttgtgactaaatgtgacttttagtcacaacaaaatattacttgtgactaaaacgtggtctttagatacaagttgtcactaatttagttttagtcacaacaagtattgtgactaaacatacatttagtcacaacaaattgtaatttttgtgactaatactttttgccacggaccttttagtcacaacataggaatgatattttaattagtcacaactttttcacttttagt

SEQ ID NO: 392061 - DNA, 1843 bp, Cannabis indica
ttaattctctatctctaatggtggtattaattctctatttccaatgtaaacttctctctacttttatgattagctgttaatttttcttttattactggaaactgtaattttgcggcccataatatagtcaaatgggcatttgccaacaatattatatggtagaggtttctactatcccgaatgctatcttttgtaatgaccatgaggtctaactccttttgatctagaaacgattttaattcaaataaaaaaataataaataaataaataaaaaaaaaaaaccttctcataatttaaaaatacaatattttattttgtctgttttccacaatacttttttacatttttattctaaaatatttcaatgataagctaagcactaaaataaaaaaaataaataaataaataaataaatctaagtatttttgagctattttaactcatctatgaatatacttttttgattttttttaactcttacctatttttctttaactctagagctattttacattggttatcggtgagtgctcttaatatatattgttcatgttcccctttttaccatatcaactttatgatagtttttgaaaactcgatggttttaattaagtttaaatttgtacattatatttatcaaacacatccaataaattttttagaagttcaaaataacttagcaagtggaaaataagtttttaatattttattgtatgtgttgctcgtttattttatatgtatgtgaaatagacaatttgagccttattatattgtaaaatatcaaattttttataactttgtaagatgccttaagtaactaaaatatacattaatatacaaaaatattgatattacaactattcagttatcaaaaatacaaaaggagtgcatcaatgaacctctaaaaaaaccccaataggatgtaaattgtgtaccctaaatgatgtatatagttgtaccactcattcttggcatcccttcaaaaaataaatttttgaaaaaagatgatttcaataaaaatgatcttagttcataagaagataaaaggaaagatatgagaccgattttactgcatttttttgttggcaataaactcacttaatacatgtcaattcagtagttttatctcagcacttgtcaattaaaacaagaaaggcagctattagttataacatttagctttgatcaagtgttcctcagtatgagatttgatcctaattgtttttgaattgtaattaggttgtgtattgagggtgctctttcagcaatagaagagattgaaaattaagagccaataagttgtatttgaagaagagatgatgtccaaattgattgcaataataatgtgggatataggccaaaactataacttataatttactcgtattaaaaaacaatttaactaataactaaaatttcgttgtatcaatttgatcaattttataaaatataaagttttgaattattatttaacaaagtacatgaaagccaaattgatatttttcccttgcaaatatcatacaatataggaagatgataagggcaaacattattaaaaataccacacaaactgaaataacatagggcatcaaaagattgatgtcacttatttttggcaacattatttaagtaaaaccttggacaaagccttataatttgcttatgctgcaatgttcaacaagagtgccatgtcttttttcacatctgtaactttggacacataacgatcactataatcttcattttgcaattttatttcaggaaaacttccatctttagaattctggattgctttcgaaagatcttcccatttattctcatagcttaaaatatcacctttagg

SEQ ID NO: 392062 - DNA, 1183 bp, Cannabis indica
accattttttttatatttaacattggttggaacttttttttcataattaatattttttaggcttgaatagtgaaaattaaaaaaacaatacatgtatatgtatatggaatggcatactgaaaattaaaaagcaatacatgtatatgtatctgtatatattaaaaactaaaaaaaataaatggatatctattttcacatccaactgaaaacagtaataagtatatagtttttaataaaaattaaaaaggtaaaaactgaaaacgaaagggaaaatagaaatatgagaatcagtcggagaagggaaaagtcatcattgccgactggtgagtggacacgggacgccgaactgagccgagaagagaaccagtcgccgtcgtgggtgggtgcctatcgtgcgtggggggtgggtggtgtcgagtcgactggttactggtgtgggtgagtcgacggtgacgacgagtcgacgactgcactggtttaagagtatatactgtatatagattcacatttcattcacattcacacagaatagtattgagaagaagagaatacgaatagaatagacctatttttgtttgaaattgattagattagtaatattattactatttagtatttccagcagatagatattaattattaaagtttattaagtatattgaagaatacgaaacgaatagtcggatagatatcaattatgaaattagtaattaagtatattaattacattagtaattaagtatataaattaatatttagatattaattattttgggttacgggtcataacccgaccagaaaaaaaccaaatactcaaaccgaacccgaaacctgtttggagtgtttttcgggttgaacccgacccgaccacacgggtttttgggtgatcggttttttggggggcgggtcagggcgggtagtcgagtttttcggatttgcgggtctaaatgtgcacccctagttggtggtgaggagcgagtctcgcgagtggaggagcagagagaatgaagaagaagaagtaaaatttgagggtataatttgttggacagtagtgatggtggggtttagggtttgggggttgaaggaaaggacggtatgtgtgagctggagtgaagctgagacatcaagaatggcattgtattgggattatgggattcagtagttgaaaatttgaaagagaata

SEQ ID NO: 392063 - DNA, 1245 bp, Cannabis indica
gatagactattgcattatttctacttttttcaagtacattatatatacatatatattaataattatttaattaaaatataacttttcatcaagatctcacttcaaaagtctaaataatataataaaatcaagtcaatgacttcgaaaatgaatccatttaaatactattaagtaaggaaaagaaataaaatattaatctaaatcaaaattatgtcacattactttcttttcgagagcctattcatacataatatgagtgatatttaaaactatatgaattagctataacctaaactttcttattgctaatatgttattggtatatatatgaatcatattctacaacttattcatatacaaaaaaattataaacatctataaaataactcatattcaccattttttttcaaggttatatttagaagttaaactttggtgagaagaaaaaaagtttaagaaaatatatataaaaaaaaaaaaaaaaaaaaattaaatttttcatagaaatctttgctgaatctaactttttttcatatcaaacattgattttcttttccctatatttttcttattttttttattttgtttatgaaaattaaactttcaaatataacctaaatgaataacttattcatatattgaaaatacttacaataagactgaagccggaaacagctgagaaggaaattgcaatagctgtactagaaagagcgagtttaccgtgatgaccaaccatcattacagaaactatttgaagaaaataattgagatatatttacaatcaccattggtcctccaatataacccaaaagcttcacttcatcaaatattttactaaaatacttatttctttctcttctttttctaacaatcccttttccatgctaatttctctcttctcttccatggcttcaacttcttcttcttcttcttcttcaataaactctctcttctatatatatgtattaaaaaaaaaatcaatatatttgattatttataatgacacatagctatgagagagaacacgtggtcacatttaattattatattttataaaatatagttggatgaagtaaataaattaaattctcttgtctttattattgagctatcttctatatcacattttatctttttataatgatcgtaaaatctaattttagttttagtttataaatgcttttttcaagaaaaaaaaaaaaattagagatgacttttattttttaaatatatatttatatgtat

SEQ ID NO: 392064 - DNA, 1101 bp, Cannabis indica
ggggacatgaggagagtcatcgaaggccagccgtggcattttgatcactgtctggacactagtgccaaccctgctggtcttgacactcttcttcccaaccagattcgatattctcccttttggattcaagttcactccattccttttggtatgaagtcttataagcttgccaaaatgattggggatgaagttggggatttccttgaagctgataaaatgacccttcttaaagttcctggcttgttcctccgaatccgtgttttgcttgatgtctccaaacccatccctagaggtattcttgtttactttagaaacatccataaggaaaaatggctcaactttaaatatgaaagcctgcctaatatctgttttcattgtggtatgtttgatcacaccctcactaaatgtgtttcttatctcaagaaatgtgatgagtatgcttacccacctcctctgcattataaaatccctttaaaagcccctgctaaaacaaatttcaagcgaaatccatttgatctctctaattcttatcctctggatgagttgccactctctcatggacaagtcgatcaaagtcttgctgctgctaatcagtttctcaccactcaggatgtgggggctggttcttcctcttctggtgttgttcctaggagagatgaggctgtttcacatggccttgttgacaatagccccatctcttctcctgaactctcaacttttgagagaactaaccctgttccagcttttaatcctggttttaactgtactgctcctgttgatgtattctgtgatgccactcaagctgcttttcctactcttgccactgctgtgcacacccctgttgagcctgactctgaaactgttcagaacatggctaggaacactgagaagtctaaaggcaaaggcattgctggtgctaagcgttctgactttactcctcactctgttatggtgggtgactccctcaggaatatcctcaagagagcccgtgccagacctgtcatcaatgaagccccaactgctgctgattcctccttccaacagcgggtgttgctgagcaaccccgcccagaaaaataattcttatgagttggaatgcccg

SEQ ID NO: 392065 - DNA, 1014 bp, Cannabis indica
gtaagaggaccagaataaacatatagggtttgttcgtttaagtatattgtcaaataaagtatattgttatacaataaatttattgtaatacatggaagatgaaacccgccatatattgaggatatatccccatgatttatatgtttgttatatagtaaggataatcgttgagtttaagtggtaaatctaaatgctgaccaagttagaaaatattaaaatcttttttattttaagaatagaatcaatgaattaatttaagataaatgaatattttatattcattgaatctagacataattaattggttgacattctaaatatgatcagattgcgatttaccaaatatttgatctctcaatttaatttccttaattaattgtcaaaatattctgacaattaattgtggtagaaattttgatggaaggtctcacctatataaatatagggtctcaatctctgaactcacaactcaatttgtaaaaatagtaaatccatctaaagagagtagagagagcttggaagtccgattacccacactaatcaattttattttcttttgtagatcaaagcatgtgtgggattgaagctcaaagaatcaatggctagagagatttcgatcatttagttatatcgtgtgcatagttaatttaattctgcatattcatacatgattatatatatgcttcatattctcatataaaatttctaacagaggattctcatcccaataaggataacactgccacaacaaggtagcctcctaaagggcgaagcataattcctctcataagaggttatggtaggattcgaacacttgacccaagcaagaaaagatgtcagtgataaagacatctctatcactacaccacacaacccctagtggcctaggaaattttttttaaaaaaatgatcattgatttaaaaaataaaatgaaatttaaatagtttttctaataaaaattcgttggggcattataattaggggtgagcaaaaaatctaagaaaccgaccaaa

SEQ ID NO: 392066 - DNA, 1006 bp, Cannabis indica
atgttatatttacatataattagaattggagagagagacataagaatttaaaaatggcgaatcatataggaatgaaactttcaaaaagagaaataagtaacaattatattttattcacattattactaaaaataaattttagtgaatgctcctattaaactaaaaaaaaagtgtttgagttcatgtacaatatataataatgacgataataataaaagaaaataactttttataatcaatacgatttaaaaagaaaaaaatagaaaaagtaagaaataggtattatggatcataagattaagatgccacataaaaacttacacgaaaaaaatggtaagaatatataaggattaaaaacaaattgaaaaggccaaataaataatgttaatgaattcaattatattttatgtatttaatatttatgtatataaatgtagaataattctatagtaggacattggttttgttcctatactatagagacattttattaaccaatcatttatatgatttttgagtgtatacattggttaagatgtacttgtgtgtatgtgattaaattttagtttttaaatgtactctccaatattaaaaaaaaaaagtgagactttttaatataaaatatttagaaaaaaataataattattaccatcatcacatataccttgttcttcaaagtgaggacttaagaattgtgtgctctatttggacaccagccattagaaaaaaaaagggcaagacttagatgtggaagcttttatgttttatcttaaagatggaaaagattttcagtgatttaaaaaagaaaaaaaaactagtttaggtctctcgatgctttcgcactctctacagtttcagcctctcttgcattttttcagtaaaggctttgctctctcttagacttatctaaaaatgatgaacacgataacaatatataataattaggtatatgcgtacctgattgatccatagtaattgtcacaatttgatagtgcaatactatcaa

SEQ ID NO: 392067 - DNA, 1062 bp, Cannabis indica
gactcttccctaatcaatttattcgacccacacaattaaaggcagctaagagaaatcactttctctctctccaatcaagcccccttttgacactttgctattaatgagttcgacccactcactcaaagacatcgcaacaagaagacaaaccctaataacctaatataaaaggtaagtttctaaccctagcacactaattcggcagcaactatttttgcctaaaaaaattcaaactttttcaaacactcttctctttctttctcacggtagaaaaagaaaatatagggttagggtttctaaaattttcttcctcttcttcttcttctctcaagaacaaagtagggttctaggattctaaagctttctttctctttttattttctctacagccgcacctagttcttcaagctctcttcttctcacttctaatggcagctagggttatggggttatattgttctcttcttgctatagccgaaacactagggttcttgggttcttatggatctaatcttttcaagcttcttccttttctattttaatggcaacaactaggttttttctagggttacaaaataattcttttcttgaaaatggcagcaaggaaatattagagttttctaggttttattttcttactctctttttgttctacccgaaaatacaaacccagaaaacaacaaagtattttagcttaatacacaaaccgaaccctaaaacacaacccagaaattcctctttaactttcttggccgaaactcattacacacccgaaaaatagcaagaacacaaacacatacatgtatacaaaaaaatatagagattaagatgagaaatacaaacagtaatggtaaagatggagacacaaatttcatctcgaagttcgcccaaaacaacggctacttctccgtcaagccctcagcttaattccattaatcatcaaataacaggttacactcttgatttacaactgtatgatttctctttgtttttctctctttggatactaacaaaactctcttttccttttacataaacacacaagtgattctctaggaggag

SEQ ID NO: 392068 - DNA, 649 bp, Cannabis indica
tatatatatattataagatcttttggtatatacatataaatatacatatatatatatatggataagatggattttaaaccaaggtttgcccagaaaatatttgagggagaaggaggagaataccaaagctggtccagcaaggatttcccattgttgccggagaaccaggtcggcggcggtgttcttcttctcaaccctcgtggatttgctctccctcactatgcagattgctctaagattggctttgttcttcaaggtacctataattatgttataaagtataaagactttatatttaattttggttattattttatatactactttttaactttatttttaattcatggtttaggttgttctcatgaatttatgtaggttgctgtataaattttaattgctatttaatttactccattaattgctatatgagttgttacgtgaatttttataaaaaaaatacaaaaaaaagggaaaaaacaaaaaatacaaaaaggaaaaaaattacaaaatacttggccggccattaaacatttatacagtccacatacaaatatttacaaaaataccacatgcactaagccttcagctgtacagagcgaaccatgaagatgaaaatacgcgctcgtttcaaaaccgcaaagcaacc

SEQ ID NO: 392069 - DNA, 1049 bp, Cannabis indica
tataaatatatattaaatatagtgtcaaaagagatattatttaataattttttaattaagtagttaaattaaatatagaaatttaaatttattttttattattagctgaaaaattaaaatttaatggtttaatatttttagaattaatatttatagtttaataaatataataaaatgttccatatattatgtatatatatttcctataaataagaaaaagacaaagaaaacaaagaaagaaaggaagagattacatatattgattgactttttttttccagcaaaacatcaataataatataataaaaggaatattatatatatatttaaatatatctttatcaaattaatttattttatgataatagcacttaacttaatatatacatataatacttatatatagatttagactcagactccggacttaaattcgatattgaacccaaactcgaaccttggattcagatcttggacccgggcctacgaccttagacccaaacttggactttagattcgaacctggattagattcggatcctggaatcggactcagacctgaccttggactcatacctcaaactcgaacctagacctagacccgaacactgctcccgaacttgaatcgagacccgaaccaaaacctcgaaccccaaacctcaagttcgaatttgggttttgtgtttaagatatgggtccaggttttgggtttgagacatgggttcaggtttgggtctgagtccgagtccagatccatatccgagtctaggccgtggttaggattagggtcaagtttattgtaaaaaatttataattttacataacctattactataagtcaatatcaaacctagtattatattaaataatactaatataatataatacaaccaacgcaatactataaaatacaatataatatattaagggtgtgttaagaagtaactgtgtaattactaggtagggtaattactagggtggtaactacacagtctagtaattacactatattttaaaatacaatgtgtgtttggatatgaggtggtaat

SEQ ID NO: 392070 - DNA, 1262 bp, Cannabis indica
ggggttagtagagaagtgactgtgactgatgagagcaaacttttttatatttttatttttgagttatgaaaaataaataatatatatgatgatgatgatgtaaagtgttatatatggtttggatatatacgagaatcatatatagttataagaaataataagaaaaatagaagtagggttccacatggaaaatggaaaaacatatagacagctcacatgatgccatcacacactgccattctagtcgtagtaatagtagtagtacctgtacaagataacaagaagtggtcctctcctctctatatcgtttcatctatctagctatatatctatcaatcatatatatatatatatatatatatatatatcttcactctttcactcttcaccattaatgatctgtattttttttttttttttcacgtgctttttgtttgaggtcatttaaaagaagctacaccggtgtctgaggtactaactatatatatagtatatacaatgtacaaaaaaaacacaaatctactaattaaacattcacattgcccttcttttcatatttgttaaatattaattttggggccttggcaaaagaatgtaaataggtctttttatataaaactagaaaataatggatgtttaaaattttttaaattatatatatagggaccggattttgtcccgttactgtacggacacggattgcaatccgtgatgtactgtaaccgtcggatgggcagttactttgatccaaaggttggggttcatgtaggggttgatgtaggggtatgtagggttaaataaatggataccggctacttttttgaaatttaaatttattaaaaaatggaaaagtgaacagttacatccatcaatcaagtcctatcaacctatcaaccgtcgtccctctccactataccatttcattgttatttttattttgttgtttattttgcaaagttctttcatttccattttcgtctctgctagggcaaaagcaaagttctttcatttccattttctttttcattttccattttgtttttccattttccattttcatttgagttggtgaaacccatactgtacattttgttcactgtggtgtacattactcgaagtctgccattgttggagttgttacagggagtgtcaacggtgggttttacactttgtccgttctactttacatacttttcacagaaaaaaaaatacatttttcaagcgaacgtggtgtttttgcattttcgtgtacttaatatctt

SEQ ID NO: 392071 - DNA, 1126 bp, Cannabis indica
ttttgtttatatattttcttcattttatcgttggctaattaaaagaaactgaactaaacacacatactctccctctgtctctctcccttagtgaacggccggaccttattactgaaaaaaattaatcatacacattcacctcaataatgggtaggtgttcaattttttttttattaaattatttaaattagtatgtagtttatttttgataaatcttgtcttgtttgtattggtgttgttttgctctttttttttttatcgaaatgacaagatttagttttctcgccaaactataatctttaattgattatttatgctttttcaatgatatcttctcgataattacggtaaaaaagtaaggattgacaatttttgacactttttcgatagtatatatatcaatactatttcgatccagaagaaaatatataacaaaattaatcacacaagccaaatcatcgacaaactatcgatatactatggataaccatcaataatcaattaaaataccaaataaaaaaatatatcagcctgcgatcgataaactatcgataataccgatggtttatcgatagtatatcaatggtttatcgatggcagactgacattattttttacttggtattttaattgattatcgatggcttatcgatatatcgatggcttgtcgatgattctaccttgtgtgattaattttgttatttttgctgtgttttgtcctaggttgaaatattatcaatatatcatcgaaaaattattaaaaattgccatcccttgcctttttaccgtaattatcgagaagatatatatcgatatataatcgaaaaagcattgataatttgttaaaaaaatccaatttagtgagaaaatcaaatctcgccatttcaattaaaaaaaaaaaactaccaaaacaacaccaatgcaaataacaaccacacaaatctatcgaaaataaattacatactaatttaaatatttaagaaattctttagacaatacctacccattattaagatgaatgtttatgatttttttcaatgtgaggtccaatcatctactgagatagatcaagagatatggagtagagagattgaaaaagaatgagctgagagagagagagagagag

SEQ ID NO: 392072 - DNA, 627 bp, Cannabis indica
aaaaaataatgaacatggaagggaagacaagattttgagagggactggtcttttggttagtggtggtggtgtggtgtactggtgaacatatatatatatatgtattatatattatatgtataaatgcatatgactgaattgtcttttgctgtttgcttagtatatcattatgacctttattttggaccacccaggaggataaggaaggtgaacactatgcaacataaattcataatatttataccaaacaatgactggttttatgtacctttcaaacactttaatatgcatgcctttctttctacttcctctgctcttttgtttaataataattcttacaaaaaaaattggttaatggtaagtacatagccttaattatccgttagaataattagtatttttgtctcttgaattttcattacaacttgattttgccctctaaaaagcttgttaaaaatttctcttaaaatataaagattatgtaatgatgtcccttctgttaggttttgtttcttttaccgtaaaaaattagtatttttatcccctaaatattgactaatacaaaattttgccccttttatttctttttttttaaaaaaactataatattttattaattctaaaaaa

SEQ ID NO: 392073 - DNA, 818 bp, Cannabis indica
cccaccatattctttaaccaatttctcagcttcaatttttacctcctcaccatcaaaatggtcacttttctccaccaccaaaaccttatccccttctttgtcatcattactaacaccattgtcagccaccaaatcctcctcctcctgtttctgaggagtaacacctccacctccaccctctaataaactctcaaccccaagtactacagccgactcttccttaacctccaaaaccccaactttcgaaccatacaaaactccatcgtcatcactttcatcatcaacaacaacatcatcgtcatcaatggaaaccttggcaattggtctcacaccaccactaagcatattaacaaccccagcacccttctcaccattatcatcaaaattgtaaggagaagaagcatcaacaaggtcggaatattgaaaaggagaaaacgaacctgttgagaatgaagaaggcggcgtcatggtggttgttgttggtgttgtggcatcaggcgaagagggagactttaagggctccattggagaaagtggaaaggggtatggaggaaagagataagggatttgaggagtgtgggagagagtgagtagcttcgatagctctgtttggtttagtttggttgggagggagaagaagaagagagataaggcttactttggtttggacgaaacctttctctctctgccttttgtctctacttaccaccaccctatatacatacggcttttaaaacttttttcgacttttatttttgattttcatttatatatatatatatatatatatattagtttctttctttttttattttttt

SEQ ID NO: 392074 - DNA, 626 bp, Cannabis indica
tctttcttcttcttcttcttcaccctagcccaccctgtcgagtcctagtctactctactaaaattctacaatttcattagcaagaagggtcactctaaaaaaagttgtctaagttaactttgaaccaaaaaagccgaggtcagagaactggccaccacaacccaccaccctccactaccgacatctctctttctctaccgcatactccttccatatctcttggtttcttaaaaacatgaataaaaaaagagaaaattgcggtataagtcaccaaaaatagcagtaatagtccctaagctcgagattcttgtaaatctattggtcctcattttaacagatttgttgttgctcccaaaatggcatgtgttgatattaaactgcagtattagtccccaaaaagttcactttgatgcaaataagttctcaatcttgaaaaattattgtaatagcccaaagcttaggattctcattagtctgtaaatacccaatttaactactttattttttgctctcaaaaataccacgtgttgatatttccttagtccaagtcataattttagtttagtataatttaaaataaatgaataaataaatgaataaataattttcaaaactaattaattaac

SEQ ID NO: 392075 - DNA, 2276 bp, Cannabis indica
ttttttttttttaattttaataactaaagtggtttgattatttgaacgatttattttataaaaataaattatgatgttaattctaatgtatacatactcatataatattaattctgaagaaataatttataataagtcataataacatatgattttaacatttattttttgtttctaaaaaataaagaaacaaaatgtcatcttaaaatatagacaaagaattattagataaaagttttaatatagaataccttattaaaataaaatgactactcttgcacaatggcccacatgccaaaagtactatgaagacactacagttaaccttgcgactttgaccaagactcataaatgtcaaataaatcaagacatccttctagagggccccatgacacttctagatggttcgaactcacacacccaagtgtgcccaccaataaagacttgacttgtttggacatgaaagtgacttggatttatgtataaagtaaaataacactaaaaccacaagagaagaagaataactgccacaagaaaatggcagtgctatctagtttggagaccactgccatagtagaatggcacagatcactcctcgcaaaccatgggagaaaatttattcgaacgggttccctcaacatcaaagagcaagggacaagtgagaaaagttatttctgacctaggagcgccttaggtgactgtgccataagagaatgtcacatgtcactcctcacaaactatgggaggaaatttgtctaaacgagttccctcgacatcaatgagaaaatggacaagtgaggaaagtcattttcggcctaggagttgccttagctgacttgtgccataagagaatgacacaggtcactccttacaaattatgggaggaaaattgtccgagtgggttcccacgacatcaaggagtgaaaaacaagtgagaaaaatcattccggcctaggatttgccttaggtgacctgtgccataagagaatggaagtgccctccaaaattggagaccactaccatagtaaagtggcacaagttggttactgcacaaggaagaggaatttattgaccaaattatattttcaacatctatgtaccaaatacaagtgagagacaccacccatggcttcccacaagccatgggtgacttgtgccattatcaggccccaactagtggcagtggtcaccttttagggcgtcggacgttgaaatgagatttttgggtcccgagacttccaaaatatgactcaccataaaaaaaaggtcaaaacacaccccgagggtctgagaacatgcatagctgacctctgccatttggccatggcagtgctcgcaacaggtacaagacaacataaactgccttcagtaaaataggcataactctctcaatttttatctaaatgacctggttcaacttgcattggaaagataattttaagacgatcaaagtgtgtctcacaaccatgactcaattttgaggttatcagatccaaaattagcatacaaggaaagttgatacattttactcgagaattaggaaatgcggctaagcgagggttggtggagcacaccgccacaacctatgtggcgttgtgccaagtatcggaagtccaaaatgcatgtgttcaacactccatttcaaattggtacatcctcaaccgaaaataactaattgtctaatatttgtgggatatttacctagatataaggagattgttattgatatttatttatttattgtaatattttattcataaaaaagagtggtatacatgattttgttaatgagatatcccgatgtatgagggattactaacaaaccctctggcctatatatacatcaagtaggaggctaagaaggagagatattccttttgacttctttttgagaccttttcctctcttttggagtttctactccgaaaacttcccctagaaaattacttaaaggcaaccaaaaataccacattgatgctggcatcttattcattgagtccaccatactcaagcaacgctagacctcaaaacaccattgatactcatctttttccacaaattattagtctattgtttctaggggtgacaaaacgtgtaatcgtgccgtgtttgtgtcatattttatgtgaccagcttttatatttcgtgtcaagcgtgtcgacccattttttgactcgtgtctaattatttcaaccctaaccttaattttatgctaaaaaaaattaaattttaatttttttttaacttagcattgaatcactaaatatatattttta

SEQ ID NO: 392076 - DNA, 800 bp, Cannabis indica
caaggttttggactttctgtttgtttgtgagaacattcttcggccattatatccaccaaaggttgatcgtcagactctgccaagtcattgaacttgttttgaaggagttccatcgttcttttcatttttgcggtaagcttcctctcttctactaaaggagcttccaactttttgctcactcgcagcaagtttaggtcatggtcattgttaacgcagattttcgttaaccaaaattttagcctcacagtgataatttcatacagaaaaaatgaaagcagtaaagtaagagatacgaacagaagggatttttttacgtgattttgcagttaaaattcttcatactccatgagtcaatcttaatagatttttgatagttttctcagggcttttcttgtatgattttttttcgtccgtctttctatcttacttgccactatttataatcacatagttggcagttaattacaaagttgactgtaatctttttacaacgattatccactgaaatcatgtggcttgattacatatcacgtagtgtaaatgcggttataatttgaaaatcatataattgtgattttcttgcttttacatggtcaaaatgatcgtgtgttttaacacatctttaattgttacgtccgagggtgtttcgataggtgcttggttccagtttttgtaatggcgagcaggagccattttccttatccttctgagatcaacaatggatgccttgttgcttctttgtttaaaagcttatcgcttcatttgggacaatcgcagttctcgttaacagagagtttctc

SEQ ID NO: 392077 - DNA, 2049 bp, Cannabis indica
aacgtacacgaatatgaaaaaatattgaattaaaaattgttctagatgtcgaaacatgtaaatggtgtatcggtgcatcccttttaagtggttgcattgtagaagtatacaattattttaattgaaaattctactatgcaccccttaaaagagatgtgctgatgtataactatctgttttggtatcagaaataattttttagtcaaactttttctcgtagtcatgtatgttatacttaaaaatatggaaaaaaaaattagcacgctaaaaatatggttcaaatagtgtgttgcatgctaactattttattttatttcgcgtgtgaaataaatagtttgagcattactttttatgttataaattattctggatttttcaaaattttataaaatattttaaataactataacgtacaaatattaaaaaaaaataaactaaaaaacattagagtacttatttacaatcttatacaaccaaaccaagtggagaaataaaataaaatcaatctaactagaaatagcttgcacaagtagcaagcaatccatctccaccaaaaaagtagcaacacgatgttgaatgttacatgcatggcggattttaaaatttagtggattataggaaaaaaatatatttttagaccctagaataaaatgtgatatttttaaaaatcagtgaaaaatatatgtaattttaaaagaaggattttttttttgcctctaaattagatggactttaaacagagacttagttcgcctatgcccaaggtcggtcctgattacatgttgcatcaacagctcttgacttgatccaattgaggacctcattcaaaccaatagcttcacctatgtgaggttttacacaaccggatctactttcggcaacaacttcccaaaactgagaccatcatgatcgcatacaatccagccaaagccaattcaatataatacaatacaatacattacgacctaatacgacgttccaaacgagccctttctgcactaaaaaggtagtgtcacaattaatctcgaaccaagtcacaaggactctggactagaccagggcattctcaaatgttaggccacatttgcttaaaacaatctttaatggaagatgcaaaaattgtattatatttagtaaaaaaaaatatataattcgatttaatataatacaatacaatacgacctaatacaacgttccaaacgagcccatgatagcataaataccaagtttaatatttattaaatccaaatattcacttatacacctctacactattaatattaattaaagccattgttaaaagttatttttaaaaattggagtttctcaactatgtttttgagctagttttttttttttttttaattaatttagagtaaattgcggtataaatatataatgtttccaattttatacacttaaatacctaatgtttatttttggtggcaaatatacctaatgttacaattctcttacactgttactaccactttcgttattaactcataaatataaacacgtggagggcccaaatgcattacatttatttattttattttaaaatttaatattcttaatataaaaaatcaaatgttacttgttttttttttgaaaaaaataaggagtagaagcaatactaaattaccatagctgagtgaaccggtgtagtacatggaacatgattatcgaattgaagtgctaatatcatgtgaaaattgttaatgaagtaatacaacgttttttaaacaagtagcaattattaagttttaaaataaaataaaaataaatgtaatgcatctgaacgcttcacgtgtccatatttatgagttaacggaagtactggtagtaacggtgtaagagaattgtaacattatgtatttttgccactaaaaataaacattagatatttaagtgtataaaataaaaaatattaagtatttatgcctcaatttacccattaatttaatttcatgcacttttgaagaggcatgaatcttaaattctacatttttagtatggtaacaacttatcacctatcattacttcatt

SEQ ID NO: 392078 - DNA, 550 bp, Cannabis indica
tggctaccaacataaattgtacatgtacacaaatagacatgtgtcatagttcgattggtctaattaataattcttaactgaaattatatacaataattttttttacctaattaaggattttaaattcctaatcccgaattcctagatttgacgaggcttgatttttggtgcgtcgtcgattgaaaccaccccatcaatattggtggttcccaaaaccgaaagcctcaagatgttcaacctcatgagcagaacaagattcattgtctagatctaacctagtgtcggtcccgcaacgcgatcatagagctggtagtgggtgatatcatggtcaatatcaccgatcgttaagaacattctcaatcatttggtaagccttgtggataggtgtatgggcgcctagacacaggtcgattatatatattttgttgtatgcttttcttactgagtctattggctcacagattctactttcatgtgtaggtaaaggaaaggcggaagctgaacaagagtgagttccgagctcgggcaatgattgtacatgtcaagacgg

SEQ ID NO: 392079 - DNA, 513 bp, Cannabis indica
cataccaagcaagataagttaaggaatatttgagtgaaaattgaagaaaaccaagaagactcatcatcttcaagttcaaccctttaatctttatgaggggtttagagtttagagtggcttgtatataaatataaatataaatatatattgtaggagattatatgtaaggctgtgttgttgtgactctgtatgtgtatgtatgtatagtacaataaaataatgactgatcccaaagaaagaggaagacaacgcgaagaagaatccttcggaaaaagcagttttaagaaagaaagaaagtggaagagtcgccttcttcattgtctccaaactcaaaagtctttctttatttttattaattataattaataatcatttcttgattggttcgtacataccccacctttattctactattttgtttttatccaaacataacgaaattaatatcttataataattatttttaaaaattattcttaatatttttttaatgttaattttaatatttttttt

SEQ ID NO: 392080 - DNA, 666 bp, Cannabis indica
gtatttttgtaaatttctcttttcttttcctataatacaagtgagaccgaccatggtattaagacgggataagctaaaaaatatttattttttgtattaattaattaaaaatattttaatattatattttattaaaaagtatttatttttgtaagtgggttgtctaatatacttttactttccacttaacttagtacataatttatattaacttaaaagtataataagaatattatttataaaagtgactatatcttaaagaatatagaaataaaagtaaaaattaaaataaataaaataaaataagtatacaattgtaatttcctaaactcatcaattggaaattgcaagactcattaatataaaatttgaaactagctaattgattctatttcatcaacacttccgagaattgggtggaatctgttatagtttatatcaattgcttattggaaataattctctttgagcaatttttccttagcacgtaatacactataaatagtgtacaaagaaggggatcctcttctagtataatttcgttagtaaagtttaatcttatatattctttctcgcattttttctttaaaacttgtcagaatgaattttgtattaggcatttattttggtgagtttagagatgagactatatgttgagtgatccaa

SEQ ID NO: 392081 - DNA, 997 bp, Cannabis indica
atagaattttttgcggttaaatcctcccaactatcattttacttgtatttaactctccaaactcaattttttgttgtaacacctaccaatcttcacttctctttacaaatcaaaggtgtcgtctataaaagtagttatgtgtcagtatggattacgccacatgtaaacaaatatacatgtggtaattattctttagttaattattttaatttttggattttctttaatttttttataatacttaaatatgtataattatgtagaccaatataaatgtaacatctgtattttaaaattaacaaaaaaaattaatactttaatcatttttttttcttttttcttttttttttctttttcttcaaattcttttatcactgctttgtccttcattttctttgtacgacaactcccaccccaccaccaccaccccatagcaaaatctggtacaattttaagattaaatctaaataaaaagaaattacaaccaccattaacttagattttaaacatgaacttaatgtatcaaaccttttttttctaatcatgcatttgaataaaaaaaattgcaacagtatgcatttgaataaatgaccaaaaaattattatatctattttctatcatctacaaacttaaattaaactaaatcatatcataaatcataactaaaaaaatcaatatatttttaatcgaaaaaaaaaggaatcttctaacagaatcagccattatcttctccaaagtcggcatctaagtgtagatatgaggttgatgccattggcatccaaaatagccacaagaaccttgtcatcctctcagcactcatctagcctttctctcaagcgaacttgagagattggtgccgcctacaagagaaatgaagccaacaaagaaaatgaggagaagaagagactgggttagaacctacactactacaaatatcagaattcgcgatggtcctaaaaataatttttttcgaggaccatcgctaaaaaaattaag

SEQ ID NO: 392082 - DNA, 1326 bp, Cannabis indica
ataataataaactaatgatttaacaggaaaatgtgctttacttaaattttaataattaattgagatataaaattaatgttggtactacaaaatatttagtgttggagatccccttttaaaattttacaaaagataacattacagttttataacaaggtaattatactaataaaaatcgtcataactcaaaaccctaactactcgacactactagtcaaataagctgatatatatacatttgctgaggaagacctctgactcatagttaacctagctcagtctttttcttacctgcaccacaaagcacttgtgagtcacaaagactcgacaagaaaaatagaagcataaacaatgtacataacaacatacaaacataatcacatgtgctcgtctaatcaaatccaagtaatcatatatttaatccataaaataggaatcacaccaattaacaaaaacaatcattaatattaaatatttgtctaataagataaaaatataagtcgatacttaataaagtaaccattacttacgattgtctaacgtgataatctaatgttactattgttgattaatgagacaattgataagtaataaacttaacaatgattttagattagagtgatgactctttcttatactgttggctaatgagacaaccaatagagtaataactcttccttacagttgttaatatttattttgtgtcaatagatccaaactgtatgtcaatgtatggattatgagttttgtattatgtgaccagaacccatttggactattctaagaactctttgttgtaactagacctatgtcatcaaaagactacaaccacgtaatcatatatctatggcgttttcatctcgttcatagtagttttgacaagatcattctctgtaaagagaaatatgcctatattcacttcaaagtaagatcatctatatttgcacatatgcatgtacatttaggggtggatatgagttatcgttaaattcttatacgaccactctagattttaccttatgcaaagaaatttaaaatgtttgagaatttcatgaatttctagcaatgttgaaaaacattaaagtaagtggttaaagattttacgaactgatatgggtgaagaaatatttggtggatatgcagttcaaagatcaataagttgaactttgaattgtatccaaacttacctccctagaaattcaaattgcataataatgaaagtaaaaggtctatgattagttactagaagctgcctgagtccttctagggaaataccctagtgataggaaaattttagaatgatggaagggttgtgtacttagtgta

SEQ ID NO: 392083 - DNA, 1331 bp, Cannabis indica
acgatgttgatggtggtactaacgtttcagtcatcccgattgtcgggatgggtggtgttggaaagaccactcttgctcaacttgtttatgatgatgttcgagttaaaaatcattttgagctaagagtgtgggttacggtgtcagatcagtttgatatttcaaagataacaagagagatcttggagggagtcacttctagcaaatgtggaatcgagaatccagatgaaattcgaagaacactgaaggaagcgttggtggggaagaagtttatgtttgttcatgacgatgtttggaatgagtcttatacttcctgggactctttgaagagctgtttcgattttggagcaaatggaagtaaaatcattgttactactcggagtgaggttgtcgcctctactatggccacttcgaaaattcatcaactcaacattttgtcagatgaagatggttggcagttatttgtcaaacatgcctttggacccaacgatgacctcggtaataagtacaaagatttggaggaattgggtagacaaatagtaggcaagtgcaaaggtcttccgctagcaataaaatctgttggtggattattgcgctctgaacgaaatgccaagaaatggaaggacataatcaatagtgacacatgggaggagctgtacaagaaggagggttccattcttccagctttatggttgagttaccgtcacttgccgggacatctgaagcgttgttttgcatattgtgctatattccctaaaggttatgaatttggaagaaaagaactgattttgctgtggatggctgaaggctttttgcaatttggtgagaaaagcaaaaagctggaggagcaaggggaagaataccttgaagaccttttatcgaggtcattgtttcaacgttcaaagaacacgaaaaaatcattcctccaaatgcatgacctggtacatgatttagcgatgtttgtatctaatgatttttgctttaggtgggattggagatatgacttaatcaaactttcaagtaaaactcgtcatttgtcatatttgatgcggaaatacgtcgtgggcttgcataaagccaagaacttgcgtacctttctagaattgtcaaccaacccaatgtttccctatgacaagacgtacatcaagtttgatatgttgcttagaagaggaagttgtctaagagtactttctttaattagatgttctatgaagaagctacctcattcaattggcaatctaaagcatctaaggtatttagatttatctctctgttgtattaaggaattacctggttcagtttgtgatttgtacaatttacagactttattatta

SEQ ID NO: 392084 - DNA, 625 bp, Cannabis indica
ccaagggttaaagcttttctcaacctcttctggtttgaatctgaaccctaataaataagctttttactgttgtagtatggaatacaatgaggtacaatgtattgttgattgttcaggctttagcaagaaggaagttcctttcaaatatttaggtatttctatatgtgctaaacgaatttcaaggaaataatgcacggtgctagcagacaaaatgacagcccgaatcaaagtatggagctcacggaacctgtctttagctggaagggctattcttgtaaactctgtacttatgtcaatccattcctattggagtcaaatcatggtattgccgaagagaacaattagagatattgaggctatctgcagagcttacctatggaaaggacatcatgtgacacaaggctcaggaccaattgcctgggattctgtatgtcaacccaaaacagcaggggggattagtttgaggaagataacagagtggaacaccgcagcaatgaaaaagtatgtttgggcaattgcgaacaaacaagataacctgttgatcagatgagttcattgtgtatacatcaaagacaagagttggtgggattacctgttgggttttatgccctaaataaaactcttt

SEQ ID NO: 392085 - DNA, 2523 bp, Cannabis indica
aaaaaaaaaaaactcatagaaatagattctatcgaagaaatatataaaattggaagtttaagttgttgacttaatcaatgttatatataatatatgcctaagtgcaaaattataataatttttaaaataaaaattcaatattttataattgtgtatttttttattttctttatttgaattaaatataaaatgtgcttttattatacatttttaaaagggtgcactaatgtattacttatatgttttggtatttagggaaattttttactctaattatttttttatagttgtgtatatattatagttattgaagacatcttacaaaattttgataaatttataggataatttacaatatagaaagttgtatttaaacagtctatttcatacgcgtataaaataaaagagtcatgcatgcaacaaactatttgaatcttattttcagcatgttaaatttttttaaatttctcaaaattttacaagatgtcttatataactacaactcacacgactgtagaaaaaattaactaaaaaattcttcaagaatgcatcggtgcaccatagaatttttcaatattatacatacatgtattaattataggtatataaatttgtaaaatattagtatgcagaataaataaaatagaacattcttaatattaatggacactatctcttattcttttccattttagaacttacaagtaaattttgatatagtgatactttagttttctaacttcattaccggtgtatttttattttgatttctttattcatattttatagtttattgtatagaatatatttataaaaattaagatacaatttttttttcatcgacatgcactcttcagaaaagaattttagtcaccaaattttccgtttaattttactgtatgtgttatttgatgttggcccccctactatccagtcctagctccgcccctgggagcaactcgaatgaaattgctaaacactatttttggtactacaataagtaccacaatatatatgctgagtacagtacccatgattatttttatattaatatatcttatttgtgctatataatatacttaaaagatattctattttatttggaaaataataataaaagaatatgtatttttttttgttaatttttagtgttgtatcatcagagttgaataataattataaggctaattaaaatttttgctccccgaactttgacatgtagcaaatcatacttcctaaatttttataaggtcgttaaaaattccccttgaactattgagattgttgaatttaagaacttttgtctaattttagtaaaaaaaaaggtttaacatagatgaaagttcagggggtatgatttagtacatgttgaaatttgaggggcatgattttgtagatattaaagtttagagagcatgatttagtacataaacaatcactgaagtagtaaaattgaataaaattggacaaaagtccttaaattcaacaatctcaatagttcagggagaatttttaacgacgaaaaaagttcaggaatcatggtttggtacatgttaaagtttagaggataaaaatcctaattagcctaattataatgttggtgtgtgttttcaaatataatattgagattaggagattgtattaaaaacaaaaatgtgtcctataaccgtttttgtttttcaatttcaaaaataaaaaacaaaagtatgttctgtaaacttcatttttatttttatttgttaattttatttaagtcaattttgggtccaggttcgagggcgagtctgaggttgagatcgaggtcaggaccagtttgggttcgggttcggggttcgagtctggggtttgggtctaaggttgagcctggggccagatccggttctaggtgcgggtgcgggcctgtgactgaggcccaggtctgggtctggatttgggtcctaggtccgggttgggtcccgggtccgattttggggtccaatttcagttcagtgtttgggtctggagtcggggtctgggttcgggtttcaaggtctaggttgaggtcggtgtccaaaatatatattcaagaaaaaaaaaattgtttaaaaaacttttgaaagtgacttcttttttaaaattttaattaaaaaattaaaaagtaaaactaattatataaaacataattttaaaaaatatttatacttttttaattttaataacaaaaaaccaattataactatattaacaaattataatggtattaacaaacacaaggttataaatatccattactaatatcaagcaagtgaatggatgtggataataataaaagaatacactttaggtgatgtttggtttggtagaatgtaatgataatgataatggtaatacatataatagtattttttttttaaacggaatggtaatagtaatataatggaataagaatagtaatgagaattgattaagatgtttggtttattattagaatgaatattcgtatgataaattaataaaattatttggtattttaatttttatatt

SEQ ID NO: 392086 - DNA, 1184 bp, Cannabis indica
aagcaagagggtaaataggtaaaactaagctcaacataggggtatttatgtcaaatgaagtcctacttaatttgtgtacacggtgcgcagagttgcaggccccacttcttgtgccctagttaccgaactactacacactactacaacaactacaaaggttcccatcggctcggactcaataaaaaaaaaaaaaaacaaattggcttaaaatgcacacattgtaaagtttttatatatttatttatttttaaaataactttctccatctttggattaaaaaagaaatcacctcctatattatttttaatttattttttacttttaccatttagattattttgatagtttgtacgtgggttactgtatggatttaaattgagatttaaattactctattaattactatgtgagttactgtataaatttctgtaaaaataatgaaaaaaaaaaactaacttaatttaaaaaaaaaaaattttttattttctaaaaaaaaattggcttctaaatgtataagcaaatcaattttcctctgtcttagtgttcacattttttcagttttgacacaattttttttttagtattatcaaatatttaaaatatgaaccaattttttttgacagggtataagcctaggagtaagatcacgttatgacaagaaaaagtattagaatggatacaatatgacacgatgttacaaattgatattataaggtatagaaaatatgtatttaagcatgacagttataataaatctagagacacaatacataagcacaaataaattagcctcaataatctgataataataataatttatttatctattatacatcaattaaaataattgtaaatattcacaatttaataattataattattttttatatgattgtgtataattattgttaaagaattatataaaagtaattaaagtttttttttcaaaatacatatagttttatagttagctcacttatggcaataaaaatataaaaatgtagagtactaatttgaatccgtataagaaaatgaacatgtatgtttaagaaaaatgatttggtctgagtaaagtacgacatgaatataaaataatacgaaatattatgtttacaggtcgtgttgggtctactttataaaattattgatacagttgatactacgcattttttttatagtctaat

SEQ ID NO: 392087 - DNA, 1096 bp, Cannabis indica
aagacaataacagagtctttactaacaaaattaaatagaaattacagttttataaacattaggtatttatgccgctataaataaacactgagtttatgccgcttacaaacataaaactttaagtacttatacctgccgttatttacctattaatttttggaagttacttttttttttttttttaaattgttaaaattttgattcttaattttaaaatttaaaagtaaaatcaattttatagaatgtttctttttatccaaagcaaaaaaaaacagataaaaaaaaatatgaaacaaaatcttgacaagtccaaaatttgtatttaatgtctctcatttctttagatccagcattttcattgttctcattccttttgccatggctgttcacaattctcaccatcacgatttaggagcttttctttaactcttctcataaaacattcacaaaaccccacttgctcattttcaaaattttgaatttcttttcttacatgaatttgaatacttaataggcatcagcgactttgttttgagctaatggagttcacggagggttataagcagactgggccatgttgtttctctcccaatgcgcgctacattgcggttgctgccgattaccggctagtgattcgcgataccatttctttcaaggtgggtaagatgtttttctatgctctctaattcaattgttcgaattgtttataaagtttcaattttgctgttttttcgtgtttggttgctcagaaaaaaaaaatgctagaagagaaaacatgtccttaatcatttacttgattttgcattcctctccttgaaaccatatgtttgaagattgaactggtatttggaatttgttacttcgctttaaacagttcatagccactggttataggtttcgtgcaacgtgaacttaatttggtaccaagaatgtgtagctttagcatgaaggtgcgttagtttgtgcttggtggttgcaaaaataggaaatacttaactatacatcttcattttcgtcttaaattagttgaatgcaatgcatctatttggtttagtggatttttaatgtgaagtaatttgaacgttcttagagctac

SEQ ID NO: 392088 - DNA, 1653 bp, Cannabis indica
ttttttttcttctaaatatcgaaatatattgagggtctattagaacattcttttaagaaggtgttactacaaaatttttcttttatttatattttagtaattttttaataatgtaattatttttatattagtaattttataatgtaacgagaattataatacatgatgtaatgagcattaattatttataaagctttaaaagttaatggaaagagtgggagcatctgatttcatctaatcttttttatacattgaactaattcaattagtaattggatttaaaaaattattatcgaatccaatcactcaaccagttaaggaataacatttaacaatattggattttatgctggatttaaatttgaaaaataacctttaattaatattaattttagtttacatatatgtttaattacattaaattaaacatatataatataatttgagtttcagtttgtggaatttttatattgttatagaatatttaaggaaaattttcacaaatgcacaaaagtaagaaaaatttaacaaaaatacgtgcacatggaaaaagaacataaatacgctaactatatattaatttacataaaatacggtgtcacattcttcgacaccttcaacactctcatcttaggaaaaaaaaatcagagcagccattgtttcttgacgaagctttctgaaacaaaaattcaacaacaattcaataaaaaatccacaaaaaactcacctattcaaatattgattaggttgacaaaataaaaaacaaacatcaacagaggtcaatccattaataacaaattctcatagaacaaatctgtttacaaataggtatcaaacattcgaaacacaaatctcagaagaaattgagtaagatctacactccttatttagaattttcatttgaatgttgcagatcatacaataaatagttgagagattgttgatcggagctccctactaaatctaaattcaaattgaaaacaggtattaaacatcagagccacaaaaatcaaaatgaatagataaatatctacagtacaaaacatataattgttgtttaattgtcgcagttcatactacaatgagttgaaaaattgttgatcgcagctccctactaaatccaaaattattttaaaaacatgtatgaaaaaacagagtcaagaaacacaaaatgaaaaaaaaaagatctatactacaaatcatataattgttttttaattgttgcagatcatacaagaatgagtcgaaaaattgttgaccggagctcccaatcaaatccaaaaaaaattaacaatcaaatccaaaaaaaattaataaggtattggattccttatgatgattgcatgttaatgattaaaacatttgattcaatttttttttttaaaaaaatatgtaatagtgaataattattgctgtttaattgtttaatttgtgtaaatcatttgaatgatcaatttgttcaaatataaaataaaaaaaaaaaaaattgagttacatatacattgaaaataaaaaataaaaagggatttttttcataaatgtacaacaaaaacaacataattacaaaaaatgtgcaaaaaaaaaatattttaaaaacttatacattttgaaaacttattacatgaacccatatattttaatcattaaataata

SEQ ID NO: 392089 - DNA, 568 bp, Cannabis indica
gaatattgagtctcgtataacttaaaaaaataacttttaaggaatatcgcttaccaatcgtaagacacgcatataaaaaatgctagacatcaataatgctctataaatagagaattattggagatgatctattaaaataaagagaaatactaaaagacgctacttatagaaagtattagatactattagtgcttaatatcaatgctctaatgctccgaaataaaagaaggttagtactgctgctcaaataaggatattaactctaagtcagatctgtatcgttgtttaaattcaatttttagcttagtatcttgttaataacgattgtgacaatggcttgtttaacatgatttattagtctactggttttgtttgttgtcatttgtttgctctttttataaagaatatttttttttttttatttcagcttatatatatgaatgattgtttttgtaatgaacattatctgtagtctatttgtgataaaatattcttgtagtttcatttaagttgttacttgttagaattggaaaattgacgttttttagaaaatagaaataaaaattgt

SEQ ID NO: 392090 - DNA, 1635 bp, Cannabis indica
gggttgcatgtcattgttaagaaaaggtctggttttccatatcattgtactaaagcaattgcctccatgtatctttttctcatgtctcttggtcctccaatgaaagaagaagggaatatgatccgtctaccaacattggaagcgttcgtttccccagcataactatgtcaactttaccttgatacaactctgatcgaatatgtgcttgttcgagtcgataataatttaatcttgtggactccattttcacatacatgtctactgcatgttgttgcagtagtcgactggaaagtaataaaattgatcttgattcttctcttatttataacttgaagcaataatattctcgcaaaaaactaccgggtcctctatttcttcatttgatgttggattattgaaatgtgaatggagtgttattcaactgatagtgtataatgatagaatgtttttaagatcatgattattacagtctaaccttattcttctgttctacagtaaatgattgttgaggatttataagttggtattgattgacatatcttgttgtgtttcctgtaatccttttaatcttcttatgccaacctgtgtctccgagtgaaaataatatcggatattacagtaaatcataacaaccataataatattgaactttatattgtctaccaaagtgattatacacaaaaatgtcacgtcctccttggtgatgttcgtcatcattttctacccatattgctccaacttatgatgatgttggggctttgtatacacgctaatttgacacaaattatttgtgtttccaaaacttgcaaatcaccaagcgaacgaaagaaaatagagtaaggattactccgtagaatattgataagttgagttgcaatggatgcatccattttgtattttgaatcagatagtcaattttctaattcattttcagtgtcatagaaatataactgtagattagaaggatggccatcaaaagggatcaaatcgattatgttgtgatatatttgtgcttgagctctgaaagtgtatatctcattgaccctctaatagagagttttatcatatttaactcccaaaaaagtaaaagaaaaataattatcataaattcaaatgagtgtttgaaaatgtgcaaattaggggtgtcagaagttaacaatgcataaagttcatctggaacttcattggtggtcaaatgaacttgtccattagcgcaacaaaagccttttgattcatgtttgaatcgcttcgcttcacaatgcatgtatttcgacaccagtagaagagaaaatgcttcagatggcacctctttcagaatttatcgatatcaagtgtaccgttgaatcaattgtcctatttaattgaccacataaagaacgtgaaagatcaaaattattttgattttggtatgaaatatgaatttcaataagagcatataatttaaaatcagttccttacccctacgaggtcttgatatggttgcttggcagattggctcctcaatagttacagtcgggttctatttgtggggaaaaaatttaaaatgtcaatgaagaaaaataaagggtggttgagttagatgagaatattgttttgcatataaacaagttgcttattgttatcatttgtggaaga

SEQ ID NO: 392091 - DNA, 981 bp, Cannabis indica
atatctagaaaaaaaaaaaaatgaagcgaccttaagaataaagaaaaaagaaaatactattcaactccaataatgtctcatgcaataataaacaataaaaaaaaatactgtagaacagagctcgataaaagcagaaaagtaatagttttaaattcatagcatgaataaaagaataaagacaaatgatcaatcaatcattgtcatacaacaccaactcataagactacacacacaaacatatatatatatttatatataaaatcttgaacatactaccatgtaaaaccatgtttggttggcgagaaaaaacaaacgcatgcctaagaaacgatcaaaatttcacgcaagaaaaaccaaatacaatacaatgaaaacaagaaagaaaataacctagaaacatcgctgagaaccgaatgaaattattaatcgtcgcgattaaatttgtttggttgcaaagaaaatgtgggaaaatcctattttccctgcattgcattttcccaccaaaaaggggaaaaaaacgtaatgaggtttaaggaaagagaacgtacactttaccagaatgacgtttgagcgatgaaggagaaggaatatgaggaggtgattttccgtattggccgttgcagagagagtgtactctccgtctcacccagatattttcaattggtacctctgttttccaatttcataatttattttcttttttctttaattgtttttaagggatgtttttacaatattctcattattcggcttatttgtaccgcatatccttaaactatataggttttggtaagttgatccttaaattttattttttaacaaattaatccccaaaatatataatttttggtaaatttattctcaaactttatttttagtaaattagttcttaaattagcaatattaaatcatactcttagatattgatatttttattattttttttttattttacttactttaatttattttttgttaaat

SEQ ID NO: 392092 - DNA, 2237 bp, Cannabis indica
caacaattatagtagttcactcctcttgactcgtaggtaatggagctacgtctactaaaaatttttattatctcaaaaaactaatttctttataagagaactcggaaaaaaatgaatacgtctagcttcacttcacaattttcaggaaaaaaaaaagtgtgaagagagagaagctctaaccttctagagtggatgaggaatgtgtaaagtgtgaataatgagttaagggagcaatccttttataggaaggatgtccaattaaattacaataaaataatagaaaattcgcttagaaattttacactagctcgtgagtcaatttttagacttcaaacgtcagaattacggtaggagtgtgagacgcacttagatccgtcttgaaaagagctttcattggccacttgaatcacgtcatttggataaaaaattgagaggtatggtcatttgctgaaaagtgactgcaaggtcaggttgacctttgggcgcctaggttgacataaacgtcaacctgggcacccaaaacttggtttcttaggctttagacatatttttagatacttggttgatgtgatatctattcttagattactttttgaccttggggaagttctcttggcaattttacttgatatgcatgggtgatgcctggtgaatcgctagtgatgactaggtgacatccgggtgatcactagtgcatatgggtgtcggtggacttgcgcatgacacatgtacatgagatattgactttcaaaaaccttcaaatcatattttttttggaaaaaataagaccgatgcccagagtaatactgatgtttgaaggacaaaacattgagccctaggccaatgtcaacctgggcgcccagtgtgcttgcatgctgacgcccggagatacctaagggctaaatcactacttggacactattttcttttgattccaagtctcatatcttgtcttgggagctaaacaagaataattcctaagatagaattgtaatcggattggcagaaccacccgaagtgtggttatgtcaacctgggcagctagtgactggggagttgtcaccctgggcgcccaacttttcatctcggttcaaatcaactatatgtataatttaggcgcccaatagggcttcatggtgcccgggtgttgtttcttgtagacttatctcctaagtctgaaacttgattggggcatgtctctcatgtatcttaggacaatggctaagcattttcccataagtagttgatatgaattaaaattgatgcgagaaggtgcacatgatgtcaacctgggcacccaacattgatgttggacccaagttgagtccctgggatgtccacgtgacatcctcgacttcatagttcaatgtcatgttaggccaaccatctctatatgatttgaaaatcagttacctcaatttacaacatgtgcatgaagtttccaactaggaatggagtagggcatctgaaagacaatcaaaaatatgcacatgaatgatataatctcactttgataaaggccaaaaaagaagaaacaatcagccaaagctcaaggaaaggcaaataaattgccatatagggatctgcccaaggggggatgaagacatggatccccgctttagggaaccaagtccaaacattgggtttgtagaagaattagaaaaagttaaaattgatcctactatgccgaccaggaagctcaaaattgggaaaggtttgtttctcgaaataaaatctactttgataaaatttgtcagagcaaaccttgacattttttccttaccgcacgaagacatggtcgggatcgatccaaccgtaatttctcatgtcctcaacattgatcccaattttgttcccgtatagcagaaaagaaaactactagacaaagagtgcacacatgcattaaaagaagtagaaaagctccaagaaaatatattcggttactgatatttatgagagaatctctcaactacttgagaaaatatctcaacaattttgaaatatctataaccactttttaaatttaaatatttatccaattaaattaattaaataattaatcaacccaaaaagataaagtatagggcctactggatggtgtcttttgtcctatcaacttttatctaaacaaatattgtcttgataaattttgttttaaaactttttatcttttccctatttaattgattttttttaaaaaaaaattatttattccaaaaataaattactattttgcc

SEQ ID NO: 392093 - DNA, 1207 bp, Cannabis indica
accaaaataaagtaataataatagagaaaaacatggaagaattctttattacttgtatctttagcaacgaaaaaaaatgtattcgtgttattattttattggcaacgaaaatactattttttttttttgaacatatatgatacaacataaataattttttttaatggaattccttcatagtcttgctgaatagcgtgagaggattaactttaatccacgtaacgctagctttgtatatcaaagcttgacttgattggttaacccaccggcgaccctattggccttaaagggataccaaaaattctatcaaataacaatgagcccctaaattgatatagcaaaccaatgatctccatccatcctcttgttgggataattagccagctttcgatagcaaaatttaaaatttgcacttgtacaaattaaatgttgattgaaatgtaaaataaatatttaatttaattacattgttgacgttgaaaatggccaataccagctcgatagattaacgagataaataatgagcttaatgagcttaagtaaataatttagagagacacaaaataaatagtagtttattctccaagtcacgatggtaatagagctaaatttacttcgagtttatttctcacgagaattacaagaaattagctaattgtggggttcgaatttttagagagagaaagtagatagagatgctttgattttatgaagactttgaagaatgtgaaaaaagaattagatgaaccctccttttatagaggagcccctattaaaataataattaaaaactaccacaaaatatgaaaaaaaaaaatattttgggatgatcttggccattgatgatgattcaatggtgaaaattgactcttggtgaaaatcttcaatttttgggctttgaatctcgttcgactgattgtttttgggttatctattagaaaaatcacaactttgttgatgatgaattatggatccaaaatcttcaaaattgcgatgcgggtgtgagacatgattgatagatctttaaaatagattcgaaacgcaagttgaatcgcgtcaatcaacaccctacgaccaagttaacaacccaacgcccaggttaacatttagcatctaaaacgtcaaccaagatgccaagtgagtgccgaaacgtcccaaaattgtatttttttttatgcctaagtgatgtgttggcaccacttagtca

SEQ ID NO: 392094 - DNA, 1229 bp, Cannabis indica
ataaaccatccttttaaaataaataaataaacaaacttaataaattttaagcaagatttttcattttgtcttggaagaaccttaaccaagattagattttgtcttggaaagacattttggggcactatttttatttttggtatttaaataattataaatttatttatataattgaatatactccaatagaatgtaaaaaaatgtccagtaagtaaccatgatgtacttaacagaaaaaaaaaaaaaaaaaaaaccaaaaccatgatgttattattgcaatttttataaagatttaaaattagtaaaatctatatgatgattttccaatgtatctttttgaaaggagtgcatgcatccttacttattttagtattgagaacaaaaattagtttaacttttttttttcatattcgtttgcaatataattatttaagatattttataaaatttaaaaaattcagaataatttataacaatataaaagtaagtgtttaaagaatctatttcacacgcgtatataatataatagtcacgcatgcaatatactttttgaatcctatttttcggtgtgttaaatttttccaaattttttaaaattttacaaaatatcttaaataactataacttatatgacaataaaaaaaaattaactaaaaaattattttaaatgctaaaattaataaaaaatacatcaatacattaatttaaagggtgcatcaacacttttttttttaaggtacgaacaataaatatatacacaatcaggtcaacaacaactgttcttttttttattattatttacaccttcaagtcaatatgctagattgtaaaaataaaaattcctaagaaagaagatgagatttatgttaaaactgaataaatgatgaattccaattctcattaataaatttggagccatatatatgtatatataattgtataaattaatccaattaatttttagaaaccctacttcccaaacagcttattataaaaatatacctaaattaaaatttaataattggtaaatatcattttgaattatgtgttttgtaaaatttattaattggatcttttattttgttaaatgacacaactgaccttatattttctaaaatagtaaaaataggatcatgagctcaactttcaataattttattttttaatataaccaatttttaaataatttccaacacgaacagatacagaaaacataaccaattttgtca

SEQ ID NO: 392095 - DNA, 572 bp, Cannabis indica
ggaccgcacgggtgttccgctgcctgaaaaggtgagcccgtgacactgagctaggaggaagaggagtctcctcgcccgttaagattttaatctccatccccacctattccccatcagagatagagtggagaattccctaataaaaaaattataatttataaaaatatacacactaattattattcaataaactaattattattcaaaacaaaacttataattcatcgtcccatttaatatttgagaactacaaaaaatattgtttccatctccgccctattaagcgggtccctacgtacaggcccatccctataaaaaaaaatgcatccctacgttcaaggatagtaggcactactcatgctctttcaaaaatatatacatatacaatttaagcgtttcatagttattatttatttgaaaattatgttaaatgtgtatagtattagtatctttatatattaaaagtgcctatctaacggcatttcttggtttaacattcttagtttaacagaatatacttaaaaataaaagaatattctgttaaatttaacgattaggtttgatctcccgtt

SEQ ID NO: 392096 - DNA, 537 bp, Cannabis indica
ccacaccatatttacactaaaactctctttcaatctctctatatatctatcttctttggtagacgactactgcaaagtcgtttatctttctttctttcttaagaaattttctgcgaaaatcaaggtgaatatttgtaagttgggaggggagctacaaatatagtagtgttgcgtgtgcgtatagtttagatatatataaaatatattcatatatatatatatacacacacatatacatcatggggcgaggacgagtggagatgaagaggatcgagaacaagatcaacagacaggtgacattctcgaagcgtcgttctgggttgttgaagaaggcacatgagatctctgtgctttgcgatgctgaagtcgccttgctcgtcttctccactaaaggcaaactctcggagtactccaccaattccaggtgagtaacatctatcattatattctctttcttctcttttgtttcattttctctctcaaaactccatcttcttactttgcttcgtgttcatgtgctcctctaattggtatttc

SEQ ID NO: 392097 - DNA, 680 bp, Cannabis indica
tacaactaattttaaataaatatagctataaaaaattactatatatttatattaggaaaagagtaaactccttaattaaatggattttatggtagaaaccctaataacctgttttgatagataagaatttaggaatggaaatcatggtaaagtgtgctctcacataatcaatttcacaaattattacatttttttatttttatcaatcaaatcagattttattcacctaatattttagagcatttttttaccaatattttagtttttattccttgatatacattatagatataatatattaaattattgataaatttttaaaatttttaagtagtttacaatactaaaaatataatttaaatattttattgcatacataattattattttatacgcataataaataatttttaaataccttaatattttaatagtaaattattcagaatgttctaaaaatttaaaaataatcttatataaatacaacgtatacgatcataaaaaattaaataagttataaacttttttaaataccgaataaattaatatagtagatctactaaaatactcatttaaatctactatattcaaaatttcttcattgtaatttttttaagattttgtaaagatttacagataatcttatatgagtataatatatgtgattatgaaaaaaaaaa

SEQ ID NO: 392098 - DNA, 825 bp, Cannabis indica
tgctctcatttagtggaacttggagatacttggccttacacctcttcatcataccattgatgaatgaagcagactaagattgcatttgcatattatcaaaccataaattagcacaagtaaaaataaccaccaaatgagggaacagctgatgggtgactcaccatcatacctgactatggtgtatctctaacacttcattgtgagtatctttgagtgatgatttaagcttttccactttcaatgaaaacgaagctaattttcctgactcggagaaagaaaaaaataatcagtacatagatgaacaaaaccgtcgacctaagcacacagaccaaaattaaaaattaaaaaaaaaaggattttctatcacttccacttgctcaaaagatacagatttcttcccttattattatttcaattgtttaccacttcaaattccattacgaaaggattttctttaaggattattttcattacatacaatttttctaaacaatggtagcaacctcaggttaaatgaaatgcattttaagtttcattaataactttccttcaagaaaaaaaccgaatttgaattgatctcataattctacggtacctcaacaaccccaaaaaagacaaaaaaaaagtgcagaaatttggaggttaatgtatcctataagaacaaaaatacagaaatcagtggtagagaagcgaagagaagaactgaccgggaagatgggacttgggagagaattgatcggccgggaagggtttggaggaggaggagttgttggggcgagtgaggaaacaagagctgcggaccatcaccgccatcgtttcggataa

SEQ ID NO: 392099 - DNA, 1452 bp, Cannabis indica
aaaaaaaactaaattaaaataaaactcaactatcttgatattaattgaagcagttctcggtaatagtgtcaaaaacttgcccacctaaatcactagtgcactttactttctttctcgcaaatgagctttctctcactatttgtaattttgtaaatataaaattgtattttggaaaataaaaattaaggaaagtaaaaatgtaaaataaatcaaaagacttacgtatttaagaaacatatccttattaaatttgtacacttcacgtccagctaggaaaaaataatattaaattttattatctaaaataaaaaaataatgcaattgtgcacactagagctcaaaattagctgtgattgaatttattttttttcttggtaaggctgtgattgaattttgattgtgagttaaagaataataattattattattgattacaaaagatgttgagaataattggccaaacatataaaatcgaaattgttttatttaacatattataatatacatattaataaattgaaaataaaataatagcgtgtgaacccattttttctcttttaaatttgacaatttttttcttgtttcctaaaccaaataaaaaggagggaacgggaatgtaattatgtttttgaataattagtaattttttattatgaactttcaatattatttgattgtagcccttaaaaaaaaacaaagacctttttttttatttaagcgtttatatattacaacatgttttacctgggactcgaacccaggacctccaacactcacacacccacttatggccacttgagctagcccttaaaaaaaaagacttgttaacaatttgcttgaacttttacatttacaaaagtttagtccttatatttggttccgtctcattattcttttaattactaacgtgtctttgtaaattggtaattttgtctcataaattttgacaactatcaaatcgtatccctcaaaataaaaatgagaaatataactttttttttagtaaatcttaaaaaattaacttaggtctttaaaaaaattattttaaataattaagaaaattaaaaaaaaataaaaaataaaaaatttcaaaactaattaagcgatttaaaaaaggagaattaccccatatattttttttaacttttttttcaaatttacgatttgaatttttaaagtggttgcagcgctagttgcaataggggtttctatacgattttttgttgcaatttaggttacaacgctagttgcaataggaattttatgtagaattccgtaaaaaaaagaaaaaaaaaactattttgaagtgtaaaaataaaaaagctcctttaaaaaattaattatttttttattaaaaaatcaatttagatttaaaaagtatattaaaaattcacttttgtaaaaactaaatttcacgggttcaagttcaagtctattttttttctaaaaaat

SEQ ID NO: 392100 - DNA, 881 bp, Cannabis indica
aaaattatatcaaatttggcacagaagatagcgtgtgccaaattttagcccataataaataccacattttttttatttacctattttccactcattaatactattcatcaataaaaaaaggtttttttatattaatttatatgttattaaaataatataaataaagttagttgttttgtatatttttaatgagtattaatggtaatattgacttttatagctaatttacactttgtgcattggagcacaaatacaaaattaggccaaatatagcttatcatatatgttgggccagatttaacccaaaatatatacaatccattggaaatgatcttacaagatggttgcaacacgctcctcacgtgttgaaagaggatcccaaaatggctagcatattaagggcatgccacagtcactcaagctgggagtgggacaacacttgcatctcaagtgctaggtggaggcctcgacaccagctccacagcttgtcccccaagaccacccactactgctgatgctgaaaccaccaaataggttccacctagagaaccacatgtggaactagaagaccatgaggaggtcaatactcgggttgaacaaacttagccaaattatggctaacctacaacatcaaaggtgagactctctcgacaagcaacataaatagttcaaaaaccggtttgtagagagctgacaaaacatcaagatccaatgagttgagcaggactgtagagagctaacttatcttaatggattagagaatcttatcactttggtcgcgtgactatgccccgcaggggtatttccatgttgataagagagattcccgtcgactaatgttaggctatttttagcctatgttatggatccgatttatgtgc

SEQ ID NO: 392101 - DNA, 818 bp, Cannabis indica
tcaaatctcttagaaataatcgcagatgaaggagagatcgttgataagagtgattcgcaggagaagatcgtcactttgaggagtgatttgtggagagagattagactctgttatgtttgaaaaattatgattttttttaaggtaaatttattggaataagttgaaaaatatctctttttttatccattaataaaaaataccctcatattatattttattaaaatatacccacttttttgagtgagtgacccaatatataccctcactctctacttaagtctagcatataatttacattaacttaaggggtctaatggggttatcatctataaaagtgggtatatcttaaagaatatgaaaataaaggtaaaaattaaaacaagtaaagtaaagtgggtataaaatataatttcctcaaatttatttatataagatttgattttccacattttgatcattaaatattttctattcccatatttattccaattactttttcttttgccataaaaaagtaaactacaacttaaattctcatatttagaaaatttccccttaagcatatgtgtacaaaaaaatgatttgaatgtgacggtaatctgatggaactgcacatttgactcgaaaatgggccaatcagactgccaacctgacccaaaaataggtctttaatcaggctaaatattaagggggtttttacaaaaaaaaaaaaattactgaaatttaggtaaaattttacaattttattgccacacggaaatttttacaaaaatattatctttttataaaataaccaaaataacaaaacagaataatta

SEQ ID NO: 392102 - DNA, 2894 bp, Cannabis indica
ttcttcctaaacaaaaaaaaaaaacaatatgatatatactatatagttgttaaaaattgaagtttacaatttttttgtgctatatacctttgtaaaaagaattataagagctttaagtcttattactacactggtgctcaatcaaatcttgttgcagactacatcacaactaataggaactaatagggaatggaatttggagcttttgaaatctgatttttcaccatctgatgtggaacatattctctcaattccattgtctttctttccaactaatgatagatggatctggcactatgaagcttcaggggattatttgtacacaggagacatggtgaaagtctttttggggattaaatctgccttctaaggttaagatttttggttggaaagtcatccaatcttccatcccaatagccaaatctttgtgtcataaaaaaatcatcacatccgcaacttgctcactgtgtacaatggcatgggaatccatagggcatgttctattttcttcctgtcatgctaaggaggttttgaaaatttttagttttaccatagattttacaagtgcacttcgaatgagagatggagattatctaatgcatttatccacaatttacaacaaaccagaccttgagagtattctttgcctcatgtggttcatatggtctgatcgaaatagctatatacatggaaaaaaggtaaagacacctatccaaatgttgacacaatctgctgcctatttacaataatttcagagtgtcaactctgctgcaaaaccagcagctggttcacgtaccagtccaacacctgttataaagtggcagcctcctccagagaataaattcaaattaaatgtagatgcgactttggattcttcgaggagcaaaattggtattggtgttataattcggaattcgactggccaagtcgtgggagcaatgtctaaaccagcagtaggcaattttaagtcgcaggaaatggaggctaaagcgattcgttggtctctcgtgggcaaagcaatatcagattcctattgactatgtggaaactgattgcctaatgcttgttaatgctttgaatgggtgcatttcacaaaattcgggtttctttgatttggtttctgatgtaacttttcatttatcctctttctctaatgtttgtattagaattgttaggcccaattacttaagcccatatacttattgggctgacccacatattgtacatatatatatatctcttttctctgtacaaacataacctaatcaatacaaaagtcatttcagactttctttttcattttcgaacagagaggttttccctctcaaacaataatatggtatcagtgtaataactcagttcatcccacaaaccccagccgttctccttcttcttcttctttcttccatggcgccaagaaccagaaactctaccgtcgccgccgcctccgtcaacgagtcacctccacttccgctgccatctccgaccgtcgtcaatggtgaagctccgacctccactgctgttcataacgatgctccttccaccaccaccatcctcggctccgagaacaccactgcagaaccctccatgttcgctccttccaccaccatcctcggctccatttcagacgatgttctccccacttctggaccgaatgaaccagcaccggtcatctccagctccactccggcgtcgatctcaacatcaacaatgcttccgcctttctcaacttcaactccgatcttgactccgacggctccaacctttaatctccatggcaccacgacggatccatcaataccgttctcttttccacatgtccaacactcctctccgtttaataccggtaataatccctttcttggacatcaaagccatatggcttttgctgataattctggtttcattgctaatcaaggcctatctcgcgccttttacgatcgaccttctcaagatgatcgttatcacttgggaactggagatcaaccaaatatcatttcctcgtttctattgactggtcaagataattttcagtcttggaaacgagcggcttcgattaatatcgctgccaaaaataaaaccccattcatcgacggctcattaccccgtccaccattaaatgatccttctctatccgcttgggatcgatgcaacaacaccgtgatgtcatggatccttcaatccgtgtctcgggaaatcggtgcaagcattatgttcaaaactactgctcgcgagatgtggaccaatctccatgatcggtttaatcaaagtaatggcccacgcattctccaacttaagacctctattaacaatgttaaacaaggcgataactcggtcaccacatacttcactcagttacaagccctatgggatgaactcaacgagtatcaaccgaatactccttgcacttgtggctgcacttgtggtgccatgcaaaaagttcaagactactacgctagagaacagatccttcagttcttgatcggcctcaatgaatcttattggggaatacgggctcagatcatcctcttctcatattaggagagatgctaaccaagccgctcatagtttggctaaacaagcattacagctggataataattgtatatggttagaagagattctttctaccattttctctattgttgtaaacgactctatgtgaattataataacagaccttttctcaacaaaaaaaaaaaaagaattatatataattatttttaataaaaatatgtataaatattaatataaagaaaaaatatctactctatataataattgagtttgacactacacattttccctcagttttgttgactgtggcgcccatatctgaaagaacgagagagagtctaaaattacaagataattttacttttttattttgttaa

SEQ ID NO: 392103 - DNA, 1353 bp, Cannabis indica
ttttttaaagaggattaaagaaataaaaccttaaacttttgccaatggagaagaagggagagaaaaaaaagattggttttgatttttttgatttatatatatatgtataatttaaagaattgttaaaaaatattattagtgtctagtactattttcggtgtcatactgttactgatgtaattaaatatgagctattatataattttaaaaaataattttgaaaaaatatcgttaactaattatagaatgctacttataaaaaatattgagtaccactagtaattaataacaatgctctataatttattgttataatgatatctgaaaagagggtgagagagatacttaatgattgtttttagattggggtaaagagcatataatattatgtaagtgattataatgtaaattaattttgtgcttattataataagctttgaaaagatctaattagataatggtatatattctctctcttttttttttttttccaatgatgggacaagcccatttctctccactaaaatatgggcccctcataagcactgagcccatatactaatgggcccaaacatcattgccttttttgcctcaaactcaagaagtaataataggtgtgaaagtgaaaggtttaaatttttttggtggaaaattccaaacttaaattacttcatgttttgccttttccccttaattaactttctaaggttaggttaggtaaggtaactacctcttgaaggccaatatcaaatttggtctctttatttattttcataattaattattattagatgttagatctaatctatatttagttggctagtcaataacctaacaaacaacttttaaacagatatttgtgaaagttttaacaaatgggcatttctcaaaaactttaaaattgacatatcactaacttgtatgtatataaatatatatctaccaaatgaacatgggagacccatcttcataattgggtaacatgcatgctaattttttttttagtaaaatattttataaaagttattagttagatattttttttattaaaaaataaattagactatatatatttttttaaaaaaatactaaatagtatcttgaattctatttttgttaaagtaaaacttaataaggtgttataacatgattaagttttatgcatatgaatatgtccaattatttttaagttactttttgaaaaaaattatggaaaattgagttcaagattcaatttatactatattggaaaatacaatgtgtaattgtctattttgtcatctaacaaaataaaaagtctaattaatcatttttcaaaacacataatctaaaataatattagggaaatttaca

SEQ ID NO: 392104 - DNA, 1041 bp, Cannabis indica
aaaacaaaatagtcaacacaggttttcgaagttcctataaatcacatgaagacatgactagtacacaaaactaacactgttctactacattatttagagacgaaaaacaacaaaaatgggtttcaagaagcagatagatctaagaaaaaaccatggtggagcatttttgcaataatttcttaacaaagaaactcaccaattgacatccatgaaggcggtcgaattgcacatttccctctcttcttcaaggcaattgcaagccaaagaggtacctgggtaaccatctgtggaaagaatggaccgtaatccccctgcaaaaatgcaaattagcaaagcactcataatctaacaagttaaatgataaaattacccataatgaaaatggcaatgatggagagacatacagaaattaaattaagaggttccattctcatattcggtacaatgtcgatcgtttcatcctcccccatgaactcaatcttaggattcaaccaacaaaaaatcaaaatcaaaatcaaaatcaaaaaatacaaacactatttatttatatgaaaaactccaatcaaactgaacagagagagaaagaaggacacctcctctgcagaaaagagagaagggtgaggatccgattgaccagccatctttatcaagtgtttatgatttttaataaacctaataacaggtaaaaattaagtataaatattagtagaacaagacaaaaacagataaaaaattctcaagtatgcatcgcgaatttaagcccaaacaaaaaacaagttccaaattaaagaactaatccacaaatatgcaacatgagtctatactgtgtaaaaattagaataattattcccctcagatttaattaagaaatacaccctagattaaggtcagaatcaagaagaaactgcaaaaagagccgaatcttcttacccacattagcaaatgattttcacatctacgttacaaaagccctaggcaaaccaacaatttgtttttttttttttgcttaactcaaaccaacaatttcaaaatctagattca

SEQ ID NO: 392105 - DNA, 921 bp, Cannabis indica
tctctctctctctctatttatttatcattatcctgcataaaaagaccttcaaagaaaagagcatgcgtcaccaaaaagagattaattgtaatggaagacaaataatttttatcacattgctttgcctcacactttaatgagactatatatattacatagccattaatattaactaagcccctctcatttcatttctcatttaagtaacaagttaaaatttagattattggagttgaagatcctaatcccatttggaattgatttggaccctttttggctcttgacctgtttgggaaaacttatatctcactcccatgtgctgatagcaccaactcgtccgaaggagggttcgacagatcacacttgagttagtcccacacaaataaacatatatataatagagcttcaactatacggcaaccaatattttattggtgtaattattaatttatttttcctcattaatgtgtttttgcagaagtaacattattacaaagaaatcatcaaaaaaaaaaaacatggttcatggaagacctttttctgtatttgcattatttgtaagctgagtcctttgaggctcattcccaatgagtggtttcttcttgttacgttagaacactttgctgattattctttatgttcatagaattcttttggattatggagatttgttttcagagttttaattattgaaactttttgatgaaaacattaaactattaactcataatataatctcgttaatacaaatgagatttgataattaatgctcaaaattaaacaagaattaaataattaataaataatatatattttggtataaattataataggaaagatatgaatttttatctagttttataattaaaatctacgtacttcattagtctatattattattttttttttgataaagtgatt

SEQ ID NO: 392106 - DNA, 3828 bp, Cannabis indica
tggtaaaataattccaacaatcgcaccatctaacaagggtagtagctggagtttgtttcaattcagatagaaaggattgacgccaattaacttcagtaaccacagttgcaaggccacgatactcagcctcagtcgaagacctggagatagtttgttgctttttagattgccatccaattagatttccacctaagaaaatgcaataacctattgttgatcgcctatcatcaggattagctgcccaaacggcatcataaaattcttcaatatccatagatgttgggcgtttcagatgtaagccattgtcaagtgtgccagccaagtatcttaagatgcgtttgacagccacaggatgatattgcaatggagattgcataaattggcacactttgttgacactaaatgctatatttggcctagttatggtagcatattgtaatgcaccaaccaaggattgataggcagtggcatcagctacaggttcacttccaaaactagataatcgaagcccagtgttcataggagaactttgtgtcttgaccccttgcatttcagctttgcagatgatatcttggatatactttttcttagaaagatatacgccattttatgtagaaacaacctgaataccaagaaagaaatccatgactccaagatcccttaaggaaaatttggaactaagatcagagattagattggaaatgaggttgtggttgttgccagtgatcaaaatatcatctacatagatgagaatataaatgatgctggtagtggtgagtagagtaaacaaggagtgatctgttttggcaggggtaaaaccaagttgaactaaaacattagacaatttctcaaactaagctgggggagcttgtttgagtccataaattactttgtgtaacttgcacactttggttgggtgatctggatcaatgaaactaggtggctgcaccatgtaaatgtcttcatgtagatctccactgagaaatgcattgttgacatccagttgtctaacatgtccaaccttttaataaggtaatagtgagcatgacacgaatagtcactggcttgactacagggctgaaggtttcatgaaagtcaaatctagcttgttggtgataccccttgacaactaatctggcttttagtctactaactgatccatttgagttttctttgatcctaaagacccatttgcagcctattggctctctgttaagaggaagaggcaccagtgtgtaagtcttgttctttttgagagaaatattttcttcaaacatagtagccagacatttgggatcattgagggctttcttgactgatgtgggaataagagaagccattagcactttaggtttcttaattctagatttggctctttttgtcataggatgcttgttgactactggtgtagattgatcaggtgaggctgaagtagtattttgcataattagtggagtaaaaaagttggtagaactagtagcatctatagtgataatctgatctgaagcaggcataggggtaggcatggctactggtacagtactagcaacaacaacaggtgtgacagtgttttgtggctcagtttggtgttgtctaattgaattactagatatggcatttgttgaagatgaaacttcatgatctgcaacatgtggtgagttatctacaaaaaccatattaataggagcagaagtagtaggtgaagcaacattcgaaacattagtaggacttgggctaggtgaagcaggaggaggatgattagactctgggggagggaaaagttggctgagtctccgacgaagactaagagcagggccatgctgcagagtgagagtggttgaggggctttgggatgagttgttatttgcttcaagagcaaatggaaagattaattcatcaaatagaacatccctagataaatagacttttccatcctttgagagacacttataccctttatgagccaaactccagcctaggcaagtgcatggtgtgatgtaaattggagtttaaccttgttgtagggccttacgttggggtagcacaggcagccaaacacctttaaagaagtgtaggcaggtttgatatggaagagtatctcaatgggtgacatattgtttagctgaggtaagggcattctattaattaggaaaactgcagcacgataagcttcattccaagactttaatggcatgctagcttgagctaacagagttaggccactctgaactatgtgcctatgttttctctccacaacaccattttgttcacgtgtgtggggacatgagactttatggacaattccagattgttggaggaagtgagtgaatgcttgatactcacctccccaatctgattgaatttgcttgattggtagaccaagttgaagttcaacttgggtttttgaaggtgataaaggtggaaagagcctcattcttagttcttaacatgtaaatccatgtatgtcttgagaaggcatcaacaaagctaatatagtatcgatatccacacgaggaattgatgggggcaggaccccacaaatatgaatgtaaaagttgtaaaggggcagtataaacagcagtggatttaggaaagggaagtttgtgatgcttcccaagacaacaagcagagcaaagttgatgagaaatttaatgtttttattgcttgtttggatattacatgagtttagcacttgctgaactattttatgatgtgggtgacctaatcttttgtgccacaaagcaaaggagttacaagtagatgacagagtactcgaattacattgtgttgacagaggactcaaattacattatttgacagcagtattagactcgaaagtagtgtgtaaacataatgatggctgcttgcttatggagagaaggttgagttggtttgaatcaaacttgtaaagacctttgtcaagcttcccaacaattaaagtcttcaaagtaacctggtccttaacaacacaatgaaaatggtgaaattcaaaaaagactctattatcttgagaaaattgagatacactaagcaaattttttgtaatttgtggcacatgtaaaagattgttcaagacaagggtgtgatcatgaaaaagagagacaaaataagattggccaatgttttgaatgtgcaaacctgtaccattacccatgtggacttgctggtcacccatataactgctactggtggaaagattctgctcatttggtgtgagatggttggtagaacctgaatcggggtaccagctaggatcattgacaacatcaggtgtggcataataagcttgcatctctgctatgttgacattaacatgtcctgggaaattttgaaaagattcaggtccagtgaaggacttgtcgaatctctagaagcactgctgaacagtgtgtcccagtttatgacaaagctggcattgaggtttttgaccccaaatggtggagatgccacggccacgagagacacctcacctgaaattgccaaattgaccacgagtggaggaccctgtacctctagaaacaagcataaattaactagattgagaggaattagattgagagaaagggggtgcattacctttaaacatgtgatccaagaggggaagggtttggggaagtagaggatgttcctttgcctatttcagcattattgtgagctagagattagcttcgtttttggcaatgtcaagatccttagcggctttgtcaagttgaatctcctgagccattaagagtgcttcgatttcaaccacactataagcatctgtcctcgtgttgacagatgtgatgaatacattgtattctgctggtaaaccattaaagatagctt

SEQ ID NO: 392107 - DNA, 1422 bp, Cannabis indica
gtgtacttgcaagtaggcacttcgaactttgttggaagtggggaggtcgattgatcgtttgtgacgaaagaacgacccccctcctccctctccagttcgaaagtcagtaagtttttggactagaaggtccttaactaatcgagtaactcatctaacgagcctggaccaccgaatttgtggttgcttggggttggccagcattcatgcccacgttaacttggtttccatgaattggctcaggtagggctatgtgatttgaattatagttatcccttttgttaagggcatcttggaggtctccacccctcgggggcctacacgctcaaaaactgacccaggtcttggcctttctcccgtattttggctatcatcccttctagcaactgagggaggtatctagccatctccacctctctaaggtagatttttaagttgatgctgcctattaggggcatacgaccctccgtcttggcaaccccccaaccttaggtttggttggtcgttggcacgactttcagcttcatcatcgtcatgactgtcgaggtagttgggacggtagtcactattgacctcgaggtcttcccttctccccttgggcctagtgtctctctagtgatcattgccctctcatggttggttgcttaatggggctaccactaccgttgttgggctgtccttccaccgtttctactacggtcaccattgttgtttctggagtttctgccactgctctaccttagacgaacattgtgggagtcatctcgtcccatatagtgaccgggtaggacttgctcatccgtagagagcggtcaattattgttgttgttaggaaccctgttggaggggtgactgctagccctctcttggttccttaggccttctttaggcccgtagaccaccctttccttttggtttcttggggtatgcacttcttgtggataggtttggtggtcttgaggaattttttggttgtgggcgtcagtacccaacccttgagtgttttggttgaaatagttttgtattaagttgacaacttcttgagtgcgatgatcttggtcatcttggccccttctcatttcctgagcatgctcttccaacaaatattggaactctctcctttggttagcgagacttttagttagggtcgctcgagtttgagtttgatcctggtgaatagtttggaactggccctgcatttcgcctatcacatctcgtaactgatccatctttgggtcaattccttcaatatccacatgggtttcatttcgtggcctaaagatgtcaggaccccgagtggtttgagtttggcttgtgccttcattaggtgggacaaagtttctagtattaccccttttggtggtgtcgtcagtagcgccgcctccagtggtggtggcatggtggtactgttggaattattttacc

SEQ ID NO: 392108 - DNA, 682 bp, Cannabis indica
aaaatagaataaatataattctatttatttgtaaagtaagtccctgaactatataaatatatataagttggctcccaaacttcttttttttgcaaattagtctccaaataggtaagctttgacaagttcatccctgatattatttttggtaaattggcccctgaatttttatttgtttgtaattttaagtcctattagtttatttatttatttatttttgtaagaattttaagtcctattattaaatagtgatagttttgttaacttttatacttttaacttccttaatttattttttatgttaattttaaatattttcttttttctttcatttttgttttaatacttttctaaaaaaaaataatgtatattgtgtatatatatatttaattttattaatcaaatattaaagaaaaagggagcataagatgaaaacaaatcttaagattagttttttttttatttggcaaataaaaaaaaactttttatttggcatattctaaaaaatacatataaataaatatatttttaatatctgacaatatatattaatataaaaatttgttaaaatgaaaaaataaataaaacttataaaaatatatttatgtatttgacaatctatatttatatttttttttgggtaaataccattttggaccctctgttttgcaaaagttactaa

SEQ ID NO: 392109 - DNA, 1049 bp, Cannabis indica
ggtttttatggggagcctaaccgcaatgcgagggtgactacttgggatcaactgaaaactttggctactgcctcttctttgtcgtggtgtgtcattggggatcttaataacatcttgtctcatgaggacaagcgtggaggtgttccttatcctaactggcttattgagggttttcaacaaacaattcaagagtgtgagttgagtgatatggagcttgttggtcatcaatttacttgggaaaagagccgtggttcgggtgcttggattgagtctcacctagatcgtgcacttgtttctaagcaatggttggtttatttttcttcagctcagttgttgaacatggagttgagctcctccgaccatagtcctttgttgcttaatcttgttggtcagtctcatctttctcgtcataagaagtttcggtttgagaatttttggcttcgtgagcctatgtgtttccaagttttcaatgattcttgggtggagtctactttgggtggtattcaagagaagattaaactttgtggtaataagcttacagagtggaacagtgattatttgggaaaatttcactctcggttgaagcattggaagagtgaagcaaataagtttaaagcttggcgtgacgatatgtctttgaggcggtttaaagacgctgagaataatccttttgaagtcctcaatcaaaaagaaattttctggcgtcaaagatctaaacagttgtggcttcaagaaggtgatcagattacgaaatattttcatgctactactacctcgcgccgtcgctctaacttcattcataaacttcagagagataatggtacttgggctgattgggataatggttttccaaatgtaatagttgattatttcaagacccttttctctagtgggacgtgccactccttgaatgttactaatggtattagtcctacgatttctgaatatcataatgttgctctgctcgtgccaattaccgatgaagaagtcaaagatgccctctttcaaatgcacccttataagtccccaggtcctgatgggatgactcc

SEQ ID NO: 392110 - DNA, 679 bp, Cannabis indica
tatttttattctcattcttattactacatttttttagtgtttggtttgaaagaataaaaatatgagaatataaatgaaattacaaataggagtggaataaaatataatttaaaatgtagaactttcatctatgttaaattttttttttactaaaattaaataaaagttcttaaatctaataatctcaataattcaagaggcattttaaacaactttaaaattttaaagaacataatttggtacatgtaaaaatttaagggtaaaaattatttagaataatgtaaattatttagaacaagtggtgcccaaatattatttagaaaatgcaaattagtaaacgaacatctttaaaataatattaaatacacaaattgcttaattataatataacaatatctagaaacacattaattgcagactatatacagtatttagtataataaagtaattaaaattaagagcttaattatattaattcaagttgagcgtatttagagatcattttagtctttaattaatgaggaaaataatttgatgcaaagagaatttaattagtggaggtcacctcaagtgagctcggacaaatatgttaggctatttttagcctatgttttggatccaatttatgtgcatttttagctgtgttgggacggaattacgcttgttttctatgttttca

SEQ ID NO: 392111 - DNA, 652 bp, Cannabis indica
gcttaaaaagttgcgacatctttatgtttataaacttcagtacaatagtgccaacctgttgtcttttgattcaataactggagcaaaagtaatgaaaggaattggagagctaaaagctttgcaaaagttatatattattgaggtgaatgttgtgggatttaacatatttgaagagttgaaaaagttgacagagttgagaacatttggagtcactatgttgagaagtgaagataataaagagttttgtgactgtgttgagaagatgagtcatcttgaaagcctttcagtaatttcaataactgaaaatgagataattgatttggaatccatttcttcccctcctcaatatcttcaacgcctttacttacatggacctttgaggaagttgcccaattggattacaaaacttaataatattgttaagatttgtctacgatggtcgaaactggaagatgatccactgaatgtgcttcaaagtctttacaatcttttggaattggagctttcattggatgcatattgtggagaggaacttcagtttgaggaaggagggtttccaaaccttaagagacttgttctcttttcattgagtaaattgagtttgatagtaattgaagaagaagcattatgtaatcttgaaacgttggagatc

SEQ ID NO: 392112 - DNA, 585 bp, Cannabis indica
gtaagtaagggcgttacaaaaaaatacactgtaaaatcatatgtaatgtaaataaaatctataaaattgtaaaaatattaaaaaactcaataattttgtaattatttttgtttccttaaaattatccctaaaaaattttaagatcatgagaataataatagttatatgtatatacatgcactataaaattttttatttttagtcacaacaaaacttgtgactaattataaatttttattcttatattgtaactaaaaaatttgtggcaaaacgtattagtcataaaaattataattttttgtgactaaatgtattttttagtcacaatatttattgtgactaaaattaaattagtgacaacttgtatctaaaaagtataatttatcacaaataacattttgttgtgattaaatttacatttaataaaaaaaaatatctcagtaacaatttttcttagtgatgcatggcccacaaccacaagtctcttcactaagctatatatatactagctttcgaggtcattaacttaacaccacatatatatactagggtgattgttacgtgccaagccacgtagtgttagtt

SEQ ID NO: 392113 - DNA, 1308 bp, Cannabis indica
ttttttttgcaacaatgccaatttagacaaattttttggtgttggcagcaactccatttacttttctgacaccaacagcttttctggcatcgacaacaaactctgataacttttccggtaccagtgataaataaaattgcctaaaaacaaataaaacattaaatataggctttgaaaacctaatttacatatatatggcatatcaaataccataaaaatacttaataacaaaaaaatgtcatataaattggtcaaacctaaaagtatcatatttaagtaaacaacttttaaagtgcgtcagacacccaaagcacagtaaatgaggcccacgaatcaagttttgcagaaatgacatgtcttgcgcatggctttcctgggctgcttctcattcatgggcttttgataattttatttttcattttgggcttcatttttttttataaagagagttagttaatattttataaaagttagagtattaagcgtgtctaacactattatgagacgacattttaaaaattgctaatgttttatattaaattatataaaatgtgatacttaattataccaataacaatataatatgttagaagatattaaacaccactaatatcttttagcatttctcatttataaattcaattaataaatataactataagtaaatttatatcaacatacttagtaaaaatatattaagtctattatatttcaaaacatataaatagtagtagattatagtgtgtattacctctggagttagtgctgtaaatatgggtcgtgcattttgacaagacacgaaaccgacacaagtacgactaagtatgaaaaaatataaaccgacacaagtctagtaagtttattatcaatgtattttcttctgccgatgaagtatttagacaaataaaaaaataaattctatgactacctataaatatgacaatgaggtcacatgtaaaggagttcttctctttctctctctcattggtattaagccaaattactgctaaattttagatagagtacttcatcttatttatttctgactcatgaactaaagttcattaacgtcctaactacgtaaaattcctagtctccatgttctcttttcttttctagctctaaatcttcatttatttaattagttatcgaaaaccttcggtcaacaattatcatttaacaatatagataaacagattggtaatttttacaaaacacaaaactaaaaataaactattgactgtttttaaaatttttaatttctatattttaaaaaataaaaaataaacaattttattacacattttt

SEQ ID NO: 392114 - DNA, 647 bp, Cannabis indica
ttctaggcaaatatcccacaaatgttgggaaagttgttatgttcggtttaggatgcaccaatttgaaacggagtgatgagatgtcacctctctcctagaaatgcatcacattggtgatgaatgctgaaaatatgcattttggagtgtcaatgatcgcatacaatgccacatgggctgtggtggtgtcctccaacaatcctcgcttagccgcactactcaatttccaagtaaaatataccagccggccttgtgagctgattttggacttgataacttcagaattgagccatgggtgtgagactcttttatccgtcttcaaattatatttcgaatgcaagttaaatcaggtcattttgataaaaaatgagagagttatgactattttactgaaggtagtttatgctatcttgtactagttacgagcactaacatgggcaaatggcagtggtcggccatgcatgctctcagacccctcgaggtgtgttttaacttatttttagatgttgagtcatatcttggagatctcgagacccaaaaacctcatttggatgtctgaaaacctaacaggagaccactgccactagttagagtcaaacaatggtattggtcggacatggcttgtgggaagtcatgggtggtgtttctca

SEQ ID NO: 392115 - DNA, 1067 bp, Cannabis indica
acaaactaccccaactactactaatttactaactaaaaaaccataccaaaaaacgtttaggtaggagttggttttgacaagtaatgataggttgggtagtttgccgcaaattactcttaaattttttattttattttgtataatattgccacgtaggataatttttagtgacctgtcattgccacgtgggcaaaattaggacttaacgagggtggacagacgataccttaaaaatgtaaacagaacagtactttaaatgttttccaaccaaaatatgagattagatggttttttacaagtaaattgatagttgagggggttttaccgccaattactctcatatatatatataatgatgatctaaagaaaaagcttctatactatcacatgtaataggcttatatgcaactctctcatgtgtcatttgaaggagaattgaggaaattaatttgactattgggaaagttttagtgattgcacttggcgttgttttggcgagagaaaacaattagttctacaaagtctacaaagcttttatctagtttgatgaagactcttctcatatttttctatgagataattaatggttttacactggaatgttaggtgattgagttactgaatactatttatttattgtttaattttctgttattggacgaaaaataattattagctggaaataatatgaaatgtattctcctctggaagagaaaaacaaagagcatacactttatttattttaaattaaaatatgagttgtaaatataataaatttaaaattaatatagtttggacatatttttgaaaggtgcggtgtcctttataaatagatgttgtaaagaggtaactatttcaatttgtcttacttcttttgtctagtatatatatagatacatttattgatatctttctttcttttttttttttttctatttcaatatattcattgatatctcatcaatttttaaaggtaaatattatgttgggattttgtattttgcaaaagttattaattagactctctattttgttaaatgataaataaaccttgtattttctaaaat

SEQ ID NO: 392116 - DNA, 2606 bp, Cannabis indica
ttagactttaggagagcgtgcaccaccaaaggacatatcttttttgccaacgccatattctcttacatgtattgtacaaacttgcccgtgcccgtgcgcgacacttgtcaccatcaaaatggtcccaagcatacggaagactgttatctcgtaaattggaccttacctaaccggtccaaagtcaatataaattgtactttacgctatcaatgggcctagttaaaaaaaatatattaaaaagtagacatgttaattattgaaaaataaattaataattatttttacaataacactcatatataaagtgattgtttttggtggacccaaagaatccgcaatgcataactatttctttttttctctcaattcttttatgctaatttcacacaactctaattcaaccctccttcaacccaccctaccaaacaaatagttaaaaaaaaaagggccttttttcatttttacactttaaaactagtttttttttttttttgtatttttacggaattctacatagaaacccctattgcaactagcgctgcaacctaaattgcaacaaaaaatcgtatagaaactcctattgcaactagcgctgcaaccactttagaaacccaaatcgtaaatttgaaaaaaaaattaaaaaaaatagtatttggggtaattcccctaaaaaaaagtgcttttagtgttcttttaaagttttaagttttttgatatttgaatagttttgattttgttttattttttatattgtagtgtaaattataattatttaaaatattttataaacttttgatttttttaaggaaaaattgatgaaggttaaaataaaaaaggtaataatgttacacaaaaagttgagaattttcttctataaaagttcattgtctatattctaagggcatgccgagatagcccaagtaataaaaccttaatatcaaaaaagaaaatctcaaacttgagagctataactttcatcccatgtaatttaatcaaatatttaatcaaataagaaatcttttatataaatattgtcccacgtaattctctaatgtaaagattaggatttatatgtgcctatctccattgataaaagtgtctatagttgtctgatgtgtttttattagaccatttggaccttacaaaatcaaaactaatcatactggccttacaaaatcaaaactagccatactgttctcacagaaccaaaactagtcaggctttacaaaatcaaaactagtcatactgaccttacagaaccaaaatctagtcatactagtcttacaaaactaaatctagccatactgactttacaaaaccaaaactcgtcatattagtaatacaaaataaaactagccacattgaccttacaaaaccaaaacgaactacatatattggccttacaaaactagacatattggtctaacaatataaaaactagtcacattggtcgtacaaaataaaaattaaaaataaaaattgactaacttggccatacaaaactgaaaaatgaatcatgctggcaaaacaaaatcaacacagaccaaaaattaaattagtagtaatcagaatatgtaagagtagtagaaatcttatcttaaattaaaaaaaaaaattgaaatagtaaaaatgttaaatacattatttaatataccaaatacgattttaagatataaatatatttataccaaaaataatcctaactagctagatataccataaataaaatttaaatttaaaagaaaaataagtaaaaagacctatttgattatttttaaatgactgaaaattaaatcaaatcaaataaaaattaacaacatattaatagcactagaaaattgaaaattaaaccaaataaaattcaataagaaaataaatatattatattaaccttacaaaaatgaaagaaaaaattaccaaaatagatataggaattaagattaaaagttttaaaagaaaaagttactttaattaccagaaatcctataatttcgataaaataaagaaagttaaaatgtttatttaaagaaaaaaaaatttaaatgtaaattcatatgaatataaataataaataaaacgatattgactaaaatttatttatgtatttataaatagtatttaaatattaatgtaaaaatatacaaaaataaattatttacagctattaacatttgagttaatgttaaataaataccatataattataagagaaagtttacgtttcaaaacatttaacttgtaaaataaataccaaattgctcatgatagtcttcgtaatctcagccctgtgaacttcggttctagctgtgatacagtcgtagaaacaagtgtccatggcgaccataaatgtcaagcaaagtcgtaaaaaatttatctcaaataataatttacacatatataaaataaaacaagtatatgtactatgtgtgatgtcatataagaagggaaatttgacaatatatgcttaaaaatagcatatattgttttaatatactaggtaaacaaaaattaaaaaaaatactctccaattaattttaatcccaacattaccctccccatttcaaactttcactctccctctaactctcacttttctctctctctct

SEQ ID NO: 392117 - DNA, 821 bp, Cannabis indica
cgatattctttaaaatctattatattaaattatatagttaccgatatttaattggaacaataacaatattaacatataagagggtgctaagcggcacgggtgtcctttagcatttcttttattttttttttttaataccataaagaaaaaaagttcccgtataaactttatataaaggtgctttgtttgcttctttccttcttttttgaaataattatttgctttcttttttattggctaagtttatatttgtatatttagtagtatttatggtatgtttacttaagggaattgactttgtaatgggaaaaagttagtggagctcatttaaattagacgaaaaagaaaaggaaatatttttctctatttttataggaaattaattttttccctaatttattatatttttattttaattttattaattaaaaaattaaaagacaaatatacccttagaaaaactataattaaaaaataattaattatgtaaacaaatgaaatgagatttagtaaacaatataataaaatattgtttttgattattttatattttaaattcattcatttttcaaattaattattttaattccaaatataatttaattaacatgccatagtgaaaatttggaatagtttatactacacatgcaaacagccgatcctaatgaaggcctaagaaaaatataaaatttggggcctttacagaaagtgctccaaagtaatttaattgttaatttgtgttatattatttataataatataatatatagattaaatatgtgtaataaactaataatatgtaacatatgactatattagtt

SEQ ID NO: 392118 - DNA, 850 bp, Cannabis indica
tatatatatatatatgttacatgcatagatagatacattgtcactgtctctcacccaacatcatataattaaaagttgaagcctgagacacaaagcagctgcaaagcaacttcaaactacattatttattttttttggtacaataatctaaacaaaacatatatataatttatatatacggtcaaatttgcataaccttttaaggtactctgtatttctaaaaagttattattgcttccaagctttcttaaagtctcatgcagcctttgctttacctaatgatcaaaatattatatttccacagctctctttcaacaacaaccctctctcagaaaacgtaaccttccatctgaccctgctagctagctacttattatttgcataaatattcaaatgttttgtcatccatattggcatctgtaatcaatttctcaatagcacattaacatggcaataatgtaccatgcaccctcatcactaattctttctctctttctctttattgggtttctatcttctacatctgaatctgctctagtaaagtaccagtttgatgtaagtgtacagataactatattatttgattacttatcaaagtaatgcgtatagttattaattgttaattaatgaataatacaggtccaagtgaagaatgtgagccggttatgccactcaaaaccaatagtcacagtaaatggaatgtttccagggcctactatttatgtccgagagggagatagacttctcatcaatgtcactaaccacgctcagtataatgtatccattcattggtacaaattaattaatagtgtataatttatttcatcttgttatattatatatatatata

SEQ ID NO: 392119 - DNA, 1085 bp, Cannabis indica
ttatacaatgtcatgagtttgaatctcatgacacacattttttaataattttttatatatattttttgaaagtgagaacccaaaaatttaattcgtcttaggcccatatattctcagggtcggctctgctttaacagattatttagtactatccgtgttaataaggtgcatcttgtttcggtagccccatcacttgagaactccaaagttaagcgtgtttgacttggagtaatcttgagatgggtgatctcctaggaaatttctccaaaaagaatgcgagtgaggataaagcacgctagaacactcgtatcgatttgtaggctcagtcgccatttcaagaagcaatccaaagtaatgtatccatgtataaaagctataaatccgtgaaagaaggcccaataaaaacttgagcggagacgttacaaataacatattaatgattagtaaacctatatatattgcaacccactatactttatatagttaaactttaacttggaaagaagctaggaacgtggaaccctcatcctcaattacaaagctaagaatggaggtgatgaaaacacttgttgctctctctacttaatcagcaataacagccattacaacctagcagcaccataattatgtttttttaaaactcttcaatccactctaaatcttgcttttttattttctttggtaaataatttttttttattatgacatgtttactaaaaaataattaatgagaatcaacattggtaaaataatcattgtcttatatttgtttacttacattattaaaaatagaaaacagagcatttattaaagaagagagaaaagaaagggagaacttcctcactaattttgtaaggaatgctattaagggtaatggattttaattatttttattttactttttaatattaaatatataatgacaattttatactttaaaatatgtcttacaaaataactaccatataatatagtttaacttaaatgacaatttaatcaatttaagcattccgattatgtttcgtaataaagtaaacaagacaaatcataactattccatttcaaaaaaaatttagtaaacaaca

SEQ ID NO: 392120 - DNA, 1025 bp, Cannabis indica
ccatcgaggccatgactattacattcgagttgaataataaaattaaataaagaacacatctctacgaaacaccaagattgtcactaaccctacgacctaaaccggactcgactcaaagcaaactaaatatatatatatatataaattatacatatattttactaacaaaataaaagttagaaagtgtaaaataattaaagaataagaaacaagaattcaaatatccaaagttttccactttcttggttctaacttcttatattcattaatttgaacttttaaaatttcatcgtgatattgttttgggaatttgcaatacagcataatatcgatcatttgcatatgttgcatctcactgaaacccataaataccaagactttgtaaaaagaaatattctcaatatgccccttcactaaagaaaaattgatgctctgcctctgatagtatcatttgtaaaacttcaattattcaagcatatgcagtgcaaagccaaaatccttagagagtataatcatatagaagctaatgaacagaatgaatcgattataaaaggtgtcactatgatcaataaattaaacatttggctgcaaaatggttaaaaatattcaatataattataatagcattaaagaaatgtctccaaactactctatagatgataatctatgagcgcaaacttacaggaagggtctcccatatcacatcatcactcatgttttcatcatctccaggcattagagctctacacatcctacataagtgaagaattgaaggttaagtgacttttgtaaactacaaaaatgtaagtatttattgcatgcttggttttgtagagtttatccaataattccaattaccattgcagaatacatatatctatttaataattaaaatcaatgattctagctattgcactaaataggtcaaccaaaaagttaagttaaggccttaaaggtgaaaaggcagagagagacagagatacctgatattatcaaccaatacagctagttcaaaactagcaggg

SEQ ID NO: 392121 - DNA, 3269 bp, Cannabis indica
taaatacaaaatacactgatcgttggatttggagagcctgccatatctctccaatctgatcgccaagttataggaatttctttgatgactcacgatgcgaaagctaaattcgctaagtgttgatcgcgatgtgtggatagttgattgctttgcttcgagcatgcatttgaggtatcctgttcggactgcgaggagatactcagagtcaattccacgtgtcaccatcatgtgaggcgacgttagagtgtgaaaattgggataacaataaggatccaaatttgggacttagacaaggacccgaacccggactagcaccaaaacccagaccctgacccagacccgggacctaaaactggaacctgaacaagaactgctagactagaccctcgaaaaagacaggacccagacctagaaccgaagtcggacctagccgcagcccaaaaagagaccggaactcgggtccagacacggtcgtgtacccagaccgggaccgagacgaagacccaaacctagacacagacctagacatgggacctgatcccgacccagagtcggacctagatagggattcagatacgaacctggacttgaaccaagacttggatctagaccgggatcaaaactagggacctagatcttgaccgagatcctaacacagacccaaatctggacccgcacctgggacccaaacttagaccaggagttgaaccaagactgggatccgtacctggacccagacccaaacccggacccagactcgaactaggctcatcccccaaccaaaactttgacccaaacccgaacccaacactcaatccaaatctaaactgggactaggacccaaacccgaatatggacccagaccaggacctaggacccgaacttggatgggggacttggacgtgggccttagaacctagaccaagatcagatgtcgggacatggacgcgaacccgaacttggacctagactaggatctaggagtcgcactaggatgggggacctagaccagggacgtaggccttggaacaagacccaaatctaaatccaggactcgaacctcaaccatgacctgacctggaatcgggaatccgaagtcggaccaagacccggacccaaaaccttcctcggacccaaactaggacaggaacgtagacatgaacccatactaggaccaaacccaaactcagacccagacccaaacctagacctgcacccagacccgaagtcgaacacatactgggattggaagccaagacttagaccctgactaaacccagactcagatcgagattgaaacctgggacttggacccgaacctggacccagacccaggaccctaacccacacttggagcccgatctgaacctagaccaatatccggacccgattccaaactaggaccaggactcgagccccaacccgaactcgaacccaaactcgaattcataattgaaactagagctggaatgggactaggactaggaccaagacaaggactaggacctacacccgaactcaaacccaaataaaaacccagactgagacccaaacccaaaccgcgacttggacgcaaacccgaacctagaccaggacccaaacccatactagaactgggacttggaaccagaatcgggatagggacctgggcatttggacaaggatcgggactcgggtcccggacttcaaactagaacccagctcgtgatccgagacccgaaatggaaccatagcaggactcgagatcggtgtcttgatctgggagccagcccagagctccacctagaccaggtccggaacccatacccaaactcaaacccagtcccagcccaaacctagacccgaacacttaccctgtgacccaaaattggaacttaaactagaagtatagcagcacccgagaacgggaccagaaccagaactttgacctagacctgaaactgtaactagacctgcacgtagactcgaaaccgtaatccgaccaggaccacgactctaacctagacctagactcgaacttggacccggacccagatcccaacctagacctagactgattgtcgaacttggactcgaactcaggcccaaacatggaacaagattcgggacacaaaatttgggtcgagacctagaattgcactccagtctcggtcctgaacccaaactcggacctgggactcgggacttgaaccagaactagaccaggatacgtgacagggatccagatttgggactcagaccaggacccaaacccagaccccgaccaaaactcggtacctgaaattggaacttgaataagaatcgcaagactaggcccctcgaacaacacaaggaccgtgaccaggacccgaacccagacctagaaccgaactcggacctagtcctagtcccaaactgagagcggaacttgggcccatacacggtcgtgtacccagaccgggatccagacccgaacccaaactcggactcggacccgaacctggacccggatctgaacctagacctgggacgcgatcccaaacctagactcagacctagatagggatcctgatacaaacctaaactcgaaccgagacctggacccacaccgggatcaaaactcgggacctagatccggaccgagaccttgacccatacctagacctagacccacacatgagagccgagctccgacctagacctggacctgaatccatacccaaataaggatctagacctggatctagacccgaacccaaactccaaccaggactcagccccaaacccgaacccagacactaaatcgaaatcgatattgggactaggacccaaacccgaacatggacccagcccgagacctacgactcggaccttgatggggacctggacctgggctgtaacgccctgactctcaggaacgccacgtgtgtgcttttataacttaatattattaatctataatttttagaaaagtgtggtttaatttaaatctttaattaaattcaacataaagacttttattttaaataatgtcgtaatatagggatcccctgtttataaaataaaaatattcttttacaataaattacatttccaaacatagaaaggaattccgatcctgctttccagaagccaagaccccaggctgatatgtacattgctggagacctctgactcatggccgaacacagctaccaacttccatacctgcaccacgaagcacccgtgagtcacaatgactcagcaagaaaagctactaattagactttatggaaagtgcagacagattt

SEQ ID NO: 392122 - DNA, 1375 bp, Cannabis indica
aaaaaaaaaaaagaaaacattttcttttatttttactttaatttatgtgaaccctactagtttctttcattacaaaatgtattaaacaaatacatgaaattgtttccattttcttccagtaaacatatcatttaaggaatgttagaaacacatacaaattgcacacatttttatctttttttttttcttgtggataatacatttgttagaataattgaatgtaaaaattagttaaagttccttggaagttgttacaattagttagacttaattatctttaattgtacagttgtaacatgtgattgaatctctatataaatacaataccgaagccaatcttatgtgattgagcatttatttcactattttcactcttctccattttcctctctctctgctcaaacaactttgtttttcagagttttacatggtatcagagccatgtcgaacaatggcgacaatggcagttatcctgggatttgaattgatcctgcaactaaagaaagaaccagtcaaccacaagctcgagcagcaaataaagaaccagaagctcaaattcccctcccaaacaataatctcctccccttgaatctcagaccaaatcgaaacaactacacagtctagaaatcccttgtaatgaccgcttaactttaatatgaaattagcaaataattagggtttaatttagaataatacttttaattattatttacataattatggagatatatttgaattctaggtgtgctatatgttatatgtgacattttatgtttttcctattttatgccgataacagtacaaatgcgacgtatggcctatagagtcactttattttggtttagtattttagaaatagcaaagtaatttagttagacatttagaatatcgggaatattcagagttataagtttgactaaaatgtccttaggtggtaagattacttcttggtgaggccgaaagagtaaactagtaaatttaccctagtttgtctttagtgacaaaggatttttattaatcttttatttagttattataagctgaatatagtgagtttattaagttaattattcttaaaaccatagttgactaagttagaaaaaatccaacataaaaataaatatataaaagtgtcaatgtttttgggctttctcacattgaattacttatatactcttttagaatatatattactttataatacaaacaaattacatgcaaatgataatattttaaaaagtgtgggcttttagatattgaattgcacatatacctttttggaatatatattacaccacaataacctaaataaaagtgttaattttttgggcttttttgatattgaattacacatatattacttcacaatacaaat

SEQ ID NO: 392123 - DNA, 1213 bp, Cannabis indica
cataaaaaaaaaaatcatattttcggagagataacataaattctcatagaatttataatttccttaaaaaaaaatacaccaactttacaaaaatgaacatcttattatgtatatatatatttgcaggatggtgataaattatggtgcatgggatttatggagaataaggatacaacaatactaggaggtgagatttgctcatactttgaaattgttttatttttatatattaattttaatttgttccattaattatgattattattattattttggcagatcttgttctaaaagacaaacttgtggtctatgatttggctaatcaaagaataggatggactgattataattgtaagttaatttaattgcttagacatatactttaaatataaaatgtagttatttaacagtttttattagtttaataaaatatttttttaaaaaaataaaatatttcgttaaatttaacggtgttagtatagttagttttataaatacataaatattaaaattacttattttagattaatttaaatatatatataaatattaatattatttgttttatgttaattaaacttatactaattttagattaattaatatatatatataaatattaatatattatatataatattattactttttttattattatttttaatattaggaatatgttcaattttaatattcttaaattttatattttttttctcaaatttttaaactttaaatattgttttttaaaaaaattacaaattaattaattatttttttaatttaattttaaaaatctacataacgaaaataaaaataaaattataattaaatatatgcacgtaataataatttaatatatatttatatatcttcttaattaaaaatattgtattaatttcttttatatatattctaataatagtaaatttttcttatatactttcaggttcattgccagttaatgtttcaacaaatagtagtgaattagtgaaagaagaggccccaaacagcaataatacatttaagaaggagccttcaaaaattattatactaataaccatacttataattacttttttgtacatatagcaatatttattaatatttagttttatatgtttttaccaaataaaataagagtaatttgcggcaaaacccccttaactatcaatttacttgcaaaaaaccatccaacctcatattttggtgg

SEQ ID NO: 392124 - DNA, 1243 bp, Cannabis indica
ttattattattattatttaatctattggaattattatgtattatttgctctaaagacctcttgaattattgatgtagtatatataacaaaatccatttcttaaaatttattttttaaatccaacactacatatttttcctaccttatattctttcccacacccaaaaaaaatcataccaactctctctttctctctctccataaattacaatcaccatatttctctctatatatacatatatattaaacatatagagagagaaagaaagaaagactcacaacatatatcgccatggatgaatcctcttctgaaatcacaaccccattcagtaagttaattataattattcatattcttcttcaattctttttcatactaaaaaaacataactaacataaatatctttatcgggccagttctgaagcccaaaaaggacgaagaacatggcccaacaagctcatcctcgttctcctcctccaaaacaatagtcgtttcagatgaggaggagaaagaggaagagacgaactcatcggtagagcaggtagctctaacggtgccaaccacagacgatcccaccatgccggtgttgacttttagaatgtggttcttaggaacactttcttgtgctctcctctcatttctcaaccaattcttttggtaccgaaaagagcctctttcgataaccgccatctcggcccaaatcgcggtcgtcccgcttggccagctcatggcatctaagctcactcgccgcacattcttgaccggaactagatgggaatttacactcaatccgggaccttttaacgtgaaagagcacgtgctcatcacgattttcgccaactccggcgccggcaccgtctatgctatccatatagttacggtggttaagattttcttcaaacaacacattactttttttgtgtcattaattgtcatcctaactactcaagtaagtaatagtattaataattaattaatttgaaatattataatttatttttatttttttatatttaattaaattaaattaaattaaaaaaaatgaaattgaatggtaggtattggggtttggttgggctgggatttatagaaggtatttggtggagccagcagccatgtggtggccatcaaatttggttcaagtttcactcttcaggtaattatatatttaatcgagagtaatttatgacgtaaatatttaatttattttttgtttgtaagtaaatatttaaatttaatttt

SEQ ID NO: 392125 - DNA, 1245 bp, Cannabis indica
agtaataattagccattaaataatttttatattatacatttctttagcaaatatatttataaatacgcttagttaatttataaatacacgtaaaatattaaagtattataaaattaagaattttgtgaaaactaaataatattaataacgtactcatgagatcaatattttttatatatgcatgtcatttagaattaattaaattttcatacaatgaaaaatgattaaaatatataatatttatatagcaaggctaattaagttggtcaattatgctaattattataataataagttgtggttgaataatttatcaaatacacacacctatatatcatcattaaatttttgatttagtgatataaattataatatcgcagtcattttttgccgactgagagctatatatataattaattaattaattagcaaaacatgttatgcacgttttaaatattgatttagaataaatctcacacacatataataattttaataatatatttataggaaaaaggcaaaataatagtaataaagtcaatgaaagaagcagctttgtttgcatccaatattatatttatctttctactaataatattaacagtacaccatactttaatagattagtaaatttttttaaaaatagctattagagttataatttcttaatttcggaaaattttattaaactctaagagtattatatgctaaatataaaatatgcaaatttttatgatttttgctcgacgatgatgaaaaatgcgatagatgaccattaaagtcaggataagttagaacctattcttagtgggacaaacataaaagatattttagatggagtttaggcggggaggtggtatttgacaattttacccataaacctttagttgcttaagtgtgaaacaagaataaaattgtaattttactattttagagagaattgtctcttagtggattttggtggaatgttcatttcagcttagtttattatagaaaaaactaagttttattgcattaattattatacaaagaaaagacaaattagaaagaactatctcttgaaattctccttctctctttcgaccctagcaaaaaccagaaaaataagcccaatctcatcaagttttctgagatttcatcagcaaagatttaaggtagcttaatcctaggtatgctctagaaacttttaatttgtaacgtccccgcttcaagtttttattgggcctttacacccacggaatgatg

SEQ ID NO: 392126 - DNA, 719 bp, Cannabis indica
ctaaaatgcctctagctcaccaagagggtcttaacatattgtaaatcatataaattcacatataataaattatataataatgtaatttctcaataatacatcattatctaattagggttttgctaatcctatctcataattctagggtattacaatatattagattgtttattaatataatgaataagataactaattattaagacttacaaatttttcatcgaccataaatctgttaggatttccatgtgcgacgatgtcattgatatatttcaatacataaaaatcaaattcttatcttttaagttgttttgagaaatctactactaatattttgtacatacgcacgacacttctacaaatataacatataacgtcagtttttatatggagaaaaatgaaaactgaagatataggcccatttctatgagttagtgatcgaagacttataaattcgattattatagaataactgaacttataggtgtccacatggacatcaataacttcggttattacataataactgaagttataggatgtatatatcctatattgcaaactgaaacccttcctcttcttcttcagtttcttttcttcttcgtggacactcttcgctaaaactccaccaacctcttcgctggaccatttctttcccatttttttatcttttttttttgtttttgttaaactcttattttcctaatgctagcataaaa

SEQ ID NO: 392127 - DNA, 800 bp, Cannabis indica
ggctattaccacactaacggggctaaacctctttaatacctggtgttctttattacttattgatttttgataaaacttgtaataataaggttcgtcagaaaagtcgttgggaaagtcactactatcaaaaaagtcacttgaaaagtcgttggtgccagaaaagtcgacgaaaaagtcactggaaaagttgtcggaaaagtcaccgtcagcagaaaagtcaccagaaaagtcattgtcgctagaaaaagttactgtaaaagttaccataagtaaatgtcttagatataaacaaaaaatagaaccggttctattacataataaataaaaacaaataattatttgtgttatttatttttattcattatgttacagaactggttatatttcaattataaccagtttgagttattttgtattatttatttttattcattattttatagaactggttctatttttgtttatatctgagacatctagtgacttttttagggatttttttcggcgacagtgctttttttggtgatttttctggcgatgatgactttccgataactttctcggtgaaactaactttttttacgacttttctagtaccggtaactttttcggcaatttttctagtaaaacttattattattttaaaaatataagatttttatcattttttacaaaaatataacataaaaaaactcatataaatattaaaaaaaataaaaaaataaaaaaactacataagctcgtagtattatttatttaatctataaaaataaatcttataattctcatatattatctaa

SEQ ID NO: 392128 - DNA, 1837 bp, Cannabis indica
aaaaagagagaaacaagtttggatgttaaaaataaggttttgggaggttgaaaatagagttttgaggggaacaaaggggtttgtcggcggtgggtgtgggaattgtagagagagagaaagagaagaggaaaatggggaagaagggttcgctgctggttttatttactttcaacttttgccggcgcaattaggtgcgccggcaaaagtctttcctgaataaaaacgcacgagatgctgcgtttcatttaagttgggacttttggcgacgcacctacgtgcgccggcaaaagtttcccacaaaattttcacacatgtttttctttgggcgggtagttgaccgccaaaattttcaaggcttttatgcgccggcaaaagctaaaccctgatgcaacgtgtcccatggtcaaacagttgccactttttccggcgcaattatatgcgcggacaaaagtcaccacctacttttgcacacacgttttttcactgcgagggaaattgaccgccttttttttagacttttgccggtgcattttggcgccgacaaaagtacataatattaaaaaaataaataattaaatagtttttccggtacatgtaagctcgccgacaaaagattgctcgaacaaccaacaattcccaccttttggtggtttggtgcaaacgtttgccggcgcaatttgtgtactttgccggcaatattggctatttccggcgatattaagcgctggtaaaaggttgaggtgggcaaaaattgttgagttcctttgccggtgcatttgttgacgtgcaccggcattagttgacatttgccagcgtaattacctaatagcgccggcaaaaattggcattcttgtagtgactcgtattatttacaaactttgaaaccattctttgtccctttgaataactttcttaggctaacatagagtgattctttatttgacaatgtgcattttctgaattaagcaatctgtaccctaatgtgagtcttcctagattttggaatttcgggctctttataaaacatacacaaggcaagcaatggatgctgcaagaacttggatcttgaatttgctaattttagctcttcctatcctccttatttatcgaggcaatgagacagttgcagcatgccattgcagcaaatcctttaaagccttcaaacattctacagcaacagaacattcaaagaaaagatggcatcttatttctctgtgttggcagtataatacacactgatcctcccctgaaattcccatctgtagcaacctatgtcttgttttgaggctattttgaattgtaatctaggtaaacaattttcagttttggttacttatatcatttatagaattaatagtatttgtagatcattctttaggaatgcttctactcagatgaacaaagttggcaaaatttcttgggataccatttttcttcctaaaagaaaagaggctttgggtttcagaaatattgagtagtggaatattacagctttaatttaaaaaatttattaaaacacaacaatgtcttaaaacacaaatcaaatgtaatagctatttataacatgtaagatataaaaatcagattggtcaaacttaaatatattgacaaactaatatcttaaagcataaactaaaagaaaaattatgtaaattattaaagattcaacaaaaatttattaggggctactatcaagtagtgtgtaagtgcaagaaacaaaaacacaaatattcttatctatactagtaaatttttcacgtgctacgtacgttgtatatgaattatatgttgtattaaattaaatttatttttaaataaattagtaattttaaaagaa

SEQ ID NO: 392129 - DNA, 2257 bp, Cannabis indica
atctacatataccgattgttgtaaggggcaataatctattatttggatttatcatcctagtcatacgagtgactagtgcttgacaacagttactgtcaattcctgcttcagtggcaaccacactcatatttaaaaattcatatactttatgcaacccattgatgtccaataatatttcattcatgtgcctgatgaaaagttataattaataaccgtcgccgtcaaaagaatattatcaagtttattgtaaagaattagaaatcatacttgtatcgaactcctatcgattgggctccaaagtattgcatggtgcacaattcatgaatatcatttttaacaagccaaatagagtcatcttcgaccctaaatagatcataagcaacctagaattagattatggatgacttcggccaccttttgatagagttataaaaggtaatgattgagctagtttttcgtaaattggacacaacgaccatgacctgttggcttacttggcctctcgaggtgttttcgagattgtgttggaggaccgagtaaatcttgagagttttatctgcttctcctcacgggtttcttctaaagttgcttggtaggtggttgtgtctatatatgaaaaaaaataaaattagaaatgtcattaatcaataaacataataagttaaataaacaaattaaaacatactaagtattttccaataggtgtaagatagtcttttggccatgttgcataactttttatatcttgacctactactgtcaatgcatcttcaccaatgggacacggaagcagtgcattctccacattgacttcttcgatgaatacctgacgataatctttgtgtaggtattcatcattgtgaatcgagaactttctatcttttaaatatttttccttcacaatgtgccccgaagtaaccttttgtaccatcccactaggctccaactgacagtgcatcgaacacgataaggtctgcatatcgaaataaaataagccataattcagtttgtaaattgaccatattttaaatttttgcattagatcagttcgtaaaataacatgaagattacctcttttgaactaccactagtaggtggcggtgctgctactagagcagaaccctttctaacacgtgttggtgatggagtagagatattggtagcacctgatggttatgctacaggatttggtggagtatagacattgacaggacccgatggttgtgctactatattggaggcaagctcagcatagccttgttcattcgatgctcctccaatatcgaaactagatgcaacgttgctatgctgggaactaaccagacgaatgagctcatccacttaactttttgttgctttcctatgtctcacatacacgtctctccaaattatatgatgcctagttcaacccatctatgtttttcctttgatgaaaggtttacctagagagaaagtccttaaaacattaaattgcccttagactgatgaatcactcataatggcaacccgaccccatagactgaagatctcgagaaataggttcactgggtaataacaagttatgaattgataaaggtgagatcatgctataattattccaaaagagaagcatgaattcttgaagtgatttaaggttgagttaatagaagctcttaatgtgttctatactccaagtggagtggagtaccgagctacacgagtattattgatagacttacctatgtgaatgtgtgtgaggctacttcctatgaaatttcgagcaaagtttctagagcgttcactataccaagatagatgtccatggccattgaagcacgagcttttggactacaccctagaaaggttatgtgtggtacattgttagagatagagttcaagattacgaatcactctagtatattctaagttgcattcactacgcaatggttcaaatcgaaagatacatttgcctatgctcaatcttattgtttagattactgctcgagaaaatattttttaaaaattttaagtgaagaattgctggaactttagttgaaattttccaaaattattgtatgagaagcgaagtgtgtaagtgcgtggagttccacatgggattggaacacttcattataagtgtacataatgtgcaactttgacacatgggctggggccccaagcagtgccggccctgaaaatatatgggcccaagaagaattaaattttggagccctcaaaaatatataaaaaaaaatattaaaagaagagtgttatggga

SEQ ID NO: 392130 - DNA, 884 bp, Cannabis indica
aaataacatacatggtagtaaatctagatcctagtaaaataattcccaacagagcagctgttaaaaatggtcatagccaagtgattacaggattctctatacccaaactaggagcatcaacgccaatatgctgaaggtcaagccctccttgaaggtttaacttggtgcaagacaaccagtcttcagccgagtctcgttgtatctgattgttatcagctctaaccaaagtcaaaagcaaatggaaagataactctgcttttctagccttgtggagttgatccgtcagtccctatcctatttccctaatgccttcctccagcacatacacaggattgataacaaaggagctcaccaaaatgctagggaagtacttcggtgtgatgaggacttcatctggagagattaattttttctctctttctttgtgttgctgcaacctgtgttcttgtttcttctctttctttgtgtagttgcagcacattaaaaaaaaactgtaatcgactaaaagaaatactttataattttctatacatatacatatatcaaaattcaagtaatttaataaaaaaatttaacaacactatcataaatcctcaataattaatttaggaattctctgatatcacatgttggaatactgtaaatttgaatttatccctaattagttcatgagaatgaaacaataaattaaaaattagcgaaagcgtaccagagtccatagaactaattttgaatcgtatgatcttccaattttgtatcaaaactttctctaaaaccgtagtctcttggtgatggggatacaagagtgaaaagatatgatatgatgcaaaatggggaccaatacctatttattaataactgtaaaaatagtaattaattattta

SEQ ID NO: 392131 - DNA, 523 bp, Cannabis indica
cttcatcattttctctttcacactctttctttagcttctctaaaacatggcatcaactaaaattgtacagtaggatcatcatgtcactctgttatggtaattttttttattttatggaagaaccacacatagttagattttaaaaaattatcaagtatactttaattatataacatctctaaaatatgaaattaaattcataagttgttgttatattaatatagttcaatattcttctttctttttcttccacccacacctaatttatactttcagttttgttgtaccaaatgtgataataaataaaaataagaaaaatatcatatgtttcaaacctttaacccatcttgatgaagccgcccttttttccttttccttttctatttcatctgcccatttttttttatttgtacgtatcagcctattttgtttagcttgcctctccaattagaattcatttggtcaatggcttatccatcaataatcttggttgagtattcaccaatctaacccatcttcttgc

SEQ ID NO: 392132 - DNA, 1844 bp, Cannabis indica
ctctattttatctttttttttttcaggagctgtgctatagcaacatactatttttttttcgctcttttactgcttcaactttgcttagaaaattatgcgtaactttcacgtctagactccaaatgagatgatttaacatgtttacaaagaaagagaacgatactctatcaattttgaaatttcataagctacttcgagaaaatagaaaaaaaaaaatagtcaaaaattggactcaagatctcaatccatcataaattatctttaagcacaaatcttcaaacttagagaaacccatcaaatctatacaaaataattactaatccatctaataaagactatgaatgagtgaacaaatgtaaaatcatcaattttcataaatactatttttctagacgttgactatatagatgaaatctcaaaaaaagtaacaaagaagtgaagatactactcaatttcactccaaaagtgttccatcatcttctacaacttgtaaaggatgatcttactgcctctggtgaactaactcaagttgtgacaactaatgaggactataccactgaagttcctagacacataatcacgataccaaataatagtgggtgggtttctaggaacccaccctgttatgacttggattacactagtgatgacaattcattgattagtccaaacaagcaatggatagtcctaataaggaactaacactcgaagcctagagaactatgccttagccagttacatggagcaacctagagtttttcagaatacaaggataagatgggaaatcatgctcaatttattaaatggactgtgataagaggcccccttcagataccaaaggcttaaaatttatgagtcgggtatcgggcaccagacgcaccacatccggaataagataatggtatgtatgaagaaaaacaaaagaagaaaaatggtttttagcaaaaaaaaaatcatattttcaaaattcccaataaaaagaggggggaaagtgatcaaagacaaaatatgaaggaagatcccttcgccttgaatacattcatgtggccaagaaatttcacaaaaaaaatattgtacagccagaagacaatcacagaagaatgtgaatacttacaaatttgaggtcaaagtgaggtggatggtatttgaaagcaacgatagtagtattgtgcttggcaacatcagaggaaaagtaagaggaagtctggttggcttgaaagtttttccagtttaggactctgaagagaatggataaaaagtaaagtgtgaaagatgagaaggcaagccatatttatagccttcaactcacaatcttggcctttttgtgattctacggttcccttcaaattccaagaaacacacaataatctaacggttagggagaagcataaacaaacacatttttggagtactcgagtatctgactaacactctacatttatggcttatttggggatttaatatcaggaaagcaaattggcatcaccaatattgaggagcaaaaagcacgttgacgcgcaagtttttcactgtaggacgcatggcacattcatacaaacaggcgtgatgccacattaaaaaccctccaggagggtactaaagagtcagtataattgcaagttccaactcacaaaattgtgacctaagacttgagggatgaatgttattcgtgtttttttttttcccaaaatacgtagcaagtgaagaataagccacaagtctaaaggacccatataagcatgtgggagatcaatattaacatagtaagtgtttagcattaccaaatgaatttcagattaacacatgtcaaataaaatgccgaataatcaattcaatttacattt

SEQ ID NO: 392133 - DNA, 556 bp, Cannabis indica
tttataggcacacatggggtaaatggcaataccctttacccacctagggtttcatactccatacgcaactaaggtcagtacttcaaaaggacgatctgaccgttggttggcgaaaatcttcttcatcgctgcttgtgaggacttttgtacaatcctggacacgcgtcgcgaaaaaggtctcttctttgtgaaataccctctaactaggttgttgggcaaaaagtatatttgaaggtgcgtacacgtactaccatgatctgacacgggagacaaaatctgatactgtgtcagaaaaaggtgtaaccgtatatggagtgatatttacaagatgctgatgtggccaacgtctctaaaaccttcatcgccttccgggttctttactaaagaaagttactctcggatgccatcgcctctcgttgccttctaggtccgggagacgttccttttcttggttacctcaaataatttttgttgtagctgtatcctttcctctgatcatgccaggtatcttacagatgaaaacttagataacaatatgtttagagcaatgaataat

SEQ ID NO: 392134 - DNA, 732 bp, Cannabis indica
aagctacctcccaaggttctgaacttactgtggcgagctattgcaggtacactcccaacttgtgtcaacctcgtcacgaaacatgtaccaatctcctcgcaatgtccggtttgccaagctactgcagaaacaacaacacatgcacttctcacttgtgattttgcccgatcttgctgggcagtttttggttggcctattgcgattgatttctccatttcttttggccactggttcgaactgctgcagaacacagatgacaaagattttatttgtcgtgctgcaactttctgttgggctttgtggaaggctcgaaacaagttgtctggaataaacgcacttcaactgttaaagaagttatggctacgtcttcaattactcttgatcactggaggaaagctcaagataaaagtgctcttttatcactatcgtttgataatagtgatgatggggttgagctatggacaccacctgcaactaataacctcaagattgatgtagatgcgacactcttcccaaatgacaactcatatggctacggcctagtggtgagagatcactttggtaagttccttaaggccaaaactagccaattcaatggtagctatccggctaaagttgttgaagcattgaggataaaggaagctcttagctggataaaaggaaaaaattgggaaaacatggaacttacagtcttttatctgtgcaagcaataagaagtaaccaaaagatgtc

SEQ ID NO: 392135 - DNA, 629 bp, Cannabis indica
ggtttgtttattttttatactatttatttagttttttttttttacaaaaaaattaaatttttttttattgtttagattgaaatataatttggtgtattcaattctttaaaaagtaaaagtttcttttgttctattttaaatcgaatacaaaatttaatttccataatatacattaaaatttatttataattttcttttaaaataaatttaattttcatatggaaaaattcattttcaaaactaataaaattatagactttttttttaaaaataaattataaattatttatttaaattattttttcggcatgggcaaccccactatgtatataaatatacataactgtcggtggaataattgctcacatgcctaaattacatttagttagagacaaaaaaaaaaattagatggatcactgtatggcttaaagagaaacataaaatataaattgttatgcgatcttatccttgtactatcctcgttcccttgtttccacatcttaatataatacacacatttcaaattttgagatattttgatattccaaaccaattatggcctttgttgatgagtaaaaaaaaaggaaatagaaaagattgtgtaaataaataaaataatgacagtagaa

SEQ ID NO: 392136 - DNA, 1436 bp, Cannabis indica
gcatataaaataaagcttaatataatcacgtgattacaaaaatagtggtcggtattacttggcttgaaatgagaaagaaaaaaaaattaagataatatctaattctttataaggtagttgtgttgatcttttaactttttaatttttatatctgttaataaattatgttgtaggctgtagttttgttaactacttacattatattaattattaaaatctaataataaatgatttgcaacttgaaaaatgaaaactggccactttaatattattagtattgttttttttaaaagtatattattagtattgttaaaatgtaatatatagatttatttttcttgttctttaacatttttttaacttttgggtttcagtctgattagaggggcgatgccacaaacaagtaataaaaaaaagaatcacatatataaaaaagaatatatgaaaagaatatataacatattttgggtggggggcaaggccactctaggcttgtatgtgagtacaatattcatagcttaacatatttaaagtgggcccctttatcttttttatgaatggactatataatcagttttgtgtttggctaacataggaaaagataatagttttgttaattcaagggagtaagcttagcacccttgttttgactctttttttggttggaagcataaaagtcacttcacttcacttcaagtttttttctaagtgatgaagaaaatgagaagagtcactcagacgaccaacaattttttattaccaaattttgtgtgacatacctattttgatattggatatgtataaatggatgggacctgaatctgtcaatacagtaatatgtaatgtatgtgttgatcgaaggtgcatgtaataaacttaagaagtacttgcttcttacatgtcattatttccttaacaacaattttattacctgaaaacttaaagccaatataatataattaagaaccaaattaaaccagagtgaccaattttgaatcgccacttgtgtatattgttcggactacccagatgaagtagtagggtcaggtggggttggggaattcgtattcggagtgagagagctttctcctcttctctcctctgtcgacgttgggattattctttgaggctgtaagactctgaagaatccctttttagtatttttttctcgccttgggataaatcgagaattcaggttcaattggtggttttccatttttcaaaacacacggaatggaagtggaattagagacgggaatcataattagagatcaaacttggaaattcagaagaagaaagaaatgacttttctttctaaaaaaagaaaagaaatgaatttgggtgtgattagagacaggggtgtttattggatcacatttaatatttttaggcctatccagattcgatccaatcatatattggattttagattttat

SEQ ID NO: 392137 - DNA, 1647 bp, Cannabis indica
aaaaccagaatcaaacaaataaaaaaaatcaatttttaaagaaagaaaggttagaaagaaaaaaacctgtaaaagccatatggatctccttgcatattaatttttatccaactttcaatacacgagacataattttcatataaaagaaaaatacaagatataatttagtaataaataaatggtatcaaactcaaaagctcacatggagaaatttcctaaaccaagaaaaaccaccacaaaaccatctcaatctccattggcaaacccacccatttcataacccatcagcatcaaccccacacattggcccagttccaaaaacaaaatcataaaccaaccccatatctcttgtaaacgcatatcaaaatatcttctccgtgacttaaggattataaattttaattttaaaagctgtatactatattgatcatgagacccaactaatgaaaataatcattaaaagatagaaaaaagtcaaaaaaaaaaaattgctaaaatcagaaaaaaatcaaaactttaagtatggatcttaataaaacatgttaaggaacatagttagttatggttgttaagattggttattttctgttagttagtttctgagctgtcataacaaactcctttacttgttttgctactgtaattgtgtatataaactcatctcttgtaatcagttcattttaatggttgaataacagaattcctttcttgagtttctttctctctttctctgttattttaccttgtcatggtattagagctttttctttcttcttcttcgtcttcaacacagctgcacaaaaatgcgtttttgaaacagtttcaatctttattggattaaagaaatttgaagaaaacaaatggggactcaaacaaatttcaaaaaaatcaacaattattaaaaatagaaattacaaaaagattaaaaatagtaaaaaatcaaaaatttattgacaaaaaataaaaaacttgaaccttacatatttaatatgagattaaaaaaaactaacaattgtaaaaaatgaaaaaaaaaaactagaagtaaatctttctaataatttagcatggcggaacatttttcaaaattaaaaattcttgaataaaattaaataaatgagttcgataatgttaaaattgttaatatatataaaaattaatattaactataataataataatcaattaacgcagtaaaatgaaaaatcagaaaaaaaatggaaaacttatcaataaattaaagattttgaaatgtgattgttgaatgcatgtgattgtgtctccgataatgatcaccattggcaccattttttccgactctagagtgtcccctcctaacgccaaaaacagagtacgactcgacaactgcaatagtagttcttcaaagttgtgtctcctccctaactacaatacaacaatgatcttaatgtgagaaaatgctacatgaagaatctgagagataaagagaaatttgagaatatatatatcatatatccaagtgggcgtctatgaagtagaaattgctttgctacatgttatgacatttcttgcaatatagttagacatatatgtaataactagtaaaaagcttgcaccgatactaaattttaatttgctttttattttatttaaaagtgatacatttaaaaa

SEQ ID NO: 392138 - DNA, 1745 bp, Cannabis indica
tttgtttccactgtgaaattgtttccatttttatgtaatataatgttaaatgcttgttgtttttatttcgcaacaaactataatttccattttgaggttaaattgtttcaattttcaatgttagttgtttctattatatatataaaaggttaaatgctactaactcatgaaaacatatttaatagagatttacaacctcattactactgaatacaagtaaaccaacaaatcaatcaaaatttatgtttgtaaagcaacacattaatccatatctatgtttgtaaaccaacaaatcaatccaaatctatttttataaaccaacaaataaactgtatgttgtagtgactttaacagccaaactaaatcgttcataactttgcttaatcaagcaataatcaattttggctagttttgcaagtttctacaagtctttttgttacgtcctggttgattgcattttcgcatttgatttgcttttttcacttttttgtttttcactcatatgttgtttccattttcagtgctaggtgttttcattttttgaagttaaattgtttccattttcaacgtgagttattatttttttatgatatttattttcattttacatatatatatatatatgaagtcgaatgcaagttgtttccatttcgagcttttgttgtttctatttttaatgtgagttgtttctattttgagcttatgttgttttcattttcaatttgagttgcttccattttcaatttgagttgttttcattttcaatgtgagttgtttctatttttttatgatatttcttttcatttcaaactaaagttttcatttcaaagttaaattgttttcattttcaatgctatatatttccattttcaatgctatatgtctctatttcacacatacacacatatatatatgtgtgtatatgagtaaaaatgctacttgtttccaattcgaagttatgtttcaatgtgggttgtttttattttttaaggttaaattgtttctattttgagcttatgttctttccatttttaatgtgttgtttttgttttttatgatattttttccaattgaaactatagttttcattttgaggtacaattgtttctatttcaacattatgttgttttcattttcaatttgtgttgtttctattttcaatctgagttgtttccattttttatgatattttttctatttcaaactaaaatttctatttcaaggttaaatcgtttccatttccaatgctatatgttttaatgtgagtttctatttttcgaggttaaattgtttctattttgagcttatgttctttctattttcaatgtgtgttgtttttgttttttatgatattttttctaattcaaactatagtttacattttgaagttaaattgttttcatttttattttgagttgtttccactttcaatttgagttttttccattttcaatgtgagttgtttctattttttatgatattttttccatttcaaactaaaattttcatttcaaggttaaattgtttccatttcgaatgctatatgtttctattttcaatgctatatgtttctatttcacacacacacatatatatatatttatatatgagtaaaaatgctacttgtttccaattcgatgttatgtttcaatgtgcgctgtttctattttttgaggttaaattgtttctattttgagattatgttctttctattttcaatgtgttgtttttattttttatgatat

SEQ ID NO: 392139 - DNA, 1138 bp, Cannabis indica
ggtttataagagacctatcaatcgaatgggccttactttcatcatgtgtttcacaactggagtggactggaatctggattgtaccatatttgtataaatatagtaatttttaaaatataaagtatgggcctgaacctgatcagattcagtgcactcttcaataaccattttagtccaccatactagtcccactcttccaatccaatcattctttcctctgctgtcaattgaatcagacatgatgccactatgttgtgacttgtggggtcccttaatgtcttgaaatttttccatatatgtcattataatttattattgtatggtaagaacaaaggtttcttatcaactcatagaattcgtttgtccacagaataacacattcacattggtcataaattaagtttgagattagttctataacaaattatcttcttctcgtgcttgttttagttggtttatctgatttgtagcagctagtctcaaccagaagaagaattacccagtggtgaattttggtcaagttggtcaattcaataaatcatcccaaattccaattaaaagaagctttgccactctaattttttagaaaattcttcatccaaatttaattttctttataaaatagcacagtcacagaatctgttttacctttcttttttgcactgcaacaagattttgattttttgtccatatctttatcagtcaccaccgcaaagcaaacagtaaattcacaagcttttttcctattttaaagtgagcacagtacttcaaaattaaaaactaatactacttaatatcctcgtatgtcttatgggtattacgtggagtttttttttctttccgaaaaatgccttaattctaattttggtgctatttgagttaaatttgatctgaaatattggcacagcttttgtatttgtgtttaaataaattagctataaaattaatactactattaatgctaattgaaaaatatataaaatatataattttatttatattattttattgggaaaaaaacagaaaaatacaaaaaaggaaaaaaaattacaaaaatactatgggccggcccattaaacatttaaacagtccacatacaaatatttacacaaataccacatgcactaagccttcagct

SEQ ID NO: 392140 - DNA, 904 bp, Cannabis indica
ttttcttttaattttttacatttttatcagatttatttcccatatgttagtttttatactatatatttcttgatatttatgagtgtatagtagtaaccaatttttttcttttaattggtaatataagtgtattttatttgagttgtttttttgatggttttttatttagttattttaggaatcgatttaatctagttaattcaaagaatcggtttttgatttagttatttcatataactagttcttgtatgttgatttttaatttagttattttacataacaaatttctttgtgtcatatttttaattagctaatatgcgtaattaatttctgtgattttatttcaatcatttggttttttaatttcagttatcttttcattattttcatgtcttatatttatattttaattttttagtttattgtattaggtaactggtttctatgtttagctattggcttttttaagaaagttggttttaagttttatattttgattttttttttttttaagataattggtttttggttttgtttatgtttttattttagttttttaggaaaccaatttctctgtcttagatttttaattaattgataaatgtaaccattttctttgtgtcattttccaatgtttaattctaatatcaaactgcaaagatgaagacaactctgacgaattttctggcagcgatgacttttccaacaacgatgataatttttcggtgactttttggacaatgacaaattttgatagcttttcaagccacgatgactactcttgcgactttttcaggaacttacaaaaatactggaatttaagttaacttttacaaaatactgccacactaaaaagttttcaaaaatactgtgtttttataaaacaccagtaaaacacaaaaca

SEQ ID NO: 392141 - DNA, 664 bp, Cannabis indica
ttgcttagccaaagagcttggttaaaaagtggaaatttgtgaaatccaagcccatccatcgtcttaggctggcataatatttctcatttcatccaaagaacctttttttatcaccatatgaacgccaccagaattctcttacaatagactttaattttttacaagttgtcactgggagcttaaagacactcatcatatacattggaatatcttgaagaatagatttgataagcacttctctcccaccagctgaaaagaaatttcgcttccatccccgaacacgcttcctaactttctcacaaatcccctacaaatgcccattttttatttctaccaatcaccgtgggcaagcccaggtacttgtcatgagtagccactgatgtcaaccccaatactctcagaatcacatctcaatccacttgttgcacattctgattaaaagtgatagccgacctctcaaagttaatcttctgactagatgcaatcgcataaataatgtatcctaaaataattgataaagacaaaaggaacacaccaatttgaggacagtaattttttttttccagatatatattgctattatttaattattaatttaaataataataataattaaatctaattcaattcaattatatttttaaaatatataaaatttaatcta

SEQ ID NO: 392142 - DNA, 712 bp, Cannabis indica
atatatatatatattgatttgtactatcaacctcgcagtcaatctctattacaactaattatggcgaaacgcccaataattaatcttttttacaaagtaatagatccacgaagcatgcaatctatttaacttaagaaaagtattaacttcgatgaagacatgttaatataagcaacaaattaattcaacatataattcgtttaattaagttatattcttcgtgacaattaatgagatccatcacaatatactcttaaaagtaatttatcacttaaacctagaatcctagactattaagtgaatagagattttcaagaatgacaatagaataatgtaaaacctaatatagccactacaagagtcatgagcatgaatgaggaaaattttgaaatgtccctttttcgttagtaatgcctatcaatggcgacatttcgttggtaaaaaatcatcagaaaaagttcgtcgaaataaagaattatcaaaaacgacattttaagtcgttggtaatattaaatatcaatgaccacattgtcgtcattgataatactatattttttattgtttttaattatccgttcccatctacgacgacaatgtcgtcattaattatgttatcaatgacgatattctcgtcattcttaatgttgttttttaaaaataaaataaatttattttgtttttatttttaaaattatattaaatatttatattt

SEQ ID NO: 392143 - DNA, 729 bp, Cannabis indica
ttattattattattatggttaatgaacaaaaaaaaggttaattaagtaagaagagggtgtggaagcgattgcaatggttttttttaaaaaaagggttgggaaacaaaagcagcagtacaagcacagaggcatgattatacacgtgtcgaaaagtgatcaatactgtctcaatccatgtgagccttccaggtttcactttttcaagcatacaggatattcattaatatataaaaccatttaatataaatccattcttgcctatttcttttgttatagagtatagtattttttaaaggtgttggtttgtaattggttagtaatatgttttaaaaattaatatattaaattatatagttgaacaaaatatttacatatagaaaaatgctaatttctctttttattaatatatagtaactgcaatttaaataaacagacaacattaaaaaaataccagtcgaaataattagcacacagttgaacaaatattgtttaaaattttaaatctacatgtacccttagcaagaacatgtgtaagtatataatgtacactgttttgaaattaataggacctcttaactagttatcattcaacttaaagagtgtgtgtgtgtgtgtgaatatatgaaaattccttcaagtggtgatattgggcagtacttaaaaatacgtatgaaaatattatacatatatattaataagattgttttttctaatgggaaatttgaaatt

SEQ ID NO: 392144 - DNA, 349 bp, Cannabis indica
atctaatcttatccagtccagtcaattcaatctaattcagtccaatcctgcgtaccaaacaaaacaggcctattagtattaattttaataaaacatattttttagggagaaaattaggtattaaaacatattcttatacattatttattgtataaagctttgaatcatatataaaaatggtatacatttgaatatctcaccctatataataaaacaatggtatgatagaagtttataaatgttttctaaattattcttttgtgatgggtcttgaatcattcatgtctatatgaagagctatcttcaaagagattgcaagagtgattacaaatgtaaagaccgcttagtt

SEQ ID NO: 392145 - DNA, 2969 bp, Cannabis indica
taccagatgagtttccaacgcttggaaagaacgcatgttcgaactacatcttgagttgggagaaacgataggatgtcattgattattgaatcgggaagattcgaaattctgtcatcaccacccaccattattgatgatgatgatgatgatgatgatgccatttggattgtgaactgtgtaacgtaacgtaaaaaaccaaatttaagataatactatagtaagtagttgagtatataatatattatatatagaaagaagtaaaagtaagtagacaagttatttatagatgcttacatgaatgaagatgatgatgatgattaaatatcttcaaagaaatgagatttaagggttccaatttacttttctttttttgttgttgggcacttctccatttcttaacaataaataacaagaatgaggttattattgtaattttagtcatacttttttgggagagttttgtttgcccagatgataataagtacactctgaaattaatttttttttctcacattattgtaaaccctatactttctttttactttttttctcacattattctttgttagttttaatacttatcttaattttttttctttaaatcatgtatattttttttctctaatagaattttatattttaatttttttgctaaggatattttttaagaatataaatttgaaaaaaaatataaaaaataatgtaattaaagaataaagatatgtattttatgtaaaattaaaattattgcaaaaaaatctatttataagtttttaagtgcaaataaaattaccacccccttttctttttaaaggttgccatacttaattttacatcaattaactataaactgaaagtttagaaaaattctataatgcacgtaccgatgtatttttatcaatttcggtattagagaaattttttttattctaatttttttcatatagtaatttttgctgtagttatttaataaattcgcaaaattttaagtaatttggtaacatttaatgcaccgaaaataaggtttaaaaaatttattgtatgtgtaatttttttatatgcgtgtgaatagactatttgaaaaatattttctatattgaaaattattttgaatttttaaaattttgcaggatgttttaaattactgtaacaaacacgagtatgaaaaattgaactaaatttaattacggatgtcaaaatagataaggaatacatcagtgcatttcttttaggggtgcattgtagaagcgctcgaaagtttattaaaaaaaaattatagaaaaattctataatatagtctctaaaataggcgcactgatgcacccctatctgttttagcatccaacatccagcatctaggaactcctttttagttcaatttttttttcatagttttgtactttgtagttatttaagatatcctacaaaattttaaaaaaatttgaaaaatttatacaaagggttcaaataatttgttacatgtgtgtctctttaattttatccgtgtgtgaaatagattttttgaacattgttttgtatattgtaaattattctaaattttttaaaattttaaaaaatattttaaataactataacgtacgtgatcatacaaaaaaattaaactaataaatttttcaatataacaaaacagtagaagatgcatcgaatatatatacagatgacaagagtgatcaagaagaacttactgaaatgtttaaaataaaatattgagactgtcaaaagctaattttcttatttgaggttttcttaaaaaataatctactgtattgaggtcattgaacaacaattgttagttgttgttgttcttctttttctaatttatattgttgttccaactcaatatatgtttttggagcttgactcagtgatacactcatccttaattgaggtgtatatattatactcatattttgcaatataagaacatattattaataagagacattattatatctgtaaaagacagagagattagtgtacctcaatactagtgaatgagaagttcagatcaaaacaaggtggaattagttactttgaccacttagaagtcaactccaaatcctaactactttaactaaatatcgcggccaactcagcattttcagttaaaatctgttacaaatctttacttggttttagtttcaagctatgatgaagagagattcaagttcaccaattgtaaagttattgatttagaacctaattccaatcaagggaatgaaaatgaaaacataaaatgcaaaacagaacagcctttgacttcaaactttattgattcacacttggtgttacaatggtgataatcaccaacagctatgaactcacaagagaatcgagttctatagcttttatttctgtacagagaaaatttcggagaggaggagaatttggtatttaaaggcattgtccaaaaatattggaaagacagaattgtacccaactaattaacttaactgccgagattgaagctttaaggaatttacttgttgtaacaccacaacaagtatctcatggtggttgattgaacctcgtaattcttagtgtgtttgttccaataattgttcataattattctttagtttttcagctatttaatcttttttatgtgttcttgatgaggtgttaattcaccacaaaatatacaattgattgcatatataagagacaatattgtatctgtgtttttctacgagaaccaatgtataatgaatgaatgtacatacaaaaagacaagacagagaaattagaacataataaataaatcatcaacaaaaatctcaagttcacttcatattcattttgttttaaggtcattttattgtaataattaataatgagtgttgagaatcatggggttccaactcaaaactaattggcaatgagtggagtagcccatgtttcttatatatggctcaatactttcatatttaatccatgtgaaacaatat

SEQ ID NO: 392146 - DNA, 1040 bp, Cannabis indica
agggcatgatagataacctggggctcgatcctaatcatgtctacatgcgactaggcaaaaatatcgtgatttctcttaaggcaagccataagcatctcgcttaagacctccatcaagtttgttccaatcttgacaaccttggtcgggtctgctgtgttgaggggaagttctttgagttccttggtcagacaaactcccgagtcgatttccccgaaatgggggtcaatgtcaaccccatctagggtgcaccttcaagtagttttaggtgttatctctttcttttcaatagtttgaactctaaaggtcttcatcgtccctacaacttttgcgggagaggtcttgtttgtcccccctagtggtgccatagcagtagaggaggtcttgatcatcccctctaaagtcgtagcaacagaaggtcttcttggcaagtgataacaaagtgttatgcactcatgggaagttccttgattgccatggagacataatatcagctgtcagtaggaacttgacggacgaatggtagattgatgagatggctcgaaagtcatatagggctagccttccaagcatcatgttgtacgaagacttcacatccaccactatgaatgtggccatgatggtggtctactttaaggtagtgctgatagtgagtggtagtttgatcttgccacacggagcaatgtcacctccattgaaaccatgcattagttgttcacatggttctaggtcatctaaggtcaaacccattctgattagggcttgctggaacaggatgttggaggatgatccattgtcaatcatcactcttgccaccatcatatttgctatttgcacctcaacaaccagaggatcgttgtgagggtaggtaacatgataggagtccaattctccaaatgtgatatgatcacacccgtagcattgagactttggaagacattcatctacctctagcactttggctcttagttcatgtcatattgatcttgcatacctttctaaggccttccttgaagttccagctaggtgagggcctccaatca

SEQ ID NO: 392147 - DNA, 1660 bp, Cannabis indica
cacgtttgttttgttgtgttgtagtactcattgaaacctatttctgggcaccatggttgtctattgtgataataataaattaataataagatgttttcttaaaagaataaaaaggaaatagatttgttgaaattattggaaagagggtacacatgcatatcattcttaaggaacccatgaaatgtaaggctggatcatgagctgctcttgtcgcacatgcagccacacacaacacagccatgttgtgacttgtgacttgtgacaatcaaatgtactattaacaatacaaaatcatacataatgaactctttattacatatatatggacaaaaagaagtatgagagatagagaggtatacttatacaattttattcaattttatcatgtaatgataaaattattttttaaaaaccaatgttacaacacgttttttttcaaaaaaaattgatacaacaataataataattaaaaaatattttttttactgcaacatgtttgtgtaacttatttaatggctaaagcactagtcatcgattacatatagtgataaaatagtttttacaatttcttatacttatgtgaactaggaatgttattttatacactctgtaatatttggatgcatatttgaagtataatcaaaataaaatactctattaacaacctactcataatacttacataataatcttattttatactctatgtaatattttgatgcatattttattagatatcttgggataaactgtgtaagcataagagagggggtgttatgggttttcaaaaccttcatgattttaatcttgccgttcttggtaagcagggatggcgtcttctaacaaggttgaattctttagcctctagagtgttcaaaactagatattttctaaatggtaactttctttcggctcagcttggatctactataagttttgtgtggcacaacatttgggaatctcaagagtatgtgtcgaaaggtgtgtgttggtgtcttagtaatgaaaggaatgttcctgtgttagggaaaccatggcagcccaatagttcaaatcctatggccatctctaatagagaggccactatgtttaacttgctcaaaatggatggttctagatgggaggtggacttgattccaaacttgtttgaggaaagattccagcgactcattcttggtatcccgttacaagtggctgaggttgaggatgttggaatttatatcctaaaagttagtaattaatagataatatattataaaatatatgaaatacaattataaaataaataaatacattaattatagaagtataattaataaatatctaaaaattctttatttatatggatataatcttgtaagatcgtacaagagaattaagattatacaaaataaataaaataagtcggtagtgtattaaagtaagaaatctttaatatagaattatcaagtacggtttactgtacactatactctagtgtgtctgattttaattcgaatcacatatatatgggatagacatgtagcaaaggtgttgtatataatttgattatacatgactgaaccgatataaattaacatctttcattaacatgtcgtttaccatgaaagagttattcatatcacaaaaatgatcattagtagataagtctgaatcctga

SEQ ID NO: 392148 - DNA, 579 bp, Cannabis indica
caaaacacataacctacgattattgccttctttaagcctttcaataatcagaggaatcttgttgaatgtccacggtgtaccttccagggccctactaatatccacttcatgaaaaaactgaaacaagtatttgttggtctctaactccttaacatacattccttttcttggacgccatcacatttcagattgaatcaaaatctgcaggtttattcggcaatagtctacccactaagcaccatcagcatcaaaatcatcagtctatccttcctcgtcaacattcaaattatccacctgttactcaaatcctccatcatatgactgctaaaagccattgcaccaatcactcgacactgaacttaccacgcaacaaactcaaactttacataacatacatgtcaaaagacaagaccctaatagaaagtttttaataatcttattgttttaccttaagctctattactctcaaaattgactgatgtttaaataaaataaaaagtacatatcacattcattaccagttttctagtctaatattgtgacatgagaaaattttttttcaagtctaatattattaga

SEQ ID NO: 392149 - DNA, 620 bp, Cannabis indica
atccaaatattgaaaggtttactgaagaaatatgagagctttcataacgttgagtattcggaaaaggctattactgctgctgctcatttgtcaaaccagtacatcaggtacttgttttcattgaagtttagtgatatttttatgttttgttttgttttgtcgtttttgtggtttcatttcaaatatttgcattcaggggtcgatttctccctgataaagcaatagacttgattgaccaagctggttcccgagctcaacttcacaaaacagaagtaactaccaacggtcaagtgatggttacagaggcagatattcaacacttgatttcatcctggacaggaattccattggagaatctatcaccctcagaatcaaacaagttgctcaacatggagaaaacactacacaaacgaattataggacaggatgaagctgttgaagccattagccgtgccattcgtcgagctcgagctggaataagagaccccagccggccaatggcaagcttcttattcacaggtccaaccggggttggcaaaactgagttggccaatgcattggctgttgagtattttggctccaaagagtccattataaggcttgacatgagtgagtacatg

SEQ ID NO: 392150 - DNA, 747 bp, Cannabis indica
caactcggagccagtacaagagttcccactagaaaaaaatgaagaccgacctacttggaaatttcacgtggacggattggctacaaaccggcaatctggtgtaggaatttcccttgtcacacctgggggaaccacctgcacgaagcaatcaaatttggattcaaggcctccaacaatgaagcagaatatgaagcctcatagctggactaaaacttgcttgggaaatgcacggcaagtacattaaggtctgtagtgatttacagttggtagtgaatcatgttttgagagagtaagcagctcgaagagagaaaatgattgcctacctaagaaagatacaagacctgctcctacaatttaagggttacacccccaggaagatttcaagagaagaaattgctactgctgatgccctagcacgactttcgagcagcacagtaacggataaggccaacgaataagacctgctcctatcctgttcctcgaagagcctagcatcactggcacgaaagagatcgaagtgattgacacttccccaaactggattacaccgatagtcgcctacctcaacataggggaactcctagataatcgaaatgaagctcaaaagatgagaaggaaggcagcacagtatatcattatagagggaattatgtacagacgaggattctccatgtcgttgctcagatgtgttacacaagaagaagctgcacaacttctatctaaagtgcatgatggattctgtggaaa

SEQ ID NO: 392151 - DNA, 675 bp, Cannabis indica
tttaagaatataaattggaagaagaaaactaaaaaaacttagtacaattaaaggtataaattttatataaagctcattatccaaaagcgtcccaactttatctttctttgtgaaacattatgtcgtaagtatgtgattgatcgattaaaagtggttgtgggttttgaggcatgatatctattgatgctagaggtcattgtggtggcattgctctgttgtggagattcaatgatgaagtggaattgcttgggatctctgtcaattatatcgacttaaaagtaacaatggttcgagaagaaccttggagattaatcagactttatggtgaaccgaatagaagccttcatgcaaaaacttgggaccaaattcgtactcttcactctgcatcaatattgccgtggtgtatcattagggatttgaataatgtcttgtctaatgctgataaaaaaatgtggtaaccattacccccattggcttattcatggatttcaaaaggtgctggatgagtgtcatctccaagatttagctctataggggtacccatttacttgggaaaggggctgtggatctaatgaatggattaaggttcgtctagacagggctttggttaatcaaacttggttttagaggttcgtttttgcccagctttttaatctcgaaattattgtttctaat

SEQ ID NO: 392152 - DNA, 1188 bp, Cannabis indica
gtcttctttcctctctccctaatgtatctatttctcatgttaagcgtaatgctaacatggttgcccatgggttagctagatatgctttagggttggaagaagcttgcttttggttggataatattccaccaccgatttactctgttattgtaaacgaattatcttttgatttatgataatatagtatttctcctaaaaaaaaaaatcttatttttatgtttgacaaaaaaattattattaattacttagaaaataaaattatctaagagtgataatatatattgtatttacgcttttatgaagttatgagaattaataaagagagttatatagattttttaataaatttgaggatgactctgacgaaaaccaataaactgaagatttagaagctttttactaaaaaggatagaaaagccctataatatcggtatcgtttctattttgggcattgttctttttttctttttcttttttttttttttttttttagagagaaagctattgtcttttttcatcatgtattttttagcaaatgtgtatgtgggtgtcatatcacttttgtgacctttttcttccagtggtacttgatacaaatcataggccaattaaattaaaaaaaataatgctacttatatctctcctgactatctaattttagtttcactgttttatttatttattttcgttcaagtactaagagttaaaactaacaccatcaaattgatcaattaattattttattttttagtaatcataaacatatagcctagtaattctatatatatttctctttacaaaaagaggtccaagtttgatttccctcccaaagtaaaaaaaaaaaatttgaaaaaaaaatagttttaaacatttaaatttaattaatttattaaaatataacttaaataattattttaaaacatcaataaaattaaataattattttttaatataaattttaattagaagttagaagttgatttaattaattaatcatactttataataaatttattaatttcattgtttaaaatatttagatttatttacttattttattatttaattaaattagttagatgtaattgtataaggtttaataattttttttattattattatttaaattaataatttatctatcttattttattttattttttttaaaaaaatggtaactttattaat

SEQ ID NO: 392153 - DNA, 793 bp, Cannabis indica
  modified_base (747)..(747): a, c, t, g, unknown or other
tagtatagtatacacatacatatctccaatctaatagataaaaaatatataaaaaaattatatttatattttaatttttactttcattgtaacacatatacatataatttatactgaaatcttatataaaaatacattatttatttaatgttacattgtattaaattttttttaaaaaactggccgagtttgcgggcagatataggtccaacatgaacccatggattataaattcaagaaatgaagataaaaattaaaatatatgaacatcatatatttttatttatggttttgtagttaaatctgcatagtccacaagttaatattaatttagtcgtgtttacaatttaggagagtttctgtaaatcaaaattgcctatcttcttccctttgtgtgaacctttatttgtaggaatatgatggtagttactcaatcatatcttagtgagaagttacaagtagtggatttaatgttcatattttacgcacaattcaaaatttaaataagtacaaataattgtttatatttaaaatacgaagtggtttttgacttggtaagaccatatttttgcaaccagatgcatgggggaccgggagtgagtatatgtactatgactagaggcaggaccggccctgacttttagtgggccatagaaaaaaaaaattattttggacccttatatagaaaaaaatatggtatttttcaaaatcagtaaaaaaaaaaatagtataattttaaaggtaaanatttttttttggcccctgggataggtgggccctaggcacaggccta

SEQ ID NO: 392154 - DNA, 839 bp, Cannabis indica
atgggaatggcccctgcaagtgaccaaagtttctacttgggactgccttgcattttgggtagaagcaaaaaggcaattcaaaatttccttcaagaaaaaatggaaaaaagaatactcagttgggagggcagatatctttcaaaagcgggtcgagaaatactccttaaaacggttgctcaagctattccgtcatatgctatgtcagtctttctccttcccattgaaacttgtacgttacttgaaaggttaatgtctaagtattggtgggggaattcttcacaacaatctcgaggaattacatggatgaaatggaaccgcttaagtcgacataaaagtagtgggggccttggctttcgaaaccttagagattacaatatttcaatacttggaaaacaagcatggcgattattgcaagaagatgactctctggtaagccgtgtgtacaaagcacgatattttcctcatggttcaatgttgaatgcaactcttggagccaacccgagctacatatggaggagcattcatgaaactcagtccctgattcttactggtgcacatatcagaaatggcgtaggggaagtggctgtccttggatcaccttggctggcagatgaggttaatccgtatgtaacttctacacatcctgctcttgagcattgcagagttaggcaactaatgaacccgaatggtgcaagttggcatggggaattgatagcagatctctttaacaacagagatgcggctataattttgaacactccaataaactcgaacagaggtgataactactactggaagcatgaaaactcaggagtttacacagtaaaaagtgcatacaa

SEQ ID NO: 392155 - DNA, 578 bp, Cannabis indica
ggatttccatctcttctttgtcatgtagaacgaactaaagatttaataggttataaagtggctcgcatagcaccgtcaattacacacctattttttgttgatgacagtttactcttctgtcgggcctcgcaacgatcttgtcaagcaattaaaaatatttttaatctatattcaaatgcatctggtcaggtacattcattaaaaattatattttatgtgatagatagaacaaacttgttcttaaggttaattctaaattctaatatatgactggattgtggtgttattattagccttatcaccattttgttagaaaacctgacaaaaataataattttaactgctacttgttgtttgttttgatttggaaatttaagtgtcctgcctcttccttgttgaattacttcaaatgttattcattgacctcgcttttagctaacgatagtgagtctaattttgtaagcgacaagtagtttaatacgattaaaatatattaaagcaaataaagatacaagaattttattgaggttcagccccgagcagttcggtaatagtctaatcctcattatttgtattga

SEQ ID NO: 392156 - DNA, 744 bp, Cannabis indica
ctctctctctctctctcgatgtccctagaataagctagggtttgagtttttctgcacaatgtagtgaatttccagcaagtttctaagtgttccaatccaacatatacctccctaagatatttatctttgatttcttatgttttaagttgagggttatgcatgtttggtgtccttaggttgttgtagttagtgtttgtttatgttaaggaattttgtagcttatatgaggttaattagatagttttgatgttgtttgatggctttgtttggtattcagacaaggtttgagctttagagctcaaactttggtctttaatggtggtttgtgaatctggttgttttggtttgttttattgcatgatttatgttctctatggtataataagcaggtctggaaggtttggtgtggtttgtagtcaatttgaggttgtagtggggtttttggtgtttcctgcaataaacaggtcgaccagttcagggggacttgtaggaacccgtcgaccggttggtccctaggaaaccccatagcatcggaattctggttggtgaaccggtctaccggtttggagatttttgggaaccctagttttttccattttggcaatatttaggttattgccatgttttttcattgatagggaaacttttattttcaagtttaagtctccgaaaagtgatttagcatgtaaagcccgcttagttaatttggaaattatcagtgaattatgattaattatgaaatta

SEQ ID NO: 392157 - DNA, 1660 bp, Cannabis indica
taatgatcaaattagatatatttttattttacatttgtttataataaatatcgactttaagtttattatattaaaagaataataaataattaactaatactttttaattgtcagtttatttgttaaaagattttttaacctacctgaatcaatttggtccttagcatatccaaatatttaacagtaaaagaaaatatttttttttaattttacaaaaaaattaaactcaaaaattcttaatacaattttagaccctgtattttataaaagttatcgattagaccatctattttcttaaataacaaatggaccttatattttctaaaatggtataagaccttgagctcaatttttgataattttatttttaatataaccaacttgaaaataattcttagcacgaataaatgtaaaaaaaaatgtaattaattttgtgataatacctttatatcatgttattattatttaataagttttattttgaccaaaaatcagtttaaagtactatatttagtattattttagaaaatataaagtccaatttgttatttaacaaaacaaatgatcgatcaagtcagtaacttttacaaaatacatagtccaaaataatattaaccccttataatattgtattatttagtaactataggcatgcatgtgatatagacaaatttttatgtagggcttttaaaaggtaaatggaaatataatattaattcatcaataagtaaataagacatagttcatttataatgatagtgttcatcgagcagaattatcgaaaataaattaaccaaattatttacactaaaaagatctaaaaaatcttaatatagctacttcaattaaaaatctaataatccatgagctatggggcgtaaaaaaacagttttttttttggtacttagagaaattataattcaatttttatatataaaaaatatattgtacttatagtaaaattctacttatttttaagaagtttaataatttattaggttgaaaaataatttttttttatgaatcaactttagttttatatattcaatcaacatataccttaaaaaaaaggcatgattgagaaatcattctatataaacaactcaataaaaaatgaagtattacaattgcttgaaccaataaatatctatttccttcaactttttcaggatagccatatagctaatctatctttaacatcttgctgaattctattacaacttaccatgatgctttgtacaccaaggcaactttcgatacactataaacttgcctctgtaatttagagatttttgctctattaatcctcagaataatgttcaaatctgtgctcaaacatctccatccgagccaaatcttgttgaaataacagttaaagtaaagatgcttcacagattcagtctgaacatcacacaataaacatgtatttgttagatagatattaaattttattagtctatctcttgtttgcaatctttataaagtagcaagagtataaagcaatgctttgaaatacatattacatagtttctcccaaacttgattagcccaactcaccttttcatcagtaggaagcaacatgtgacagtcagtagtcccgtgatccgtaaggggaaacaccgggtaagctgtgcaatcccacaccgcctggggaaggtca

SEQ ID NO: 392158 - DNA, 676 bp, Cannabis indica
accattatcatctgtggtgccacgaattgtcttcaagacttgtttggcctcagctactctacccttgcttccaagccatcttggagattcaggcaagcaaaacaaaatcaaagaaaaatagagaagagaaggaagacaaagaattcccaacatcaatctccagctgaaagtatcggtcaatgacaccgcaaacactatggaagaagacacacacatcccgctggaccccataaactgtggcaacgtattaagtgatcctctgatatctgagggcgacgtttcggagatgtaaatgggaacaagtgtaacgatgaaaccggtaccaaacccattgagtagtctagctaagagaagaacataaacatttggagacctcatcattattagaccactcaaaaggtacaatgccgacgaaattaagagcatgggtcgtcggccgattcggtcagaggcactaccggagatgcttgtgcttagtatacccccaattagagctatggctattactagcccttccatgttagtctctaattggaactcctttcgtatgtagatgatggtgcctgttaattataacatattatattttataattaatccacttacaattaataataaatttgtttatattgtttattttttattaaaaattattttcaaattttgatatttagaa

SEQ ID NO: 392159 - DNA, 3525 bp, Cannabis indica
tccagaccctgataaggacccaatcttgaagccagaataggaactggactaaagccaagactcgggactcgaacacgaccctggacccaaaccaggataagaacccgaacacgaacccataataggacaaaacctgaacccagacccgaacacgaaattggacccaagcccgggactcaaactcagacccagacaaagaatcaaacccaaacctagacctgcacccggacccaacctcaaactcagactgggatcagaacccagtacaacctgaaactaaacccagactcagatcgagatcgaaacctgggactcatacccaaaccttgaccgagacccaggaccctaacccacacccagagcccgatctagacctagaccgagatccgaacccaaacccaaactcagacccagactcgaaccctaaccaaaacttgaacatggaatcacaactagaactggaaccggactaggtttaggaccaggactaggaaaaggaccaagacttgaacccaaacccaaataaaaacccaaactgagacccaaacccaaactggcactaggacccaacccgaacctagaccgggacccaaatccagaccagaaccaggacctgtacccagaatcatgatagggacctgggaacggaactacggccgtgacctaagacccgaccccagacacggacttgaacctaggaccaagctcgtgacttggcacccgaaatggaactagactgggacccgagattgggatccgaatatggacctaggcttggacctaacctgtagtcagtgtctggatctaggaaccagccccggacccgaacctcgatgaagactcgaacccagacccagacccgaacccagtcccagtcccagatccaaacctagaccttaacctgtaccctgtgactcaaaattggaaataaaatcggaagtagaccgagacccaagaacgagaccggaaccaagacatcgacatggacctaaaaccgttaccagacttggacctagacccggaaccatagtcgcaccaggaactagactccaacccagacctagacttgaaccgggaaccagactttgatctcaacgcatatctggactcggtgtcgaccctggacctgaactcagaaccaaacatggaaccagactcgggacacagaaatggggctgggacctagaaccgcaccccagtctcggtcccgaacccaaactcgaacccggaccaggacttaaacctggaccctgacccaaactcgagaccccaaatgggaacctaaacaagaactgctggactaggaccctcgaacaagactaggatagtgaacaagacccggactcaaacctagatcgaactcgaacctagccccagaaaaaaactgagaccgaaactcgggcccaaacacagttgtgtacccaaaccaggaccgagacctggacccagacctagacttgggacttgattctagacccagacttaaagctagatagggatttggatacgaacctagactcgaaccaagacccagacctagaccaggatcgaaacttgggacctagatcaggaccgagaccctgacccagacctagacttggaccaacacccgggaaccgaactcggacctagacctgaaccaagaccaggactgggatcctggcctggacccagacccggacccagactgaaaccaggattcagaccccgacccagacccagacccaaacttgaacccaaacactgaatcaaaatagaaactaggactaggacccaaacctgaacatggacctagaatgagacctaggacccagacctggacctacgcctcggaacccagacctagatcagaaccgaacctggaccaggacccgaacccaaatcaagacccagacttagatcggaacctgaacccagactcagaccaggagttgaaacccgaccagctcttagactcggagcgggacctaggacctggacccaaatgagggacctagactcaggaaataggcatcagaactgggaccgagacccaagacccaatcccatacccggaccctgaccttggactcaaactaggacatgggacccgaagtggagctagactgggaccaggggcttggacctgactcatagtcagtgtttggatctgggacccatactcggactcaaacccagacccaaactcggacctagaaccaaacccaaacccagacccgtaccccagacttaggtccaagtacgaatctaagtttgagtccggaactagaatttgagtaggaacctgacccaaacccgaaccgggacacggactcgaataaaaactcaaatcgggactcgggacacaaacccaaacccagaccgggattggagactcagacctggacccaataccaagacctagattgggggtacaaactctaaattagaaccaaaatcaagacgtaggactaggactgggatccaagtttagacctcgttctttgtcccagacaccgagccaaacacagacatgggtagggacccaggattcggatcttgacccacgacccaacgcttcaaccaaactcgtagttggtgtctagatcttggaatcgtaccaagacccaaacctggaaccatttccaagacccagacccgaacatgaacccagtcttgggctaggacccgtgacttaggaccttcactagaacctagacccgtaccagaaccaagacccagacccagaccctgacccaggcccaaacccaggcccagaccaagaacaagaccaggacccagacccaaacacagactgaaacctagaccaagacccaaacccagacccggacccgaactcgtaacataacttagactcaaacccaggacttggacctggatcgagatcatgagtgggacctagacccagactagcaccgagacctgaacctaaattgggacaagtacttggactgggaccgaggaccaggattgggaccaggacctgagaaccgaactgtgacctataccctgacaaggtcaagacccaagacaaggactagtacgaaacatggaccgggacctgcaatcggactgggaacctaacctagaccgggacctaggaccctgacctgaatcggggatatggaccaatgactgaggacccaagacccaaaccttgacttgagacccgaacaaggacacaagaaatgagctagaactggactaagatctttatttagacccaagacccaggacccaagaccagaggcttagacctgacccacagtcggtgtctaaatctgggaattggaattggacccggacctagacccggacaagaactggaacccgtaccagaactcaaactagactcgacatgtggttggtgtttgtagttgggaccaagactcaaacctaaaccaaaacacgaaactagacccagaccaggacttggacctagaccccaacccgaaccttaaatcttaccctatgacccaaaatgtgaactggaactagaagcaaacccttaaacccaaaacccta

SEQ ID NO: 392160 - DNA, 1228 bp, Cannabis indica
tgtggcagcaatgttgattggctccaatctcgcgaggtatgcaccgctactgcaagatgctcttctaactcttttgtacatgtctataaaattacaagcagatctaagataaaccattgtttgtttatttagcttcttacaaaaataggtaggaaagtcattgtgtgtcaaacctattttacaatgaaaaataaaaaatttcaaacatcaaattttattttagtttgatctctaaatttgttacagatagttgtgacttgtcatttatttttccatttatggcattgataaaaaatataaattttaatagaaattacatagcaaaataatgaaagcaattgagttcttttttattttatttttcaattaatgaaaggtagctgaaatgaggagtcagctaatttgctcttacaatatatgtttttcaaatttctaatatagttttcttgttcctaaatatctatatttagtttagcattcaaaaaagccttttaatctatttttgtttttcatgattgtatatgttgcagttatttaggactacatatagtttattttggtctcttgtgaagaaagaagtttgcttagtgtactttttgtgctcgattaaccataataaaaaaaaatgatacattaatatcattcattccttccttagctcatgttgtgtaattgagtaataattcttagagtgttattggagtaacaaaattgtgatgaataagtcttttttaatcctgtgtgaatagtttgaccaacgtaatatatattatatttttttaattataacatgttctgagttattgcgtgttagttgtttttggtcattttattgcggaatcgattctatttaatttgttctaatattgttggaattgatttcttcttattttttttttttaaattagaacaggtttttgagttatcctgtgttatttatttttactcattttgtcgtggaaacagttctattttaatttatgtattagtatttttgaaatagtgtatctcttcttctttttttttttaattggtaacttatttctgagctattgtgtgttctttgtttttactcattttgatgtggaaccatttctgttttaatttatatatcagtttttagaactgatttactcttgtttttttcaattagaaccatttctgagttattgcgtgttatttatttttagtcattttgttgtggaactagttttattttaatttatgt

SEQ ID NO: 392161 - DNA, 746 bp, Cannabis indica
atagctattttattggagatgactttaacaaatcttgtgtctaattggcacaatatttactataatgtaaaatttatatacattaaaaaattcaatattttttatttatatttatgtcatttgtattattttattagtatatttaaaatatacattaaattataaagtatttatattctttttattgtcttacatattaaaataataatgaaattgataaaaatattaattagatattaatttttacatcaagttttgtaattatatattggaacacaatgttaaattttaatataaatctatcagaaaattattttttgtgtcaaacatttgggtgtcacatttacacctaaaaaccaacctacccgactcaaaacccaaaaaacgagtttcaagaatagggggtcgggttccggtgttacccagatcggcactgggctaggttcgggtttaagaattttgaaaactcgaaacccaaaactcgattaccattttatatatatatatatatatttatatatattaccctaacatattttttagatttggagtttgtactatgaacttttcttaaaaaatttaataactttataagtatttaaggattaggaataggagtaattttatatatataacatgtgtatggaaattaaaaatacaaagaatataatgtaagatgataaaaaaaaatagaaattttagagtaaaaatagttgttgaaattttatgtacttttatgcaaaaat

SEQ ID NO: 392162 - DNA, 1107 bp, Cannabis indica
ctgtagtcttcaaaccgtgcaagttctcatgatcaccacacttgcagaagagagattgcaggcccatgctgtctctaccaacgtcgtgccatgtgatatctatcgtcgctagctactacaaaagaaggagaaggagaatgaggatcaaacgaaaacatcagatatatgagaaagaaaagttaatactgtaacgtaagagttagagaatgaaaaaaaaaaaattcggcttcacctagccttttaaaaatgcattaaattaaaatataaataaaaccatgtttactaatcggtactgatggctatataacaagaaacaacggtagaattacttttaggaaaattatagtaaatggccggacacaaatcatagaattatgttagtatatattctaattttaaaaaattataacaaatgatcctaataaatcataggattatgttagtaaatgtcctcattttaaaatcattaatttttttttattattttttagaattagaagcaaattatttaaagattatagtatatctatattagttttgttaaaatcttttttattatgtcgattttttaaattttttatgagttgttgtggtcgttggtatatagattttgttgtacggtatatttttattttgttgtatggtatattattattcttagataatatttagttttattatgatatgtataatagtggtatataattttattagcataataaaaatattttaattaatgtatgtatataattttattagcatactacatatatttaattactttttattttattatatacaatggtagtatataattttgttatcatggtatatatattttaattgtggtatataatttgtttagtatagtatatataaatatattagtaatatatatatttttttattattattttttgtatatatgttttagtgaatggtctatgtattttttgtttatacggtatataattttttttaaattaatatttaagttctattttctattgtacacatgatatataattttattagcattctagctatatattttaatttttatttattgttattattatatatatatttttattgtaaatattttct

SEQ ID NO: 392163 - DNA, 718 bp, Cannabis indica
aaagttattgatcttttaaaaataccatatatttgggcctaataatttaattttttcctaaagttaaaaaactgacaggatcagcgccaagtcttagtgagctctgtagtaaatctatagccccaatgtagttttaatttcattaatggtgaagacaatatcatatccatacataacatgggagatggttggctaagagtgccagaggttctaaccatgcagctgatatgttctagcctcacttgtagttccataaatttatatgtatacatctttattatttgattaatgaaagtctcattttagctcttaatttgtttggaatttgaatttttggaagaaaagtaaatatattaaaaaatgaaaattttcttttaattagattaagatgagagtatagataatattattaaaaaaaagaataaaataagagtgaaagattgagaaaagattatcaaacataattatttcatcgaaatacgcaacgcaaacgataacacaattatacgtatttcgacataatgatcaattacaatgaacggttagacaaagatgagggaaaacagtagaggtttcaaaggatgggagagaggtgggacatgaatatagtaagaatataggagttaaaggtatggctagctatcaattataaaaaagattgttaatctgttccataaattgtagtgatatttgccaaaaaaaactcaaaaaaaaaaaa

SEQ ID NO: 392164 - DNA, 2193 bp, Cannabis indica
gtaaaataaaattccaacatctaggacgtagttacgatctcttggaactcctagaatctcgagtagatcagtcagatccacatttgtaggatacagttaaagatatatgtgaaagttgtttgaggaagaaatcaagacttgtgtagctttgtccaacatttatgtcatcgtttctcttggccaacatattaactaatcggtcaggcccttttcaagacttgtctttcttgtgtgattacttgtcaaacattcttgcaaggtgtcaatctattggttttatcgatccaccacacacaaagaataatgtgggctattaggataaagtgtataaagctgttcttgttgagttctcaacacatgagcaagaacaattgaaaaattatttctttctttttctttccctatttcgaaaatagcaataaaaagaatgaatctgatttttcaaatcaggctcctatcaataaccgaatatggttactgatattcatgagagaatctctcaactacttgaaagaatatctcaacaaccttgaaatatttataaccaattttcaaattagatatttacctaattgaattaattaacccaaaaagataaatcccatatggatgagaacaatgctaggcgcctacctatgtctttaagacaagcttggtgtcttttatcctaacaacttttgtcctaacaaatcttgtctcgaaaaattttgtcttaacaatttttatctttttcctatttaattaatttgaaaaattttaattacaaaaataaataattactattttttcaatttaaaatagttttttcgaacatttttatacaactctttattcctacccatgacaatgtttcaaggtggcagttcatggatcatggacctataattctaaactccaatatactagattatttcttgagtctcatcaaccaaataatctcttatttattaattccatgattactccactataaatgtaataccctaagattaagagaatggattagcaaaccctagctagttagctgtgtataattatagaattatattattatataatttattatatgtgaattattgtgaattatgacatgttaagacctttggtgagctaggggcattttagtaaatttgacctgagaaaggtaaaactatgaatttaatttaattacatgcttatggactatattattatatagtatacctgttatgtccttttacagatgtgttctgacaagtttgtgcggtatagtcacaaccgggtattttgggattatttattggtattttatttttatgtgagaaacgtgaaaattaattgaatatgtggtatgtgatagaattgacctagttgcccttgaatgcctaaatgagtatgttgccctaggggcatttttgtaatttttgcataattagattactttcaacaaaaagtattttcgcataaaattagaattatttttctgctttcctcagcccaaatagtcgaaccccatatttctctctaaacctaactcaaatttgtgaatttggtgagaattgcttggattcaagcttgtcttgtgggaatctttggagcttggattgttaagaaattgaggtagctcttctcactgtttttaatttgaaattcttgctggaattgaagatgaatattatgattttaagctctaaatgttcttcgaatgcatgcttgatgatattggtgtaattttgatatcttatgcttgattgagttagaaattgatgtaggatgtttgagtaatgttgttgagatgattttagggattttataagtgtttttaatctgttatgcaactctaattttagtgttgtgtttgagtttatgttttgggatttgaagattcaagatgtgagcttgaacttgttgatattgtgctcaagtttggagctttgattttatgttatttgaatctgaatttctatgcacgtaggctgtaattttgagctttaaaatttgtggtttagctccctgctgtagttgtttaattctgtaggaggttattttggattgatgcatgttttggttggatttaggtgtttttgggctgattttcgtgttgctggtttttggtgttgttggagagtaaattaggtgtaattcttctctaattatttaatttatgctaggtgaaagtttagtatgattatgggctggtttagcatgaaaatt

SEQ ID NO: 392165 - DNA, 851 bp, Cannabis indica
gtgatatttttcatatataagaaataaagcttttctctctctaaaacctaataacaagtattgcataaatgaattttcagttaagttttagattcaacatttgtatattgagttttctacatatttctaaatatttttatgttttaatctttataacagaataatttaaataattatgtataaaaatacatagttatcactcattgtttgatttgtattatgtaacgagtaaaatttcttgaatttaacattaatagtggcaactacatgtaggatacggtgataacaacaggtgaaatacaataataacaacgattttaatgattgtgatataaagataacgtggattgcgagaaacaatattatttttataaatatgtaattttttaatagagcaatttaaaattccttatatatgaaccgtataatttttaaacttcttaatagaactttccaatctttccaatgaaagagttttttgataaaaatgtaaaactaaaagagttcttttttaaaaaaaaataaataaataaaattattattattaataataagtaattagataatattattatatattaaattattttttaagctatattatttattatattgataaataattagttttttatattatactaaaataaaattaaaatagtccttcaaagagcgattatattaactaattttatatataaaataaatattaataatataaagattttaataaatacattaaagttcatttgtgaaaaataaaacatataaagaacaatataaaattagagatatgattttgtcccgtgatgtactttcacggaatgtattccgtggtacattagatgggt

SEQ ID NO: 392166 - DNA, 1979 bp, Cannabis indica
ccacattgtacaaaaaatttgtttcatctccaattttatgtatgtggttgaaagatgtgacaagtaatctccactacgcatcgatgtacatacgttccaattaaacgtaaagttttgagctctccaaacagccttggcatatttacaactaaaaagagcatgtcccgttgactcccaagcttgtctacagatggagcaagtcgaatcggtaatgatcttccttcaaacaagtgaaatagccacaggtaaagcgtcatgaatgactcgccaagcaaagattttgactttttatgggatttgtagggaccaaaagaatttccaccatgactgggatgtcgaggagctagagccaaggtcttcatcttcaagagaggtcgcaaaatgatagccactttgtaccgtataaataccagagttgtgatgatgccagataagtttatcattggggctgaagtagctcaatggtatagtgaggatattctcaacatcaatcagacaaaaaacctcttgtaacatgggaacattccactgtttgtcctccgtaatgaaaatagctacaacattgtttgaagaaccaatgtatcttgttgggaggaaagtattatgaccagggatccaagcatcataagcacattttacagaacgaccctcacaaattttccatctcaatccttttatcaaaagatcacgaccccatttaatgccctgccaagttagcgaaggtgagtgacccattcttgcttctagaaaggtgttgagggaagtacctgcttttgagtaattgtttaagcagtgagtgtggattttcaacaaggcgccaagcttgcttagctaatagagcttgattgaaatagataaaagatcgaaatcccattccgtcctcgtcctttgtcttacatagcagattccaagagcgccagtgaattttggatccattctcattcataccccaccaaaaattagccatcatactctcaaggtttttgcaccggtagccgaaagcagctcatagcataggttgggatagattgaacaacaaccttgagaaggacttctataccaccagctgaaaaaatcttttcactccaagaatgcataagtttccatatccgttccttgatattgctgaagagttcttttttgtctcttcccgaataagatggtaagccaagatatctttcatgacactcactgattggcagggagagatgtcgatgaaagacacttgagctgtcaaagtggtatttggagaaaaaaacaacacagatttatccggattaagaacttgacctgaagcacgatgatatgtgtctaaaactctcttgattacaagggatgagctttcattagcttgacaaaatagaagactatcatcggcaaagagtaagtgggaaatggatggggcatgccttgtgagtttgaaaccatgaagattaccaatactctattcatgttgtagcagcctagacaagccctcagcacaaatcaaaaagagatacggagataaggggcagccttggcataatcctcttgtaggaattaaattaccagtgacttcaccattaactagaaaggagaagctgtttgtagcgaggcaacccattataagcgtaatccaaccatcagcaatgcccattctacgcataacttcttcaatgaatctccattctactctgtcaaaagccttgctcatgtccaactttatggaagcaatgccattacgtctcgatgttttgttcttaattgcatggaccaattcaaaggcaactaaaatgttattcgtgataaatcgattagccaaaaaggcactttgtgtttcggatatgaccaaagggagaacttccttaaactgagcaacaagtatcttggagaccattttagaaatgacgttgcaaaggcttattggtctgaagtccttcatgcattgaggtttcttgatttttggaatgagagtgatgattgtacggttgaaaattgta

SEQ ID NO: 392167 - DNA, 1767 bp, Cannabis indica
ggaaatctaacggttgggagtggagtagaagatgaaagggcagttcactaatgcataatgaccctcaaaactgtgaagccgttaagtcgaagggcatgcgtggtcttgaagaaagaaattatgacaaatataccctttgtaatccttaaaaagcactttttatttaaaaagaactttttaaggggcaattgttaccttaaatttagctaccatttcaatggaaaacacatgtcaaaattgggaagaatatggatcaatgcgtgtaacggtaattacatttaatggaataactcattaaatgcggaagtcacaaagtatatttacaacttgctgactataaggttttatgcgagataaagatatacaaactcttgcctcatgtattaacgagaaaccatacgacattagatgcacaaagcgagacatcaacctcgttacacctaggtagaaaacacttggcgtgtaatatacagtatacaaactaagtataacagtcgggtgaacccaagcaactaatagtgaggtgcctatctcgctataggaaagcacgctcttggtacttccactagtcagcttcagacatctttcaatgagatttatagtcttgatggattggttctctcgagtagaaactgacattcaaatgatgtagattgttgcagttcaccttgtcacagagaactgcgattgtgagacggagcgttatgtcttccgcgaagaagtgatgaggtttacattatcaacctcggaaagataggggaaaagctccagcttgctattaaggtcattggtactgagttcctgtcgagacatcctagaacgttacgatttataatgtgtttaatacacgattatcttgacccagtaaaagtagactaatcacagctgtgtgatattcaaataataaccgcgtttatttacgtgatatgtaatcaaaccccacgattttaggggataattgctttaaagattacaatcaactctgtaattaattgcctaactatgtaattataaatagaggcaagttagactgaaaaatggatgaaaaatcataagagaaaaggccctagaacaatattagaagtctaataagattgactcatggactatgcagaattttaactgcaaaatcacataaaaaatctttgtgttcattcttttctttttatgtctctactgtttttatttttctgtgcaagtttatcactattcaggctcaactttggttaacgaaaatctgcgttaacaaggcgaatcttaagttgtggaaggtgttcatcttcaattcgagtattggaactctaactactgatgaattgaagacacttggtgcaagatattatccaaattggtggaccagtgtggtatttttgacacccattaccatggtgatggtccctcaaatgatagcctccaaaagtcaggtcaaaacattcgactgggatctcatggataataaagttatacctcagacataatcgaggtaatttaagtgcattttttagaaatacttttactaattaaattaaaaattttattagtattctctatggtttactaaattttgcgtatagctactaacacaatggtgattgtggaatgtacatcgtagagcatatcgagcataagttattggatctagcattcattggagtagatgatgaccatatgcccctcttttgtcagagatggggtgtagatttattctaccaaaacttgtcatgaactttggatttttttattatatttgttgaacaatctttactt

SEQ ID NO: 392168 - DNA, 842 bp, Cannabis indica
atgattttagtcgatacacatggttatatccccttagagcaaaattcgaagccttagaagccttactatagttcaaagttcttgctgaaaatcagtttaaagagaccattaagacacttagaactgactggggtggggaatatcaattgttctctgacattatcatagaacatggaattcaatttgttcactcatgtcctcacatctcagcccaaaatggtagagctgaacgaaaatataagcacatagtcgaaatggggttaactctctttgctcaagctagtatatgccattgaaatattgggtagatgcttttcaaacagcagtctatcttataaatagattgccaactcccatattgcaccataaatcaccttttgagacactttcaacaagaaacatgattatgcttttctcaaagtatttggttcagcgtgttttccatgtttaagaccttatcaaaccagtaagtttcagtttcactcattaaaatgtgttaatctagggtatagtgactctcacaaaggttacaagtgcttaagttcaacgggaagagtctatatctctagaaatgtaacattcaatgaagaggaatttcctttcaaagctggttttcttaataattatgcaccagaaaaagaagtaatagttcgcaactctgaatggtctcagcttcctatcatacagttcactaaatacactcaaccaaaatattatgttcttgctgatattgaacaggtacctgcttctcaactttcccttggagccccatctgccacacatcatcagcaagaggttagtgaccataactgttgggttttgtgccctaaataaaacccttt

SEQ ID NO: 392169 - DNA, 2344 bp, Cannabis indica
cccaactagtttgagtttggcctgtgccgttatttggtgggataaagtttccagcactaccccttccagtggcaccgttagtagcgtcgccttcggcggcggtggcgttagtggtatgcctagtggcaacaatttggccaattgttccatggccaacaatagtctgggcattggcgtgaatggtggttgccctgccattatcaacgcggtggctcggcctccattatttccggcaagattgcttgttgacagaacttaatgggcattatccatctcctcatcaggtcgttcttgagatcttcgggttaacaccattttttctcgtgaaaaacttcaagattttagttaaagctctcaatgaaagtaccaaaatattgactggatttttagccaactgacgcggagtcataataaatgagacttaaaataaaatcacagtaataagtgcagttaatgaagccgtaacttgcaataaatgaaataaaagacaccaaaatttaaagaggtttgacccgaatttcggtaatagcctactctccttgtattttattaatctgagttgcaaaagtcaagaactggctcttgattgcaaagaatgataggtgtttatttttctaagtctttaaaattgcggatcctcctcccaagttatggatgaccctttatatagggaagggggtcggtgcttctcgcttcaagagacgcgacaaacgcgcagccacctcaattgtgatccccttgatttttggaggcagttgaagtctgatttttatgtgataatatcccactatttttgtgggttgacaactgtctttgagcctttcatgggatttgaacatttgaaagagttactgatgacgagggtctcttatgggtgtgacatggtcgtcaaccacctttagggatgaagcccatacttgggggcaacactcccgagacctaacttgaggggggtggacaatcttcatcgttaggtgaccccttgagacctaatttgagggggtgaccgtcgtcatcgttgggtcaccccccgagacccaacttgagggggtgacctcccgagacccaactcgagggggtgaccgtcgtcatcgttgggtgaccctccgagacccaacttgagggggtgatcgtcgtcatcgttgggtgacccccgatacccaacttgaggggggtgacattaatcgtcatcttggggtgatcccccaagaccccttgtccgttgttagtagttatggtgtgatgtccccgtatacctttgagaatatcattatgtctatggtaaaatgcatgacttgtaccatgcgtgtgtaggggtagggttatacccctagactaatcctttaggggttaaggggtgtacccctagactaaatcccatatagatcattgcagttgaggtaggggtagtagtatatactccctagactggcttgactcccgtaggtgtgtggtgatcattcattccgcttacgaaggtattagtccatcatttttccttcttagagaagcactccttactcaacctaggggtaagggtgaccgtctgacttccactctaacggtcatgacacctttcatggtcgacagtcatcccaacagtcatgacttaatttacatatatattcttcattaatttagtctcaatatttttgtgccacgtgtttctacttttgacacgtcatcatcgttaaaatttgggtgaacaaaaagaataagtttgtgggatgtatttcctttgctttgtatagttttgatatcaatgaaaattttcttactaactaaaaaataaaaaaaaagttttaacctaaagctagcaaattatttttcaactatgcaattaatttggtgtgtactctcgaattaaaatagataaattattgaggagtcttacattagtaaatcgtttgcaaaaaataaacaaaatgcaaccgaaaggtaaatttgtaattatttttatacttcaaaagaaattttattacaacggaatagtttgggttgtcaaagttcggaaatttttttattgaattattcttttaaatatgatgaataccaaaacaagtaaaataagatcgaaatctgtaataataataataataataataataataataataataataatattaataataataatatattttcaataatactcatgcctaattatttaggtacgtacaaccatattaaataatctaaacacatgttaatcagtgacggacccagaaattttactttgtggggacttatttatcattcaaaaataattatacctattttataattattcttactagatttatttaattttatgggggctttttttacgattttgatctat

SEQ ID NO: 392170 - DNA, 1035 bp, Cannabis indica
tttaatttttaatttataattttctttgcttggactcatccctctcacccacggagtgttgttgactgggtcccacaagtcattatcctattagggttccagcgtggacaatgacgtggcatttgtacgggagtttatattgaggagtgggctgaatataatttttgtgttagtgctgctttggtaaggcattatgtaatttttagcttttacttttttttaatgggagaatacattaataacactattcaactatttattgatgcaaaacaccacactcccaaacgtgatgtcataatcttattatgaaaacaaaagtcaaaaactattttttgcaccagtttgtgtttttatgtcacacctatatattatagtttttttaacaaatcttacaaagttttaataaatagaataatttacaatacacaaattaggttaaaataatctatttcaaacccataaaaaaataaaataaacacttatataattaattgttttaattttattttggtattttaaaatttatagaatgtcataaatatatggatacacaataaaaataagaaggaaaaaatgtacggtacaccataaaactttcaaaaactatttattagtattttacaaaataaaaaaaaattactattgcatttacatgtcaatatcaatatcaatatgtgtgtttgtttgtaggatataattattaggctttcagaattgaattattttatttgatttcattaatttaatttggtgaaaatatgggaccctctggaattttttttctgatagtagctagaatgcgcatgtggaactcttaaatataggaaattcattatgacaaatgtaaatactgaaaaagtttattttcaccaaatcaagccgttacaattattattaatttccttttttaaaataaatgcaaattttttaagtaaaataaatgctagttatagacttttttttttttgtgacatatatagacgtgattttaaattactttgggtagttgggtaaaaaaagtaagattccttaccc

SEQ ID NO: 392171 - DNA, 696 bp, Cannabis indica
ttcacttaaatttttgaaaaaactattttttaaattttaccaaacacatattaacttataactttttccaaaagtgattttagctttttaaaaagctctccaaaaagagacctaaaagattataataagaggttgtaacatttttcaaaaaaaaaacacagtctaattaatggcacaactggatttttttttttttttttttttagttttgttaaccagtcacaactggatttttaaagactagaaatgatacagatcgatgagatctcagacaattcagagactaaaattcaattaagtactatacatgtacatccacaccaaaaaaaaaacaatgaagtagtttttttttttcaaaatatatatagattgtttgttatttaaaagaggttttgtaattgagattgagaatcaacggactccattcctccagctatcttctcatcaatgccgtgttgtgacggacaacaaacgtgcttcaatttggctttgttctcaaacaagacaaacttgtatattttatagtcttctagagtagtagtggatgataaatatcgttatgattgcggatgattcctttcacagtaattttttctccccaactttgatatgtactaaatcgtgttccctgaactttttttgccgttaaaaattcttcccgaactattgagattgttaaatttaaggacttttgtc

SEQ ID NO: 392172 - DNA, 965 bp, Cannabis indica
gttcatggtcctcggatcgccactatcaaacactataatgaagaacaatagatgtgtgagagagtttggaaaaatctattttgaattgtcaaaatagtgattattaataaataatttatttttcaaaataattaaattaaataaattaggaaaagacaaaaattgtcaggagaaaagacacatgcaccatctacattgtgtttagacacagtgcaggcgccgcctacatagggtgtccccgcgaattgtcttcttaggttaattatttatttaattaattctaaagataaatatttatttaaatgtgaatttgtaaagtaattacagatatttccttatagttgagatattatctcaatgcaattgagatatttcctaaattggttatagaaaataaatatctacaatcatattaattattcaaataattaaatataatttaataataaatttaaatttaaaataaaatatttattagtttttattttatatataccgtatataaactaaattcaagttatatgaattattatgtataatttttgagaagcctaaaaaggctaaattaattactttttctctctatcactaaaaagaaatatttttgctcatgtgtcgagataaactcaagaactctatacactctattatcctactagcctacattagtttttgtctgtgttagaagatttggaaggctactggtaagctttataatcaatcaaaaaatgatacaacttgcaaaaagaattaaggatatcctgataggcttctagaggtaaaaattattttagtctatttaactttagtttaatatatacatatgatgatcttggacatatggtacaatgataattagaataactatttagttgcgtacctaatttggtactataaaactaacaattggtaccaaaacaactctattatgtatgtatatttaatattgtgtgagttttatgtat

SEQ ID NO: 392173 - DNA, 689 bp, Cannabis indica
gcctaatgggacatggagaatgtttatagatttcacaaatgtgaacaaagcttatccaaaagactattttccactttcccgcactgatgagatggttgatgcaaccttgggtatgaactgttaaccttcatggataaatactccggctacaatcaaattaagatgcacgtggctaacctagagcacacaagtttccaaactaacaagggaatctactgctacaaggtcacaccctatgaattaaagaatgttggagctacctaccagcgaatggtaaaataaatatccaagaacgtactgggaaagaatatggaggtttatgttgatgacatgctggtgaaatcaaaaacttccgtgagccatcacgaacatctagaagaggcatttaccatcacttgggagtacagaatgaaacagaacccaaagacatacacttttaaagtttcttcaaggaaattcataggttttatagttagttctcgaggcatagagacgaatccaaagaagatcatgttgggtttttgtgccctaaataaaacctacttcaatattatcagatttactaattaatgaatatcagaaatctcattttatgttgcatggttcacaagatttatttcatgattatatttaatgaataaattcaagattaattaggatttttccccctgaaatttgacatgtaccaa

SEQ ID NO: 392174 - DNA, 1341 bp, Cannabis indica
cctttctcttataagatttctcactgagaaacatcaataaggaatctcttctgttcttcctgcctaatttagataacaaaaattgctttgttaaagcattatttatttcttttattggggcattacatattccataatacttattgtgagcaacacatcaattactaaacaaactttttgatacagatcaattacttctgatagtaaaaaaataagaaatcaagtttctctctttctctctctctctctctctagtgtttttataagctactaaatataagatttaataatttgggaaatgtcatgcatctatattgttttctttctaaataatcatgtagagtagaagtgcgtggagatgtttatttagtgcaatagaacttattgacacaattcattcagtttaggagatcctaacctgtcactaacatcaaataagttctgcacatttttcatattagaactttgtggttgaaaaatactctagatattttctggttgggatttatctatataagtaaactctggcatgtcaaggcaaatatctgtacatatggtgcttcttgcttttgatttttttttttgtgttaagttgttttcctttattctgttttaaccgttattcagttacttgacatgcaggttcctggcacttggagatggatgcttggagttgcgggtgtgccagctgtgatccaatttgctctcatgctctgtatgccagagtcccccagatggctttttatgaaggtaatgaagtaattggatcatcccatctactttttttttttattaaaagcctgttgttttggctttctgtttgtagtgattttgattgtttaatgtttaatctacaggacaggaaaactgaggcgatttctgtacttacaaaaatttatgatgtttatcgtttagaggatgaagttgagtaccttaactctcagttggaggaagaacgccaaaagaagagagatgttaggtacttggatgtttttaggagaaaggaaatcagacttgcatttctggctggtgccggacttcaggttagatcaagacttgaatatcttcattttctgaaatgataattttaacgtatatccattgttaatattaactagtcaatttgcataatgattgattctttaattaataaatatgttgcattttctttcttttctgttttcttttcctgttacattatgttggttgtgatttgaaaatgttgacatgggagggccaatggataaagctttttaatttgttaattttagttagggtgtgtattcatttagtacctgtattttatctaaatacaatttggtacttgtgtttttttctttt

SEQ ID NO: 392175 - DNA, 1171 bp, Cannabis indica
ggattgaagcaagcctctagatcgtagaatatcacctttaataggactattaaagagtatgattttgaacaaaacaaagacgaagcatgtgtatacaaatacaataaaggtaatgtagtggtattcttagttctttgtgttgatgatattctacttattggaaataatgtagaaatgttatcagacgtaaataagtggttgcctaaaaaattctaaatgaaggatttgggagaaacacactgtgttcttgacattaaaatctatagagatataaagcgaagtacattaacactttcttaagcaacttatatcaataaggtgctcaaaagattctcaatggagaattctaagaaaagacagttaccgtctagacatggaattactctgtgcaaggatcaatgtccaaagatttcataggagatggagaacatgagaaagtacccttacacatcagctgttaggagtttaatgtatgcaatgttgtgtacaaggcgtgacataagctacgctgtagggatttttagtcgttactattctaatctaggtttcagaatatgagatttttagttgttactattctaatctaggtttggagtcttattttgtataaatcaagtacttttgtaatggtttgatactctactagtagattttattctctaggttgcgacctcgtgaattaacagtattcgagaaaatattgacaacacgtaaaattatcgtgtgtgattttactttctgtaattgttggagattcactcttagtttccacgatcaaacacttataagctgtgactcttgagaacaatggcagcaatgtcaatcacacacacacaaagcacataaatgaataaataactctctttaataatctaaaagtgtttgtacaagagttaagtttacacaaaattgtactggacctatttataaatataggtcagtgaagtatatccaggaagaggtggttaagttagttttaactaacttaactacacaaccaccaaatgtacacgtgtaaactaataagtctattatacattgggagtcaacaccaaaatagtactacagtataatattttatctctgcacttgtttgatcaataagtctagatttttatagatcgaatttcatttttgtatgaagcaacttattcacagttccacatttaat

SEQ ID NO: 392176 - DNA, 1020 bp, Cannabis indica
taatatttttaaaaaataataataacactttttatgatatatatagtctcaattaatataaaatatatttatatatattatcaactttcatttttcatttttctaatttctctctccaattgaacaaaaatcatgagaaataaaacaaaaaagagttgtggagggcagcaagggagtggctgaaaacatggtttatgttgaaagggactcttgattattacaatttacaacatcaaaatccaacttgggcactaataaataattttgactattttgctataatttacaatgtaaaaaaatatattatatataaatttcaccgatctatttttttcaatcattcattaaaatgataaatcagataacacagtttgaatattcaatattttaaaaatatatataaattaataccaaatataatttgttgattataactaaatccaaaatcttggcttttgattaataatacttaaattgaactggtttagccaattgacctcgtcacaacaaaattgtagtcaaagcatcattttcacatataataatatcaatatattgatgtaaagttgccacctctatcaaataattagttgtttttcatattaaaagagcactctactatactcactttactgttcaaattaaaccttatagtgttagttggtgcaaataaacaaaataaatatagaatttcatacatttagatttaaattaaaatacataaaactcgttattaaattacactaataacaataggctaattagtaattttttcccccgaactatgacatgtaccaaattatacctcctgaacttttttggccgttaaaaattccccctgaatgagattgttagatttaaggacttttgtctaattttagtaaaaaaattctaacatggatgaaagtacaaggggcatgatttagtacatatcaaagtttgagggacatgatttggtagatatcaaaatctagggagcatgcatggtttagtacataaacaatcactgaaacagtaaaa

SEQ ID NO: 392177 - DNA, 964 bp, Cannabis indica
caaggacacaacaaatacaacagattcacaatcgattgttattcatagtgattcataaagtataaagcatgaataaaatcaaaggcttattgatgatgcaaaaagtacacgtaaaatacagagcaataatgaaagaagtcgaccttaatgcctaaaagttctttttttttttgaaagggctaaaagttctaaaataagaagaataaagtaaacatcgaagaaaaattaaatttattcttgagatcaatcattaacagctagttaattttcttgaattacttggaatgaatatccatcggagatgacttagagttctacaatgtgaatatgagaaaatcatggaaggcgaacaaaagtagacagtgattaatatcgatctcatcagccccaaatttcccatccccttatacataactttttatgccgcaaatttttaaataaaattgacatgtcactgttagagcattgttgttacatcttagttgtgcacaacactaccataaggtgaagctctataaatagttagctataatcattatttaattaaaatatataaaactcaatactagatatcactcactacaaaaaaaaaatggatcaaccaatattggccacaaatctttgtcaacacatttatcttttcataattgtgttgacacaataacacgaattaatttttatatattttacacaaaaattcaaaaaaaaattgtatttatcatgataattgtgttatcgtgtcgtattaaatactaatttatcatgttgtgttcatgtttgaggtttcaatatttatctttctagagattatgagctaaccaaaaatacattaaatgctaatctttattactcataatcatcaaccaagatcaatatttatttagagcatcaaattcataaatacacatacctcccaatccatccatatgagccatttttgctttaatgcctccaacaagaatca

SEQ ID NO: 392178 - DNA, 1029 bp, Cannabis indica
actacaaattaattgatcgaggcgcgtgaaaccactatcctcactatttacgaataatatcccatttctcttccttcctaattcagaactcttattacaaattgacaatcatatatttttcttattataatattaataaattatcctcaataactgtgggctttcgctttataagggtgtacctcccctacattctcattcatacactctcaatttttccagccatattttatagagaagaaggctaagagatgggttcgtatcgatcttcttgttcggtgaccatagccatggtcgtactcctcctcttcacgatctttgccctgtcgtccgccctggatatgtcgatcgtctccaacaacgatggatatggtgagaagtcgacgggaaggactgacggtgagctcagagctatgtacgaggcgtggctagtcaagcacggcaaggcctacaacggcttgggggagaaggaaaagaggtttggtatcttcacggataatctcaggttcatcgatgagcacaacgctcagaacctcagctttaagctgggtctcaaccggttcgccgacttgaccaacgaggaataccggtcaaagtacctaggtaccaagatcagtggtaagaagaggatcagcgaacgttatgcaccacgaatcggagatgatttgcctgagtccgttgactggaggaagaaaggcgctgtcgtcggtgttaaagaccaaggaagctgcggtgagctcactgtaatatttatttgtttcttcttaactttatcattattattatttttaaaaaagctgtggtgcggcatattataattttttttaagttatatgaatctcatatttaattagggtctacactaataataatattagattggcaggaatcttagaatctctatctaagaatatactaaattatattttaattgtgagattataactaaatagaattacactaagaaaaaaaaaattaaaaaacaaaaaaatatcaatgtaacaataataacaataaataatctttaat

SEQ ID NO: 392179 - DNA, 2541 bp, Cannabis indica
tgggactcaagtacaaatcagagtcacttaagcaagaagtgcagggctttgtcgactctgattatgctggagatgcaaatactcgaaggtcacaaactggttacattttcaccctaaaccagtgtgccataagctggaaagccaatctacaatctatagttgcattgtctacaactgaagcagaatacattgcttgtacagaagcaataaaagaaacaatttggcttaaaggcttgagcagggaaatgaatatcgatcagaaatgtatcacagtttcatgtgacagccaaagtgccttacacttaagcaagaaccagatgtatcacgagaggaccaagcacattgatgttcggctacacttcatcagagatatacttgcagaaggcaaagtaaagctcgagaagatagcatctgaggataatccatcagacatactcacaaaggtagtgaccacagcaaagttcaataaatttcgagatcaacttggaatttctgagctagcttaatcactaccgtgaggccaacttaaacaacaactaaggtggaaatctgtgagatagttgtcatttactgttagtggttgacagttatttcttaactgtctaggtgtcataagagttagttaacttttctaattgttttaactaactaatgtcgtgtatataaggcattagttaatactagtttcagctagcctattctttgaagacacttgtgtatatatgtaaatacaatcttgattctttcaataagattcaatacacttttacaagttattgttcgattactctgttttcttagttggttggttactgggttagagttctgtccaagaacttaggttacataaggcaacaaatcgaagctgcattccttacattcttcattaacaattctcttcaatccaatatcctcatatatctcaaggcgcttatatatccaatgtgagaaatatatctcacttgtattattagcttccacattaataatttttcttcttcctatcatttctaaaaccatcattccataactgtaaacatccgacttatgtgacatgcttccaaagcttctgttaaaaacttcaggagcaatgtatccaattgtcttggacctaacactgaaataatactttcttctcttttacaaattttggcaaagccaaaattcgaaattttcgggacaataaagccaacatcaagaagaatattatgaggtttcatgtcaaaatgtaagattcttgtgttgcaaccgcgatgcaaatactcgagtcctctggcaatgccgagtgaaatttgatattatgttttccaatccaactgatgactgttttcactagttgtattgtcattaaatataaacttctcaagagatccattgggcgtgaactcgtatattagagctcttttagaaccttcaaagcaaaatcccaacaaagtgacaatattgacatgggaagttctgcttatggttgctacctcattcatgaaatcttccccatctttatctttggatttgttcaaaaccttcactacaacaagagagccatcatccaagtttcctttgtagatatcaccaaaacctccttggcctaatttttgagtgaataagtttgtcattttcttaattttggaataactataccttctaacttgaatggggccatagttattaaaaaaaacctcaacgttttcattaatttgatgcttcttccacagtatgtcggctacgaggggattacactaacaataattactattccacctgcatcatgcaatcaataaaaggaaaagacaaatcaatgatatcctcaaagatccatttaataatattttatggatccaaagaaatttacttggctgaaagcaatatgaagatgctaaataaaaaatgatgctgagactttagcagcatataatattcagaatttcgtgttcttgttgatcatggttatttggtatgattcgttgtttactgttaataatgttagcaagatcctggaaagtgaataaatgcaaattgatgttgctatcaaagagttaaagattctacttttatttcttgaaaagtattgagaaactggttttgaggaggctatgactaaagctactgaaattgcaagtatgatacaagttgaacctgtatatatggaaaaacaaaaaatttatagaaaatagcagttcgatgaaagtgccaatgaggcggtgacacaatcaggaaaacagtcctttaaaattgactattttctctacataattgatcaagctatttcatcattaaaacatgtatgcataatttcatggtgtttatttaaaattatcttttactattaataccatattaactaataaagatgttagaatattagctgtatattaggtgtaaaagaattagggtaacttgtatttattagtttcctattttgttggtagtttcctatttcctagtctcctagctttgtatataaatatgtactattctatgaaatatacacacaattcgaatcactattttctacatggtatcagagcattgtgattcaaa

SEQ ID NO: 392180 - DNA, 852 bp, Cannabis indica
ttagatagcaaaattaaatatacaaaaataagattataagtgcacccatatatatatggattattttttaatgaatattagctattgatgagaacttttaaaggataactataattaaatgtgaattttaaaaattttaatttaataaccgataataaaaaaattaaaatatttatgcttaattttattatttaattaaaaaaagctctattttttacactaaaacatcaaatatatatttctatttaacattacttaactcaaactcaatttcatttaattagatatcaaaattaaacttaaaacattaaagggcacactgccacgttcagtcgtccacaaacttaacccatgattacagttcaatcattcatgttttttataatcataattattaatttaaataatttattgttatatgagagtgatgttgttggtatgtttttttattgagtggaattaatgctcgtataaagcaaatgggataatattattagttaagtacctaccactacaccaattttatcactttttgaaaaaattaccaactacaaaagaatgaatagctataggccggtgtgttcctttttcattccttaaattctttctcttataaaattagttattctttttgaataccagtcgatttggatttgaaggtagcgtgatcactaccaaaacaaatttgttattttttcttccataaatgttgttattttatgagggagaaatgtcttgttaattagaaactcaataaatatatatggaatattttttaaggcatattaccatgaagtaataaataaatttaattaatgaatattaattttaaaaaataattaaaccattaaa

SEQ ID NO: 392181 - DNA, 729 bp, Cannabis indica
aaaattactaattagcttaatttttaatattgtgttgtaaatctacaatacacattcataaaatttaataattatttattatgttaattaaattataaaaaaaacgttttaactaagagttgtaagacaaacattttattgtttattgtttaacatagcttagcttcgagttttgggtgttcgcggtgcaagtggtgcataatgcagtttttataatttttcaaactacaaccgcattgtaaaaccttaaaactgcagaaaccacactacaaaaatgcactacgatacaattaggctcttaccttaccactattattatcaaatattaaaataaaaattaaaagattagtctaataaagtttaaacaattagtgaaaatatattattaaatttttaacgtcataatatagatactaatcaacaggcccgaccctaaacatagataggctaggcatgtgtttagagcttactttgcctagaggtttaaaaaaaaaccttcatttttaaaattatacaatttttttattgatttttaaaaatattatattttttctaaataaaagctcaaacataatttttttatcgtgtcccctaaatttcaagtccaccttggtaattaaattattgtattaaactgtttctaaaaaatatataatatatatcaataataataataccttaacaataaaaaattaataaaaaatagaaaataaaaataatttatatgaa

SEQ ID NO: 392182 - DNA, 1380 bp, Cannabis indica
tcatatcttgtgatcctaagggttctatagtatactcagcctatagcgatttgaatagtaatttcctcagtataaatacaactaaaaggaaagtaggtcattacccactatcacaaaggggtcgaacctgtataacaaatcttattgtctattgcttttcattcttatttatgcaaacatgtgggaagcatcagatctatatgaccctgctatcggttgatcactttttgaggtcaacagtttggtattttcattgatagcatggatattgtgatcagatcaaacaccatggtgaaaacaagaagggcttccgtcgcaccatctgcatcttcaggtcttcctcaagacccacagatcgcagatctatgcactcaagttccagtcacaattggaatccccatgaatattgcagatgtggtgaatcttgtcaccgtaacaggagctaccagtctggccaaactgacatgagcacctcggtggatccaagtggcaggcccacgcctccaagagtagaccaaccattggtgcctcccactgaaggaaggacccaggggtgacagtcccttagaacaatggacctcaactctggttttacgctagaaagacaaacccaggggtgggcgagccagcgattggtgagcctcacctagacttaagaaaataccttaagttggccagactcagggaagctgtaggccatgcaggcctaactgaagaacctcacgctgctgattgtgattttttgttcaatagagacgcaaattcttgatatggatgaatgataggagtacatccttcgatcacaccaagcagaattagatcgctgcaatcgggagtctagcaatctaataagacagttcaattagagaactgatagaagagcccaggatctccttagagatccgctccaaggaagactagtgccaagttcctcaggaactaggacagattttccactgccagagggaggacagacctttcctcaaacgtcaaacggtaagaatagctagatcctggcaaccagcagcatggggggccaaccagggatctctagctcagtagcaccccctattgtgctaacattggtcggccagccaccagcaggagtacccatggccggccagagtacatcatttcctccccaaggagagcaaggtgaacagaggtcgatcttcgatcgacatggaccgagagtgggtagaaccacccaaaatggtaattcgagaattaaaatcgatcacttcaggcatctagatccaccaaactctaacaattggtgtggtctacccccaaatcaacacacagtcgacattggtcgaccgtggagtcacgggaagccaaaccttgcccaatgcaagtctggctggccaaagaggcatc

SEQ ID NO: 392183 - DNA, 2120 bp, Cannabis indica
tcatctacaggcaaagcgagatgttgttgtccaaatcagcatcaactgtctttaaggataagaataacaagcagttatgcggttatcaattgttatccacacgtattttaatgaaacatgatcgattcccacatttcatgaagcggttatgtaattcaaatttagttccatttatatatcttattattaatgagcatttgattaaatttaaaagaaataataatttgctaatgagaatttaccgttagagtgctctgaggcagttattttgtaccactttttggttttctcttcttttcttcctattcattcatgttacttcctttaaccgctacacgaacttgcatcttctcttttcttataaatcactgaattctccctatctgaagtatgaatccattaactaacaagatgaagggaataatgatcctcactgatgaggacgactcaacactgattttggataatgatcaagacgaattaactactggtatttgataatgttctggttgcacgaattcttacaataaaaatagtttttctttctactatgcagaaacaaataaagtttcattgcattggaatggcagattcacactaaaatcactaaaaaacctcctgatctctttgttctaacctttggatgtgaaggagacaaacaaagggttcttcttagggagcctattcattttcaaaatcatcacattgtgttgtacgcaccaagtgatttacaaaatgtctcgctagatgatctcatctactctccattttgggtctaatgctatagacttccttttcttagtaagtctaaatcgttggcaaaagcattaggaaacatcattagacaatttctggaagtccatgatgattcgatggaagaagattggggtccattcttaagattttgcatcaaaatggatatcactaagcctctgctcagtggtcaaaacattagactccaacaagttcgagataaattttgggtggaatttcgttatgaaagactcccaaaatggtgcatggaatgtggtaggcttggtcacccatattagaaatgctatgtatggatggaaaaatcgataatggagtagtgcctgatctactttatggacctgaattgaaaggggttgcactaccaaataatggttatgataggtacagaaccgatttttcgaaaggaaatgcttggcctctacttacgtgtttggctcgaaaatccttactgctgcgattccaaaccttcccaacagacaagcatctcatccttggccactattaccaggagaatcctttgatcaacaacaaaataccaattctgagaaacatcactccagttcagtaccagtctcaaatgaccccttacccacggttaggattgctgctacttcacctaactttgttttgtccacgaggaatgttcagaataatgctactattaattcctcaactaccacaaaggttatgttcgcaccagcattgctaaataatactaccaaccattcgactggtatgatgaccactaatatggcctcacctatctctgcatcaaactatcccacaccagcaatggaaatttcagatgttgatgacttgactaaactttatatgccagatattggtataaaaaacaacaccattgcaacctacccgcccatgccttccatagttaatgctcctctaaatgggactggctctcaacacgcaacatcgaagtaaatcacaactacacatgttgtcattaacacaacattgcagcaaacaattgataaagaaaactgtcctccaaatcgatagccaaatagactgcctgaaaacacctcgatcaggaaaatactcaaaagatgaaagggtccacaacactcataatcctctctaactttgtctactagacaagagacaagtcaaaacacttccaatttttaaatggatcaattggtttttttgacacatctgcagtggctgagactcaaccccgcaatcaaccatgaaaatcaatgcgcggggtctggggaatctgagcgtgttccgtcatcttcgattgcttgtcaaggagaaatctcctcatgtattatttattatggaaactaaacaatgtcttaatgtaatttctcgttttagac

SEQ ID NO: 392184 - DNA, 857 bp, Cannabis indica
ttttattgtatgttaaatccatttttgcaaatttaattgtcaaaataattttattttattttatttctatataatttggctaagttgttgtgttatttattatgtatatcttttattgatttattccattaaaagcaaattaaattaatgttataacttttttaaaataggaaagttggatacgattggaaagttataatgaaaatatcaattctttattggggtttatctttccgatcgtatttctcaatttattttgatttaatattcattttctaattgatttgattagatcttggttgaagaaaattgaattaagacttttattttctataaaaagaaatccacagttactgctcacgattctatctgtacagaagaaaaaatttctaggttgatcgaaaatatttttaaagaaagtttcttgtgagttgtgatcatgtttagaccttgtgtgagctgtctataaggcatatattgattataaatacacgtatagtagctagattttgtatctcttcacatctttctatttcattcatattgtgtaagatagagtatctttgttgtgtacaggagagggtgttcgtctcttcttctgtgtttatgtattttttattgtcttgagtcagtaatcagtcaataaagaagaagaacaaaagtataaacctttcagagaagatttttcaagcttttgggagaaagtgtttcaagtcttccctcgaaaggaagtaagcactcttcaagtagatcaaagagagtttgaacacttgaaagtttcagcaagattcatttgagaatgtggaatacatcaagcttgcgacatataataaaagggactctatttatgcataagt

SEQ ID NO: 392185 - DNA, 701 bp, Cannabis indica
atatatatatatatatctttaaatatatatgagaagactagagaagcattaaactctgttttgtcaatatattaaccagaattcaattaagtagtacgtactgacatgtatagatagaaatatataattaaattttatatttatatttatatgataggtaatcactagagacctcttctcaagccaagtcgaacactgcaattcaaagttgctgaacatatatatatatgttatatatagtcttgaaacttcaataattgactgctttatatttatgaatttgtaactgcagatagctatagtacaaaaatgtgcacgtactacacgttactttagtgacatcttattttatgtttatgtataagaacttctctccaatataactaaaataagtgagatacgatcaaaagttgaagcaaatttctatgatgtattaaacataaaagattaaaaaatcatgatatatattcgacaaaaaaattagtttttaaaattaatgcataattgtaaaacataatgtaaatataataattatactgccatatatatggcagcttttacattttttacattttcttatttcattcataccgttctaagtttttatcattatattgatactttatttttttttgtttttgctcgagaaactcgttcacacaatttttgttaggagttttatttttacactttaaaatagt

SEQ ID NO: 392186 - DNA, 1393 bp, Cannabis indica
tagatcatctgggaacagatcaagtgagtgaatttcatattttcacacctaggatggactttgaataagttaagatgatgagctaccttatccatgatcttagtaagatactccaattctaataaaaaaaaaaaaaaaagcaaaaggagacataagattcccttgtcgcaaacctcttttagctctatgcaacatgtgatctcccctttaatcactacaagaattgagatttttactaacgtaattggtaaactgcactcgcaaaaataacttttagcgacgctgttaagtagtgacgctggcaaaagatccttctggactagccaaattttgtaagatttaccagtgtctaaaggtgcctagaaaaccatgctttgctagcgcagtttggttattacactagtagtactatttttttccagcgtcatttgcctatgaatccaacaaaagtagacacataacttcgctagaagcgggagtattttggtaggtaaaaagatttatcggacccatgcaaaaaaaaaaattaaaaaagaaataggggggaataatcccacgcaaaagaaacttaggaaaaaattgggggaaagagtttagtaagcatctttgttgtattagaatgctagaaaaatttgaaatcgataataatgaaaagcttgatacgacatcatttttattaaccgcattttagcaatgttatttttggttttgccagtgccatataatgtgcggaaaaatctgagttgaataaaaagaaaccctcgcccttttcccttcttcctcctcctcattttcatttcccttctctctccggttccagtgttgctcatgtaatgtcctactaatttaggcgcgctatagtaatttttaaattaccgtgccaacctttgctaatcacagagtttagtgaaaaatatgattactaaaaacttttacaataaatataaactttactatacattcaaaatataaagtttacaaactctgagttctcgagttcattttacaaaatacaaccaaaaaaaaaaggtgtcgcccagcgactaacaaaattgagcccatgatgtcccgaagatttgagcactttaggtctaatcgtctagatatgtagaatcttcattaagcttcagactcactgctaatcagtttttgccttgcctttacatacacagtagaaaaaatatctgtgattcgataaacttagtaacaaaagcataaatcataaacatatattttgtcttgtaacctaggcacgcccacacacctaatcacaagtataacccacgtccaacatatttgaatctttaacgttctagacaatcaataaatatactatatgcactcagtaccccgaaagtactattgttggtagtgttgtgtaaagcccgcttag

SEQ ID NO: 392187 - DNA, 590 bp, Cannabis indica
aatacaatacagtataatacaacatagcaaacaaacacttacaataaatattaatgaaggtcatccaatttatgtttacttgctcaaagattctctttcattttattaagattgtttaatagttctatgaaatatgttcaatataatttagtaacaagtgtgaaatattaccaaccattcataaagtatcatctaaacactactagtgtctaaataacaatgctcaaattcttaaggacaccaaaaaaaaatcacatacaagactgtttttatttatttatgatacttagaaaattataatttttttaaaattcaaataatttccacaaccaataatattcaaacaattaattgcacatgcaattaactttttaaaattttatttttgacattctaaattgtttaaaatttcctcaaaactaatgtagtatagcattgctatgggacaccacaatgcacccaacactagtgattaacaattttttatataatttaagtggcgattagtaacacttttttaattagttttttgtttttaaaatagaaaaagtgaaaatatttttcaaaaatatgttctataaaactgtttt

SEQ ID NO: 392188 - DNA, 1564 bp, Cannabis indica
cactaaccctgattcccttgtggcttcccccttaaaagctaaatactttaaaaataatgatttccttcaagcttctgttggtcattattcttccttttgttggagaagtatcctctggggtagagacattctgtctaagggtttagtttggaaagtgggggatggcaattctgttcagatcattagccccaacttgattcccaattatagctctattacttttaaaaatgattatccacctccttaaaacatggtttcttattttatcagggaggattgtgctagaaattctaataagctcaataattattttcattcggactttcttaacacgattcttaaagtaccaattgaccctttaaataaggactgtctcatttgggggcataatccttttggcaccttctctgttagcccagcttaccacttagccaattcctctcaccccaatcccagttcctccaatcctgacacttacaagccttggtggaagtctgtttggtcctccaatgttcctcctaagattaaacattttatttggaaggcttttaactacttcctgccctctaaacttaagtttgtaggaaaattttttataacctttactactctatttgttttaaccaaattgattctaacactcactctttgttacactgttctagggcaggtaagtattggaaacaaatcatttctccacttttttttttcataataataaagcttgtgacattaaggaatttctattaagaggttttaatttgtttcaaaaagaggagttgactgccacttgggagaggacactctacttccttcccctagaatgtataaattgagcatggatgctacggttaagagccaggataacaagcatggttatggtattgtagttcaagactcacaaaacaacataattgcaagtttcttatcttcagcaacctcaggccttccacttatctatgcagaagcagaggctcttcttagggctttgagttggtgccaggcggttcatttccctattgatattattgtcacagactatcaagtccttgtctcaaaaattttgaagcagcaaaaggatctcttagccctctctagtttgatttggaagatcatccactctttgtcctcctttcctaatgcatcaattaattttacacccagaagcaataattttatggtgcacgacctcccacgaagagcattaggaactgatgaagaactaatttaaaacaattgtgtttcaagtcttctttaggtccttgtaacctattttatttctttggttccaggtcttgtttgtttaaaaaaaagtatatataataaaaaaatgattcaaatcaaaaaaatatacatataaatgatagagcaatttgcggcaaaacttccttatgttttaatttttatacacttaacccccttatttttttttttgtggcaaaacccccttatgttttagtttttatacacttaacccctttatcttttttttggtggcaaaactcccttatgttttaatttatatacacataacctctttatcttttattttggtggcaaaacc

SEQ ID NO: 392189 - DNA, 1401 bp, Cannabis indica
gctccccgcgctcgacctcctacacctcgtcaattttcttttccctcctaacaccaaaagtctaagcgaggaggtatcaaacaagataacgacgacacaatgagtatagatgatgaggacaaagttcatttcatccgaggtacaaaataaaaggggtctttttactatagcttaggatgtatggtatatgagaccatctaggatacaacgttatcaggtgtaaaagtgacttcaaatcttatggattagggatctgatgatatttttaaattgttaagggactcactataaataagggcccttgaaattattgtaaggggtaagttgataactatatgttttcattaaactttaactaaaaataactgcataatacatttaattaaaatatacccttttttacaattgaactacctaatagacccttagttatgttaacaatttttttttttgctgaaaatttatgttaccagattgatgagcctcacgcaaattagtcattgatgtagctgagcaagggagtcagaaatgctgaggtgcgacaacagaaatggttcaacgactgtgtggttgcgaagctttgaacctcaggacgtacaactctgattgttgttgatgactgtgaatctttgagagagaattaaagcgtatagctccggcgagggagatggctaggaagttataggaagatttgttttttgctgaaagttttaagcagagaaatgttaattcatatattgaattagagaagagattcgtttgagaagttagagggttataattggaagaatgaaggaaaaagagggtattaattaaaaaattttgaacaagaggtaaatatgagagatactaacttaaaaggggtatgcaatctaatttcctcttattgtaattgggggggttctaggaaatgaatggaacaataacttcatgaaatttccactttaaacattcttctattaagtttttttaggagatatgtctaaatcctaattatatcgttgacgagttctaacctgtaataattttgcatcgtctttgggaacgacaatctctagctacattggttcttaaatcattcaccatcactttaaaaatgtcaatatattctcatattctccaagaaaataggggtcactcagatgaaaaccaaccgaccacaatatttagaggacaccaacctcctgtaaccggagagggccaaaggaagaacaaccaaagtgtaggctatcaagaaaacgttcgaagagagccacccagcactgtgtgactcgataacgacattgatggctaaccccatcaacaaaagcattcaactaccaagaaagccatctctggtgtagagccttctgtcatctacattattaaactgttaggattttatgccctaaataaaatcta

SEQ ID NO: 392190 - DNA, 477 bp, Cannabis indica
tcatgggcagcaagagtaatgcaacgagccacattgatgttaattgcataaaacaggggaaatgtctaaacttggagcaacaagccaatttgattaggccttttaacaagggggatgtcaagaaagctttatttagcattcacccatctaagagcccaggattaaatggttttggttctggttcttacaaagacattgttgagttttgtgccctaaataaaactcatttcaatataatcagatttacttattaatataagatcagaaaatcgcattttatgttgcatggtttacgtgatttatttcatgattatgtttaatgtataaattctattaagtccagaacatatataaatatttatatcattagtaatgtttactagtatcggatgtatggagtatacattagaagggaccgatattaatcttagataagatatcataaacttattgttatgtctttctaagtcgatatca

SEQ ID NO: 392191 - DNA, 1443 bp, Cannabis indica
acattcatcaatttatggtaataatttaccaatttaatttagacagacttgacatgaattctaactattttgggttaatgcatttaaaaactgttaccactttcttttacaacattggaaaatttgaccaggtttgatggaacattagaaaccactgacctattattttttgaagttcatgtttctggttcatcctttagattgagtgaagctagtgaatttgataacaagccaacagaatccacaggccatttcattggaacatccaaattcctgttaaaaaaaaagagttgttattcaacaccaaagttaaatcattgcatgcctatgatacagatggacattatagtgtaaaattttagtatgagcctttccagaaagttactaaaaacagaatgacataaaaactgcatacctctctttatgtttgaacttgcattgactcattttatgagaggaatagtttccatataataagtcaagctgttttgatagttttggtacttcagaatgagccaaaacattccaaaccttcaaaatctgaacttgatgagaattttctatgagaagatctacagtccaaacaatacacatttgcttaaccttataacactctactaattgggatgaagctcctttgcgccagccacatgaaagcttctccaataaagaaagtatttccttacaaagctcgtaatctttaactcttgtcatcgaaatccagaaatcgttattgaaacaaacctgtgtcaaaattataggacacaaacatgcaaacatggagtggtgaataggcaatcataagtacataaaacagacatagattgaaagaaaaaaggtctatcaaaatgagaacataccttccatcttgcatctctaaacagatgtgaatctagatttggtaaaagatggatttgtttaagctgaaccaaggcagcaatgatagccaaagacaaattcttgtcctcattagcattgtgaaaacaactacgctctttggcatccatgactagcttcttccaaacacattcactatcacctaaagtttctccattgcccacaatccaaaggcagtgcctagacaattatgaatgtgtcagtgaacttaaatcacttaccaaaaatgtatttttcttctagaatttgtgtgttaccttgcacgagttagcgccacatttgctctttgacaattggaaagaaacccaactgatcctttagcattgctccggacagttgagatgattataacatcttcttcaccaccttgaaatccatcaaccgatcgaacactcaaagagaagtcattttgagcatccaagctgtattttgttccaactatctcacatattgcataaacttgtgccttgtatggtgatataacaccaactctaatctttttctttgtttttttaacttctgagagatcaaaaccaaaataataat

SEQ ID NO: 392192 - DNA, 598 bp, Cannabis indica
tgtaataatatctctaacaatcagttcggattagagtaaaaaattatttggatcggattagatccgtcgcgcctcattgtttttttttttgttaagagcaatgtaagtaaataatatccaacaacctaacatcaaatataaaagatcaatttcaagtaaattaacatgctacactattatttattggggatagattttgaaaaatgttaacattatatttgaaaagttttatatttcttttatataaatttttgatatttttacataaaatcggacaaattgaaaaaaaaaataaattcttccaacaagttcttttattattaaattgattaaaactttagactagagtaattaaacatgttgattttttttttcatctcttctaaattaggcttcaaagttcaaatatatatcaaaaaagattagtttgataattaaaactagtagaacaattttgtaaattatttatttttcgggattatttcacgaaaacataaaaacaacaaaaaaaattacaaaaatacggtttcacgaaattttaaatatttttacgatttttttattttatttacagaaaatacggtttttttatgttgta

SEQ ID NO: 392193 - DNA, 1910 bp, Cannabis indica
atggatctgttgaaagatgcaaaacccgtttagtagtcaaaggctacacacaacaataaggcatcaattattttgaaacatatgcttcaatggtaaaatttaacacactaaaactcctctttgccttagctacaataaaacagtggcatctccaccacatggacatcaacaatacttttttgcatggtgatcttcataattaaagatatatacatgaaattaccacaaggatataaaccaaaaggccctattcctaacaatgcagtatgcaaattaaagaagagtctatatggactaaaacaatcctcacgacagtggtatgccaggctcagcaccactcttctccaacaaaattttattcagtccaaaaatgaccattcactcttcatcaaacattccaacaatgtttttttagcaatcttaatttactttgatgacattattgttgccacaaataacatccctgctctaaatcaattcatcaataactttgattcacatttaaaactaaaagatcttggcccactttatttttttctaggccttgaaatagctcaaaacaataatggcatctctgtcactcaacacccttttacacttcaattgctacaggaaacaggacatttgggagccaaaccagtcacaacatccatggagcctaatatcaaactgaacaatgaaataggacccctacttgacaatcctacttaatatcgaagccttattgggaagctgctctatctcaccatcactcggcatgatatctcttttgctgtcaacaaattaagtcaatacctccaaacacctcgtgctccacatctcacagctgccaaccgtgtccttcaatacctcaaagctacccctggacaaggcctgttaattttatgccacaggtcctacaccacttcaatttgaagcttttgtagatgcggattggggatcatatttggacacacgacggtcaatttcaggctactgtatttttttagggaaatctctcatttcttggaaatcaaagaaacaacaaactgtatctagatcttctgctgaagcagaatatcgagccatggccaatgcttcctgtgaactcacctggcttcattcaatcatctcagaattcaacttcaacatcagactgccacccaccctgttttgtgacaacaatgctgctctccacattgcaaagaatccagtatatcatgagcgtacgaagcatgttgaaatagattgtcatctcataagggagaagatcaacaatggcacaatcaagactaaccatgttccatccaaatccaacttggtcgacatcttcactaaacttctattccctaatcaattatttcattatttgtccaagataagtgtcaaaaatttatacactccatcttgaagggagctattaaatttatgtttagctcaaatcggttaggttagttattactgttaagttagtctttccttttgcctatatatatttattcctcttctcttgaccaattgtaacaaacacttgatattcattcttgttgaataaagaattattctgtttttcttaatcactaatactaatatataatctttctatggaaaaataaaaagcgccagaaaaaatgcaaaatttcttgtagtaattatttttccaaatgtgaactaaattaaaatttatacaataaatagataatatggttttactttgattcgtatcatcatgtcggggggagattgaagatagtcaatctttatctataacttgatattacatgatctttcttatattcaatatatgtataaatatatatatatatgttataaaataatataatataatataaagtagatgagaagaaagaagaagaagatgtagagagaaagagaaagtgaaggagaatttctgagttgtttattccaat

SEQ ID NO: 392194 - DNA, 1431 bp, Cannabis indica
gttttaatatttttttgaaattttgtctggaaattttagtgacgcttacaaaaaaaaaaagtctatttagtgcattttcaaatagcatcatcatcaagttggatcttacattatttgaaactttggtagaaagctgaatatgtataattaattagatcatgtaattctttctcatattcatttaaagggtagaaattataatgagggattattaattataattaattatatgcagagtacttaattattataagctgagattgtattatttattaattaatttattgagatgtagttgtcatatagtatgaacctagaaacttaaatgttcaaaaattaaaaataaaaaataaaaaacaatatatgtatatatataaatatatttgatcatatacattggaaatttatgtagtagggtgtaaattttttatttgtttcggtatttaagcaagttttttaaattattttattttttcatgatcatatacattatatctatttaagactacttgtaaatttttaaaaaattctaaaaatttataatgtcaaaaatattgtttaaatagttacttaccactcgtatataaaaaatagtcgcccgtgcaataaaatatgtaattcttactttcggtattataaactatttataatttcctagatagctagaatgtatgcaactttaaaaaaattagattaaagaactttttttgattccaacacaaataaaaaatctaccaaatatatctataaatagtgcactatatatatatatatatgaaccttttcttcttttgtagtaatcttgtataggtacagttgatataattgaagggtaataactaataaatattaataatttttatttgtggtaattaattaatatgggcatgcatggttgacttgagtctatacttgggacttttaatttcagcctcttatattaccaaacgcctacttattgggatctcttctatatatatgtaatgctagctagaattaaaagaatataatatattattacaataatgattattttaaaataatattattcgaacaaaattagcaaaagagagaacattaattcttaataacttgttttggtattttcttaaacagtatatggtattattataacattaatattaagttctcaaagacccaaaaagtctgcacataatgggagcaaaagttttaaaaaataaataaaaagagcaaatatatacaaaatttatattaaatactataaagccatagatataaaaatttatataattgatatggccactaaactaatttttactgttgatattaatttttactttaagaagttcttaaatgccaagcaagtgggagggagggaccatatcacaacattattagaaaagagtacttttacttacaaaaaatattatatttttttttaataatata

SEQ ID NO: 392195 - DNA, 988 bp, Cannabis indica
tttttctttaataggttttaaattaatatttagaattaagtcattcataattttatatacaattcataatttaaaatacaataataaaattcatataatttaaaaaattatggataccaaatattgttcaaatgctaaaaaaaaattaagtttttaatacatgagtttcgtctctacatatgtaataacattaaaaagaaaataccatctaattcaaacaactttttctgcatgcttagcagagttggaaacaattcaatcaacatgataatacacttgaattactccaccttcacttcaagtgctgaaaacaaatatcaaaacagagataatgagcacaatagagctaaaattccttgggtgctcactcaaatttcccaaatcatgaatgtaagactcatcaaaatcttcagaaataaaagggtaatcttatctaagcactgcttgtgtaatgtagaatcatgaaattcagaattaacaacaattgcagatttcacataatatttttattgaacaaagtatacatttaactatccaaaatagaagagtaaaggaagaatatgcataagatcaatttgaataactttatagtgaatctttaagctatctgaagacctaacttacactagacacactaatccctaaatttatttccacaaaatataaaattggtatttaaattacaaataatcacacagagctcggaacgagctttccaacgatataaagaacgtcccaaacagagtcccgagtcaaaagttatggccaaaacaaaaacccgaaaaaaatacaataagctaccataaaattgctgcgactactgtgtttaaaaacccaagaaacccagcttccacccacgaaaaatgcatccataaacaccaattttcatgctaaaccagcccacaatcataataaactttcacttagcataaatcaaataattagagaagaattacacctaattcactctccaacaacaccaaaatat

SEQ ID NO: 392196 - DNA, 1759 bp, Cannabis indica
gttctatggtcggtctgcgacccttggatgacgaaggcttcgtctaaccaaaaaatcctttctttttccaacttttcaatcttcccattcattactcatgggccagccttcttccccttattctttcaattctgctaacgaataattgataataattcccaaatccagatcgcctagttgttctccatctaccctgacgtcctttgactttaggccccataaaaatttaatcaattcccaacatgagcacgtgactcaatgaccggtaaaacacccctaggggaagatctcgacaaatgggacgctaagttaaaatggaggaaaaggtactccataaactcctcacccaccccacataagggacaagaggtgttttcaatctgcattctcttagctaggaacactcgatttgttagggaataggagagaatacactaccaaagaaccttatggcgctccaacaccttactattccacgatttattccatagggtagaagctacatcacaaggaggagcatgttcaacaacttggactaggtaagctaacttgctagagatggttctttggtccaaatccaccaatcttttccttgggcactagacttaacccccttcaaaatattactaaccatctcagaatcaaaaagggatttgaactttctgaggaccttaactccattgtctaaaagaaagtcatcaccaacccattgaagataatttggaggattgactacaaggctaagatcgaacgctttgccatggatgacccacgagtcctgctagatatttgtgtctttcccaacaatgataaacatacatgcacttttcttaaaaatagttcaggctttaacaatatttttccaaaatcaggaatcagaactcttgtaagagaaattcataaaatgtctgttttttaggtacttggcccaaaggaccttgcaacaaagtgattgattctcattaatcagaagccattcccatttttccaagaaagcttggttcatctctaaacatttccaaaatcccaagccccacgcaatttggggagacacaacttttctaatgctttcaagtagaggccccaattccccttctcacaatcccaccaaaaacctattaccataccattaactttagatgccaatctcttagatagtttcattgttttcatagtgtagattggacgtgcaagtcaaactgatttgatcatagtagctcaaccttctttagagagggatttccctttccaatataattaaattttgtgtccttttgatgagatctgaagagcggaagacccaaatagttaattttccaataataccatcaatccccataacctctttgatacatctcttcattccttcactagtttcattactaaaaatgattgaggttttgagtttattaatttttttgccagaccaagcgcaaaatttcagaagacattcctaatttctcttagctttatatatgtttgctcaacctacaagaatgaggtcatgcgtgaagaagagatgggagagtcaagacccatttttgctcagcttaatccccttaatcctccttattaaaggcatcctccaaaatacgggagaagatatccactgcctagatgaagggataaggagaaagtgggtactgcctaatgccgcacttaggagcaattgtacccacaacatgtccattaagataaatgttgagggaagttgttgaaacacacttatagtgtaacaccctaactaacttaggcgtat

SEQ ID NO: 392197 - DNA, 1064 bp, Cannabis indica
tttttttttttttttgagggaaacgaatagagttatttaacctatacgaaagttcatattcaaacaaaaaaatatatattttctatcgtatctaatatatttttatttttaaaaaattcagaataaatttttttaaaaaaatttcaaaaataagttaatacattttttcttttttacttttactcttttaatacaatttttatagtttatttatagttgtcatgttattttttattattttataatttatttatagttatggtgaggttgatttttcgttgttatttagttttttttcttactttttgctaaataaaatttatttttgtaattttaaaattttacaaacgtacttttgttaataataattttatgccataaaattataaataaaacataaaaaatatatatttttgaaaattgccctaaacaaacacttttttgaaaatggagttcaaaaacctaaaattcagaaaacaacaaaatgttattttttattttcaattttttttttgtattaacatatttttttatatatattttctcacatactcgggtctaggtctaggatcgaggccgagtttgaggtttgagtttgggtccaggtcgcaaggctgacatccagagtttgtgtcgacgtaagggtggggctgggtgtcgtgttgtggtgtggtgtggaatattcactactacaaaattggcatttctcgtcggtttaaaactgtttgaaaaactctttctattagttcataaaactgtcggctatgtggacgccataaaaatagaccccttaagtagcggtttataatcgacgggaaaagtaactttaagtgacgatttataactgacggaaaaagtcaccttaaatgacggttataaacagatggaaaaattatccatcagactgtaatcgacgggaaaagtccccttatgcgacaggaaaggtttccgtctgactgtagtcgatagcaaaaacaatatttccgttgattctagtccgacgaacattttgaggcaaggaagaaattaaaaatgttattgcaattcctgttggaaattatttt

SEQ ID NO: 392198 - DNA, 1297 bp, Cannabis indica
actatgcttgccttccttccatgtacattctccttaacctgaaattaaaattaattatcaaaaaaataaaatcttattataacattagcaatatgtcatatatactaaagtgggttggtcagaaaattgtaccttggctcttaattcaatggcaaataatccattacttaatgaagaattaaccgttgtggtctcaatccgaagctctttcaacatttgcatgagttcaagtaacaatccttctctgtaaggacattggagctccaacaacccgtcattctctataatcgaaacttgcaccgttgtctcggaccgaggcgatagcggtggagaagctgaagactccactgacttgggtttagctacgacgccatggcttccttccacaatcctcattttcctcttttcagttccgggtggttcaatccgtacccgatcaacaatagtcaacccgctccgttggtctttcaaggatccagtactacacgtcctttgcgggacaactggcatcattaatgaccgttgatcaagctccatcaaatggttacgtgtctcgagatcttgaaccttttttctcaactgttttacgtactctatggtatctcctaaaatagaggccttgtccatcttggttacgaaaggtaccaacgaccttaatatgatgaacctctcgttgagcttctctcggcgccgacgctctgccatgacatggttggcgctgagctcgtcttgtggcgtcccgcctttattccggaatgcccgggtcgcggtgtcgactccgacaccagcgctgcccttgggagagttttcgtcgcggtacttggtgtggaggaggggtacactgaaaaggatatactttaggagccattgtgaggttgattctgatgatgaagaggaggatgacacgtggaagatggagtggtgatcgttgaggtttgtccacttggagaaagctgattgggttgagtacgtgacgtagcctgatgacgatgactctgcccataggcagctgggctggttttggaggatggcggacactgtttctgagtagtgagtgtcttcatgtgctatgtcttctaatggatttgtaggacctgcatgcatttaattatatccattactctaaaattatgaagcgtgaaaataaattatgggcacaaaggacactatctacgaatacaaaccaatgcaattctcaagtaatattgtgtgttaaagagaagtaaaccagtgcatttagtatagtaagagaaaaaaaatagaagcaattgtttcataaaagaaaaaaaaattaaaa

SEQ ID NO: 392199 - DNA, 962 bp, Cannabis indica
aaaaacaccatttgttataatgaacaaattacctttttaatgtttgttaatactactctgtgatttatttttttcttaaaagaaaaaatgatactaaaaattaccaccaagatgaagaaagatttttcaatttcttattaataatgcttttttgaaatcaaagaaaatatatagttattatgaatttatataaatgttaatttaggctcataaaataattataaaattggtaaaattgaggtggaagactgaagaacatatgatttggaacatggtcaactgtgaagtaaagaaatggaaaaaaatgttgtgatatttgtatagtgctttgaaatttaaaataaaacattcagacttgttgaattattggtttctccaatcaaattcagtgcactctcattgttttttgtcctgccttcacttcattaatgcaacttttatatttatgtttcagatttgttatctcttttctttttcatgataaatttcatgcaagtacacaacgatttagtagataaatacttattattcaaattcgaataaggagctatcgtttttcatgtgcagcttgttttttgagacttgcattatttctaattctaccataacaaaacacagttagcaaattgggtccagtccagtagcactgtagccttgttgaactagctacccattcttttaagtataaaactgtggggattatttaataatcaatattggcaattggtaagtaacaagtagtgacttttgttggttgcttattaaacatcttacttttgacttttttttttaaataaaaattctcatatgtaaaaagagaaacaaaataaaaataagaaataattacataagacataattttttgtaaaatatttacatttttacgtttaaaaaatatttttttttttactatttttacggttttccaaaaaataacacgaaaacaacataaatcaacaaga

SEQ ID NO: 392200 - DNA, 1003 bp, Cannabis indica
ctcttctgaaaatcttggaggttggctgctccttcctgttgtaatttgttccagaaaggggttcccggccgtacggatcccaacctgaaggaaggccaattgttgttcgtcgtccaccttcttggttttcgaggcctcctccttgaatctctttatgaagttctttagggtcttcgtggacagttgttttatgttggttagggcactgacctcaaggttgatctttcttgtcgcaataaattaccgtcggaaactcacttgtaatttattccaatagtccaccaatcctggctccaattttttgaacaattcttcggcggatccggtcagtgtcaagggaaagcatagacattttgcgtcattactgaccctcatgacggtcattaccctattaaatcgggacagatggtcactggggtctgagtctcctgtgtaggtcgctaattcgagtattttgaaatttttagggagttctgcctctaagatgtttcgggcgcaaggttctcggtcctcgcaatcagcgtcagaatcatcccccttttgtctccgggagactctagcaatgtcttttcagaggatcgccaatttttctaagattacctcatttaaggcgtcacttgatattggtaccgcgtgcttcttcttttcgaggtggtttctcaagtcaccatgtttcttgttaattttttaccttaaatcaacttgaggatgcctttgacctttccttcctctttccccaggctcatggtgcacagacacgctctttcggtcctctatgttatgagggccaagactctctcgacggatcttgcccctctgcgaacctatcccttttgggaaatctgagcagaccttttgcggatccttagcccttttgtttctcacagggatcaaagtgggatttttcttacggtcttcctcaaaaggatatcgtatggggcttgactccctagttttaggcctttgggtgcttggcgacgactccttttgcgtttcctctagt

SEQ ID NO: 392201 - DNA, 736 bp, Cannabis indica
gaaaattaaaaagaaatcaaaattgaaaaactaattaagaaatttaaaagtaaattgtttttctatttaaaacttcatttggaaaagaaaaaagtgtcgatttcatgtaaacaaaagttgttgttgttgttgttttttttttttacaatttgttgtttaaaatatttattgaattttgaattaaacttttttttgttttttaagatgtgtttgtaagtataaaaaatttaaatatattttgaaagagtaattgtttaagtaaatttaatgtttttcactttttacttattatttattttaagcatttaatgggatttttaatattttttctttaataataatttttttgaataaaagaattgaaaattttggtatttgtcaaagtttaaagtacttatttttgtaatttttttttacatttttatgtttaaagatttttttttaatttttacgatgttcaataaaaataaaaagaaaactatataaaactaaccaaaaaataaaatctaaacaatatcaaaataacaacaaaaaatatcatgcgaataacgaaaattcaacaacaaattatcaaatataaatatacatcaaaaggttgtattttctgtaaattaaaatcataaaaattgtaaaaatatttaaaatactgtacaaccgtatttttgtaatttttttttttttgttatttttgtatatttgtaaaataattccttaaaataaaggaaatatactcatt

SEQ ID NO: 392202 - DNA, 754 bp, Cannabis indica
attgataaccttccttcccttagatctgtctctataagacactgccgcaatttgacatcagtactggaagggattgataaccttccttcccttgagtctatcagaatatataactgccccaatttgacatcactactggaagggattgataaccttccttcccttgagtttatccatatagcagactgccccaatttgacatcaattcccgacagctttaggagagtggggaattctactatttggggctgtccaaagcttgaacagagataatatgtaaatgaagtttctctgtaagtttatctctttctgtctctgtctgttatggtttaattagactaatgtgtttatgaagcattcatgcattaatttggaattgtttgaagattgcaactctgcgatggagcaaatttgtggtgataaacaagaacaaggcagaaagggagtgatgtaattgaattgattagttattatgtttgatggaacaagatcaaagaggagtccaaactctgggaaggctgcattgaaatgtgaagaaaatatgagattgattgtccaatgatcaacgatgttatgattcagacaaagtaagaaatgactccttacaacacaactctaatatctatctatgcatactgcttaattgttttgttttgttgttgagtttaattgttcaatatgaatgactcatttgataggtttcgattggacacaagagaaatggtggagacattgggcagaaacaatgccattt

SEQ ID NO: 392203 - DNA, 1076 bp, Cannabis indica
tgcatatttatactaagctactaatttacctcattataaaatctaagagttcccttattcatgaccttagtaataaagaatgaaagctagaacaattaattaattatagtatagtttggatgtttgtagtgagactggggttgactatatttgtacaaatgtgtacaaatataggagatgttctatattatcatctacatattggagatatcgatgttgtttctcatcagacaagtcataataccacatgtcgtagttggaagggttttaaggaactcagttcgttataatttggataatgaaatcaacttattgatgggtgacactagtgacgataaggaacataaatacatgaaatggattttatgtattccaattccattatatggattcttgcagtagcactgagtgactttagagccattagatgatagcaaatctttagggccagtagtacatctaagtgactctttacggtctcaaagactaatgattcgactatcgtaaaattgggtagaataggtatcggtggaaaaatgttgggaaaagtttttcccgacagcaaaaaaacgttggcagactattattgccgatgattttgcacaatcggctacattaaaactgttaaaataaacctccacttacactgatattaagactcaatacagaacaatacaaggacagaacagtaaatacaagcaaagccctaagttggccttcggcctctacttccctaacagaaattagttagaatggattaggaaaatccacacctaactaatttctgtaactaactaaattaaacacatgcagaaattaaaatacaaaccctagatctatatatacctcaagcaaacaaccagatctacacggttgagtgattacttcaagatccagaggttctgaacttgaagaaggagatgaaaagtacctcgcatgcacaagaaaacaaatagagagttagactttgttaggaagagagaataaacactaaaactcgtattaaactgagattaccagtcgaagaaattacctgtgacttggaatctcctctgatgtacttctgaacaacaaga

SEQ ID NO: 392204 - DNA, 987 bp, Cannabis indica
tttttcatcatgacttcaaaatttacttttagaatttcgaggtcaacacaaggcattatttgcaactgtgttggtgtgaagtattatctcaacaacttgtaatgcaatcttggattctctacactagatcattcttacaaaaaataacatctatatttcattgctccattcctcatgggtttgtggtttctacctttgatcgggttattcaaaatttagaataggtaattttgaaatgttctcattattttgttttttttatgaatcagaattttcattactctacaaaacaaatgcctttataatctataagcacctatcgagtaggctttaactttatctatacaagttacttataacaaatcaaaccaaaatctatctttttatttaatcttttttagcattacagaaaatactctactctttacacgccatttttacttgttgaatcacttcagttgtgcctactttttttccattctataattgctcattccgagctttccacagcaggtatacaactattgcaacaccaactgccatcactctttttttgaagctggaaaagctttctttcctcacctttctcatgatagtttgaagtgaactatccttgatattccatccaaaccaggccttcaactgctcgagacattctacagcaaacacacactcaaaaacagatgttttgctgtttctgcagcaatattgtagaagaggcagtttcccgtgtcgatcaaaccttgcttgattaattgatcccttattttgagcctattcatcatagctaaccatagtaggaagctatgttttgggatgttcaacctagaccacacttcattgctccatggtaccttctcaaagtcttgtgcaaaccacgtttgtccctctgcaattttgtaaccgttagcagtgaaaacagtgtgctgaacataattttttattttgtctttaagttctaccatctttctccaataccaacttcca

SEQ ID NO: 392205 - DNA, 1423 bp, Cannabis indica
aaaaaaaaattaccaattttctataaatataaatgagacacattcatatagtttgtattataaatatgggctggtccattttacaaaaacgggatggcccgtttaagcccgatatggaccccacctagcacgaataattcgtgtttatgggttaggttaggcatgacctttgaattatgggctaggtctgacacggaccagaccgggtcgagctcctctaatgtacaactttaaaaaatatatattattattaattcaaattaatatcaagtttagtaagaaaaataaataattaatatcgagcctaaacgtccatacttctttgttcacatgtttttataatttataaatagagatattgactgcaaaactacttaaattgtacttttattttggttttcacactttcgttataatgatattattaagtgccaacatgtactgttgatgtgtacacaagtgtacacgtggcaaaatttaagtgacctacataattttaaaattattttaaaataattaaaaaataaataaaaaaataataaaaaaaaaaaaataaatatttataattctaaaaatactaatcccttcctctcctcatacctctctttatctctctggtttcttggtgtggcgccgaaactggaccagagccaccatctccaatccccctctcacctcaagcaaaccttgggttccttttcccgaaacccaaaaatccccaaccctgaagcccattctcccttgcactccctttcttctcttggccccttcattatcacgtcgtcgccaccaccattagctcaggcgaagttggacttgagaatccaaggaaaactcgaaggtgtcgcggaccctctctcttttttctctctatttcctggcttctctctcttgttggggccaaagtttttcgacctcgattgcatcatctttgatcccgttgagccaaacgagctatggaaatgtgttcaccttgccaagggttttgagaatttgtggctcgatcctccatgcacctcatttgaccaagaactgccaccacgcacaacggggggtctttgatggttccagttctgatggagcacccagaccctccaaaatctgtggtagtaattgttgggtttgttaaagacatggattgaggtggtggtggtggtttcttgatggttccataaaaaaagagagagcaatcggttgcaatatttattatttatttattttaaaatatttttatgtgatatgaaataattttataatattcaaataataaatattatgtagaccattagaaatctgccacgtgtatactgtgtacacttgggatgtccacctaggcacttaataataacatattaacggatttgtaaaaactaaaatagaagtgtaattcaggagtgtttattggatcacatccaatagattt

SEQ ID NO: 392206 - DNA, 1609 bp, Cannabis indica
attatttttaaatgtgtggagttcaaatgatacatatatgtatatattctttcttatttaaaaatgtgtcattatttcgtcttgattatttgatcttttagatatattatcttgatcggtggttttgtggggttcaaatgatataattatccattcggatacagtcccttgaaattcaacaacagtccaaaaagtaggtattgagttaatcttgctaaaattatttgatatacatttataaatagaatttttcaaaaaaattaatttgcgtaattagttttatcgtattgattctagtttttttgcctctattctcaatatttattttataaatcttaacctcatttatattttgacagagctattgaagagatagtgagctacatagtcaactgagttgtctttctacagccaactttatttctggtatagtcctactactgcctctaaataattagagtgaattgcattaattagcattggagctggtaattccaagctcttaagaatgatgcagaggaagattaattttttatatgactccaatctcttaattgttaagctctctctctatatattattattatgtgtatgtatttgtacatttgtcactctcttgtacttatttattttttatgaataattatctagccatatggtgagagaataatgcaactgttaaggctatactaaattgttttatcaatgtagggctacttttttttgtctttgttttggaatttttattgaattgagttgctaaatgtgatttatagttgctttaatttcatactataatcccactacccatactttgttgatttcttgtctttggtgggcagtgggatttgttgtgcatttggagtttgttttcttctttgtttcattttttggattcaaggatgacacgaattgcaccgcatgatggtctgatgtaatgaaaatttataattttctcttaccgacatttatgcttcattttataactgacgcaatagatgaaaaaaatatttaagcaatttatgtgtcttgttataactgacggtaaaagtttttagtatcggtttagaaatgacacaaacgagtttgcgtcatttccaaactgatgcagaagataaaaaagaatagtgtatattttgtgtcgttttttaaatgaagagaattatattttgtgtcatttaaaaaattattcgcgactatggtatatacattggttttataaactgacgcaaattctttaaatgacacctaaaaactgatggtaattgcactttttgtaatagtgaacctagaaaccacaaaagcaaaagattgataatgaagacgaaatatacctatggcaattacatcttggtcatatagggtatgatagacttcacaggctaaccaaaggtggtccattgaaatgtcaccttatgtgaattaccagtttgtgaatcttgcctagaaggtaaaatgacaaaacattctttctctagaaagggagagcgtgccaaggaaccactaggcatagttcattcagatctctgtggacaactgaatgccaaagctagaggtggttatgagtactttgtcactttcatcgacgattactctagatatggtcata

SEQ ID NO: 392207 - DNA, 570 bp, Cannabis indica
aaataataaattaattattttaacaactaaataattaaccttgtttttctattttttttatttttcttcttcttttgattcactccctctcgtctgttctactactctccaatttgtaatagcaagagaatttgctctaaaaaaaagttaaatgaaatttgaaccagagaagctaaaataaaaaaaaggccaccaaaatctacaacccaccagagacagggactggcagaatagattcaggaagatcgagttggagtaaagtgtagctatttagggttttttttttgtttttgcttaattgtttttctgagttttctgcatgggatcataagatgagatgaggaagaaagtagagatgaaggaaattaaggaatgacactgtagcagtaaacctccaccactaagaaggatggctggcaaatcataaattttttttatagatacagggacggagggacttaagccattgtgtaggcttaagccctcactcaattttataatatatgaaaaaaaatatatgttacatatatctatttaaatttttgtttattataaatgtgtattaagccc

SEQ ID NO: 392208 - DNA, 1477 bp, Cannabis indica
tagcttggtcactatcacattgtatatacttattaggcacaattgatgtgtaactaatctaaactacccaattaaggctgatataataattaagtgtgtatttaatattacgtactaaatatatttatataacaacacaacaacaacagcaataatagtaactagtaacaaattaaatgggtgatgaggagaatagagaagtgcctctattgaggagtgaagaagaagaaaggtgtccaggttgtgttgtggagaagttgaagcaatccaattcttccattcctttcaaatatttcttctttgtttttcttcttgctcttgctgccggtaattaattaattaatatatataataattaattaaccccctgcctataaaattttatattatctttttttaacctttaatttcatttttgcatttattcaaattttgcagctttaccaatatcatctttgtttccatttctctatttcatggtgagtttaatttatatattattattgtttttgttaatgatgatgaaatttcatatgaatgatttgaatgaattgttgggtgtttttttttagataagggattttggtatagcaaaaaaagatgaagatattggttattatgttggtgcagtaggtgagcatgcatatataactgtaatttgtattttaaaagattaattaataataattttagtataattatttgatataatattaatttctattgtgtgtttgaaatgaaataggatgtgcattcatgtttgggagatttcttacttccattttttggggaatgatatggtcgtagtaaaccagtcttgatttttggcacaatttcagtgttagtatctctttaaataaccatttaattaattaattaatgtgtattaattaattgattaatttaattatttagggtaattttcaacacactttttgggcttagtacaaacttttggatggcaatttcaacaaggtttcttcttggaagtttatgtggaattcttggaccaatgagggtactatacattactttcaaatacacatctttttattttcatttttcaatctttgctttacactttcttttgtttgtagtttcatttcattatttacacattttttttcttcaaattttgacagaaatataattctaaatagaaggcatgctctttagatagacactaaatttttaggcccactaattttgtgtttatgtgagttagacccaaactttaagggaaatttacaaaaatactgaaatttgaataaacttttacaaaaatactgtcacacgaaaaagttttcaaaaatactatgtttttataaaacatcagtaaaacacaaaacagatgaactcaaaacaacattagaataactaaaaaatactagtaaaacaccagtgaaaattatttggttacatttcttcatttggttacattttaaagtattgaatgttatttcaatagaatgatttt

SEQ ID NO: 392209 - DNA, 1141 bp, Cannabis indica
attaaatttaagcggtctttacatactgactgtcacaactaagtaaatgtacaacacctctctagtgattggtttggccaatacttatggagtggaaagatgcttctttatttcttgaaaggcttgcttgcactcttcattccattcgaattttttatcgccttgcaaaatgttgaaaaaaggaagacatttatcagttgattttgaaatgaatttactcagtgatgccattcttccaattaaggattgaacctcttttggtttgcttggcgaaggcattttgagtagtgcctttattttctcagtgtttgcttcaattcctctcgcatttacaataaaacctaggaacttccccgaggataccctaaatgaacatttttttcaggttcagtttcataatatatttctcagtatggcgaagcattctgtgaggtcttctgcatggtcctcgcttttaactgacttcaccaatatgtcgtccacataaacttctatattctgacttatctagttttcaaacataccattcacaagtcgttggtatgatgctctagcattttttagtctgaatggcatgaccttgtaacaataaatccccatattagtaacaaagcttgtatgttcctaatctggaatatgcattttaatatggttatatctagagtatgcatctataaaggtcatcatctcgtgccctgctatcacatctactaattggtcaatccgtggtaacaaaaagtaatcttttggacaagccttgtttaaatcggagaagtctatgcaagttctccatgtcccatttggcttaggaacaagaacaggattagatatccacgaaagataaaatgcttctcttatgaagttattggttaacaatctgtcaacctctccctttaatgaattttgtctctcgagatctaagatcgtcatttctaacactttgagggataagaagaatcaatgttgaggtgatgacatatcatattggggtcaatcctgaccatatctgaatggctccaagcaaatgatcttggtttaccttcaaaaatacaattaattgttattttagttcattcctcaaaccttttccaaagttgacacacttggtcagattgtttgggtctaaattcacctcttctaa

SEQ ID NO: 392210 - DNA, 1098 bp, Cannabis indica
gaatacattaccccaagttatttttgagaatgactttattgtattaattttttttaaggaatattatttgattttttaaacatatgtaatggattcttactagatatgcattatatattgggtgtttcaatgcactctcacaaaaagtatgtgcactgatgcatctcttattgtttcgacattacaaagaaaaaaaaaattagttcaatttttattatgatcgtgtacattataattatttaagatatttttgtaaaattttgagaaattcagaataatttacaatataaaaaatatattgaagtaacatatttcacacacacataaaatatatgaaagaatcactcgtacaataaattatttgaaccatacttttagtatgttaaattttaataaatttttttaacattttctaaaatgtcttaaataatataaaaaaaaaaattaaagtagaattttttcttttgaatttttcatatatattagttatttgtaattcgccaaaatcactaaaacattaactctttttcttttaggggaagacctatagaagaaatgcataatttttcgtattatatatttattttttatttgcttgctaggaaattaaatgagaatgcatgttttaagaatattaaagcatcttcattgtttggtcatctttttgtgagatttatacgtttatgttttcgtgtaaattgtaaagctttggcttttaaaacctttaaatgaatattctcattttgtttttttttttttaaaaaaaaacaatatctctaatagagatgtaaattgatgatgcattgctaaaatagaattcgctttgcaacaaaaaaaaaattccctaatggtatggtaatatttatgttttatagtaaaagttgtcttaaatttaacatacaatatagcatgataaatgtaacagtcagagtttcgcgtttggcaaggagaaagattgggagctgtacatcccacatcgcctagggaaggtcatgtgtgatgattctgagactgtgtaggtatgggactatatagttgaagagaacttaaatggattgattggtattacctatatcaacaaggttcatcttatttttc

SEQ ID NO: 392211 - DNA, 501 bp, Cannabis indica
tttatatagaatagatatctcaataataataattgcaaaatgtattcatggtcaaattgttatttaataaaaagctaattataatctttaattacaatcttttaatcattctccgtgttcaggaagacatgttagaaatattatctctataaatttttaaaaaattctaaataatttataatactgaaaataaagtttcatgatattttaatttagtactcgtgttcaaaaaactttaaacttatttttaatactataaactattcgaatttttttaaaactttacaggattaatattgtaactataacgatcgaacattgtaatgaaaaaaatattctgacatttttttagcatgaaagttaacttaaaagttgtattgaaaaattaacggtaacactcctcgtatacaaaaatgtattattgaaagaaaagtgtaagaatgcaaaaaaaaaaaaataataaataaataaataaaagtaaataattttaagaaatagaat

SEQ ID NO: 392212 - DNA, 1359 bp, Cannabis indica
ggttagatagtaataaaataaaatggaaatgtaaaaaaaaaatagtttttattttttgtttgatagtagtttaaatattaaatgttatttgaatagaataatttttccattatttgagtaaaaagactatttaattttaaaatgaaaaaaaaaactaatttcaatacaagataaaaaaattaataatctttctatcaaatttttatatattttaaatttgattctatttcatttttattttattctatttctattcttattcttatatttttatttctttaaactaaaatttcgagtacatacaataataagctattatatgcacatattaagtacacatccacgaaataacttcacattgttgaaattaaagaaatatagggtgaaagaaaatttaaaaaaaaaaaaaaaaaaaaacatgtacgtccactttctatattgggtattagatgagttagtgattctcatattgctatatttttataggtgagacataaactagttggttacttggagatgacgcaacatccgataaggaagctttaggcttattagctcaaaggcttatggtctccactatctgatcattacttacaaataattgtgatgtgatcgtgatcaaaattaattataggaatgcaacaatttttttcttaataataaaacatgtccgtctaagacttcaacagtcaaaattgaagctagaaagttcctattcatacagacatccacatagggatttagagataaatattatcccaatttttatccacatgatgtggtgtgtccataaaagaaagattgatgccacacagagtacagcttgtcagcaaaaagaccaagtcaccatgcacaacttaccacttgacgagaaatccaaatacttaaacaggacaaagagacaacaaactggccaatcaagggtgtctggccagacccctagccgaacctattggcaacataggccgaccaacctcctgtacagggaaggcaggaactttttgtgtgcctctacggctttcagcctggacaatacctccagctacaaatcgtgcttcaacaacccacaaaagtaggagattaacttcaattgtttacctattcttcgagactaattaacatgttattttttttattaatttaatgtgtaactaattgatgatatctcctcattcttaagtcatagagttcaagaactcatagtcctagctcaccctctcttctacacgccattagcagtgtagaagagactaagtctccctcatttcatctacttgatattttcctcttattctcactattgtaatttcaagagagccactctagaatccacaatactgtgatctaagtggtattatc

SEQ ID NO: 392213 - DNA, 544 bp, Cannabis indica
ttttttttttttgaagaaaagcttaaatatattacctactaaatctcaagggtttatagtcatcatcatgcgtgcataaataaagatacatgtacaaaaatatacacacacatccaccgacccagaaaagatttagtacatgtaacctaaaaataatatatatatttgaaaaacaaaagtaattattttttatacggctacaaatgaaagtaagccgaaaaaatacatataaaattatccacctataaaagatttagtagatgcaaactaaaagtgataatggtttgttaataatttttttttattttacaattatatacatataaattataaaatatataattacaaaatacattcaacaaaaatatcggtgccacattaccatatcaaattctaaaacaattactatcgaaataattctctttcttcacatttttctttgggatttttacactagatgtcaaatttggcatcttttttacatttttatttatgtttgatcttttaaacttttttataaaatctggttttcaattttattttt

SEQ ID NO: 392214 - DNA, 1159 bp, Cannabis indica
ttgtaattttgttttttattgattatcgttttaatatcgattaattattgacaggttgttgataggttatcaattaagattcaacgtttggttcttaacatgttaaagtctgtgttattgataagttcttgacaagttctcgatagttaaagcattacaaacgaattgtaattttgttttttattgataatcgcttgaatatcaattgattattgatgggttgtcgccaaaatcttgacaggttataacaaataaaagtggtctaattttttgtgcatagtagaatattataagaagaaaaaataaaaatagttgagtaaaaacaatagatcaaatatataatataatatgttggtatctcgtaactttactttttttatttatatcttacaaattatcccttgttaaacaaacaatagtgttggttacgttatattattacaattaattgtataatgttcttggttaatgacagctgtaacaaacagtttttattacataaaagatttgtcaatataaacaacacatatatgtatatgtcaaatgaggaagatgatgaagctttaagaattactctgttgctagaattaatataattatgtactttaataaaattacaaaaaaaaataaagcaaacattaatgaaagtacaaaatcaactatccatttgatgaccttcaaattagcttaaactcaacgataattaaaatttaagaagcattacttgcccatttaaaagattaattaattaaagaaagtttaatggataaatcattaaatataaaatataacagaagaataagatagaaagggaaacacaagtgttggcctcatttttagacaacgacaatgagtcaattaaagtgattagaaataataagtaatgataataataattaaacaaataaaacacataaattgtgagaaaagaaccaagaagttcttaatctatcttgaaagctcttataatagtttttgcaacttaagtgctctggaaaaacttatttcggatctcagaatagtgaaataaattcactattaataggtaatgattacatcaactaggtttcccaaaattaataagaattaaaataggaaacttaagtactttccttaaacaaataaagtaaaaaaacaaactaagtagggttcctcttat

SEQ ID NO: 392215 - DNA, 832 bp, Cannabis indica
aaataaaaatgttaacgtaaaatgttaaaagaagttcagggaaaaaaaaagtcaagttctaaagttaattataaaatatctatggtgctaaagacggctaatgtcatcgttgttgttgttctgggtctcgggacaacttgatgacgatccataggaggagtggggaatgacagatgtggacccataggaggcaagttgaaaccagacacaacccgaaagagattgtaaaattgatattggaatcgcttgaggtagacttgttgtgtttcatactgctacctcgaatactgagtttactactgtgcctcctgcacttgtctcttatggcatcatactgttccatagtaacagtctgtgagccaacagtaaaagatgtggcatgtgctcttttggccccaactaccttcaatctcgggtcaaagtctttcagatgtcgagatcgctcacccaatacttgcatcataacaggcaggtctagtgggtactgggtgggatatatagcatcctcagcaagctgatcctcagtaggcgttggttgatttgttgtcaattcaactattttctccaacaaaattaaatagtcaatttaaaaaaaaaaaaaattgaaagaaatgtttagaaattaataaatatcaatgtaaacttacataagcttgttgcacgtatttattgcgtcaagtattgtctttttggtggaactttcgaacagtatctacaatagctgaaagttcttctgtctcaggatcatcctatatttaagtaaaaataactgtgattattattttttctaaaaaaaaaatacttatcaataacaaataaatttaaaaagtta

SEQ ID NO: 392216 - DNA, 1037 bp, Cannabis indica
tttgggtgtgaggaagggcagaggcttacacagcatacaactcgtcatttgagtcttcttcttcttcttcctcagactagtaaaaagcttcagtatttggtgatgttgttatagttgtatttgtatatattttagttgagagccaaaactcaagagaagttctctagttttccaaactaaaaaaaaacaaagataagtatttaattaagttggaccggaaaataatttaaaaaataaataaaataaaattagttatttatttatttattttttgaaatggaaatgacaacaagtcacatttgcccatatcactagcattgacagacaaaacataattggctaaacaatgtgccacttcatttgcattcctactaacatatacacaattaatgactctatgatcttgcagtggttggtgtatcttctgtataaaaattcggaatctcatctttaaaatttactttcattttcaaaatacatctcataaatatgttgcttagcgactataaaatataggtccaaatcatcctgagattgaactctctaggtctacccccttaatatgtacaatcatcttcgagctctagattcacttgtgctcagcttttgtctttcctttacctacacatgcaaacaacaactgtgagtcgacagactcagtaagaaaagcatataacatataacatactagcgacttgtatttaggcacctatacacctatttataagacttaacaaataatcaagaacgttcttaacagaagtacgacctttgtaccacatgcaccaagtacatttggtcgcattatcctcaatagttgatagaaaagtgtcgacagcacattggctctgtaatacccggaattaaaaatggattagcaaaactctaactagataattatgagttaattgaggaattatattattatatagttcaacatatgtgaaattatatgaatttaacatgttaagaccccgttggtgagccaggggcatttttgtaattatgacccgagaagggtaaattgttgagattaa

SEQ ID NO: 392217 - DNA, 1116 bp, Cannabis indica
atatatatatatatacccctatataaaatattggcattgcatatcctcatcatatcataaatattataatttcatctataacaacactattctataacatattttctctttttgattatagaaatataatgagtgtgttagtgatgaatattatgatgatggttttatcattatcattattaatagagaccgttggatcatcatcatcatcatcatcagttgattgttttttcatatttggagattcattggctgataatggaaataataacaatcttctcactttggctaaagtcaattatcaaccttatgggattgactttcataattccccaactggaagattcaccaatggaaaaaatactgttgatattattggtaattaattcttcttaattcttcttcttattattattattttcttaatttcttcaataatatatatatatatatatatgtatatatgcaggtgagcttctgggttttgatgagtacattccatcttttgcttcatcactacttaatgaaagctctaatttaatgagtggggtcaattatgcttctggggcatctggaattctctcaatttctggcaaacatatggtaattatttatacatatatatatatatttatatatatatatatatatacatacatatcatatttatggttatggtccctttggttttttaggcattaatgtcacatatattcagataattagttatggtattgtgtaattagggtcgatcctgatactaattacgctttaggtagcaataaaattattgaattatttttaaaaattattaaaaaaatatggtttcgtttggtaacacttttgttttctaattttttaatcataaaatgaaagtaaaatttttgttttaaaaattttgcatttgaaaaataaaaatgcgttttgtaactatttttatttttcaattttaaaaacagaaaacaaaagtgtgttctgtaaaatttattttcattttaattttttgattttatttacgtcgggtctaggtccggagttggatttgggttcaagttagagatcgagtttagcgctagggccgtgggggatttgggattgaagtccaagatattgatt

SEQ ID NO: 392218 - DNA, 1376 bp, Cannabis indica
atagcttcagccattacaatgttgagaaaagaaaatatactaatgataaaaaaagcaatttcatacattgctaactatacccatacattgttaactatacccatacattgctcttggtgagaaaagaaaataaaatctttttggaatagcatttcatagttttagtttattagtttgtgattccaattttttcttttatttatttttcatgattggcttaacttgtataagtttttttttagcttttaaaataataataataaaaaatcattctagaagttgtttagataaaaataaaaagttattttttaatttaataatctttttgaaaaaaactcagatttgtagcttctcctaaaagaatttttgagaagttgtttttaaaattataataatttatgtaattcttaatttaatcacatatttttgaatatttttgcatgatatccaaacacaagttcatcattatagagagcgactcgagagtggtgatcaatgctctcaatcatgtgtcttcgtgtagggattgagaactattcttctttttatttaaaactctctatatgtttgatggctacgtttttacttgtataccgagaacatgtaattttgccgcctttaatgtggccaaatgaatttttacttacaaagagtatggtaacttatatatttcttttattttagaagacttattttgtaatgacgatgagatttaatattattagtcaataaatgctcattttcaaacaaaaaaaaaaaaaacctttaaaaaagtatttttcattaaaaaaaatattttacataataatttttcaaacgataaaaataagtcaaaatttatctttatcttattgttctaactataaacaaaagttgagacaaaggatagataataattaactttctaaaaagtaattttggtcaccctaaaaataacttgatacaaacctatcacgttgttttttgttttaaagcccatagttagctggaccctggacttcatatttgtataaatgggccagtccagcctggtttacatggatctggttttcttgaggcccattgctgcaaatggtatgagacttggtgttgtgttatgattcaaagctgcaattctttaaaaaaaaatgggaccaatttcattgtttgcatggaatttcatatatattagtgggtctacctttcaatcattttcaaccaaaaatcatttaatgaaaccagtttttgttttcatctttacattgttggggtaaaaataagagggacctccaacaattgtgaataatttttttagatgggtgtagagtagaaagtgtatggtgtagacaaagagttggtgagagtttgagattgaacgttttttttttttttttgaa

SEQ ID NO: 392219 - DNA, 1099 bp, Cannabis indica
aaaaaaaaaatctttaaaatatatattcatccttcacttaattataatatacacaaagtttaaatttacaagtgttagaaaatcttacattgataatgtgttaaaattaaatataatatactgccaattaattttaagatagaatctcatacatcttaccatacagtcatctattcttacttctttcaccgaaaagaccaccaaatattattaagtattattatctcgataagagccttaatataaaaggacctcaatatcttacggtctcatttttgcctttatgctatgaaattatttaatctaagtattttgtaggtgtagagatttgaccacacacgtttttatgtgtaacatatgtttggcatgcatatgcctttaattaagtccaaaagaagtgtaggtctttattgattattcattcataagttgaaacaagggctagcatttgttcaaagcaaaactatatataacaaaggacccaaggattccatgcatatatataatatagattcattgcatttacattactattgatgaaaatagttttatgtacaaatatatatatatttattctatataaagtgtgcctatataacataattcttggtttatgaaaaatttatgggtaatttttatttatattaaaaataaaaaagtttattatattaaatataaaatggtttatgagaaattcatggatcactttttatttatatataataaaataaaataaaataaatcccattaaatctaaaaaaaaatagggttccagattttctttaattaccgtatttctaaccctatttaattatttatgccttttttataaaccctatttgattaaagttaagattataagattaattcaaattattgttcatatattgattaatcccattaataaaaaataattcaatatatgaaccctatttgattaatctcattataaagtcttttccttttaattttccttttattgatgatgctactttattcatattaaggtagtgttctactaggagatctaacgagtttcgccccttcgctaatggcctctaagagttcaaatattccagtattgtataaatcttcaatt

SEQ ID NO: 392220 - DNA, 716 bp, Cannabis indica
aataaaaatagaaactatggtagcaacattctctccatggtccgaacccattgcttgggccctaaactctgaagaacatgattatgaaattattaagctcattaataaagttgcacagaaatatattgaagtcccaaaaatcaacactttcaatagcttgaagagaacttttaacaacttaaaagattagaagacacgatttggcagtaaaggaaaaaaaaattaaaatattttgcttcctagagttattttggagagaaaaaggtgaattgcttacaagatttcatattcctaagaacatacaattgagatagagatacaataaaatattatttattttatgccatattaagttatgaaactatgggaaaaatctttaattttttttaatataggcttatagaaaaatattggaaatcgtgggaaaaattacaattaatgtagataatcaaatcaattaaaatttaatcaacaaataattagcaatgacacgattaacaattcacaaactataatcggagataaaacaaagatgaactgagtatctaaaaccaaaaacgataaagcaataaaataataaaatcaacaccaagataaaaattgggtcaaagtcctatagatcgatgtgatctatggctctattctagttctggaacaccactgaatcttctttattgattgagtaagaatagggtacattacagtcgagatcaatt

SEQ ID NO: 392221 - DNA, 607 bp, Cannabis indica
acggtgtggggatggatctccacttggcacgatgagggtgagaaggagagagcacagtgagggcatgttttggggttctggtttcagagttcaggaggaagaagaagaagaatgagatgaagaaaggaaggaaggaaggaagaagaagaagttggttctgattttgggttctagatcgcatgttagagaagaagtgaaatctgattttgtcatggaggagagtatggaggcgagagagtgatattcggagagagaaagaggaacaacgagatggaattagggtagaagaaaagaaaagagaaaagaaaataatagaaaatatattttttttattattttatttttttataagttttaaattattattataatattttaataattaatattacgtaaaccactaaatttttttgacagtttaccgtgtcacttaattaaaaaatttagacgaaaatgtaaagagtaaaacgaaataaaaatttattttgtcgtcaaaatttttaatttatatggttgtgttaaaaaaaataaaattcaattagatttatcatgcattttcttttatttttttttatctaaaatagtaggttatatatatatatatata

SEQ ID NO: 392222 - DNA, 1633 bp, Cannabis indica
caactttaattattatttaaaaaataattagcacaattttcttgagaaggaggagatcatgtgatgaattgttgccccaaattaaaaagaaaatgcaaaatataataatgtgtataaaaggccaacatcaactttaatcaatatttaaaaagaataacaaaaaataaagaaaataaaatactcatgacagaataatataaaatggtaatatacataattttataatgtacacagtatacaatatataaaagatagactaaaaaagtaaattttgaagtaagacattataaaatgaatgaaataaaaaaaaaatagtatgtggtgtaaaaatacatgtttcccttaatttttcccaaaatacgtcgaccaatgcgactgtgccacgtggatctaaacaacatgattttgagataattcaactaagtctttttgtattaagagtatccacaagaaaataccgcccgcagaagaaatgaggattctacatactcctagaggatagagctatggaaaagcacctacgaaagataccagaccccatttgaacagtcacctcacatttaatgtcgcatgggagaagacgtattgaaactgctataagcattaagtctgacgccgtaacccctcttctgcagctattacgctatgattaataagcctagtgacaactactttatgagagatcacatcagtcaagaagggataaaggattacatctacctaacccctaatatacctagggtataggccatgcattgcccattttatatctgctgggaatgtgtgcccctactgagatacacagaaagacgagtagttcggttctagggatcaccccagaaaaatactataaatacccccaaacacattaagacgggggtcgaaacattctgggtttatgagaatcaaaaaagagaaaaactaccaaaaatattctctgtaataaatactctcataaatacaaaagacttgtggattaaggctcattaatgccccaaccacgtaaaaatctcatgcactattcctacagttttctcttatatattattaaattggttgccgaaaacctcggtcaacgttttggtgctttcattgagatctgaaggaagcatctgcaaatagacaacagtcttataagctaaaacaacaatggtggagactcgcaacacacgtcagccccatcctcctcaagacgcccaagatcctgaagatgaggaagtggcctcgagagtcaatgtgggctctgaggtaataggagagaccaacgacgacgaatacgaagaaggaaactttgacgagtacgacgcctatgacgaaggtagttatacagaactagtgctcttgagacaaaaggctgctgatcatgaagctgaaatcacagcccaaaaagagcaaaacaaaaggatgcaagaggtgatgctcgccatgcagaaagcaatggaggcagcagggatccacgtacaccctaacgccatccctgcaggacttggagaaactctggaagagtcctcaccaagcacccaaaagcataagtccagggagcctagccccatacggtatccttctgaagggaaccagcgaaaaaaacctacttccacccccgggaaaaagaaaaaggtgcaagatccgcgaa

SEQ ID NO: 392223 - DNA, 1462 bp, Cannabis indica
cctcaaccatcctctctatatctatggacgacaacgggcccagctccgcatctctggcagttggggtctcctcttcagacatcgaggttcggataaagctatcctccttgtcctgggcgccatcgaaagcattgccttcagagccaagcatttggctgtccgaaaaatccctcatgtgaaagatagaagatctgtttagtgtggtgaatgtgcgaagataatacaagtgacctcacccgcataaaaaagtaaattcaagattttcttggagggctaattggaattctcgcaaaaacccaatcatcccaccaaggcgtaaaatcgcaagtgtgcgactagacgaatatttaaaaaaacggctgggagttacccagtgacccaagggacatgcgttttcgagcatgaccctgaagttactaggaaacacccacccttttaagaaatctaaccaatcacaacctgcgagcgtgtcacacatatccaactagcggtatatctcaagaaacagttgaggaatctcctatatctcaaagggcatgcctctctcgcataaaccttgggctaacagaaacacctcactatttcgagcaaacctactagtcgaaatacacggttatatgggaacagggaacactggcaaatgtcgcaaatggctaggtgtatcgcagtacctcaaggaacatgcgatcgcacgcatgagcattggaatacggcaacacacccaccatttgaaagacttatccaatattcccacaaaaaaatatacagagaatataaaagccctaagttctaaacaatgggtaaaattgataaagtctctagaaaatcctaaagcaagcagatatgcgagtattcgagatgttcatccaaatactcgcgagtattccagagatgagtaatcaaaaagatgcgaatattcaaagtattcttccttaattgacggttatgcaaattacaggtccgttttttcctgcggattatccaattttaacaaaggagtaaaactctatgtgtattccctacaactaaacgtgcattttcaaacttctcaaagtgtcaaaaacccagaaatgcaattttctgtctcaaaatcagaaaccaaatacgcaagtagtttcgaaactaacctttagttttgacgattctctgtgtggttggttttgatcacttgtgaaacgtaagagattcgagaagaaaaggcaaaaatctgaatgaaggatgtgaaaattcagagaaaaaagaaaaagaggaagttggaaatgagaaaatcatttcgtatcagggggcttaaataccaatacacctcataaattgggattgtgacacgtggcaacaggaatgcctaaggtcattccatccaacggtcagccatgggcatgcctacacaaaaaccgaagagtttcgtgacatggcaccataaataggataaaatgaaataattacagccgttatttttcgaaac

SEQ ID NO: 392224 - DNA, 589 bp, Cannabis indica
ggtttcaaaagtgggaacacacaacacattttttaacacaattttatctgtcaagtgaatagaatcagtgcaaacaacagccacatttctaatctggtaacttaacataagattgagaaggatttttgacaatatcaacaaacaaagataagtcagggcacacatgatgtgtagcacctgtgtcaataatccatttttttattatgaataaaattggtcttaccaaagaaatgtgaaacaattggctgatctgcattaggttgagagggggactgatttgaatttttctgagacaacatgctcattaatttttgacattgcacagtaaggctattgatgagatcttgatcatttctccaggttgatccacttgattactctggatttgttgagatcttgaaaagttggcagcagccttcctaatttgtgaagcaccagaatctcgagctggaaatcttgagtaatatttgtgtcctattggatatccatgaatcttatagaacttggacatggtatggccaggaattccacaatgagagcaagtgaccttagatctgttgaagttagagcttccagcaaactggtcatt

SEQ ID NO: 392225 - DNA, 1049 bp, Cannabis indica
aaaaaaaaaaaaaaagccaaatgccaatatcagctatgaaaaatgaccagtaaaaagatattggatcaaagagcatccagatcaagatgtcaacaatcagtatgtatatgttttggaccttgttgcgagctgtttctcaaaagtgggttaccttttataatacaaatactaaaagaaaaaaaaacaccctgaataaagtaagagaataaaagaaataattaacattttctcgattcattatgatacctatctttaagcacttctccaaaagataaacacttcacaacacaagacccagctttgagatttcatttttattaagtgccttgagatccaaaccccacaacaatagggtaatcagtaatttattaggaaaatatgtatatacattaatatacacctacaattcagagaaagacaagaaagagatggtataagttttcagtccaacctgagcaacaactctatgacccctgtaatcaactatagccattgcaagattataaaggccagggacatcagcttcctggtatgctttggtgccttttaaatcattattagcagaagcatatgtggcttgctcagtctcagctgactgtgtctcagaaggtacatcaggagtaacttcagtgaccttatgatgttcctctctacatgatttatcacatttgtccccattggcaattccaactttggatgccttttcagataaacagttgtttttgccactttttaacttatctgatccacatttcttgctcagatcctcaagatcagcgtcaatagcaaaaactgaagaatatattattgtggacatacctaaagcaagaaaaatcacaacagaataaggtaatccacaaaagaagacacatggtatggtatgaataagagtaataaactgaaacacagaatcagaaaggtacaagtacaacaataacttaattcctaaacaattgcaccaaaaataatagatgaaatcatgtatataaattttggacagctacttgggtctttagaactaaacattttgaggacctatcctttttaga

SEQ ID NO: 392226 - DNA, 1079 bp, Cannabis indica
gccatttatcaaaaatgaaaagaaagtactgttcaggcatcgctgtataagctcaacaaccgaaggagcgaatcctaaggcgatcatcattaagaaaatgccactccactctgtcaaaggctttactcatgtctagcttcgtggctgcataaccttcttttcctctttttagatgcttaagagagtgcaataactcaaatgcaaccaacacattgtcagtgatgagcctagattgcaggaaagcactttgagactccaatatgaccactgaaaggaaaggctttaaacagattacaatggactttgaaacagtttgtagagtacattgcacatacttatggtgcgcaattgagacacattccttggctttttaactttaggaattaatgtgattaaagtcttgttgaaagcagatgaatcaaccccattgttgagaatctcaaggacggttttggtgaccaaatcacccacaatatgccaatagttggtgtagaacataatcgacattctatcaatatcaggactactatcttcactcatagattttagtgcggtgtaaacatcctcggcagtgtatggtagggtcaagatgtcattcatatcaacagtaattttgcacggaactgaagaaataacatgttggagagcctccgaatcaataccttcagtagcataaatattactaaaataatcctcaaccagtctactaatgccttgaagagaagattgctcaacaccatgatcatcaatcagagatttgatggtattataagagaatcatgtgtattaagattacaagattttatctttttttaagtgttaagtacatatttattctaataaatatttattatgtatattatacattatacaacaaaaatatttattatattatacacataagaggaaaaataaaaaatgagacattttaatataatagtctttaaaggtctaagttatcataacttagaatcatgtacaaatgagcttgtcagcctattcaagttcatatcaatttggaattaagacaaaatatttaaaaagagatacaagaacaccaaaaaatataatcacttttc

SEQ ID NO: 392227 - DNA, 607 bp, Cannabis indica
ccatgctcacccctactcttgatgtccctaataatagatatggtttgggtgtggtagttcgtgactacacaggtgaggttatagtttctactttttgacacattttgggtaccctttcttgaaatgacaaaagctttagcgttaaaatatgcagtcatccaatgctgcttgttgggttatcagaatgtgttttttaaatcaaattgtttgaatgtggtattgaagtttaataactaggttttttggctttttctttgggttaatatcaaatgattttagacataattttttttttttaatttaattctgctagtatttcattttttcctaaatctattgatgttgttacttattctttggctaaatatgtcttgtcgaaagttattattaacaaggtttggtggtcaagttatctttcttgtatccataatcttgttttatgtgagatgacttaatataatcagtacatcttccttttttgctttaaggatgatttttcggggtttttttctgaaaaaaaaatagtaaaatttacactcaatgtggaattttaaaagttgtttatttaaatatgacaattttaggtttgaccaatttatatagtatt

SEQ ID NO: 392228 - DNA, 680 bp, Cannabis indica
cccctctcttgctccttttctattcctctttgccaaatcttcgagaacccaccaccaaatcccaaactctcctttctctctcgatctccatctgaaaacccaccgtcagattctaagaggattgtgttgagaaagtcaaccgccccaagctcttctctaagcttaattttcttttttctaaaaaaatatgtttgaaatgtataaatattgtgagattgttatgagttttttttttcttttaaaggaagattgtttaaatttggcaaatttcctctgagtgtttcgtatttgttttgggataattttcaaactatgatattaatagcataaaattgagagagtttaaaatatgacaatttttttgaattaaggtgacattttaagcatagaaacataatttccctttatattttatttggtatgaaaataattcaaggaaaatggcggcaaaaccccaaatactttcgttttggtttcattaaacccctaaaacccaaatttctgcgggtaaacctcaaaaccaggaaactgttagcaatttaccctttccgtccaaatttaactgttaagtgccatgttggcttgttcacgtggacacaatatacacgtggcactattttattggtccacgtaaaaaaattatttaaaaaaattaacaaattaaaataaaattaatttaa

SEQ ID NO: 392229 - DNA, 742 bp, Cannabis indica
atcctaattagcctaaaataaatcaataaatacttattatctaaagttttaagtttgtctaatattaataaaattataatttttgtccaattattctatcaacacaaactctaataggaatcgtttggtacgccatgttgtattatatcatattgtattgtatttattttgggaaaaatgaactttcttattgggaaaaataataaacttccaacgcaacaaaataataaagaaatgaagcaaagtaattcgatttggtaaaattacgaaacccacaaggagagatatgtttcacttttaactcaaaattacacattcactatctcaatctctctctgtaaatctcaatacactatttgcttcttactcattttttcacattcacttctcttttcacaacttgctcttcttcttacacacagcagtactctcaaacaaaaaacacatatttataggaaaaataaacttggatacgaagacatattggagaccaagacattctaaaacttttttaagaagactcttcaaaacttggctaccaagactcattttctcacaattaataattatccaaaaataaatagcaacttaacaaatgtagataaataaattaatttgactcaaactccaacaatttccaccttgacttaaattctctaaactcacaactcaaaccatcaataagagtttatatgcatcgagtgtaagaatattttattttgggaaatatatttctatttaa

SEQ ID NO: 392230 - DNA, 783 bp, Cannabis indica
acatgcaaagcttttggcaattaagagatcagcttagaggacagtcgaaagtttaaggagatcaccagtggttgatggcttcttctaaattacttgaacacacaaggttaaaaggagagcgcatgcatgaataaccttaatctttcaaatggtcctgttgagccaaggccaatggacaaatttgggtaccaggaagataacaaatgtgagatccttaattttaactcttggaattttgattccaaaatgaatgagaacatgaacaaaaattccttcggaaatggaatgttagtctatcagaagagtaatgcaaccactatggggaatatgactattaacaagcatagtgaaaacaacttgagccacaaggactctatcaacatcaacaataacaacaatagtgacagtggtaatgcaaacaatataatgtagctgacaaaaaggttcaagaccttgcttgctactgagaccttccctcgaaatgaagtgctaggaggttacattttcgtttgcaacaatgacactatgtaagaagatttgaagcggcaactatttggtaaatttaactatttcaataattcaacactgcatttttagattgtatatagaagtaaatgttccttgtatgtatgctagctttcaactggtcaagtttcaacaattatctttatattgaaattgaacattaattatattaaaattacacatgatattaaataaaaactttaatagctaaaataaaactaaacatacatggcttgtcacgtaacatttatttagtat

SEQ ID NO: 392231 - DNA, 862 bp, Cannabis indica
ttcgccgcaaattgctcttatattaattattagaggaaaaatcaggggggattactacaattttaaactatgtatttggtaaaagtatgaattggatcctttattttgtaaatgataattttttttttttgataaatcagaaaaattataatgttcaaacattctttacaattacatcctatccttacttatgaaaagctagacaaatctattacaaattctcaaatcatatcctatccccttttttaattttctttggcataaaaagtctaattctatgttttacttattcctttactttcctcattattatacaatgtggagctacaactattctattatatatcatttctattgagctataacttgtcactagaaaaaacagctatttttagtgacaactttttagttataacataatttttttgtggttaaatgtgacttttggccggcacaacaaaaaactacttgtgactaaaacatagtatttagacacaagttgtcactaatttactaatttactcacaacaagtattgtgactaaaacacatttagtcacaacaaattataatttttatgactaatacatttagctacggaccttttagtcacaacataagaataataattaataattagtcacaacttttttacttttaatcacaaattttgttgtgactaaaagttttttttgtagtgtgtatactaaggatgcaagagttgttgccattaccattttcaccgtatgataccattcaaattttcagcttggatcccctaatcaagccattgcttcgcctcctttaaacatcgttgactacacgaacactcaaagaataggtgttcaattgtaaaaaaaaaa

SEQ ID NO: 392232 - DNA, 959 bp, Cannabis indica
ataaatataaataaagtttaaaaccaaaagtttagtaacaacacatttaaacaaaaatatcatcaaactaatcctcatgatattgtctatcaaaagaaagggtacactatttttcaaaacccaaaaaaaaaaaagtacactaaaaatgatgaactatttcctctaagttaacgaatatatgctattaacttattacacaaatgaatcattgttttattaaaaggagatgcttgctttagcttgcatcaatttgaaaaatcaattcgaaaccgagcaaaactttatctaagataaggttttcaaatcaaatttttgtttattatgaaatcatgatgagttttgaagattaagattaatggctcatgtagtgggacaattctacaaacatgtttaaaactaatgattagtataggcttaacctttcatctaaagggaaagtaatgggcatgaaaaaaggagggatacaatcttcaaaaatgggaaatttgattccaattattttgaattcatcataatttaaacaaagtcatattcgcttgagtttgggaacactaagacacaagcaagtatggtttttattttggattttagggacaaatatacttatgtcttttgaattgatccaatcattgagtgccatttggacagtattttcaaatggttcgtgcccacatgaatcaacaaagttatacaaaattacatgacaatttatttatggaccacacaaaaaaggaaaagtgaatttaatagataatgtgtttgttggcaaacaaatagaaattaatgaagtgaattggttaatgatataactaattgaataatactttagcgccaaagcagcttaaattaaatcccaatggaccacacaaaaagaaaacagtaaatttaataaattggctaattaagattttttttctcttgagttttattatgtattaaattatgctctttcaactttt

SEQ ID NO: 392233 - DNA, 1901 bp, Cannabis indica
tgaaaaataatataaagaaaatgttattatgtatattgctatctacctacctactcttatagaacattttattgactgaattacaatctagttgattgaggtttcgaatattcgtcatactattatctctaaaccgcttgcagaaaatggtttcaatgtaatgaaacatggggtctttctgttgtggcagaaaatgaaatttgatgtttatgcaataagagattggagaaaaacatacatttgttatataatgtggtcaactttcatttaatccaagttcttgggcaacttcatatgccgggggaaaagggcttcaggatgacattgtgatagccaccaagtttgctgcatatccatggcgacaccagggcagtttgtaaatgcttgcaggtaataacccccttttcaggcttatctgttgtcgaattcgtctagagacagctttgaaaatcttccctgtgtatgatataattttgatatagcatggtttttcaggggctcactagaacgtattcaagttgagaaaattggaatagggcagctccactggtcaaatgcaaattatgctcctttgcaggagatggccctttgggatggtttagtggcaatgtacgaaaaggttttatgataatttatgcatagatttataaatggtagaaatactttgaattcccattgtttgctaacatgttttcttcttcttcccataaaatatttttgctttaattttctgttagcattgtgatttcaataatgagtacttgattacttgtttctaaatcacatttttgagttttctgactcaatgttttactgaaaaacacttgttgttgtaagaccatggattacacccattcattgttaattagttttcaatagctcaaataatggtgagccaaaaagaaccgagaggtctattttatcataagtgctcgaaaagagccaatacttgagggcatatcagagtgttcaacatcaaataaatcttgtaaatcctaagtagatatcaagattactgttttgtgaaggttaggttcattcatcttccatctaactaaccaagaattgaaacaagaataggatacattagagaatatgcaggacaattgagacaaaaagtgttttatcttagtgatgaaattaatagatcatttaatgaatattacactagagcattcacatgagtttctctactatatattttaaaatacttcactaaaattttattttacatcaacttttttattttttctctacagtcatttaaatattacttttttaatacatataaactaattgagtatgaataaatattattggaagaataaatagtgattttacatacatagagcactataatattttttaaaatttgaactaaaataactcattgaatggagtcacttttttgacattttttcacaaatctcttctttattttgaagaaaagagcattatagctcacctaatatcctaaaagcactcacaataaatactttttctttttcttttttttttttttaattttatgatagagattctttaaattttttagctaaatgtaatagaaaaaaaggctctcattaatggagatgtactaaaactaatgcaacttgctctacatgtagagaatgaatcgtgtattctctaaatttattttaataatatataaataataatattattttttttttttgagaaaatagcctcaggaaataccacccaagagcaaatcactaaagagggccgagagctaataaattcattatttatgtacattgtatatatgttcaaaaattattattttaatagcgtaaaaatattgatttgatgtgctataaaataagggtaaatggcggtggattggacacagtgtacacgtggcacaattttattggtcc

SEQ ID NO: 392234 - DNA, 1581 bp, Cannabis indica
ccaaaagagcttggttgaattcagttaaactccggaacccaagaccgccttcctccttaggcttgcccaatttgtcccaagtgctccaatggagctttttattctctttagtatcccccaccaaaaattagctgccaaggaatggagatttttgatgagtttctttgggagacggaaacaactcatggcatagcttggaatagcttgcacaactgcttttatcagaatttccctactggcttgagagaacattgaagttttccaccctttgagtttgctccaaaccttgtccttaatacttcaaagacctcttttttccatcgccccacaaagcttggaagccccagatatttagcatggtgagaaacaaggcgcccccaaactatttgctaattcttgaccctgagttgaagtgattctcttacccatactcacctctgatttctctagatttatttgttgtcccgacaacctggagtatttatgtaataagctcttcatggtgtcacattcttccttctttgcatcaaggaaacaagctatcatcggcaaaaaataagtgagagactttgatcatatccttcccaaattgcaccccattgatatttccagccctctcagcttcatgaataaggcaagataatccttctgagcaaagtaagaatagatatggagatagtgaatcaccttggcgaagaccccgggtaggttgaaaatttccaattttctccccatttatgaggaccgagaatgaaacactttccacacatctcatgattttctccacccactgttcctcatacccaagacccctcatcatcattcttaagaagttccattccactcgatcataagccttgcacatatccaatttcagagccatcttcctcccatttccaaacctttttgttttcatacagtgaaggctttcaaacccaattatggcattgtcttgaatgagtctacctcccacaaaggcactttgttcttctgagatcgcttgttgcatactatgtttcatccggccggcaaggcatttcgccactattttgtacaccacattacatagacttatgggtctaaactcagtcattcgagttggctttgggaccttggggatgaggcaaatgagtgtatcattgatatccttcactggcatcccgtcattgagaattccaaggcaaactttagacacctccggtcctattgtagttcaatactttctgtaaaacaatccaggtaaaccatcactgccgggtgctttttggggatgaatggctcgcatggctgtgtacacctcctccgtagtaaatggctccaaaaggtagtcattagtagttcgagatatgcggtttgggacaattcgttggaagtcttctagttcttcttgagtggcctgagtagaagtgaataatttcataaagtaattacaagccaccttccccatgtttctattccctgtaacccagtttagccgatcatcaaccagccccttaatggtgttttttgcctttctattacttgcttttctgtggaaaattttgtatttttgtccccttctttcagccataaagctctact

SEQ ID NO: 392235 - DNA, 833 bp, Cannabis indica
cgaaaacaatctaacagaagagactaaaagtccgaaaattaacgattttcaccaagagtcaactttaaacattagataatcatgagtcgtcatcaatggtcaagatcagcccaaactaattttttcatatttttggtctttttcaattactatttaataggacctcattccctataaaatgagagctcttctagttcatttttcatattctgaaagtcccataaggccaaagcatctctctctactttctctctctagaattttgagcctcaacacatagtctactctttgtaattctcgtgagaaataaaaagtcaaggtagatgtagctctattactgtcgcgtcacaggaagtgaactactataaattcattgtgtctctcttacttaactttcaatacgttctcgccaatctaacaagtaggtgtaaccaaacatttgtatccagatctatgcgtcaacaaaaattagatgaaaataaataacatcgatataagttataacctacatataatggaaagctatttggtgtaaacatagaaatattttttggcaaccggtaaataatcatctcttgactaaagatcttataatgttgagtactctcatcaattgctctactctattcattaaaatatctcaccaaaatttaactttctctattttacctcacacatttatattacaccatacttccctttctatatatattctctatatcatttaaaaattatattttttttaatatgttttattattttttaaaagaataaattcaaatacacacaagtattaaagaaagttttaaaatattaatataatatttatagct

SEQ ID NO: 392236 - DNA, 1163 bp, Cannabis indica
tttggggtgtcttctatgcaaggatggcgggcatccatggaagatgctgtaagcgttcttcatcattacatatttagttcactgactgtcatagtttctaattcaacactttccactttaaagaaccatgctcaattgctttttcatttgaattgttactttatgattactatataactcattgtatgcatagtgaattatatgatgccccactttctaatcgaattctctaatgcagttagtttaatccaattaaatgatgtcatctctgactactttgaagacaaaagaaaaatttgggattgctgtagaaataatttttcaagaagggaaagggaaatttctattatagggtgaagctttaaatggttacaaagagtcatcttgatagagaattcaatttggactcatttgattttttatggtactttattgtgttgcagcattctgctcacccagatttggacacttcaacgtctctttttggtgtttatgacggtcatggaggttagaaacatattatacctcctagtcaaagcgttagagtttttggtctctgcaaattaatcctaataagtctatacatgcagaatttgtcttgctatatgttattcggtttccttagaaagttttactatgttggtgctaattttgattttttccactaacttgcaggtaaagcagttgcaaagttctgtgccaagtatcttcaccaacaggtgctcaagcatgaagattacatggctggagatataggctccgctttacagaaatgctttctaaggttatttaatgacttttgattagtttcatttttctttgtcaactggtctttgttaatctttagcctgagcatcgggaatctttgttaatgccaagaagtttcatcttctaagcagcttcttattcactaatcattgggtttgcagaatggatgagatgatgcgtggccaaaaagggtggagggaattggcgatcttaggcgataatttagacaaggtttctggtgtgatagaagggttaatatggtctcctagaggtgggcaagctaagagaggcgaattaagtaaccatgttgaagattggccttctgaagaggtatttttcagtacacatttatgcttgatgcacctaagaattgcactttactttcaagccttttg

SEQ ID NO: 392237 - DNA, 665 bp, Cannabis indica
tggtttgatgaatacctagtataaatgtacataaatgaaatttttttaaaaaaaaagagttgtactatctaaacattaatgtataaagtgtatatataataaggtttgacttagtactattggtttataagattcaaaagaaatatcattaataggttgtgatagagtgacaaattaagagtgattatatgtcattaatttggtgcatattgtgattttttttcttttgaaaggatgcatattgtgatttgaaaggtaataatatggattatcaaaccaatcatttgattatattagcttaggcatagtggtggtaaagtgaagatgccttttgaaaattcttaagttgattttcggacaagtactcatgtatactacaaaaacaaatatagaaattaatatttagaaatagattctctaaaaaaaaagcaaactatgtcacaaaacttgcaattaattaatttttggagatcacatttgatctttcattaccatatcaccaaataaaatccacaatgtttgaaaatgtttcctttatttatttaaaaaagataattaaaaaaaagtttgacaaaaaagtaccacatttgggattttacaaacaacgtaagactaaaaaactttgttcaaaaataaataaataaaataaaaaagaaaaattaaga

SEQ ID NO: 392238 - DNA, 655 bp, Cannabis indica
aaaaaaaaaaaaacccctaaaaattattagtttcattgtacttgcatttattttacatttttttaataataattacttataatgatatttacatattaagttgtcaatctataattgttaattttaatattttcattctctttcttatatattgcatttatattagtagaatttacaaaaaatcaaacggcctcttacttcaagatataaatactaagtatatatattcaaaactacaattaatgcaattaaagaaaaataataaaaacgaaattaatgaaccgaaaacatacaggattttataaaattgatagaatagtaaatatctattatatcatatttaatcaattatatatgcataatgcatatcataaatataaaatatatttgaataataaagagcatttgattgaagtatcatttcattatttatagagaagtcaaacgtataactataataaatgtatgtgtgactcctatttccggccattaataaaaggtaaagtggttattcacaaaaatatacaaacaacaaaaaattataaaatatatagttttaccaaattttaaatatttttacaattttttaattttatttacaaaaaatacagtctttttatgttgtaatcttgttaatttgttgttgatttgttat

SEQ ID NO: 392239 - DNA, 684 bp, Cannabis indica
tccatactgggaagatatgatccggggatgagatcttaggatttaagtcctgatatcgtgggatctaatgattaattccatgaacataatatggagttggatgtttcgatgcttgctgattacatctccggacgctcagaattgtgtcttccagattcacgctgtgctagaggattatcttactgggatgagtcacttttctatcatttagaagagttgatttcactaaatggaccttgcccattatcttagttgggccagctattgggcctaaagtaattgagctgtagctggctttagaaagtacacgtgtcctcatatggaaatacgaaaaaatagggacgtttcccattttgaggccaacagattctatcccatttaatacctctatttcgactagtaacatccttatggatgtgggtttcaaatatagttcacctacactataaatagagacctaagggattcatttgtgacaagtaagtttctatcgagtaagcaccttcctggaaactatataggcttgataaatccaaaaaactatttcatttttcttccctaagtgcttgtggtatggaaaataagtttttggtcaaatgtgtaaaaccttattcaagttttggtaattcccatacttatcatttttggtatttgtggtgttgagatagttctcatatatatata

SEQ ID NO: 392240 - DNA, 778 bp, Cannabis indica
taaatttccctaatttctaaaccattttagtagagtgaaaattccttccaaaagtttcagaaaacgtcatttcaaggcaaaattaataaaaacttaataattttttttcttttatatacagataaaaaatttcgttcttttttttgataaaaaatttcattctattcttatagttattttatttctatttattcttagttttgtttctcctaaacgatgctttctctggaaccatttatgggcctaatcttcaatgtttgcaggcccaagtactatcattatgggcctaatcttctatatttgtccagcctagtgtggtgcacatgagctttaagtgttacacaatggtattttgatcttattgaaacttgaaaaatagttgggaatctcacaaaaatatccacttttttttttgtcatttttactgtcacgttctttttatatatataaatatttattataccaagttttcaaaaatactatgctaaaatttcaaaattacaaaaataatatattgcagtaaaataaaaaaaaaatactaaaataacgtaacaaacaacatgaaaacaacaaaaatataactacaaagtaaaagaaaaaaaaaacaaaataatgacctaattacaatatacaaaacaatatcaactgttcaatatatttttgtattacaaatttattttacttacttttaagaacttgatttatctttttgtactgctacattattttatttatggttattgttgttacaatttcatactttcaattttttttttct

SEQ ID NO: 392241 - DNA, 809 bp, Cannabis indica
tcaatggagatagagtgaaggagattctcatcgatgtaagtaatttttcatgattatctatgaaatttttagataattttgaatttttgagaatttttagataattttgaatttttgagaattttgtaagggattggtgtgtttttgttattgttttgcatattggtgtggaaatattgtttgtgattgaaagattgagtgattattgagtgggtatttacccgggaaagaagaaaattaagggaaagtgctggcaaaatttttcttgagttgtaggacaattaattaagaatgggacccaaaagataagagtgagtgagagaggtgcctcatcatccaacacaccaaggtcatcgaggcgatcaaatgtagatagggcaaggttcgtaagtgccgaagcacaagaacactgtctacaattgaagaatagggcattcattgatgataggggtattgatattggtgacactagaaatccaaggatcggcattcatccaatgtttgtgccaataagacaataggttataaaacggggatgggcgaaatttgtgtttgttaatgagagagtcaaccaaaccttagccttagaaatttttgctaattggcccaaaaggaagaatgacttagtgaaggttaggggagttgatgtttcggcctctactagagctatccatgctatctttgaccagaaaacttttacccgtgaagaacaacgcctgaagatgcttgaagaagaaggggagttacattatgtggatatggttgagactttgggtttccccggattaaggtttcatgagtataatcag

SEQ ID NO: 392242 - DNA, 535 bp, Cannabis indica
atattatataaaaattaatatataaattcaattcaatatattacaatacaatacaaccaaatataatgttccaaacaacccctgcctaaaaatgtaactttagtggttgctttaattatccattcatcttgattattcccaaatataaatcttattggtctggaacaatatatataacacaatatatgagtgtgatgaattttaattcacttgatacaaacatatagatgtgtgtgtatgagtgaatgtttcattactaaatcgtgtgaatatgataacatatattggtatgtatatatagtgtaagtactagaagagagttacgtagcgagccacgtaaatattagttttattttaagttctaggggtttttgtttaagaatttagtgactaattgtaaattatgttataaacgatatgttttataaaactaattgttaagaatgtcataattgtgtatataaacctataatatacacattgttattcaaatattttatgttataaacgattttttttatatagagtttaaatt

SEQ ID NO: 392243 - DNA, 710 bp, Cannabis indica
ataaatgaaattacaaattaaaagtaatcaagattaattcaactacctcaaatacttaggccaagctttaaacaccaagacccactttaattttgcaacaatcaacctcaaaaatcacaagaactttcaaagattgaatagagagatagagagagtgtgtgaggagggtttcaaaaccaaaaaaaatggtgttttgattttaatttttctaaaataacaaggatatcatttactaactattggtcaaatgttcattctaccctcaaggctaaaaatcaacacaattaacaaacaagagaatttatgtcctttcacatcaaacatatatatctcatgttatttttataaccacataattcataaatttcggtccttgaaccttgtttgagctaaaatacctgattatgaccatactgtgttaacttgtcgaaattcacctgtaacacaataaaatgaacatactacataataatatagtccattagcaaaatatataataaaattatcattttaccccttttagctcaaaattacaaaaaatacctctaacacacaaatggggtcttaaatttaaatattctcatataatatcatatgattgattatattataatataatcctacatttattcttaattaagactagcgagataaacaatcaacgtagaaggtccatgtcaggatacacggcgtatactacagaacaacaa

SEQ ID NO: 392244 - DNA, 1494 bp, Cannabis indica
agcaacagtcatgagatcaactgcccagttgagcaatgctgtctctgtaggctttagttacttcacaagctcgatgcattcttcttcgttgttgcattggagaacttgtcaggtgaaagtccatctagtactcctgaaggaagctcattaaaccaagatttgattaatcctattatggatattgtctcacatagaataaatagtagaaatggtagagtattgaacatgggctactccactcattgtcaattggttttgagatggaacttcataattctcaacatggtattagagccatttgaatatccttctgtctgcaccaaataaaaagtcattcaaatactaatgtaacttcagccacaaaaagatacaaatatgaacctttttaaaatagataataaaatttatgagtagaagtaaaactaatggcttattaaagaagatggggttaaattgcttaccttcaaacctccttgtgagtataggcactcatgcattagcaatagaatagtaggcacattgttccctctcgaatcataacaacattgcattgattcagttgagaccccaaagacgcttgcactgtaaattaaaaaaaaatgagcttcaatgaaaaactacccatttagagtaaaagagttaaaataatcaaccctttagccataatctcaatgatatgattaatttataaactagcctaatattgttatttaactaaacatgtatattatatcaacacatggagaaggtcactttaaataatacaatgccatagaaacataaaagtgtccaataactttatgctatgctcatatatttataattgttggccttgctctttctctttgtcaggttgctaccttattttgacacccatattagtatgatattgtctgttttagcctaaacattcacggttttgtttttgggcacaataaagtaagtagaacacttatattcaagacaactcttgactattaattcttcaccttgtcgggccgctactttaacttgactctcacattagtataatattgtccgctttgggcctaaaccctcacggttttgttttcaagcacttttccaaaaggtctcatattaatgaagtatgtagaacacttatatacaagataaccatattctaccaatatgggacttagattgataccccaacaataatattaagcacctcataataaagttcttagtttaataataaaaaaaaataccattaatccacaaaaatagtaacttagtaagttaagtttatcctttataatttcttctgcttctcccaattagcttcagcaatcaaattagttattaacggtccgtttggtacaatttttggaaaactgaaagttactttttaaaacagatgtgataaaaaagtatttagtaaacaatcaaaaaatagttttttgaagaatttttagagatgctccaacccaacttttagaaaaagttattttgattaaaagactataataagtt

SEQ ID NO: 392245 - DNA, 1186 bp, Cannabis indica
acaaatttatttataattttttttttattcaagatcttattcattaaaaatgagtgaaaatatataatttttgaattaccatacacaagcttttaaattttaaaataatattaattaaaccatagttattctaagagaaacattataataataaaatcatatatatatatatattttttttaaattactaaaaaatttatattaatattttttaaaaaaattgtattaaattattgtttagcataaataaatttatgttattcaaatattttattttaatattttaattatttattaaataaaaatataattaattattttattatatatttaattatatataatatattattttattttataattaattatttttattatttgttatttattttgtgctgtaaattatttatttatttttattttgatttaagtttttttatataaaataaataaaataatttaatttatttttaaaccaaacacaaaattactttcaacctaatttaattttgtccagttcaattaaattcaatctaatcctgtacccaaaagttattgtataatttttttaacaggctatttaggatttgcccacaaactatttaggaggtaaaatttagtagttgtagtaatgtttttttttttctttgaaaaggagtagttgtagtaatttaagagtgaaaaatgaaaattctaaatagtattttaaaaaaaaaaatcaataaaattattataaaaagtttttttatagaaagaaaaagaaaaaatagttataagtggaaggggggcaccaatgtgtccagatcaaaaggttttcaattgattgtgtcggggctagctaatccatgctactaggtgatccggcggttcttaagccaacattgttcttaattttatttttttactaaaggttaagtttaattattattattattattattattataataatcattatttcacaaatacacaaaaacaacaaaaaaattataaaaatacgattttacaaaattttaaatatttttacaattttatttacgaaaaatacggtctttttatgttgtactcttattaatttgttgttaattttttgttatttatgtgttattttttattgttgttttgatgttatttttattattacttttatgtagttttcttattattttctatgttattttat

SEQ ID NO: 392246 - DNA, 569 bp, Cannabis indica
taggaaagaatttcattttgaaatattcataagaaaaaacatttcttatgttattatttatagtaagagagagataattatgaaagttgaaatcactttctgaattagaggaaaaagcatactggcattggtcatagctattacattattacatgattgtttcatttttgtaattttataaaatgagctcatatgcaaaatcgtctgaaattttaaattaagttaatcaatgctgatgaggtgtttacttctgcacaagtaactcttgatcattggaataaaactcaagataaaatttcgttgtcatcaatctgtctagaaagcattagtgatggtgctgagtcatgggctagacccgcagaaaacacaatcaagattaatttagatacaacactctttgatagcgacaataagtatggtttcggaattgttgcccaaaaccatcttggtcaccttgttgcagcacgggccggttgccatggcggaagatatgcagctgaagtcattgaagccatggggattaaagaagctctcagttgggtaaagaccaataattggcaacatgttca

SEQ ID NO: 392247 - DNA, 759 bp, Cannabis indica
aaataaataaataaaaaggtttatatatattgtaaggattggttgtaatcaacttaatacaattcccgttatcttgattaatttaaattggagcacttaaattggagactagttagtgacaagaaatgcggtgtgtcgttttaagtattgaaataagtttctccaaagaaaaaacaagtactgcaaataaaataatacactacactacaaatgatctacgtgtgattttcatctcattcaaataaataaggaataccttaagatcctgatatcaaatatgtatttatttaaatgataacaagaacacgttttgatatcaagccgaaactttcccctttatttgtgtgtgtgttttcttaatattattttaaattttatgatttgtaaaagatataaattggattatttatgttgtaaaatgataatttagattatgtattttttttaaatggtataaaacaaactctaaattcaacttttattaatttttttttaccaatttaaaaatagtttctaatgttttctaaaaagataatttcgaacatgaaaagattatcatgcatatcatagcacttttaattagattattattaatttttaatttaataaatagaaaattttaaattattttaaattgattctaatctaaaatagtatttatttatttagctaaatcccttattgtattgataaactaattatttctttttacaatttttttatcctattattagagggattatttcacaaatacacaaa

SEQ ID NO: 392248 - DNA, 890 bp, Cannabis indica
ctgttgttgttgggaaaccagtaccctgcacagatgggaaacaacttgccaaatttggcacaggtgaattagtggttactggtgttgcaccagcagttgtttgtggtattgtaggtatgacagcagatgcaaaaaattcatgataggagtaagagtcagtgtcaatttttaggcatggatgagaatgggaaggatgtttcatcaaatattacatccctggaaatgtagacacgacccgaagcatctaaacacttgtaccctttatgatttaggctgtagcctaggaaagtacaaggtgatgacctgaattgaagtttgtgtttgttgtaaggacggatattgggaaaacatttgcaaccaaacgtttttaacacagtgtaatcaggtgttagggaaaagagtttttctatgggagacacatgttgtaatacaggagttggcagtctgtttgagagataaacagccgttctaaaagcctcgtcccaatacttgagaggcattgatgcatgagctaacaaggtaaggccattttctacaacatgcctatgctttcgctctactaaaccattttgttcatgcgttgtaggacacgggtgcctgtgtaaaataccaaactgttttaacagatcagaaaatggtcgaaactcacccccccagtctgtttgtaagcactttatttgcttccccaattgcaattcagattcagctttgaattgagtaaaggtttttaatgcatcagatttgtttttaagtaaatatagccaggtgaatctcgagaaagcatcaataaactgaatgtaatatctgtacccattgacagatggagtttttgcaggaccccataagtcagcaacaacaagttgcaaaggttcattgtaaacagtaagaga

SEQ ID NO: 392249 - DNA, 944 bp, Cannabis indica
agtgtgagcacccgaccaagcaccacaccctttctgtgggtttgttggtcggtgattcgaagaagggacgtaacactccagtccgcccaagtacccatccttatccaaggtcctcatacgtgcctcacttattttggatagagggctcaaccatctggcccctaaggcactttacctcttatggggaactgccttagtaagctcctcggtgacatagtcctccccctcgaccaagacgtcaccctccgtggacactggctccccagcctcgttataccctccaaaatttggaggttcggccactccttcttcctccgcttcgtaagggctatcaggacggacgtcatcctactcttctatctcctggacctcactgtccccctcatgatcctcctcctccaccgcaggcggatcttgctcggcacttggcaacgtggcaagctgagccatgtgaggatcagatgcgttgattttccacaaagtcttctttgtgtgggctatcatccttctcctggattgatattaatgtgtgtgtcgtgcaatcgtaacagcagggagagttattgggataccaaagttaccagaacttggacggcgaacaggaagggtatcaactacaccttgccggacaatatacgtcaagttggatggaagataaagcctccaacctttcttcaattcccaaatgaagcggtcgtacccttctcttgtgatttgctctgagtaatagtggtgttgctctacgggttctggagtaggagaacgatcactattcacttcccaatcttcaaagctcgagttagaaagtccgtcacttgaagaggacggactggcacgaagatgaggttgatcctcgtacagaagttgaaagcaaatccttgtcaattcagtgttttactacccaaaactcacgagggttcatctataaaagacaacacacgaga

SEQ ID NO: 392250 - DNA, 1532 bp, Cannabis indica
aaaaataaatgtaaaaaaataaacagatataactaattagaaaaacaataaacagatatacatatattatattctcacttagaaaacttaaaagaaccacacatcttaaaaaaataaattataaaaaacaaccgtaaaataacactaaaacaaataaaaaaataaaaaaataaatacaatatactgcaatataaaacttatgaaaaatacacagtaaaaaagataaattttaccgtaatatttttgtaaagaaataataaaagtcagtatacgatataaatttccctatatatacacacctacatgtacccatccaccctatagtaaagtctagaaaactgctttggaccattttgataagagcaccaagattgatatgggtttcacaaattaggcttggactgaatgaattgtattgggcctgtttcatgactgttagtgaaaaattacattttccacaaacaaaaaaaattacattacttacttcttttagcttgatacctttaatttttatcccctctttcaaaatctatcacttcacgataatttttattcttctctaatcaatttttttttttcaactttcccacaaatctacacacccatctacaaagaacacacatgtttgaaattatgtgttagttatacgagtgtgtgagaataatttaggtacaatactcataattagaggtacatttaaattaaattctatttggagataaatttggttaacattaaaaaaatagtattcttcaacttctccaaaaaaaaaaaaatcctattttataacaaaaacaatttattacaaatatacaataaatatttcgtaaaagatacttccaatatataaataattcttacaaacgtgtaaaaattgttgagtaagtacaccccaacaattatatttacaattatatttaagtgtaaataaattctgaataatttacaatgctaaaaataaaattaaagtatttttttgtactcgcgattatttttttttgtacgcgtagtaattaactgtttaaattttattttcggcattttaatttattctgatttttaaaaaatttataaattgtcctaaataactataatgtacgcaattatgagaaaaaattagattaaaaaactttttttaaatatcaaaacagataaaaaatctaccaaaaaatccatttatgggtgtaggacaacatttttgtatacaaatatttaaaaattgtttacaaacatgtaaaagttatttacaaatttgtaatttgtatttttttaacaaaattcatttcatacttttataaataaaatttgtatttttaatatttttttagtttttgggtattttgaaaattcccttgctcaatcaacttgattggtttgtgacccgtttgttacccccttcatagtacaaaatacatttgttaaaactaaacaaatgaaaacgatttttttttaaaataaaaataatgtgtgacacactccatttccataaataaataaacaatatgcaaaaaaaaaaaaaaaacttactcatt

SEQ ID NO: 392251 - DNA, 1465 bp, Cannabis indica
tataaactaaagtgggtatacaatataatttcttcaaattaattactatgttttgaaaatcaacacttttgtcaaaacctattttaaaaaataccataacacaagtgaaatgaattttgagaaattacattggtttagaactcaaaataattttatatttttaaaaacttaaaatatggggatccgagaattctcaattggttaagatttcataaaaactaaatctttaaatgactttgagtttgagttttaagctaataaaaatgaaattagttatttatgttttctacattttcaaatcattgaatctgaaaattctctaaaaattttcatacttttatattttgagattctcatttctcaaccaattacaaatttaatattttttttcaaaaaaaaaaaaactcaaaaacattaaatcacatcagaatcaatcatatttttttaaataattttttacatacaaaattctaatttttatttccaaattacatttcaaaaaacacaaattttaaatcactttttggattatatcaacaaaacaaatttataatgtactttgaataaacctaccacaaaactacatatacagtcaatgtgcactgaaaaaaaattgtaaaaaattcaagaatagaaaacaatccatatatttttaaaatttgataaaatttaagtaaagaattattctagtaatatatatataggttttgccagggtggttctcaaaagacttggtgtatttttgtataaaaacaaacaaaatcaatcacaaaaacaaacttagttttcttgaactcttaacttagttacgatcttcccaaagcccaatcacattctttcctacattgttattgtaaaatcaaaaataataataaatcaataaatatatgtagctagtgtgcaactgtcagattctaagccattgatttgactccatcaacggctctgcttgaattgtatacagaacacaagtgtcctaatctagtaaatatatttattttctactttaataaattaataaaatttcccatcacattcaaattaatatatctaattatagcatcattaacgaccctgcatgttaattcaaatttttattgcaaagaaaaaattagttcaatttctatataaatatatatttatttatttataatcaagtccttaaaattaataataataactttttcattaaaaatttagaacatattcaatttagaaattggtgtaaaataatactttatattttgatttttttttaataataatcatcatctgtaccctgaaaattagtatacaataacaagcaatattacattaaaaataatattatattactcatagtaatatacgtatcctataatttgtgacaaataaatcttataataactatatcttacagtattttattaagtacaaaaatatagtaagtaatttttttttattttaagtcgtttattacattaca

SEQ ID NO: 392252 - DNA, 1731 bp, Cannabis indica
ctttgtacaattttagcagtaggatggcctagtctattgtgccaaagagaaaattgagaatttaaatgaggtaatgagatgctgttacaatgactttgacaggtagtggctggtgtagtttgtgactcgaaaccaggtgctgaggtgcctctattttgagaaagattatgaagttgaaggagtcaaacttgtaaagaccttggtcaagcttcccagccaacaaggtcttcaaggttacctgatctttgacacaacagtaagtggggtgaaattcaaagtagacattgttatctttggcaaactgagagacacttaaaagattctttgtaatgtgagggacatgtaaaagattattcaagacaagttcttgggaatggaaaggagagaggataaaagttttacctatgtgttggatgttaaggcctgaaccatcacccatgtggatctgttgatcaccattgtattctgtggaaattgacagattttgagcattgggtgtaatatggtgtgtagctccagagtcagggaaaactgcttctggtgtagcatacagatgagaacactcagcaatgttagcacttcctggaaagccttggaacgtttctgggccaagaaaagatttgtcaaatctataaaaacatttttggacagtatggccaagtttatggcaaagttgacattgaatcttttgaccccatgctgagtattgaccacgaccttgagtgatacctcctctttgggattgcacttgaccacggccaatattgggtacacgagagtgagacatctgagagttaaagccagggggaggatgtgtagcataatagtgacctctggatatagcagcattaggagtgaaagaatgagtaggatagtagggacctttgttacctgaaaagggctttgtgtgagtcagattagcctcaaccttggctatgtcaagatctgaagaatctttttccaaccgtacttcttgagccatgaggagtgcctcgatttctgctactgaatagtcatcaagtctagtgtttactgaggtaacaaagacattatattcactggacaaaccattgaatatggcttcaatgtggtcttgggcagtcattgaatgaccaatcgaagcaagagtgtcgacaagacttttaatctttaaaagaaagtcactgagggagccttgcattttggaatttttgagttgagtcttgtatttgccgatgttggctctgttcaaagcagtgtagtagacacgaagtgtgtcccagatttgggcagcagtctcgcaaccaaccatgcgagtgagaatcttctcagccatggaggacaacagccaagaaacaaggatgctgtcctgttgatcccaagcatcatactctggtgaagttttgttgttcaaccgatcatcattagtaagaaattttgggggaatgcgagctggatcaaggtgattttgaaggcgatttccttttatagcagcaaagacttgatgacgccaaggaagatagttatgttcatctaaacgaactgaaagattgtgcgaaaatgtgacaggagctgaacgcggaagattaaggcttgaactttgagacgaacctccattgttggccattaacgaaagcttgaagaaaagaaacgaactggacagaaagaaaagaaagagagagctctgataccatgtaaagtaaaacgatttgagagaaagactgaaaatgtttcattgaattaaaatgcact

SEQ ID NO: 392253 - DNA, 2634 bp, Cannabis indica
tcccatccaaggatcatccatacgaccctgctcacgattctgttctttctcgagtcaagtacctcttttctgctgaatctgtggcctcggatagacgttgagaagtcctcaggctgatagtttgttatctacttcggctcttgttacctaccctttgtattttatgcgtatgaagtgagttgcttctctgcatctatcagattctttttgtgcctattttttagttaccttgatttttataagaataataaatcatgacaacataaaaggacatgtcatcattgagctagttggcttgatttttatgaatttccaaatttggctttgttttatgctaccccaattgggtgggggttttgaacttttagatatttactcctgaagcatattattcaattagctctctcataaagttggaaaaaaaaaatcttaaatcatatgggggttttgaatttttagatatttaacctaactttttttagacttttaggtcttaaatcatatgttatttattcatctctgagatagactaacatacaatctgcattaaacaataatctaaatgtcacaaagactgtaaatattctcgtttcgcatcaaaactaagatttattcaattttagcatttttaatacttttcaaattttgtattgagatcatgaatcatgtctaaggtaatcaatctcaaatatgtaattaagaacaaatatgaataaattcacaattaagaaagaagaaatagcaattaatatttaactcatgacataattttaatcaatatttatcaaatccctaaaagggagtttagttcataatctcaatgatcaaatccaatataaaacttaaaacagaaataagcataagaaaactaaaagagagaagaaagaactaattagagaaatcgcttggattaccacaagcccctcttggaagtcctcctctttttgtttctaggtttggtttctgaataatggactcaaaattcgtaacccccttgaatagaattaggtttctacttaaaaattgtcaaattacgaaattgttcacgattttgcgtagaaagcatcgctgcgactacaaaaggtctagtcgcggcaaccattaaaagctcgaaaacctcttttctggaagttgctcgcagcgaccataattcatgctcgttgccgcgagctatgccaaagtcagcttgaatttttcctcgttttctcgtgactttgtccattctaactttaatgaatattctatttaaacaccttaggaacttgaaacaaagataaaaaagagtaagtatcctaaaagtaaaaacaaagagtgaaaacaatactaaaatgtgacccaaaatttaggctaaaaatagtgtaaaaaatgcctcatggaaagttagatgtcatccggaaaggtttccggaagaagtcttcagggaagcttgtcatcctccagaaattagtttgggaaggctagatgttccctccaggaaggaagttccggatagtatgctccagttgttggaattttatatcctaaataaaacccaattcaatgtaattgtatttacgtttaataaagatcaaaaatcataccatgacctagtcgtatgctttgttcacgtgtttgatacatgattataggtttaatatataagttctattaaatcctaaacatatagttattcacaattacagtgatgttatcacaatgaaaagtaattgtgattatatgcttcaaattatttaagtctcatgatttatcagtgcatcgaatttagattgacgtgataatccgtgataaggtttatttacacttagctaagcggaatgtcttttccaagatattaataaagtatcagatgtattggctatacattggactggaccgatattaacagtcgaagagatatcataaacttaccattgtatcttttcaaagtcactatcacttagttgatcataaatcaattttatctcaatcctgagatggttaagctctagcttaattgtattgcataagttttttgacttgttcgttaccagcttacccaaaggactagcccatacttacatcttgggaactcggtagtacaattgagtaagagtgttaatcatatatatagacatctatagcttttatgtttattagaagtgaagcgatagtttccttagagtttggcttaacatgataaatgatataacgctcatttcggtaattgtattagttttccaaaatatcatttataagtagctatgtatttttatgataaaatacattgaaggataaaacgataattttgtctctactcgatgtatgattattgtgattgaaataatggataaattatagcttacacttacttagtgtatagagcattctatggaatcatgcgtgcaatttcgagtctatagtggagttaggaggaattaataagttaggaaatttactcggtaaatatcaagatctgtttattaggagtttgattacataggcccatgatccctacattgtaagagataatatcatcttgtagacttaactaattgattttataagttaattagaatttaaaaatagactgttttatttgataattttaccaagtttgaacaattttgagaagaaaagagaaataagagtttattt

SEQ ID NO: 392254 - DNA, 1098 bp, Cannabis indica
ataatcataatgaaaatgagaattacgagtttttgtgattattttaaggtatttacatcttcttttctaatcatatctataataatttattattaattatatgttataattgttagaaatttttttacctacatcttaatttactactcagattgtgactaatttaacatcataaatataaattttctaaaacaatgaatatatacacataagagattagagaaaaccttacattgggtgcaacagaatattatgtctctccttccgttcagatttataacccttgatttctgtatgtagtagagtttaatcaagatttgatcttggatcttctctcctacgattgtgtttaacacagtcttccacaaacacctaagtatcaccttaaatagtatgggctgatactcaaacacctttggaacatattttgagagagagaagtcgaattccatggtgtatgcaattcgaaatatgtgaatggaagagaaaagcaagaccaaacattaggtttttcaatgttcttctctttctttatataagcattcactcagggttaggtttagatgagattgggcttaaaatatagacatgggttgaatttaatctcttagggccgaaatcatatgatgggctttagagttagatttttgctactttatttcaactaataaatctaaagtgtcttttctaattttattccacttatctcatctaattatttaaataccaattttaatttaaaaattataaatacctattaaataaaatgtaatttaaatatatttattaattagactcacaaaaagtactaattgacaaacaaaccccaatttctcttttcttctccaaattgtccaaattttataaaaattatcaaataagacatagtctatttttgaattctaattgccttattaaatcaattaattgtgtctacaagataatattatcccaaaaaatattgggaccatgggtctatgtaaacaagctcctaacaagtagatccaaaatttatcgagtaaatttcctaacttattaatttctcctgactccactatagatttagaattgcactcctgattacatagaacactctat

SEQ ID NO: 392255 - DNA, 634 bp, Cannabis indica
cagtattccacatagcaataactccttgatcgagaacaaatttgagtaaacaataagctaaagaattagcttctctgaaaataaaatagaaattacaaccaactaagaattaagtttctaatgttccaaataatggtatcaagattttaagtctccacactattcagtctttcccccgaagccagggaaatggcattggcacaatatgattcaacgacaaagtttttgttcagaaaaacgataaacttcaagcgcaacgaaataataaaaaaacgaagtaaagcaatttactcagtttggtaaaactaccacacccacaaagagagatatatttcacttatcacttcaaaattacatatactctctatctcaacctctcatcccaaattccaatacaccctttgctttttactcactctcaccacataacaaactcacacacttctctttttcacaactcactaatttttttttctcacacccacctctcacacaaaacacatatttatagagttacaaaacttaggcatcaagacaacttggaggccaagacattcgaaagcttccttaaagagactcatcaaaacttggtcaccaagactttcctttttcccacaattaataattacccaaa

SEQ ID NO: 392256 - DNA, 961 bp, Cannabis indica
tttccctttagaacaatgagtacaaagaggttccacttggatgccacatttggataagacataattagtaagaagccatgaaggacaaattttccaaacaaaatcggcgaaattttctacctccaatttccaccaggcgtcagttttggacgagtcagattgaaaaaattcctcttatttttcgcatttttataagcatgacacgtggattctaatcaaggaaagccaaaaagtcattagttgccctaatccctcaattggtgctctagggagataaagccatcaacctcacgtgaagagtctccgtgacggagagttccccgactgctgaccacacgaaaggtatccgtgaaccaaaatccccttccattccaggagcaaaggctgtcaacgcccgcctggattgagcatggattgcccagaggggccaagacattctgaaacacagtgaaccagttatgcttttaacccgcggaaacttcacccatacatgtcagactacggacctagggaccaggctttttcgagtacgacgtcagaggttgtctcccacgacacaccatcgtatagagcatgtgtgtccttgtgtactagaccaaatgatccaacgactatgaataagggaaattcaaaagggagaagccctgaggcgacacgcgttcgaaggcccagctcgtacgatctgacacccttaaatggcatatgggaaatacgccacctaccaatccgatagtgggattttgcccctactatgatccatctaaagcatcccatgcaaagaagctggcctataaataccccagataaagaacaaggaaaaggggactttctctttcgaaaaaggagaatttaaaaatatcgaataaaatgattatacaaaatacatatttttttaaaaaaaataatgagcttttaatcaagagagattcgatctccattgttggttttacatcgcgtttgt

SEQ ID NO: 392257 - DNA, 1525 bp, Cannabis indica
atgattgtatattgaactgaacatagttcttcaaaccagaaagagaaaagatagagagactttgttgaggaaaaagaatgtgttttgttatcctagtgtaatgaaatattggatacaagttactcacaagggagtgggatttcagatatataaagattgtccaaaaaataagtaacataattaactaactgactttccccttattgttctaactgaataaaccgaccataactaacaatttctaccttggtcgaattattcagtgtatacaaaagaataaacaacaaataaagcaacaaaaacaaaaaaaattacagatcacagatggtagtgatccttagtagatttagacaatgtctgaatttggcagtggtgagtggcttggtgagtatgtctgaggcattatcctctgttgaaactttcttgagcttcatgtttccttctgctatgacatctctaatgaagtgaagtcgcacatcaatgtttttggttctttcatgtacatttggattttggatatttgacgatcatagtgtacctcgatgcatctttgttctagactaagttccctgatgattcctttcaaccatatagcttctgtcactgcttcagtgcaggcaatgtattctgcctcagtattggataggacaacattgttttggaggtttgcgttccaactgactgtgcaattacctagttgaaaaacccaactagtttgtgatcttcttgtgtccatatcacctgcataataagagtctacatagcctttgacctctagtgcttgagagtttgagccatacataagtcccatgtcagatgtgccctttaagtaccttaccacccactttgctgccttctaatgttctatccttgggtttcccataaacctgcttatgacatcatagcttggcttaaatcaggtctggtacagaccatgatgtacatcaggcttaccaccaagttagagtaggtcgtatgttctcactgtagttgtgatcaaattttgtagtgggggcttgtgagtgagacaattttgtcatgtgagccataggtgtgctgactgcttttacctttgaaaaaccaaatttttgcagcacttttgaaatgtaatatttttgagatagcattagtctctttccctgcctatttttgagtatctcaatgcctaaaatcttattggcatgcacaagatccttcattttaaattcagaacttagcatatctttcacttttcttatatcactaataagtttgcttgctattaacatatcgacatataggagtaaaaagactgtactcctggtgttggatgttttgacatacacacaactgtcataggaactcttcttgaagcctgatttggtgatgaaatcatcaaatcttttataccattgcctaggtgactgttttaggccatagagtgatctttttaacaagcaaacatagtcttctttgcccttctccacatagccttcttgttgttgcattagaatctcctatgccaattctgttgggttttgtgccc

SEQ ID NO: 392258 - DNA, 1717 bp, Cannabis indica
gcctcagccagacgttgccagagttgatgactttccaactcaaccaacggtacatacctagtgggatcgtaggcattctcactcatatgagtaaaaccaccggcatttgtgttgggttcctcattcctagaatctaggctttgatcatcatcacgttggcttcttcttgaacgtgttcatcgtgttaaacgagttgttcgtgaagtgagtggctttcgagagcccattggctattttctaggacgacgattagcctattcaagacgagtgttgtcgttttccccattatcagccatggagaaaaaattccttttttggttaggagggattttttttgagcttttatcacgtaggctctcaataaaagcaccaaactgttaacgcagatttttgttaacgattatgagcttattttgtaataaatcaagcacaaatataaagaaaataataacgatgacaccaagatttttacgtggttttgcagttaactctgcatagtccacgagtctatcttattcaaatatttctgaatacatgattagggtttttacaatcagtatgctcccttttctctctaagatttttttgtccccttttttgtagaatctgcccctatttatagtaatataagttggcagttaattacatttaagttcaaatcccataacaatattccccgaaattgtgggccttaattacgctccatgtaaatacgtgcggttaatactaaatcatacaattgtgatttaaaccatttgtgaggagatcaacgctgacgtggatttggacatgctaccaaatgtatctcgttgaggcgtctcgccaagtacataagtgtatgacctagtttacttgcattccagcaatggcatgagcaccagtatactgagcaaacttaataactgccctttgacgataaggtcttgcagactggacaatcatgtccttcaagttatttcacttagttattataatgtatattatacgctaagtattttaataaccaattcaccacgtcgatgcttctttacatacagcgaggtagatgtctcactatgcgttgtctatgtctcccttgggattatgccttctgatgcaaaatggtttctcatcaatagataaatcaatagtttgtacatcctgatctcgcttaagactgtgtaatcagcgagttataaatatactctatcaattctgcatttaaatgagttattccattttgtatttaatgatataattaccattatatttattgattcatattctctgagattgacacgtgttactttttgaagtacagtcgaattttgggtataacaaaaacatatggtacctaacttgtatttagataaaacatagggtaccaaatgggtagacacccttagttatttaatatattaaaattatttacataaactagatttttgaaaaattagttggatatttgaattcaaatttgattttgaattgagacatttcaagaatttgttagatttaaatatttttcaaatattttctaacagcctaatttgaattcaaattaagatatattttttaaatattttattttaaaatagaaatatcttaaccaactttctagatcttattacattgtttgttatttaatttaattatttaattcaaaaactttttttaacaaaccaattattaatttgatttaaattgttatgataaacttgttgatagattcaatgat

SEQ ID NO: 392259 - DNA, 1925 bp, Cannabis indica
tggtttcctttcaaaaaaaaaaagatgtaggtttaattcttgacaagagcattaatctcctcattcatggctgctaatcattttgcatctttaagagcttcatagatgctggaaggaatgagaagtgtaatgtaaacttttggcttatgaatcccattcttggatctggtacacatagggtgttgatttgttgttatggttgttgctggtgtaattgcagtaggtgatggagttgcaacaggagtgacaactggaatggcaacatgagtaacaactggagttgtagtaggagtgatagtaggggctgcaactggagtgatagcagtacctgtattaataaaaactaaactagaaggtgggttagttggtgaagctgtggtagatgaagaagtggtgtccgtcatagcaccaaattggttagaggaagatgtgaaggggggaggaatttatggtggaattagggaggctatttttggtggaatggaagaaatgaaaggggtaagaatgataggttgtgaagtgggagcagtggtagaggagaaagggaagaaatagtcattgaatgtcacatctcgagatagatatattctcccttctaaactgagatatttgtaccccttttgagtaagattgtatccaataaaggtacactgagtggatctaaatcgtagcttattcttattatagggtcttaagtttggataccatgcacaacaaaaaactttaagagaggagtaattaggctcttttacgatttgaaatggagtttgatttgcaattttggggagggaagtctattaattaaatagacaacaattcgaaaaacctcatcccaaaagtgaagaggcatttgagcatgagcaagtagagagagaccactctctactatgtgtctatgtttctctcaacaactccattttgttcatgtgtgtgtggacaagattgtgtatggacaatgccacattgatcaaaaaatttgtcaaatggtttaaactcaccaccatagtcagattgtagagctttaatgggaagatttaactaaaagtcagttgggattttatgccttaaaaaaatctatttcaatataatattatttactatcaatagaagattagtaatcatttagatttacatgtagtttttatgattatggtttaaatatacaatttcttttaaattcagaatatatagttactcacaattacagtgatgttatcacagtggaaaataattgtgattatatgctttaaactatttagtcacatgatttatcagtgtactgaatttacactaatgtgataatcagcgataaattaaattcacttacacgatgatatgcaaaatgtctttttcacggtattagcaaagtatactagtatcagatgtattggctatacaccagactagaccgatattgacagtggaaaagatatcattaacttactataatatcttttctaagtcaatgtcacttagttgatcttagatcaaaagatcttaatctttagatgattaggttctggtttaaatgtattatatatgttctttgacttgttaaagttaaccacttggatcggcccaatacttacatcttagaaacatgatagtgcaattgagtgtgagcgctaataatgaatattaaatttatagcttttataactatttagaagtgaaacgatgatttccttataacttaacttaatagacataaatggaaaagctcttatttcagtaaatatattagtttactgaaatatcatttataagaagttaagtgttttaaggataaaaatatattaaagggtagaacagtaaatttgttcctactcgatgtaaatcatctatagatgatctttgattatttagattgaaacaatggataatttatagcgtatctattcatggtaaatagagtgttctatgta

SEQ ID NO: 392260 - DNA, 1010 bp, Cannabis indica
caagatagctttcaaaccagcagagatataaccctgaggaaaacacaacaaggaatagaactaaaagaacgagttaaaaagttagctgcctgattctcggactgttcaacaaaattaattgaaatagaaaacaaaagagaagattgcataatccataattaaaagtctcaccggagtcggagacaacaaccgcttcttgtttcattagttttgaagttgtgtgtgtcccacattgttattattattatttttgcatttttgatatgctataaattaaatatagtatttttaaacattttataatataatcttgaaaaaataataaaattagattatcctatctaaataattagaagatcatagtgatgtgaaaaatattaacatgcctgaattatagtaaagtaaatttatttattttaaaatgaacccatttaataatttattcaattatttcattattaatgacagtttgtccaaactacaaatattatgtaaaaaaaattacaattacttcctagaatgaaaatttaaaaattaataaaaaaaatcaaattataataaatttctcaaaaaaactaccaaaattagcatactcttgaacgagtttaacatcagccttgcatcgaagaaattgagggaaaaaaagccaaaaaccagtcaacattacaaacccaatagtcaacattctcgacatcactttaggaacccgccacgtgtcacctaaagccttcttcagaatgatctcaaccgttaaacaaattccatgaagaacaaagaaacacgtcacctcccatgtgggtggcacgcgcgacaggtaaaagtacataagttcgtgaactagcccagagacaaggaaggtggcaataatggctggaattgaggcccactttcggcccattaaagttgagataagcccaatagtgggttggtatacagtgtgacgcagtatacgcgtgtgacagtcagtagtcccgtgatccgtaaggggaaataccgggtaagctgtgcaa

SEQ ID NO: 392261 - DNA, 739 bp, Cannabis indica
aataataataataatatgttttatgaatgaattaaagtagtagtagtacaaagtgtacatcaaatattcttatgccataacgaacccattcactaaaagacaaagtaataaattgaatagtattttgatacctagttaggatacatacttttaaattgttccaaatcaaagagacattcatatatttatatatatagcatcattaaaaatacaattttactattgtttcatttcatgccaacacaaataagggagcatgtacatacatgctattacattattcataacatatttcaaaaaatttgtaaaatgtactacttataataatataacattatactaaaaatatggatggtaattggaaaatgttgacattgaaaagtagtcaatactaactcgttactcgttagattggcgagataaatagtaagtttaaatgaataatttaaagagacaaaaaatttatagttgttcactctccatgtcgcgataatagtgaagttacgtacgtctacttcgagtttaaattctcacaagaattacaagaaaattggttaagtctgaaagttctaatttctagagaggggatctctgatcttaggggtgaagatgaagaagatgtacgagttggatttttgttttgatgcttggaagtggcctaggttgacaattgtcaacctgagcactgggtgcccgagcaccaggtgctcaaaaataaaagttctctgaatctgattct

SEQ ID NO: 392262 - DNA, 1047 bp, Cannabis indica
ttgatgtgagaaaatacttatagagatatgtacacaaaaaaagtctaatattagttagaattaactaaaaaaaaaaaaaaaaaaaaaaaaaaaaaaaaagtaacaaaagttatttttggagtgtaacagtataaaagaaagaaaatgggaaaacacagtaaactgagtaaatttccctttagttttccatgaaattcttccagaaaaatctactataattagtttagtaaaaaaacattttaaagagaaatattaatactcacaagctacccgactaacagtagaagtatttttagaattttaaaaaaaaaaaaaaacttttaaaagtccaacaaaccatagctatagacgccttacatatctagtagctttaattctttaactatatcattaaatattaatttatatgctatcatattactcatgatcaactcatagtgcaattattttaagagagaagagaaaaaaaactctaggtacgattattaatcaatcaatctcttgcttgctccccaaactttttggaaataaaaagtaattaattaattgtttttttttttttatcatttggatattttctttcgaaatttggatatgcctaataaactaacattttccaattaatgggaaaacattttccaattaattattatatatataggctatatggaccggaaaataattgatgcagtataagactaattaataatgctgtagaaaaaatctcgatgaatgatgataacctagcttatttggattggatctccctactataatttggctatgatttttagtcatatacataattaaattctaacctttggtattagcctctactaaaaatatataccaccactaaaaatatagaggataaattttcttatttttattaatttaaaaattactggcttgcgccatgtgccattagataattaaatgtgttctggtccaacccacttaaaacgtataagtttttttttttttaaacttttaaaaaaaaaaacttaaaacgcgtataattaaattaatttaaaaattaaattaaaa

SEQ ID NO: 392263 - DNA, 1151 bp, Cannabis indica
tctagtatttttttatgtaaattgaataatattttttagtttgatttcatatttttcttagacttcttataacatttcttattttttaagatatgagtttgtaataaataaaaataaccatgattttctcatcacaaaatcttagtttgtttatattatttattggattttttattaatttaataattatattagatttttaataattttctttttatttttataattaatagaaaataataaatttgaaagaatattaattttcttttaaaagacggcaaaatttagtattggtagaagtctagtaaacaaaaatattaatttttaacgataaaataattaaagctaatagaaagaatataattgtgtaattttaatattttaagaggcacgattacatagtgtcaaaaattcaagggtataaataataattattctatgttttttatataaattgattcagtatatgcaccccttattaaatgtgtgttgacaaaatataatcaacacatatattagatttttttttcctaattaagaagattcttctctgtgctattatatatttaaaatttcatattaacataatttcagaaattattcttaactttgtatgtgtcaacaaaataattcagaatgtctatacacataacgagatatttttaattttactagtgtataaaatacaaaaagattcaattgttatattaaatcgatgtgttaattttcacttactaagcatattcaatattttaatatatatagtactacattctgttttatacattagttataagtttaaataatttttaaattatatattattaaatttattgttgaagaaaaactagataattatagccatattatttccccatcatatactaattaatcatgttattttcaaaaatactaaaatgatatttttttttatatttttatacataactttttatttatttatacttttataattaattttatatttatttataaaaatagaaacaacataacctaaaaatagaccactaacaatgaattcaataaaacatgcgtcgaatgggtaaaatatgtcttgaaaggatggcggcaggaagttgatttttaataaagagaaataactaattaattaggtttatgtaatgcataac

SEQ ID NO: 392264 - DNA, 1609 bp, Cannabis indica
caatggctggtcagtgtacacccttatcaggtgagcttgaaagtaaggtcgtacctttcttgaagctaagagcagataatatttttatttttccatgagtgggtatcaactctcaacgtcaataagtctcttgctgacatagtacactgggtgttgaatgccatcttctcctctaattaaaactgcacttataacatattttataataaccaagtatatgcccaaatcctcattgtctaaaggcttgataggatatgaggttgagctagttgtttctttagctcttaaaatgctatctcacactcctttgtctattcaaatttcttgttacctctaagtatgttgaagaaagggacacatttgtccgtggactttgacacaaatctgcttagtgttgcaatatgtccagtcaagctctatccttcttttatctttgtgggtgacttcatgtataaaagggcttggatcttctcagggtttgctttgattcccctggtattcataatgaaaccaaggaacttatctgagccaactccaaaaaaacatttgagggggttgagcttcatgttttaatctcaaaggatcttgaagcatttgtttagatcctctatgtgtccccaacctttttggacttgaccagcatgttgtccacatagacttccatgttacgaccaataagatctttgaacaccttgtttacaagtctatgataagtggcccttgcattttcagtccaaaaggcatgattttttagcagtacatgcccatgccgtcaagaaacttgtatgttcttggtatggtggatacatttagatatgattgtaacctgaataggtgtccatgaagcttaggatcttatgaccagctgtagcatctaccagttggtcgatcgttggaagtgggaagcagtcctttggacacaccttattcaagttaaaaaaaatctatgcatactctccacttattgtttggtttgggtaccaagacaagattggatacccagagcgggtagaaagcttcaatgatgaattgttggcactcagccttttgacttcatcttttagagcttgtgctcgctctttatctagttaacctccttttttattctacatgtcgattgtttggatctacgttcaaggtatgaaaaattatggatggatctattcccaccatgtgtccatgcgaccaagcgtagacgtccaggtttgtccttagaaattttatcaattttgattttatttcttgtgctaaaccctttctgatcttcaatcttttggtcgaaagagtagtgttaatctctacttcttctaactcctctatcaatccaaagctatctgcatgatccccaaagtgaagatctaagtcttcctccttactttgggctgaacttcattgccctttgtcggactcttggttagagctcttgacaggcatcttttctttcttggctttggacaagccaagttgtagcattgtcgggcaaattgatgatctccccttaggcaccctacctcatgccttgctgggaacattaggcatagatggttgttgcccctaaattcgcccaaaatacgtggaccagtcgaaatgggacacgtggatcagataa

SEQ ID NO: 392265 - DNA, 811 bp, Cannabis indica
agtaataaaaaaataataaaactgatatgaaaattattttcattagtatcctatgctcaaatgtgaaattgactcttcatcaactattattaataaacgatttgatgttttggatcacattcttggtgtttagttgtttgattatttttttatgttcttgttgaaacaatggtgttggtcttttttcctttttttttctgtgctttctgaaaattgtgtaagattgctatatttctattttcttattcttcatgttaatcatgttcctgttggattatttaccctcgattttatatatttttgtttcttgtttttttgtcattattttatgattgttttaaggctattaatttaccgttgtttacccatatcaatttatcacgttctttaacatcctggttctgcttaatttttaaacattgatagtatcctttaattaaaaaaccaaccacaattaatcaaatcattcatatctcaatttccacatagtatccaagtagtttaaaaatcctatagagtatgtaaatagatcattgacatctcttttaatagtaatagaaaaataatgaaacttgtatgcaaattcttttctttagtatcttatgctcaaatgtatatttagtttttctgctgttgttccactgctgtacttaagttgttcttgtttgatgtcttctactctatgttctcttattgtgccccaactccccacatttgatgcacttattatgttgaatcttatcctagctagcttccatcctcattttttttgtctttcagatttcaccctttcaactggaggcaagactat

SEQ ID NO: 392266 - DNA, 680 bp, Cannabis indica
atgtttcaaaaaagaaaaaaaattacttttttttttctaaaagtataattagattttaatactgctggaaattggagtgtcattactaaaatttgaataaacatatttaaatgattaaaaattttatttgaaaataaatattttttgatgtattgggctaagagaacttagagaagtgtgttttggacacaaatgaaaattgggccagcaccataattttaggggaatttacgaaattttcaattctatacgtaatatcaaaaataattacaaaaataactatgataaataaattcatataaatagcacccattgttatacgaaatgaaagtaataatatttttaagtctatcaagatccgatccaattataaattggatgttagattttatcatccgatctgattcaattagtttcagttatccaattgatctaacatctattagatgttggattggatcggttctatccgttgaatatatttcagatatatttattggtttaatttgggtttattcaatattttaaacttagaattttttagatcggatcagatccatctaatattttaagtctagtatgtattagattggattagattcatctaatctaagaaaaaaagagtaaaatttaaatgttgttataaaataatataaagtagatgagaagaaagaagaaga

SEQ ID NO: 392267 - DNA, 1375 bp, Cannabis indica
ataaggaggcataataatttttttttctgtaagacattggtaaaagtaaacttaaaaagaaaaataaaagtgttcttggtagaatttgaactcttgacatctatcatatatatatatatgcaatctagctttcacaattacactaaaactaatattatatctataaataacatattttattacaaatatatgtcataactaaagtccatttacattaatttcttcctatctttttcagagagcaattgtcattttgcttctatgtaggttccactataaatatgtgacatcttaaggtgtatcttaacatttctttttattatatatataattatacttatcaaaattaaaatgttccaataaaattatttacgtagaactaatgcctttaaaatttatgcattacttgtacatttaaattcactctctctaaccaatttatttgaactcaatttcaagcatatgagtgataaacaaaaacactgatgacctttttaatgaatgattcaataaaaatgaataaaataagtcttattatatcaatacggaaaagcaaactaattattaaaagctttcttagatgtttttgcttgaagcataagctttccatttcgagtgatttgccatttaattaaaagctccattacattaacacacttatctattattcttgttaaccacaaaatgtgtacgtaggaatgtcctttcacaacatatattatacgtacaagctcaacaaaatatccattacatatactcaagtttaaactccctaactcttatggttatgatcaactaaaaaatcaataccaatttttctagtatatcaatctaataagtagtactccttagcaggatcgagctgagttaagacgggttaagcccacgcttagatcccaccaactcaaagccccataaaagtatcatgtatttctttcattagaacccaatattatattttttgttctataacccacaaatttacttcatatataagattatcgtactttatatctaaatctctttgttgaccgagattttcggcaactaatgaaatatgaatataataatgagctgtaagaaagcgagatgaagactttttacgtggttggggcgttaatgagccttagtccacgagccactgatatttatggatgtctttaatacagatcttacacttgggagaatgtttctctctttaatacaaagaatgttcttggtgagttttttctctgtttgctcttcagcaaccaagattctccgaccccattaaatgagctttgagggggtatttatagtgttttagtggggcaatccctagaattgtacttacacatgtgtctgtaagtatccataaagttgggcatttccgatg

SEQ ID NO: 392268 - DNA, 608 bp, Cannabis indica
ggtccttgtatagaatgatcaaaagtaatcactatttttagttatttgtttataatatctaatggttaatattataaataaaaatattaaacataataaataatttattctttcaaaaaatacaaataaataggtaacttgttggttacttgttgtatggatagtaatttttaatgaattatatatttgtttccaataattattttttgctttctttctaatccatgaatgattccaaaattaattattaaatattataattttttataatttttaaaaaattgctatggaatttatttgttccacacaaattgatcatcacatcctattgtatgcatatataaacatacatgcatagtagtaatagtaatcttcatcatgaatcacatactatttgcactatttctaaaaaaaaattaaaatattagtatacttatgctatcaaatccacaaataatataaaatctaaaaactaatttatacttaaaagaatagagatcacaaataatctaactaatatcaatcatattcttggagagaaatcaaccgtaatcaatatattcgatataattgaatcaaaatgttttgtgatatttttttttaaaaaa

SEQ ID NO: 392269 - DNA, 661 bp, Cannabis indica
catgttgagattcaagaatggaaatgtggaaaaaattctcttcatagaaatgaatgagcaaagctcagtatacaaggagagagaccgaatacagttaacaataattagttacatctattaaataaagtgtacataactaactcaagtaacaacctaactaactatacattaactattaacaatgagtgattaatgtccatgtttcacgtacaattatacatttggataagtgtaaataactgtttatgttaaaattacaaagaagtggattttgacttgattagaccgtgttgtttgtgagcagatgcataactgagtgtgtaatacgagagatacatggttgagtgtgtaatacgtggagatgcataactgagtgtgcattatgatgagatgtatagctgagtgtgtaatacaaggagatgtattgctaattgtgtaatacgaggagatacattgttgagtgtgtaacatgaagagatacattatagagtgtgtaatacgaggagatataagattcttgtattacaactagatacaagatccttgtattagatacaagatccttgtattacaacaagctacaaaatcattgtattacaaccagctactagatccttgtattacgactagctactagatccttgtattacgagatgttgaa

SEQ ID NO: 392270 - DNA, 729 bp, Cannabis indica
ttttttgtgtaaattaggaataaattatcttaattgtaaaaatagattctcaaaagtattttcagagaagatataaatcttaagttcttcgcaaatgacttttaaattagaataaatattttttattttttatctaaacacttctgaaaaaaattcttttaattctaaaaattaaaaaacaaaatttatcgaaactaaactaaacgaaatgaaacatttatttagactaattacaagagtaaaaataataagaagtttaaatttttttttgggtagaataacaactttgatctaaatgacattattctagcaaaactagttagtgtgactttattataattatttattaaaaataaaaaaatattatatttatatgattatatatataaaaatatattattttttaggattataactaagaatatttgtgtaagaaaaacttagattttgattttattggccaaatatactctattttttttttcttaaatatctaaacataacaaaacagtaacagtttttgtctgttacacattgttaagtgttcaccatacaatattgccactttcaaaggagaaaaggaaaatttaaaacataaacatgaacaagtgcatgcggataagtcctactcttgtctatatggacctttcccataaataaaaacttcatgactacctattttcagctttttgactgtttttgtaacgccctaatgctaaggcacgctac

SEQ ID NO: 392271 - DNA, 1037 bp, Cannabis indica
ttttggcctcttattccacttatcagatatctctagtctacattgatggaacactactatatctgtcgatacatatgctaattatccaccaggtttagctaggctgtctttataaattattaatatatccaaattaatagtgctcgacctgtttacgatgttcatacactactgtcttcttctccaatgacttgtctttatttggcgctcattttggtctcaatcttacacaatgcttggtaacagatggaattgcttaaccggaaagaaagctatcttaaagatagtttagattatgaagctccttttattttctatatccattttcgaaatattattttatatatgattttcatctactccattttaccacttgtaggaaatttgtcaattttaaccctttacaaactaacacacaaatcagtccgtgaaggtcaattttgacctttacaattaaaacatatatactagtcaacataaaaacctgaaacgacacacttttgaacgacatagttttgaccctaggtataataacctagtagatagatcaagaaacacttcgatctttcttgaaagaccctagccacgattttacttcgcaacttagagccttcacattcttcttcttgctaatcgcttgccctaatctctaaattagagaaacacacaacaataacaatatccaaatctcgatctagaattatctaagtttgagttagaatcaaacaaaagagacataaaaattgatctcggagttcacccaaaaactgttagctagtatgtctctgtcaaactccctttagatatgcttaaccgtgaactatcaatcatcaatggagttacaacaatggagattcctgatcacacagttccaatcaagtaatgtcaattattctctttatcctctcttctatttttctttacaatttttttttttacctagaaactgaccctgttgatgtatacatcaatgtttagcacgtggcaagaaggaaaatattcacagagttaatgtaacaccctaactaccttaggcg

SEQ ID NO: 392272 - DNA, 1033 bp, Cannabis indica
aaaaaaaaaaaaaaaaatcttcacacaaatcacgtcacacgagtttacttacattcaatttcatctccaaaaaattattgtttgtgacctagctatctaattatatatgtaaataacatttcaaaaaaaaaaaaaaaaactcatatgtaaaattataacctttttgaaaaataaaaatactataaaattccgtaatgttcatattgattttatagtaaagttcaataagcgtaaacatcattactgtaattaagacactgcattacattttgttttgtttgttgggctacaaatacaatataataagagaaaaattagaaacaattacttttagaagaagaaagagaagagaggaatctttggtattggtcagcttaaaatggacaggccaattggaaaaaatgaaagagaatcatttggagttttattaattttattatataatatttttgtattgggtttgggttggtatatatattgttcacaaatagggggtgggaccctagacactcatgtaaagtttcaatcctttttgtcaccatagggaccaccacacacacaccccttatttgcttctcatcttaccattacattagaaacagtctttccccacctttccatttcttaattatatagtcttgtatacaataatgatgattgggatgccaatttttattattattttttttttaaaaaaataactgcttcctaattttcttgattggttctagtcttctatagaatcttttgtcaacatattttttcttatttttaacccactagttaaattaagtgcgattatattctataaaccatggattttcacaagttacaacttacaatggtccaaatttcatttcacaatcaaatcttgtccctagattccttgtaaatccacctgaagatgaggaggatgtaacttaatcgttgggcaatgaaattaattaattttcacacacatatatatatactagtatattgttacgtgcgatgcacgtatgctatgttttatattaagtattatattatgagt

SEQ ID NO: 392273 - DNA, 844 bp, Cannabis indica
ttcagtggtgatcaaaattacatatgcattaccaaaaactgttacttttggtcacaacataatttttttgtgattatataaatgtgacttttagtcacaacaaaatattacttgtaactaaaacatagtatttagttacatgtcactaatttagttttagtcataacatgtattgtgactaaaaatatatttaatcacaataaattgtaatttttgtgactaatacttttagccacggatcttttaatcacaacataagaatcatgatttataattagtcacaagttttgttgcgactaaaaataagattttttgtagtgatgattaatgatgcaacttacaatcagtggcagtacctcctcgagccaggatagctcatcgtctaattgaagagcatcatttgccaaaccatgagctgcacattcttatcgcgagtgacatgggaacaaaattgcccttgaaaatttcgacaataaagttataacatccttaaacagcactcccagctcattaaaaacacccttcatttgttgatagctatcaccagaaaaagcaaaattgattaaacctctctaattgggttgaaaaaataacattaagaaaaattaaaaaaaaaaatatttggcttgaaaaaaaataaacttatctttgaagcttcttgagaaaaccaaaatcaccctttatcgaataatgagcactctcctctttataatagtaatagttgaaagagagaggatagctctccactattactattactaaatattagtaatagtgacattttaatcactaaaataaaaaaaaataataataacatttggcttgaaaaaaaataaacttatct

SEQ ID NO: 392274 - DNA, 1141 bp, Cannabis indica
tcctttgcagcttcatgctctgatctaagtactttgaggctctttcacaatatagtcttgagttagaatgataaatgagaagagagggaggcagcatgttatttgttagggttagaaaataaatgtgaataagatggaaagagaaagagatttttagggtttttattttatataataataaaaaaaataaaatatataagtgagagagaaataatataataataataataataataaatatttactctttataggctgaaaagaatctttccaatatttaataattgtacggaatactaactatatccaacaatatataactaacaagtataaactgttgggattcactattttttaaagaaaaaatcatttaatattgtctatggttctccactgttagcattggttttttctaatagtaagccattgggaagaaaaaaattcgcttacttttttcaatagttttcataattgaccctctttaattgttggaaaaagtctattttgtagtactgtatgctgttaaactaatctggaaggtttcaataggtttggaagaactttgggttggttttggtgtaaaaactaaaagttaaagttatccgtttgtgttgtaggaaacggttaaccgtttgacccagtagggaaccccatttttctaaaaacaattagtcgtttgggtattttgagtttagggcctattacaggtttgcttaagttatttatcaagttgtcattgtcgcattacaagaaaaagttgttgtgccagtgactaagctcgccggagtaagtaagagtagctcattgacatagttttatcggtgacattttgtaccagcaatgattcgtgggcatatcacctttcactactacaaaatttactattcacgtctgtttttaagtgacacttaaagaatttacgtcagttttctaaactgacgtatataccgtagtcgcaaatagtttttattagcgtcattttccaaacgacgcaaaaaaacaatttttgacatttataaactgacgctaaataattacttttctattttattttaagcgtcgttaaaaaatgacgctaaatgtttcatggcattttaaaactgtcacaaaaacttattccgtcggtttaaaaatgccatat

SEQ ID NO: 392275 - DNA, 765 bp, Cannabis indica
aaaaatatcaataatcaatcacacgacaacacctttaaaaaatagtagagactactagtacataataccaatactcctcaataatacttagctatatgtttttctcgctttaaatcggtccccgtatagaccgtacctgtatgatgtatctaatcatacataattatatttattttcaaaaattgaaaagttaggtcagtgtcatgtatgtgtgacaatgcagagtcatttggaattataaaaaaatattgaatattttataaaatgcttttataatacatttttttaaaagggatccttcgatgaataataatgggcacaaatttttttttgtgtgctatatatatttaaagtaaaatataagtattattaagtttctttttataaaattttacaaaaatattattttttacaatgcaaaaaaatatactatgtaaaaattttgggtcttgagtttaggtgggccctaaccacgagcctagcgcctcttaccagtttcggtatctgagaaattttttttagtttaatttttttatggtcgtctatgttgtagctatttaaaaatcttgaaaaattttgagagattcagaaacatttaacatttcaaaaatatggttcaaacaatttattgcacgcaaaactcttttattttatatgagtgtgaaataaattatttgaaccctattttctacgtggtttctcaaaattttgcagacatcataaataactaaaacatagataacttaaaaaaaaaactaaaataaa

SEQ ID NO: 392276 - DNA, 899 bp, Cannabis indica
gtcaaagggctcttgtaaaccatactgagcccaatgattgatggttgctcaagtatgttgaggacctgagtccacaattgtgggccaagacaaagccttggtcttggacaacatatattgacccgaattgggattaggtatcacaatatttgtccccaacacaatagtgtcttcggcttcatccattcatcccggttcattgaatcaggatccttcctgaacttgccacagtgaatagtatacctaccgttagtgttactgtatcacagttagttaggttagttaaaattaggcaagttattaactttgtcctaattttttaataaaattttgttattatgttttcattgtatgtcagctgaaatttttgaatatacataaaagaaagtctcaccttatttcaaaactagagccattttcacatttttattcctcaatctagctatatcttttcttttatctctgtaaaataagctttttatagctttaacttggtatcagagctgatggccatgaacaccggaccaccagttgctccacctgttcaaaatatcatcgttggtgctgttatcgttgctgttggaccataatatctacaatttacttcaaattgcgattcaactcgatcaaaaaacttcacctattggagatattgctcatagtaatttccatctttataatatccatctttaatttcaccatcatcttcgccttcgtcttctgcatcaccttcatcctacagatttccttcttgatcacccatatcatcttcatcaataggtttctcatcgacatatttttcctaaggctaggtttccttggctagacgattgccaataacttctgacgtttccttgcccttacggcgccactacaaaaaatgtcacttttactagcac

SEQ ID NO: 392277 - DNA, 809 bp, Cannabis indica
gagataagtcaaatctcaccaaaacctatagtcagtccaaatacatcataaaaagtaagtcatcatgccctatgacaaaatttgggaaaatgtgcaaagcatggttcatacaatcacgacagtagattcgttttaccaccattttaagtctataaataccctaatgatatatagaggaggggactcttgggaattctaataaaaaaatagaaacattcattaataacagtgactcatggactaaggctcattaatgccccaatcacgtaaaatttctcttctttaatactcatcaattatttcaaacagctctaattactagttgccaaaaatctcgatcaacattttagtgctttcattgagagctgtaggaagcttacaaaaagagaaaatcataactagcctcatggtataatggcgttaataaggaatacttcacatccacaaccgccaaacgacccaaaaggtctaaaagaagaagaggcaacttctagggtgggtgcgaaaggagaaggagacactaatgaccttgagaatacaaaccaagaggaatgcaaagaatacaatgaagacaactatacgaaactagttgagtttaggcaaaaggttgttgaccatgaggctgagttggctgaacaaaaagaataaaataagagaatgcaagaaataattatcaccatgaaaaaggtgatggaaaatgtaggaattcatgtaaacccaactacagtcctgtcggtacaagaaaagataggggaagagctcggcctgatagaggccaaaaatagaaggatagggagcctagtcccatc

SEQ ID NO: 392278 - DNA, 1139 bp, Cannabis indica
gaaactagcatactttgccattgactttttccggtaacagtgacgttttcaatgacttttccggggacgatgacttttttggtgacttttccggtggcactaacttttccgacgatttttctgcaacttattattgtttacaaatatgggatttctatcttttttttacatatatatggcataagaaaagcccatataaaacaaaaaaaaaacctataactccttagtattatttatttatgccataaaacaataaactcttataattttctcatatatagtgtaatttctaccatacaaaattgtggtaaacacctttccaataaataaatttaaatgaaagaatttaaaacaaaatttttgttaactttgaatgaattggttgtgcatgtacttaggggtataactggttaactaatttagatggataattttgcatcattgtttttgattgtcctctaccctaattatgttcaatgaaaatttagttcattgttcaaaggagaaaaataaaaacaaaaattttggtacgggatttgaaaataatttgaccttctaaaaacttaaaacataaggttaccataaaatattttttttaagctcgagttctcataaaatatttgattagaccatttttaatggttacactaatttagtgtacaatttttttttttttttaatgcaacaactttaataattcacaccaaatatttaactaaatatgttttacttaaaagatctcgtattttatattatttatactaataacttaaaataattaatttatgatataattatatcatagctactagtaaaaatttagtaaaataaaatatttattacatcaatgaaacattacacttacacatttaaaaaaaaacattaaaattctataattgatcttaatatatgcgactattttcaaaatgagctcataacaatatcaagcatctcagaatatcaaaattctcaaaatacttcaagtccatatagctaatattttgatattcttcaatgctaagattctcaagtaataaatttaaatattaaattattatttaacttaatgtttatgttcatgtatattattatttttagttttataacttagtgttatgttatttttattttatttaata

SEQ ID NO: 392279 - DNA, 1037 bp, Cannabis indica
cagtgcaattcatatatctatgtatctatctcttctacatatcctatcaagggtatcatcgatcataaataatacacacttttgatgaacctacttagcacttatttagtataaaaaacttgaagtcttttcaaggatgaatccttttgtatttgttacagagtgtatgactaattattctaagttgttaattaagagataaaggtaaatgggttcaatcaaatatgttcaatgaaaggagaacatgaaagaaaagatagtagtagtgactaattattcttgcataaaacacaatattaattcactcatcgatcacctcttgctagaattcaaacacaatcaatcaatacattaaactaaaaagaaaaacaaaacacacaaatttaaccataatatcattggatgcatgatcaatgacgaaaacattatataattaatgaagaaaacagagtggtatagagagagataaaaaaaagaagagaccagaattagggtttatatgatgatcaagagattatgagggggtataagagaaggaagaaaagaattgaacaaggtcttagggtcttaggtgggtgtgggtgttttatattgatattgtctaattaaggaattatataaaatatccaaaaatatattacgtaaccaaatcttttaaatttttaatttagtatactttcctttcttatattattaattgacaatatcacattacattacagatttgcttattttctttatatttatgtatatttttcaaacaattgttgatgaaatatgatcgatctgttgagaaaaggaaacatgatgtggatatatctttaattcaacgtgcaagcctaattatatcttacttggagaggcaatggtaagttcacacactgttgtcttttcactttctgctgcaatttctcttctttctttctttctcaagctcactcaaaaacccttaaacccctctttctttctctcttctgctgcggctccatctctactcggctatcaggtatcttatgtaaccccttaatttatttata

SEQ ID NO: 392280 - DNA, 766 bp, Cannabis indica
ataataactttcattaaaagattaaaaggaaaaagcttcaggccaataaaatagaagatcaaataaatgatctctgaaaattttaacgacgcatacgcataacaacaaaaaataaaatataagtaacagaacaccaaaagaaagattagtgttccaaaaatttaatttaggaatgatcctcctgtaatctttcctttgccacttctatggggagttttcatctctccacacgagcagtggtagataactaccttagtaaaaaatttgagatacgagagacaatcaattaccactatttccacatgagagctcggctgaactgattcttcttaattaatagcctaaattgaagataaaaagatgaaaaaaaatatttcaaagttgttacaaatatttgagaacctgaataaatttttttttctaaaaaaacagtctaactaatatcaacaaaatatcagttcgtgaatatatatttaattaaaaaaatataattattacacatatgcaaaaatatattgtgaatatattttttattagtaaatatatagaaaacacataaaaaaatgcttcacgtatgttgcaatgccacatatttatttttatgcaaccaaaataattaagattatattgggactcaaaaggcctcacctatcaagtttaatattacaacttgaaaactgactattatagtgcgaatttttgcctagaaactcgagaccaagctcccataagaaagacaggtagactcacatcccttgaggattgc

SEQ ID NO: 392281 - DNA, 722 bp, Cannabis indica
cccagacctggacctagaccccatcctcggccccaaccccaacctgatccccgaatccagatctggccccacccaagacccgaacctcaaacccggactcagggatagaccccgtacaaggacaaggacgcagacctcgacccaaaccctacactcgcacctgcaccctgaggttggggtcggggtctgggtatggggtctaggaccgaccgagtccaggactgggtctaagtttgggctgaagtcgaggttagagttgtagtcaagtttacagtgtaaatagtataattttacacaacttatttatacaaatcaatatcaaacacaatattatactaaaaaaatactaatacaatataatataatacaacataacatatcaaacgagctcatagcctatcaaaatagaaaccttaaatctagtaacatttttttcatcatcaatccgtgctgtacatctaaaaatactaaatagcaaacactttttttaaaagaaaaaaaaaaagtgaacattttaacatgcaaattaataaaggccactgatggtttgataattaccttcagtcaattcaactctctctcgtccaacaattgttttgcaatgtcagtggctgtatatgagatgcttattggaagagtaatttggtccaaaatattacccgaagcatataatcaagtttaacaacattgtagaaagccagagctcaattgtatttcttttt

SEQ ID NO: 392282 - DNA, 506 bp, Cannabis indica
atgatcttccttgaatgcgattcaaagttcttggatggcaagaagtttggtgtgatctgggagtttgaaagtttgaaaaagaaggtaaaagtggtaaccgaaggttatcaaaggtacttataccccaagacagtgatccacatgaggaaggaatggatagccacgatcttttcagagaaaaatcctcatccaacggctagggagaccaaatatctatgagtatctccgcatttaatgcctctcaaaatcaaggtgtgaagtaatgataaagattctctttttcgatttgcatgccaatcagtgaacaactgccaaaatatagccattcctggaagatgactcctcgacaacttcgtcctgactcacgctcgactgccacgtggatgccccattatcataggtagaatttagcttccatggttgagtaatttgggaagagtcattattttcttcctctaatatccacacatccaaatcaagagatcagagcaagcttccatcatgag

SEQ ID NO: 392283 - DNA, 1005 bp, Cannabis indica
agtgcgctagagaagataattgttgttgtcgagcttgacaaaaagcttatgagagaataccactggatgaaacgaagtactagaggctgccggagaaccagacatggccggagttgaagcaaaggaagtcaccattatgaaaaacaatcaagaaaacgaaagtatcgaagggcggaagcgaaaaaagaaagctgctctgataccatcttagatacagagagagaaaataagaaatgaatgaattgaatcttgtattgattattgtggagctgttagctcagtatatgtacaggaaataagttagttaacataactaactaacagaatatatacataggaaaagaactaacaaactatatacagttgtaactaactaatgacatcactaacattagtcaagtgggccaattgagcaacaaaaactattaaccacattggagatggcttaatgtgtcattcattcagaacaggactaatataggatttggtcattgaaacctttttgtcaaatttttagtcttctaatttttgttaaatggagaaaaatgtgaccaatgtagttgacttattataacttacaagtagtcatattggtctaaatagtaatactgagaagacccttctcaactttggttcatcagtttacactatatccttaatttatgaaaattaatgtcaaaggacaaccgctgtagtaacaagaaaagaacactaaagctttgagtccaattttgacaactttggagttaagacccaagacttaagtggcccagaagccactaatttcgtgttcgtaaactagatatctatattctatacatgtgatgagccaaagcttaggttgcaattttgggaagtattattaaattggatagatatgattgaataatttttatcatgttggaaaaaaactaagggcttttttcataaatgtacaataaaaacaaaataattacaaaaaatgtgcaaaaaaaaattattttaaaaatttatacattttgaaaa

SEQ ID NO: 392284 - DNA, 1380 bp, Cannabis indica
aatctaagtggttttacgtattccgagtaccagggattaggatagattttaatcgtcgacctagtacgtcacattttccaacacttagtttctattcatgttaccttatatagtcgttaacatttcgattttccgttgattgcagatagaccggctctacctattctagacccggtccccaaagaagttgatgaggtcctcggtagccttcctgttcaagatcgtgactggcaattgctgtgcacaactttgaagttgcgagaacataagctaattctcgaggacgctagccttcatcgggagccaatgtacaaggagccgtcagagaaacaaaaggagagaatagacaagcatctatccaaacaaacctctagaccaacatcaggtaaatcattgtgtatacttgtaatataacataacagatttatacttatcttattgtttttgtctttgcagaattgactttcttaaagcaagctctagtgcttaactgcaagccaaagaccgtaactgcgacgacttctcccgtcattcctcagaagagcaagagtgatgttgtcgcgactcttgctgttaactcgtctaagaagcaagttaggtctgctgaggacaagggagagaaggtcatgattgacctggctatcagagctcacacttttgtgactcttcaggacaaatttgtgaacgacgaattcgtgtatatggtgaggcaattcctactgagaaaatgatgtcgctgggaccagaattggctacgcagttcatgactgtattctcgagggcattcgtcgcaggttcaaaagaagttgatctccttaaaaagcaggacataaactccaaggataaagaccacgagaaactccaaaaatccaaagagcaggtggaacttcaggtcaagctctctcagtcaaaggtcgaggatttggctcgtgacttggagactaagaaggaaaatggggagaagcagtatgatcaagttgtttctaactatctctacacgactttatccaaggttccagacttcgacttctccattcttggagcgaaagcggctgagatggccgaagcttttcgtgctatgttacctaatcaaaaataggggtgcggaggaaatctttttcccgaggaggaagagactgtagatgctgaggaagtcactgatgaagctgccaacaaggtcgtggatggctctactgctccaactgctcaatttatctaagtttttatttccttagttatcaaactcttttagcggtacacggtgttgggttttatgccctaaataaaactctatctcaatgtaatcaattttattcaacataaataaagaaatagaagtatttttcattcatttgtgtatgttttggttcatcttatcaa

SEQ ID NO: 392285 - DNA, 1455 bp, Cannabis indica
aactgacatttactaaatttaagtaaaaaaaaataaaaacaaattcaaagaattttgccaaaataaataaataaaaaaaataattaaatatataaaaattaaaatacatgcataaagttttctcatttattttttatttttacataattctccaaaggctgctgctaaattaatggtcataggaggcatgtggaatccaaaaatctgaataacagtactcagagaaagagacagtactaccttctttatttaaattttctcattaatcaaattttttataaaacaagaaaaaataaacttagaaactcaacataatgttcttaaagtgcatcttcttttgaacatagaaaaaaaaatggaaaaaaaaaaaagtagttattggtggaagctgtcagtcatttttgtatgaattaaggtcccaaagtttacctaactttaatcatttttaaagtaatttgtagtataaatatttaagtttaatttttaatataattaaatatatgtttaatttttaccggtaataatacttaagttataattttgaaccttgtcaagtgtcaaagtaaattgtcatatgacaatccctaattaattcaagtcattatagttttattttttatttaaaaattagtttaaatatactaataaaagaataacacacgaattaatacttaacagtcatgtacttacgaaattctaaaaatataagttaattattattaccgtcaaaattaaattagacatatatctacaacaaaaaattaaacttaaatatttacatcccaaattactctaatttttatcaaacattatgcccaaaattgatttgtatttttggaggggcccatataaagtacagaaattcacaattgacccacatttatttttgttcttatttttagttttttactagagaagaagacactagcaaaaaccacaaaggaaaaccacacactactctatttttttatatataaacaaaaagatatatagattattagctaccttgacttatatgtatctatatgttataataatatatacatatataggtaaaattaaaaagatagtgtgaaaaacaaattaaagacacctaataagatatgcaaatcaaccttactttacattattacataattaaataaaataatttatatatgaatttgtcctattatctattttgtctaaatgtgtcatttacaattttcataaagatttgagtttgacactcatacatatatatacaaatattatttatatatataaaataaataaatttcagtaaaattttaacaccttgttgtgttttttctgaaggttttaactttatctgtcataataattaaattgctatagttgaaactgcccaattaaatcaataacctctttgcatgtaatttatatatattatgatacatacatatacatatacatatacatatacatatatatgaa

SEQ ID NO: 392286 - DNA, 777 bp, Cannabis indica
ttttttttttttttaattgaaataatatgctgtattgttaatttcacttatcaaaaaaacaaaaaaaatcactctaataaaaatagtaaagaaattaatgtctgtagtaaatgatttagctaaaataactatgtactatttgctggtatttatttccatattttatcacttaaaagatatatctgtactagttaacgcaagtataaattgtattttggtaaatattattttgtactctgtattttacaaaagttacatattggatcatctattttgtaaaatgataaaatgaattctgtatttttcaaaatagtaaaaataggaccggccctaagcttacttttcgacaactttttttataatataaaaaacttgaaaataattcctaatacgaacacatacagaaaatgtaaacagttttgtcataaatatatttagatcggattatcattaaattttattttgacaaaaaatcagttcagggtactatttgtactattttggaaagtaaaaggtttattttatcatttaataaaatagagagtccaatcgataacttttacaaaacacagaatctaaaatggtagttaccaattatattttagtcttataataataatagtttatagaattttttatttggtatattatattatattatatattactttattaaattatattatatatcatatttttatataatagtgaaaattacatgaaatatgggatttcataacaaagttagaaaaatatggtatttttaggtttgccact

SEQ ID NO: 392287 - DNA, 2355 bp, Cannabis indica
ccataacctggataataagtttgggagaataaagaatagtgtgagtgaaagtgttaaaaaataaaaattgcgtgactgagaaaggtttgaaacaaaaaattttaacccgacatcacttgaaaattttagaatagtgtttgctctcgaaaaaaaaagagagaaaaaaaaagaagaaaatcaagcgagagatcaaaagctaaaaggtgaaaaaaaataagtgatgtttggaaattgttaaaaagtctcaattattgtatttgtgggaacacttcagaaaggtcttaattggtgaaaagtttgtgggttctaatatgcttatggtatttttagccaaaatgtctttcatttaccgaatatctaagctatcaatttctaaccttaaaagcccttttgatttcgaaaaagatgttgtcaacattagtggagagaggtaagcatgcaagcatattagccattggtttatggactggttttaatgagtaaaacaattatgatattaattcaatactgaagttaatttgtatctgtacattgtttgatagtatatgagcatcctaattaattgttagagtttttagaattgaaattctagtttagttaatggaaggaaatttcacatgagccagtagtattataattgtttgatagcttagttaatcgagttttagtgttagtcttactcgagggcgagtaagaatctagtttgggagaatttagttaggctagttttagcctaacgtttgggtcaattttacagttgttttctttgttaatgttatcttttggaatagttttacgcttgatttcttttgttttagatccccgaggtattagagttcaaattctatcaattgttgaaaagacggggcaaattgtagaaaaatctactgaagctgataagtatgcttcagtagtcgtgaccaccattttccatggtcacgaacctttttcatggtcgcgactatgaggcataggcagaaagcttgatttttaagttttgcctatggttgcgactaggctttaagtagtcgcgactatgggctaaacacgggaattttggacagttttggaatttttccattcagagatagcaatcctaatttctatttaaggggctcgtgttttagaagaaggatactcagaaattgtaacctaaaactgaacaaggaggcagaggaagcacttgcagcgatctgaagcaagatcaccaactagttctttcttaactcttgatttctatgttaatttctgttttaaatttgattgtggagattatgaactaactcctatttcgggagatgatgaatgttgattgatattatttcttaagttaatgataatcgttatttctccttttttgattgtgaatttatctatatttgtgtttaattccatgtttgagattgatcaccttaggcatgcttaatgatcccaattcaaaatctgaaaagtgagttttgggaatgctaaaattggatgaactaggttttgatgtgaaacgaaaatatttgcatagtcttagtggcattgagattattgtttaatgctgattatatgttagtctatttcagaaatgattagataacatgtgatttaagacctaaaagatttgaaaagagttgggtaaattatctgtcattcactttaagaaagagaatagtaattatcattaacaattaagtaattaaatcaacatgattctttttcctaatttctcatccttaaacacatttatagcttaattttagtttattgtattttttatttttattgttatcaaaattattatttaccaaatagaaatataaatctaatttagtggtattcggtttatttctttataaaatcgatattatttgtgtgaatattatttgattacgtgcaataaatagtgttactattcatatttttttcgtactgctggatcactttcctctaaaaaaaaaaaaacctcaaaattttttttgaaaaagaaagaacaacgtcaattgagaatcattctagccgaaagtacatcaggaggtgggccaccccattatggaatagtttgtcacaaagacaaattattaaaataaaactataaattatattaaaaactatatattgtatgaatatttattaattatttaaatttatatagcgtgtgaactttgagcgtatggtataaaagtctaaattggcttataaaaaacagaaaagtgagaactcgtctctaatcctttttggataagttagaactattttttttttttggtaagaacggataagttagaaattggtagtacacaagttatagcaacggatacatcctcttatattttttttacatctacatagttttaattaatatttttt

SEQ ID NO: 392288 - DNA, 424 bp, Cannabis indica
gggtaagactcttccctagtcagtcctccctcggattgaattcccatctcctgacctctcttgttaagccgagacaccaacttcatctccaaaaactccttttcagcctttgccaaggccatctcaggattgacaaccacattttgaatgtagaaattgttccgctgatgccaaattgcagagaaaatacaaccagtataattaagtatctcaactctattccttccatctggtaaatctttgcagtggagcatcagattttccaagacttccgataatgtttctccaaggatatcccctatcttaatgtgcttactgcctccaaaccatatggacctagagaaattacacctacaaaacaggtgcaaagggtttgttaggctatttttagcctatgttatggatccaatttatgtgcattctt

SEQ ID NO: 392289 - DNA, 1405 bp, Cannabis indica
aaataaataaaaaaaacaacaattacaattataattacaattcaaagattaaaacagtggtgtgctctatcaaattattgaattagaagaccctgcagttggagctgcatgtgcattgggcacctcgctattatcccttacttctcttgccaattgtttttcttttctcttcctcctcttcaactgccggtggagcggtggttgctggaaagtttgtgccgcatgctcagatcagtattttagtcataactcattcaatacaacttggaattggacaattgaaaatattctaaaaatccaagaatgagatctacaaatgtcatgttgagctccaattccaattgttcctttaaagttgtttacatttgcaattacgttcagtttagtcaaaccaagctccctgacttctactattttctactaaaatgtgtaaaaaattcttcaaatgtctcccaatgcataattagccttcataaaagtcctaaaaagtaaaaatcacactgtcaatcgtctaaggaattaattttaaaatattaactcattaattattcatatttataagataaatatggacttatcaccctaaaaaaattatgataattgttatagtattaattttatgtctagaaatacgagcatagtttggtatatacttgacacgtggactcgattcccaattaaaaaaggatgatgtgttaataactgctctagtaaaactatcctcgcatgatagaaacttgcgagaaggtgtgaccgagacaggatctagtcgcagactatgtgcatcatagtgaagtaaaagcgagaccaaaagaagttatcataaatcacgcatatattgattatatatgaggacctaatgattctctcttgcgtcccatgaaaagattgcatctttaaaaacgtctagtccgaatgaccaatatatgtgataactcatcttgaactcaggagttctatgttgtcagtagatgaaacaactgatacatgacccatataattgcatgtgttttaccttataaattacctcaaagttggtcctaagactttatatgtgagtaatatcaggaaacccgcaagttcatatgttgttgaggaaaacgaacgattaatatgcgactcttaaaaatataactaagaacgatcgaaattggtctttcatttattttgtaaatgtttttcatcttaattaaaatgcaattaatgatgtaacgatcttgtctaaccgattatgtaatctaaaggatcacttgctttctatataaatgagtgatccaactcgaaataagaataatcacaaatctcttataaaagtggactaaaaagatcgagttttgactgaaccatctataattttctacgtgtctttacgtatacagtgtttttattttattattcattattt

SEQ ID NO: 392290 - DNA, 648 bp, Cannabis indica
tgtatcatcacttatgactatttatatatcgaaaacatcaaagggtcatacattcatatttaaagggtatattttgaactcaactcactgactttcttggtcattgtgatttttctatttaaaaactattataaaaaaataaaaaatccacacataataaaatatatgacaaataaattgaaagagatttgaaaaataagacggatattaaataatatgtttttcttttctctttttaagaacatagtggtcaagttgattaacataaaattccatacaaaatatctccttatcaaaaccatttttcactcgaaaaatagaagaaataaattgttaaacacaatttgtatggtcatttcttttaaaagaataaatattattttggactttgtgttttgtaaaaattattaattggatcttttattttgttaaatgacaaaatagtccttatattttttaaaattatacaaataggactctgaattgattttttgtcaaagtaaaacttattaataatcgaatctagagatgttatgacaaaactagttacattttgctgtatctgtttgtgttagaaattgtctcaaagttgattatattaaaaaataaaattgttaaaaattaagctcatggtcctatttttaccat

SEQ ID NO: 392291 - DNA, 720 bp, Cannabis indica
atagttccttggggaataccccatgacgacatccgtataagccatgttgggccttctttccactgcccgagaaccattcccatacctgggcggtctgatcttataattgatgagtttaataagttactcaacatggaatcggagactcactcccttagtgggttaacccactctttcaagcctgagaatgagccttcctaaaaagagatgaatctcagaagtacacgtgatatcctcccggttaacaactacccactttccccttaaaaccttaaaatttctatagattacaaaaaaaaaataataataataataaataaacctagaaaacaagagagcttcgtaccgagccacaaattctcgaagcccttgatgaggtgaacacatttcatagctagttgagctcaatgggacaggagatgatgatattagggcaggaaaacttgagctctgagaagagagaagccaataaattatagagagaaaaagagagagagggttcatgaggagggtgggacgtttcagttttccttgggttcttaggtctggcttcgcctgagttgatggtgatggtggcggcaccatgataacgaaagggagaatgggacagtgagtagcagggagggagtttgggcttcggggttaagattttcgcggttcagggttacgagggaagggacccgaggtctacctgaggtaaaaggtgttggaaatatttta

SEQ ID NO: 392292 - DNA, 550 bp, Cannabis indica
gccatgcgttcgatccagagattttgagtcccggggctgatggaaacacaatcgtccccggttcctatagcggagttgaagatgacaacatttttagagagctgaacatgaatgccatcggtgttgggactgtcacgatgggcaatgattctcactcctctcatctctacatcctcacaatggtttattacaatgtggaacatttggctattcaatgacaacaatccagtgattttgatatccttagagtatgtgatgctcaaagtctgcatgtaaatatatatagtaagataattgttatttgattgatattaagaatgatttagcaagttaagtctcagtttaatgtttctaacaaacaactttatatacataatatttataaagtaatatatatgggcacgtaaatatattttaagcttcttgtatcaatcacatatattatctatattattttagtacatattttttatgcacatattattagtatataatttatattaagaataattatatgaaatactatttttcgtaaaatttttacattttt

SEQ ID NO: 392293 - DNA, 995 bp, Cannabis indica
aaagagcggtctttacaaaagagtagttgattgctggcaagttagttagctaggttttagttaggatattgttttttgtttctgactaactttggttggtagagtttgtatcacgtgttagtcattgcatattcaaagtgtatatatttgtacaatgaatgagagtggagatcaagctgctattttctatcttcccattgtgtgcaattccatttctccctctctctttttctctctgctgaaccaagtattcttggttttcttcagcttaggcttggattttaactagagacttaggatttggattcggagcttgggatactctagaaatcacaatcttggaaataagatccataaagtattttggtgactaggatgctttaatagtgataaattttgctttcaaagctctgaataggagttaggctcggctttggggctcgaggcttgagaatttgtaacttgagttacacttggataattgatttaagaatttaaacataacttaaatttatattatcataaatattattagctaagaataataatttactatgaccactttaatactattacatctgttctttggaacaaccattacacacagtggttgtcatgtattagtgaagtttattactcttgttgaaggtcttaagatttgccttcgtacttagcctaatgacatagctgatgatttggtgtcatataattgcattaatagtacttatgactgtgattacgtttttggttgttgagttatatatagttgtggtaaatttattgggtttctataataatttatgagttgttgtgctttgtatgtgtaggtatgagattaaaaggctaaggatggagtcggtagctgatgggattgggggatcttgtccgagttatgcataatgccagaaatccgactaatagggttgccaagttcatgtctttcaacaacaatatttcagtcttttgttttcttttaagaacttatgttttgcttc

SEQ ID NO: 392294 - DNA, 899 bp, Cannabis indica
caatacgacaacaaaaaaaaaaaaaataaaaatttgtcgctcaagtcatgattagaaagccctttcaaattcagaaagcacttcttaagaggcaattattatagtcatatttcgaacagtttatataagagttcaacatacgacacgtgtgtatatgaaattctacaagataggtcggctcgcatattgaatgacctgatatttaatatgcctcggtaaaagaaagaattataagtctcaataatacaacagtcagcagaatagatacaagaaagtatgtatacatcgccttgggcaattcagaaccaaataatacgtcaacaggaatttcttgagcagatgtgttattgacgatgagaagaaagtcgaggttattgtaagattgaatgcatttgacttagtttgcataagagatacgacttgaaaaagtcttttcaggagatgaatccttcatccacatttcactcttttggcgatcagcgagaaaggtataatccatcctagtgatttgcgaggcaatacacattcaacatacgtgtctttttcatggagtaaatgttgggctttgtgccctaaataaaactctatttcaatgtaatctttatcattaaattatcaacaaagaaacagaagtattttcatcatttatttagtatgtcatttggttcatgtgatcatttatatatttatttgatttataaatttatctaaatctttatcacaatgatgttcttgtttattgtgtcgtcagcacagtggaaagtaatcaagattatgtgattaaatgtattcctagatttatcagtacacatggtttaactgatatgataatctacaacatagtttacttgcaccttggataagtgctatgtcctttccagggcattcgttaaaagtaa

SEQ ID NO: 392295 - DNA, 1461 bp, Cannabis indica
taatttaaaactcagaaaggtaagaaaacaaaattgatatttggatattgatggttcatgcatataattacaaaccatggataataagattgatctctgaattatcttgctttggttgatacaaagtaataataaaacaacatttcattaccagctaattagttaatttctgttttcatccaagtaataaaatttaacatgctacgtcatattgttggaatgaaataaagattcaactaattattaattaccaagttgctccaaactgatcatgttttccaaacaatctcctgcattatgtccccaattgtttatccacttgtgattcttagcccatgaatctccaattgcttttaacgccctgtataaaagagctaatccctacatattatttgacttaatgttaattttacatcatcttaaaggagacagctagtaaaaaacaattgattaatactttactgacaatatatttacatacttgatctattgaaatattttcagtttctgaagcatggacattgtaggagacaacattgggatacagcttgtggagatcttcaactgttcccttgacaagctgtaagagtaagtaactcaatcaagaatatgtttatatgtattatatgaacaaaattgttgctctacgcttgtagttcataatagtaaattaattgctagatatctcactaaaaatcacagtactatttttagatacacacataaatgtacataactcttaatcttatcagagtctgaattttgaattactcaaggagtttctctcgtaccatagcttagattttcctagactactatttgttatataagctgatagatcctttggttagtatggagaattttggggatggagtgctatcagtcataagtttaactttattttattttggttatagaccatttcatctgctgaactttaccaactttggaagacattattatgagaattggaaaactcaaaaatactttataggagccaatgaaatcatgggctccctttgacacacccttcatagattgctctatttgatcaattgtagcgcttaatattggtctagttcatgagtgttttgctgttagtaatagtatgagtctgtgattccttcatggaaattattttgtcaagaatgcaatattgcttcactgaactgttgagactctttaactatggaagaacaatgtacttatacaactactctctttattttgctatgttaatttgagctgtaaaatttctttattttcttaactgattttcctggtttgaactttgctgtatcaatattttctttaggaggaagattcatttctagtaaaaattaggctttattttataagctaatcaaattaaagagttaacaccaaaccaaaagtacttaaattgaattttaaaacttttatatttgaattatttttctattcaagaattatgacatatat

SEQ ID NO: 392296 - DNA, 1138 bp, Cannabis indica
agtcccaccaccactcctcagcattcccctcgaaaaaaaaaacatggcgaattgcattctataatttggaggcacatccaagatatcaaatttctccttaattaacttaagccacatctctgcaattgatggatcatggcttccctcaaaatttcgagggttttaactatagaaatttctccataatagccattctcttggtatattttccattctcacccatagatcctcttttcgtggctctacaaacccatttacataattattaaactacacagactaattagttcaacgacctaaataatcaataactaacaatgactcatgatgattttatgtatctttccaaaatactaaatttcaattccaacggcctaaaattagactaatgattcaactattttttttaaaattataactcagcaaagagagttggataattggaactcttacctatatttgaccaaccagatcgattagcaatctactctcactctctacaaagttcgttctcaatagagatctatgaaatgccaacacgtgagcttgggaactaaattctgtcgtggctccccaatgaagaacctggcttagcacagaggagtttgtagagcttcacctaggggtttcttcaatccttggaccgtcttcctttcatcgacgagactagggttaagttcccttgatggtggtgagctccgaaattcactgcgacgcgcgaaactttcgaatggaaattctgacggtgatgaatacgagagatacaccggagaagtgagaaaggaaaaagtgggaacaatgttttgggctttttaactcactgtgagttgggtcatattatttgaattagaagtaaattattcaaagattatggtataattaattttgttaaaaaaatttctattttaaagctagattttgttgtacaatgtaattctattttgttgtatggtattttattattcttaaatgatatttattctttattttgttatgtataatagtggtatataattttgttagtataatacatgtatgtatacaattttattggcatgctatatataattattattttttattatttttagttggatagtgttttatttatttttaataatatttaattagtttctat

SEQ ID NO: 392297 - DNA, 1060 bp, Cannabis indica
caatgagtgctaacgttcctttttgggggaaaactccaaaatttaaattttaaattacttaattatccctccaaattcttataaaaagagatttaagctttcttgacaatcttttagccatttttatttcttgcatattacgagagcaaaaaattctctttttcttctcaaaccatcgaagaaccctctgttggagatcatttgctgaagttgtcaaagcaaactcaagaatatgcgaacagtgagtaagtcatcttcttttcttatttatgtgatttcctttgaatacatgcattacttttctgaattttttattgttattctgggtccttgaatctgttcttgactgatctaagatttagacaatattagagcttttaacttctaactgatatacgtgttgattctttatgcttctaatttcttgccattttggccagaattatttgaaaatatccattcataagtttatgaatatcagtgttcttttaaacccttagtttttggggtttcatttttgaggtgaaatcccttcttttttctttgaattggcttggttagcatatccgatatgttttaccttatttttccccatctagctctcaccctttgtctccctccttttgtagatgaaccctggtgagttctggggaggtgaacatcatatcgaccaggatctccttcaacttctacaagaatcatccttggctcggtgcagattcatctccatttaatgaaagctcctcaatgtccaaatttgacgattggaaagttagcagtgatcattctacgtctctagagcctgtggtacaacatcaacaataccctggcggataagcagagaagggtacaaccggttcattttggaattgaacaagggttggaggtgttatgtaatacctaagattaagagaatggattagcaaaccctaactagttaactgtatataattatgaaattatattattatataatttattatatgtgaattattatgatttatgacatgttaagatcccgttggtgagttaggggcattttagtaattttgacccgaga

SEQ ID NO: 392298 - DNA, 1240 bp, Cannabis indica
aaaacttccccattcatcatatagtctaattcattttctgttgaaactgatgttcgtaacaccatatggcttcacaagggatttattgcctgaaaatttatatccaataagtgcccaaatgcactgttcctcagcattccacgctgcctatcagttaacttggatgttatacttgtaattattgacaaaggtgcgtaacaccggactttctttttcgtccattgatctacaggtataacatatggcatttttatgaatcctacataaaacacatgtgtaccacaggtcatatatacagttctcatatagagtatatacaaaaatcaaacaatataaaacatattaaaacaaaatgaatttatacctaatagtcaagtgctcatacagagtatatgcaaaaatcaaacaatataaaacataataaaacataataaaacaaaatcaatttatacataatagtcaagtgctcatacaaagaatatgcaaaaatcaaacaatacttaaaataataattagaagattttcttttctatttttcttgttattattttctttttgctttaaaaaattatactcccttatgtaactataaggatcattgctttgaatattagaagtggtttatcattaatttttaagtattttcttttagtccatttttattgacaagaattacaagatcatactcatgaagtgaaaatgcaatgaggtgtttgattgaatgttcactttctacgattcatctaaagctaaacttaacatatatcaatgattgatctttatgtaccttacctttgagtttggttcttacagattgcttgaaacgggtggtgacgatctgcgatggttactagaaacaggcggtgatgatctgcgattgtaattgtccaggggcggtgacgatcggtggtggtaatacagggggttttggtcgggctggtagaggcaagatggtcttggtactgagggagaagaaagagagttctctggagacaagaaaatgacatagggtagaaagttagggtttgttctccaggaaaatgagaatgcggtagaaaattagggtttattacctaaggatataattgtaattttatcatcaaattttaaggaaatggacattttcttaattttttataaaaatggacatttattaacttaatgggtagatttagggccattttgcaacttggcccttgtttatttaaaggttaaattcttctcttttgggccttgtgtg

SEQ ID NO: 392299 - DNA, 693 bp, Cannabis indica
ataaattaaaatttaacatagttgtattatataatacaatacaaggagataatacgaggttccaaacgagtttaagcatcttcaaacgacggttttgttgagtttactaagtcttgtttttattctaagtcacatgggaatgagatgagtggagaggagaggaggtccttgtcaggtagtcatatttgatgccttttttgggttcttttgtttttttctaaacaaatattattacaacgttgccggtctacatttggcaacacccctgcattttttcttaatttattatttccttatatcataatagcaactacactcacaaatataaattatatcatattgttatcaattcaattgtcacgctattaatatttgttaagtcataaattttatgaatcttttaattaacataatcactacttttaaaaaaaaaaaaaccatggtcgtgtatacattttgcattatggcggtgtcatctgtccttaaacttttgactcgagactttttattagtgtgtgtatatattgatctaatttaataataattggctaatttaattgtaattgattgacaaatattaaatatctaattgtaattagattggattgaatgttatttttaaatattcaatcgaatccgactggatattagatagagtgtccaaaaatccaatacatttaacatccaatcgaa

SEQ ID NO: 392300 - DNA, 843 bp, Cannabis indica
atctgtacttttgaaagagaaagtacccaaaagttcaaaaaccatttgccgtcattaccaagcgatgactaggacaacactcgtcggaccatttaatattattttaaaaaaaaaaatttcaagttgattttaaattagaaaattattgaaaagtatattttaaaatataaaatgaacatatgtaaattaatgttaaatttttagttatagaaaaagaaaaaataaatttaaatttgttttgttaacatgaaataaaaaatgatgtaaatcaacaaaattaattataaatcatcttaaatcctaatttaaaaatccttttacttcttggacagtaactcgatgacgaggtattgtcttggctgctacgcaagataggtaagttggtttgttggggttgaagaaggtggggctgcacaacagaatatatttggatgatcatggctgttgggaatgcaggtgtcaaagatccagggatgtcagggattgaggacacgggctggccagttacttgtttcttcaattttatttaaattttgaatttgttcaaatagataatttgtagtattttgatacaagtctggactgattcatttgtgtcgagttatatgttttttgatgaatgtattatttatgtttttgtgtaattttggttgtgaattgatatatcattctgagtttggtataattttttggtgcatttaataagcaggattggatgattattaattatgattaaactatcttagtactctgtacatgtgactaaatgaagtatataatatatttgagtaatttgagacataaatacctaaatttaatgtttgacggtaataatacctaagt

SEQ ID NO: 392301 - DNA, 515 bp, Cannabis indica
attattttattattttaacatagtttttgtaaattgctctactagtttatagagagtgctaggccccatatgaatattggcattcccgatgtccaattccacaataggttttattggccgaatattgaagcagcttttagaaaaatgactcttttatgagcctttcatatatcatctctcaattatcttttttatttttgcttaacatcatctatcaattatcattacgtcttcttatttaactttcagaatacacatagtttattttatatatgaactaatattgatcatttatgtatgtatatctttatcgttttttccatccatgagctacaataattcaaataatgtgaccaatgagaaatagaattttggacaaattatacaaataaaaccttaaaatagaaaaataacactcagatcattcgagaacgtaataaaacatgtatgtgcggtttagatgacctttcatcataaatatatatatatatactaggtaggagttacgtgccgag

SEQ ID NO: 392302 - DNA, 1054 bp, Cannabis indica
ttaatttgctacggcttatacaaattaatttcttaactaagtactattatattatattttagagtaataaatctccctatatttttacatattatcaccattagaaaaataattgggacacaactcaaattgtacatatttattacacattatttgtatattatttttaatattttttcaattgtggctgatgctttagcgggtttgctgagggacattgccccctctatggcaatgagtttgtttgatttccttcaataaaatgacttaattaacaaaaaaaaaaaattgttttcgacattttacgatatattctacgatatgatttagttagagactgtatttaacgctaataagtttttgcaattaattgtgatcttaattttgatgatatatgtcggagtgtaaattttgtatgatgtccaatatttttttaatatttgcgatgtgatttaatcagaggccgtaatttaatattttgtgattttattttcattgttaaattacgagtgtctttttttctttgcatgtatatttttttatatattttattattaaaatttaatatctattttttaattatttttgtagatggctcttattattgaaggaatttagacaatattaaaaatatgtgaatattcaaagactatttgaatacccatgtgagtactcacttacaatagcgagtactcataaaatatagtataatatataaatacgagtattgtatataatataaaaaagatacaaattatagtggttcagcaagagcttgagctcggcttgcctaatccactgttcaaagagatctcatgctctgtaattttattagaatcagcccagtcccttttgaatgtagggggaagcccctacttataggtagtaggtaacgattacaaaattatggtcattatgatagacccttacaaataataataaaaggcttattaattgtactaattacaacaattgtaactccttgattaatgacacttgaatgcttgaccatttattttatgttgattggtgtgtgttgttgggttttatgccc

SEQ ID NO: 392303 - DNA, 1513 bp, Cannabis indica
tcaccttgtcctcaaggtgaagagaaacaagcttccacatgagtcgttgctcgtcctctgtcaaagaaccaagtcaactggtgcacgttgttcatactgcgaaagagaagacaccattcagtaagccgacctcgctcaaaaaaccagctgagcaaagtcacgttcttgccaatggtaagacgaacaagcgacaatgaaattggggcagcaagtagagcgatgtcaaattgaatcccgaaacccaaacaagaaaacaatagacatctgagtttgccaaattagacattgctccacttctcctagctgctgcctttcgtgtgaacaaaattcaaatacatcatttgggtagctattttcattgcaccatgccgaagacaagaagttatgtctggtgccaaagcagcttcttcatgtttcgaccagcaagaaaatccccacagagttattgttctgcccctgtcgataatcttgcttcctcccagatggaattcatcaagttcaactccactttgctccctcactaaacgaactaaaccttcttctgttttgttgaagaagttttctgcaataggaaatgtctccctgcactttttgataaaatcttcataagccaaattaagcttatcccattgctgaagataatattcagcagccttgatgtctctccaattgagaactacaaaagtaccacgcatatatgcaattatgcctggttctacaggataattcttgtggccaaaccagtaatacttgccataaattcccaacagtgaagaaagagcacccaagattgagattagttgcttaatttctatgactggtaaaccaaattgatgttgtgaagttaggccatgcttgaaacttccaaaagtgatactccgtcctctgtcaaaaacccataaaccgccaatcccgatgggtaaacgcgagaaacaagaattactcacccaattgtcaccgttgtgcttcacatgtaatactttagcacatatttctttttgttggtgctcttgcccaaaaccagtaggaaagaaatagggataagacaaaaaatttccagaaatggaaattaaaatctcattcttccatctttgtctatcacttggtaccaaaatggtgttatgcaagtttggccatggagggaatttttgaaaaataatttttcttcccctgtcgaaaatccagcaaacaaatagtgcattcacatttttgacgtaccccatatctgaacgtgaaggttgtctttcggccaccctcctcttctttttcgttttcggagctgtggtgccgtacatccatcgcatctccttcttgcaatacccagagggctttaggccaaccccaaagatgggtacagtcggagttcctcttccaaggtgtcgattgccctagagatatttcattcgctggattcatggctatcggatcctccctcactgtactgtcgtcgtctcccaaccccggcgaaccccaaccctatcaccggtgttgtgagattcttcatgacctgcca

SEQ ID NO: 392304 - DNA, 912 bp, Cannabis indica
ccatgtgattcgtgttaacattttagcagcccatggtatgacaaagtatgtttttctgttagacgatgagctatcctagttcgaagagcgtcttacgctaattataaatttttgtattataaatttatgagtgattctaattattttataaaaaaatatagcttgattttaataaaacaaaacataaaatactcaatcagtattttaccaaaaaatccaagggcagaacacaacacatattgaataatttttttaattattattattattattttacaggtacaataatggaagaagagtggagaaaaataaaatggctgcaaccagcactatgattctgatcaatagctactactactgctctgctgttctgcaatcttattttgttcagagatctctgatgttttttaggctgtggacaaaaattcatcacatccacaatttcccatcttcaattgaatatgagaggattattcaattttcaacaacaataaaactatttaataaaaaatgcatttttgatcttaatatttatatatatatatttatataaaatcactttttttcgaagcattttttaatatgctaataataataatttgttttacaaaaattaatttgttacccacaatgttttaatattatatttttgaaattagaattattaagaaattacccttatttttattattttaatttttatattttcattatctgatgaattattattttcattttagtttcataaagtaaagatagtattataaattttttgaatgaaaaagaataggttaattaggatttttgttctgaattttgacatgtactaaatcatgttctttgaacttttaaggtcgttaaaaatgccttttgaactattgagattgttggatttatggatttttttaacat

SEQ ID NO: 392305 - DNA, 368 bp, Cannabis indica
acttggttaatttacattcaagaaaatgggccatagggtgcaaattggttttcatagttaaagtcaatccagatggaccaattactcgcttaaaggcccgccttattgtgaagggttatgctcaaacctagtggactattatgatactttttctcttgttgctaaactcacatttgttcgattgctcattttcatggaagctactcatcattggcctttgcatcaacttgatattaaaaatgtttttcttcatggagatttttaggaagaagtgcatatggagcaacctcttggaattgttgcttagggggagttggggaaattttttttgtcttcacaaatctttatatggattgaaacaaagttct

SEQ ID NO: 392306 - DNA, 578 bp, Cannabis indica
gtgtagtataataatggcataaatataagtttacttatatatatagatatatgcatataataatatcttgatatttatttatatatgaatatatatggtaatatttaatacttatcttaattgatttatgtaattatataaggtctaactgtgtgtcgacttgcataattaaatgagaaactttattaatgaaaactttgtttcaaactatccagatttatatgaatttgtagtttcaacggattttaaagctgttaatttgaattattctccgattattcttcttgataatttttgtaatttaatgtcaatttgtttcctttttttcatccatgacctaaggtgtaataatatttcagaagtttgattaaaatattagattataactgatgcgacaaatataagagtgaatttatttgtattaagttaatttttagttttctaatcattgaataatcttctaatatgagtattcttactgttagactatatatatagtgtatgaaatatagcatatacaaatgatatgaaatgcggaaaataaactttaatcatatcaataatatatgcaatgaaag

SEQ ID NO: 392307 - DNA, 813 bp, Cannabis indica
ctgcacacccctatcagtagtattatgtccaatatatggtttatctttggagtttttacaaaatactggattttagataaaaatttacaattttactgtcatataattttttataaaaatactatcttttttataaaacaaccgtaaaacaacaaaacagaataattaaaacaatagtagaacaactgtaaaaacttaacacaatacataatataaaacttacacagtatttttgaaaaaaaatcccgtcatacaataaagaatttaaaaaaaaaatggaaattgtggtgtaaaaacccaatttttattttatttttatttcttacatataagtttgaaattggaaagggacatgtacttaacaaaatccaaagagagcaagcccaatctcaagaagcccactactacaatcttttatttttttctcacacattttaagtcataaatactcacaaatgaccaaaaaaattacaataatacgaatttatagtttttaacattgtgacagatttaaatttttaattttatttttttacaacaatattatattatgttactttcacgttgttttcatattagtttatataaattatatttgtattattttatttacatattatttctatattgatatcatgagattatgtaaatgtaaataaataaataaaaagagcaaaacagtaaaatatattgtgtaaaaatgtttaaaaagaaaactattttagatattttgtgtaaatatccctttttaagttttaactttttttgcatttttacggatatctacatagaaactcctattacaactagcgc

SEQ ID NO: 392308 - DNA, 3484 bp, Cannabis indica
tatcccaagggacatgcctttcttgcataaaccattgggctaacagaaactcctcactgtttcgagaaaacctactagtcgaaacacgtagttgtacaagaaaagagaaagctggctatacgtcgcaaatggctgggtgtatcacagtacctcaagaggcatgtgatcatatgcatgaacattaggttacggtgacacacccaccatttgaaagacctaaccagtattcccacacaaaaatacacagagagcataaagaaaaccctaagttctaaacagtgggtctaaataaccaaatctctagaatccctaagtaagtatacatgcgagtattcaagatgttcatctctatactcgcgagtattcaaaatagcatcgtaaaaagacgcgaatgttccaagtgttcttccatggattcacggttatacaaatttcaagtctattttctgagaattacccagttctaataaggccctatgtgtattccctacaaataaacatacagtttccattcctaaaaaaaaattcaaaaattcgtagatagtctcgaaaactaaccttaaaaatttgatgattccccatgtgaatattttcaatcgtttcaggaactttgaagattcaaaagaggaaaaacagagatcaatctgagagagggtattttctttgaaatttcggactaagagagaaaacgaaaatacgagggaaaataagggaatcgtttcgtatcagggggcttaaatactaatagccctcataaattgggatcgtgacacgtggcaacaggaatgcctaaggtcatcccatccaacgactagccatgggcacgcctacacggaaacagaagagtttcgtgacgtggcaccatggtaggataaactgtaataattacagccgtcattttttgaaaaccctcaatgggacaaccaaaggtcaccacctcgtgacatctcttcgcctgcctctcgattatagtttccctcatgaccgcatctgtcaatcgcgaaactcgagaccagactccgatctaaaggacacgtgtactcaatttccccgaggaaagctgacatgtcaatgagagactcctcgagtatgaaccttgcctgaaccatactcagtaagatgatacgaatatgaccaagtctagtcgtatttgtatgactcgcattatgtaggaccaaggaacgaatttagcccgcatagattaagatatatgtgagtatcctcgcgatcctcctgcgaaaacatagagatcgattctctatattgtgagctagtctgatgactcaacagcctcgataaaccgacatagattcgcgcgtcttggttctataaactcataataagatgtccatgaaagcgaatttacaaggacatagatatcttagactcgactagtctcgagcgcatcctaagcctacgagcttatgcaagaatatgaatagccaactcgcactagagaagttgcatacgttgctgtattaaactggaaactgtttttcatttatgtttacgtttttagcttaattattgcaaatcaatgtataaacggattgacaatgaatgcaatccttgtgtaaatgataggacacttactttgtatataaaggagtgatctgctgtaaaatggagggggagaatctttgcaacagtggactaagcagaccgtgatctgactgaaccactatattcctcttatgttcattatttttccaattttttgctaagtatttgtgttcataattcgaatactcgccattctgggtcgagtactcgcactaattttataattattattattgttatttatttttggtgttgtaaaattctttcaacaacatcccctatgccaagcatggtagtgcgcatacacacctctagacatgccttttgcccaacgacctgaatctttagtattttacaaaggagaaacgtttgagtgacatgtgtcctccttcccacaaaatagcggtcgcacaccacacgatgggaaggcttccaaacatccaacgatcagatcgtcatgttgtagcattagcccttgtgacgtgttgagtacaaaaccctcgatgggtagagggtacgcccttacccgtatatgtgcctatatataccctcacttttcatgtacaagggatgaacaatttcatacctatcaaacctttgctaaaattcttacaagctttcttcttctttaagagaaacatcagaatacattactagggtttatattgtaacacttgtaatagtcaaacactcgcctgcaaggttaatacaacgaactcatggactagagattattaatgcctgaaccacgtaaaaattacttatctattatttactattttatatattccttaagctctagtttattggttttcaaaaatctcggtaaataggcaacactgctccttgctctatatggcgctctaaccacgccatccaattgaaggtcagtccatgtgctcgttgggttctcaaaggcctatcacattggacatctcccaccaatttactttccttgatcttgtcaagtgtctgagtgatgatagaggatggaggagagatccaccggttcaactgctctccataattaagaacttgaggctctgcagcctcctccatatcatggtccactccgacctcagaaagttgactgaggctattcaagggtctccaagcctcatcatatgaacctggagggttgttgaggaaaatagagcatgtcaagtactgtctcctcctagtaggcactacctcctcaatcttggactcactatccgagctatccacagccacaggtgcctcagcctggccagcccccaactctttgtcatccagaggatgtgctgcctccttaactataccaactctccctctggtcgccagcctggcaatatgagggtttgcgacatgtatgcttgactcttaccataatgaaccactactaaccttgagatcgctcgaggagctgctagaggaatgaactagacactagtcctcaaagggaagaccaactaaatctttgtcgatgcggttatcacctcccccaactgtcactcgagatcatctgcacacaaaaaactaggggagctgaacaacctgacaaagcggcaaggtatagacaaagctctggtcaatcgtacccaagggtacttgccagataatttcatcatacaaggtggggtatcagcaaagtatagtctcaagtgtaacaacttggacaaatcttgagtcttaacttgagcattcgactataatagactcaccattaagtttcgtatagagtttctaaggaaaccacgtataggactaaggttgtatatgcctacaaggccatggcgggattcttaccgaggtcaaaagaggacagaaaattggccacccgcttggaaccaaggcctaggcacttggaaccaaggcctaggccggccagggttcccaagctttgagagggtcggccagggtcccatgacctagccaagaa

SEQ ID NO: 392309 - DNA, 1138 bp, Cannabis indica
aaaaaaaaaaaaaatccaaaaacagaattcataatatttttaacatttttactaattttttacaaaagaatactaacagtagttttaacattgtttttgttgatacattatattacgttttcgcaacgtaaaaataatattgtttaagaatctgttttccatatcagataacagtatcaataagaaacaaccaattataccggcacgtggagagtccgggctggcgagttggttgggaatggaaaggtgatgaggtaatatggaacatgtggggagctgaagcaagagaacaagggaattgtgcaaagttgagaggtgaagaacaacttcctcattgttgtgagaaaaagccagaaattgtggatctcatgcccggaacaccttacaatctccaagtttcaaattgttgtagaggaggatttttgggttcactcattcaagatcccacaaaccatttatctacttttagaatgattgttggagatgctagtactaataataatggcacaataaatatgccccaaaacttcactcttggtctccctggctacacttgtggaaatccttttcaagtctctccaactaggttttcccaagatggtggtcgacgatatacacaagctcttggtacgctacctacctatatttataattatatctattctatataaagtgtgcctatataactgaaattcttggtttttgaaaaatttatggatgactttaatttttatttaataaaataataaaatattatttatatataataaaataataataaaacaaatcttattaatatttgaactgatattaaatattctacaatcatttaaaaagaaaacgtcacttgaatcacctctgccgtcaactaaatcagggttatgactcaagaatgggcgaccttgaatcattatgccaaccatggacatggccaagctcttcgcttcacgagggttaaaagccaccattgttacaacctcttactacgcacaaaacttttctaaaacaatcgagaaaagcagagcctttttaggcacacaagtcgaagtccttacaatcaaaatcccttgtagcgatgttacactattgtctctatcgaagaaaatgaagattgaaatccaccaatgactatcattag

SEQ ID NO: 392310 - DNA, 1268 bp, Cannabis indica
atattaatctcaggagctataaggaaataatcacagcaaatcatttatggtgtaatcaacactcattaactcactaacctgagccaacataattcacaatgttgcttaatacaatattccaatcccaactctctctctatctctctcagatatgtctctctatttctcactttaacttctcttcctactgtattgtgtctccctactgtgtttgacttgtatttcacttttaaaatgagatgagtagtccactttatataagccaagagacttaatatagttgctgtcatattttatttgacagttaagttagttaaagactaactagctaaccgaatcttagttgagagtttaaggaataatacctcaaaaatttacaaattacatttaaaaaaaaaatgggtttttgcattccaaaaactcatcaataattttaattatataataataagatcctttctcataatattattgcaaatgaataaaaagaaataaagtaaaatgaaacttatctattaattttcttggaaggccatatacaaaatatatatttaaaaatgattaaatttgtttttggattggagtaaagagacaatagtagcaaccttttttaagagcctttcggttaatttttccaacaacacacgtcaatgagtaccattataatttacgtaagctttaccaacacttctccaattttttctatactatacgttttcctttttattttttttttaattaaaaaaacatgataatcattactaataatattaactaataaccagtaaccacatcatgtcttattcatctaattgtaattagtaatactttaattaatcatgtttttccgttgtactataatatattataagtatatatacttagcaatcatgttatgctactacgtacgtaacacacataattagtaattatgttatttttgttgtgacgtgttgtgtttgtgttcctataaaaatcaaataaaatcaacttaatcttatagtttacttgtttagatgagattcacgtgagaagttaattaaaaattaaaattaagaaaaaaaactaatcagagcatttgtaatttagtcttaaaggtgtgatgcaaaaaaaataaataaataaaaaaaaaataaaaaaaattacataaaaatatgaatgtcacctatctttttatttatttttttagttagttatttaaagatttgtcacaaattgttactttttttttttttttgtagattttcttaatttttttttttctttat

SEQ ID NO: 392311 - DNA, 651 bp, Cannabis indica
ttgctaacattttcattgattgaaataaatggttgtggattaattaatgttgcaagatttgcatctcagacacagcagaggcaggaccggccctagacataagcgggctaagcctgtgcctagggcctacacttttcggaggctcaaaataaaaataaaaataaaaaatttattaggcttttatttaactaaaatttaaatgtatcataagctataaatattcatagtttagttggttaaggtgcacgatatattattcaagatcatgagttcaaattccataacactattttcatatttttcatatttttattagcaaagcgaacaatatcaaaatcatatgccattgagtaggtaaaatcttcggcaatattttcatatataaggtcactttcaatttttctttcattttaatcatgcataatgtgtttgataaattattatacttgttattcttaatttattttccaaaatttactgaaattattatcttctaattgttttatgtatatatatacatgttatttataatatcagaaaactgagaaggagatcaagcttgcacgcaactaatgtatgattattttctatatctattctatataaagtgtgtctatatagctaaaattcttgatttatgagaaattcatg

SEQ ID NO: 392312 - DNA, 1275 bp, Cannabis indica
cagaaaaacatatcagaaatacagagagaagagttagaagaaataaaccctagattgaaggcttctgctccaagatccagagatgagaaatcaagttctcatggtgaggaattagaagaaagaagtacatgcacaagaaaacaaaaaaagagttagatcgagaacaaatcaagtgaaaagaacaaaaagcataaagtgtaaaagagagaatcgagcttacctgatcgatttctgtgacagaaagctccaaaaccttgtaaacaaacattgatgatagtggatatcaagctaatctctgagacgagcttgacagagacgtagccctaatttttagggtgaactctgaaacaaatctggtgttttctctcccttactcttgtttttcatttgctaaacctaaatctatgtgtgtgtgagggtgattctgggtttcaggcttggaattgagcaagctcttgaaaagaacttgctctgctagggtttcgatctgtgaggctgagaggctgagtgtttgagtgttagggttctagactcttcgatcagagtctttaaactcttggatccaaacgacattggttttggtgtcgtgttggttaaactgtgccgttttggtctaaagattaatttagacaagtaaaggttgattttaacctttgatactgatattaatattcttgttggtgtagggtaaaagggtaaaactcctacagaatgaaaatataaatatttgtggatttgatgagattaatttgttacttttgtacatccgcataagtgcggattttaaattttctaatctaattaatctacacaactacaaatatttatattttgcgaatacagattgaattagattgaatattttatgaactctacctaaaatagaagtggtttgtatatgtcttttctttttaattttttgtaatttaccctcaaacatatatttttatatatgtattatttactcatcattatttatttcccaataatacaaactttgaaaaaaataaaacaaactttcccaataattctcgtcaaatatgggatgtattttaacaattattaggataaaattaaataaatccactagccacattattatgattattttgatgatcattaattcattattattattaggtttattattattattattaataatattaatttacaggttaagagataatagtcatatctttttgtcaaaagataatagtcatatcttaaaaaaaaagttgcaagtattctaaaaaaaaaaaaattgcaagtatt

SEQ ID NO: 392313 - DNA, 1529 bp, Cannabis indica
gtctcggtctggatccaggtcccgagtttcgatcccagtctatgtatgggtctaggtctaggttcgagtctaggttggtatccagatcaatgtctaggtccgactctgggtctgggattgggtcgcaagttaaggtctgacacgatccgggacctagaactagaattggacaagtactgggactagagcccagacatgggactgtaacatgatccaaacctaaacccaagctcaaacaagaacccatactgggacctatgacctaggacctaaacaaaggctgggacctagatctagacagggacccggacccagacctcgatcgaaaaaccgaggccgaaccaaggacccaagaacaagactcgtacctgggactcaaaactcggacccagactgggactgcgacccgaaaccaaattgggacctagactcggactggacccgaacctgaacccgaatcggaacacgaacttagacccagatcgggacctaggagccgaacatagatgggggacccagacctgggaattgggccgccaaactaggacaagaacttggatcgggattcgggacccgaccccagacccaaacttggacctaggacccacctcgggacctgggatctgggactcgatgcttggacccgaccagtagtcggtgtctgggtgtaggtcttagaaccaaactacaactcaaaccaagacgagacacataccaagacccaaacccacacttgggaaccaaaactaaaacttgaactaggaccggtccaggatcttggaacgggactcagacgtgaacctggacgtgaacccgtattcggacccagcctcgaaccctatccgagaccaaacgcacacctaaaccttgcccgagacccaaatcaagactcgaacccagacttggacccaaactcgacctgaacccgtacctcgtgacttgaaactagaatcgaaactagaagcgaatcaggacccaagaacaggaccaggtcaaggacctagaccaagacccaaaactataaccggaccaagacccaaactcggacacagacccaccctaagattgtatcaaaaacatgaatccactcccgatccgggactccaaacacgaacccagacttgaactcagacccaaacattgaataggactcgggacccaaaactgggatcaagacccagaactggaccccagtctcggtctcggacctagacccaaatccaaatcgggacctgagacatgaaccgaactggggatccaagatcttgtccaaggatccgagaactgggttttcgacaagacccatagtcgatgtcttgatctgggactcgaataaggaacaaaagcttgaccgcgacttggacccagactgagacatgggaccagaaaccgaaacttgaaccaacgtgaccaagaccctagaacaggaccgagaccgtgaccaggacttggacttgggctgggacccaaaactagacaaaaacctagccccagaactcaggctcggacccagtcccgaacccagacta

SEQ ID NO: 392314 - DNA, 594 bp, Cannabis indica
tagagaaagatagagagagagagtattttgtgctgtgtgttttgtcacgatcattggatgcacgtggaagcccagaaggtaaattcttcttaacttatagtgaagttcatataataatctattgaaatggattagagatatatttgatatattatatatataatacataccaatttcgtgttgatacccatctttcatcttcctcagtttctctctgccacctctctctcctcctcctcttgccttcttctttgtaagaatcaccattccttttttttttcccttattttattgtttttcttgttacagcacttttgtcaatagtcttaagctgcatggggtttttttctttttcttggtatgtgtgggtgtgtctttgtaaacttcaccctttgatggaatgcaaattgagattgtttcacgatctgtgtttctcttcttttgatttgaaactctcaacttgaatatggttgtttggttttgattctagtttttgatcaacctttgtattttgttgtgttggggtcttgcttcgaaataagaccatttttacagtgacttttatgaatttatttcaaaaaaataaataaaaaa

SEQ ID NO: 392315 - DNA, 585 bp, Cannabis indica
tccagggatcccaatcccaatcccaatctcaatcccaatcccaatcccaatctcattcttattcttattcatcttaatattagtagatttagaagaacaggaataacatggataaccattaggattattattattattaataaacctaaaaccactctactgctatagtaccactattctactactctacctcttctcttcttctttttcttctgtagtcttctcttctctactctttcacatacaatcattctctctctctctgcctttccatctttaattaatttattaattaattaaattagttggtagtcagcttcacctggctttcactcaatatacccctttggtttggatataaaatataaataataagatacatattagttactgtgggccgactttaattggatgggaattgggctggcccatgtatggcccgtgtaacccaacccggcccgctcttaaaagagccctaaaccctcttctttagctctctattctcactctctctctctctctctactaactaaataaataataatatatatatatataataataatatatatatatatatatatt

SEQ ID NO: 392316 - DNA, 1228 bp, Cannabis indica
agagagagagagagaaggaaatgtggtggtggtgaggatagtggtgtgcggtggtgggttccaagaaagaagaagagaggaggaagaagaaggaaatgacaagggggaagggcttcgaccttgttatattaaaagacttttactaagacatttcgttctaccagtaaaagtctacattgcgccgaaaaaagtctcaaaacttacccttaattgaaacgaagtgtttttgaaacactttccccagccacatttgcttcggcaaaagttttcccaccaatcacagttttttaggaacttttgctggagcatatgtgtgccaacaaaagtgtaatttccctgcttaaaaagttaaaatattttttggtaactttttgtcggttcaaatatccaccgaaaaaaagttttccccccaaccaaatttttcacgcaacgaaattctcccttttttttttaacacattttgccgattcataattgcatcagcaaaggtcatgaatcattagaaatagttcgcgctatacgcctgatttatttcgagacttatgtcggcataattcacgaattgtgcaaatatataagtcatttttgctagtgtaatagtgcgccgttaaaaatatttaattgaaagctttggaatttttttaaacccctttatgtcgctgacttttgatggcactaaagtggcattctttgtagtgtgtccaccccaaatcttcatcttcccttacaaattcttcaaatcacaaacatatagaaaaatggcaaaataaatttcaaactacaataaattaacaatattattaaataaaattccttcaaaaaaaaaacaatattaaataaaatctcttatacacgttaaaaaaaattaaaaatttaaaaacaaaaaaaatatatcttcccttttcaaatgtaaaaatatatttatattactgtaattaaagataaaaaaaaattatagttaattataaattattattattgtgttgtgactaaaaggtctatagataaatgtattagttacaaaaattacaatttgttgtgactaaatatatttttagtcacaatatttattgtgactgaaactaaattaatgacaacttgtaattaaaaattgtgttttaatcacaagtaactttttgttgtgactaaaaattcattattagttacaaaaaatttatattgtgactaaaaggttatcactaaaaataacagtatatatatatatata

SEQ ID NO: 392317 - DNA, 1538 bp, Cannabis indica
gaaatagtagaagccaagctaagtattgcactaattaaaatattacaatccgaatattaataatttaaacaaatataattaattagaaaataaactattacggcgccgctgcgtaatatatatatatgtttaaatactttttttttgtccatttgtcttattagatgtattatgacaatctcagtacaaaatattgacctttgatggtgctcatcaagtgtgattattatgtttatttattaatctgtgtgtttgaatattgccacattgccaacggtgactttttcacttttacattttaaatgagatttttttttttaatgtttacggaattctaaaaaaaaaaatctctaataattaatggagcaacttaaattctaattaaaatctatatagcaacacacataaaaactaccgaaaaaattctaaccgtaaatttgaagaaaaaaaaaatgttaaaaaatagtatatgaagtaattttcttaaactaatttgtttttgacaaatcgtttttttttaattaagtttttttaagtaaaatagaatttttattaattaataggtaaatcagattattagttaaatttttgtataagttgctaactctgaagtattaaaataatgtgaaatgatgaggatcacccttaatgacagtcagctaataaattttttaaaataattagggtactgcttttattccatttttcttaattaggttaaatataagttactgaaatataatatgttatataataatttataaaattaattaatcaataaagttaggcattataccctaccacgcaatgcactgccaagagatagggattattattcttgtactgatctctccacttagaaatgtatataatataaaatgtggtggctaaaaaatagcttcaagtatactgccctattatattcaagtgaaaacatttctctatagatactcttttctcttctatttaataagtttattagtaagtttttgtttatatatatacttattaatattagttgaatacatgattacctatagcagcagctagccgcaagaaaactaataataaggtatacctacttgctttgctaattaaagagttgaatgcatattataattatattaattcttccttttgatttgattagtattaattattgtgctttaagatttgattctaaaagcgttactttattatattttacattgtttttgtgatcactactagtactagtgaaacctaattcggacaaaaccatatttattttttagcattatactaacatattacttaacttggtaagcttaattaatttatggaaattgttaaagaatatttttagtgtttaatactctccttaatatcatactgttattggtgtaattaaatataccatgttctatataacttaaaaaaataaattaactaattataaagtaacacttatagaaagtattagacaatattaatatccaataacaatgctcttagggcttgtttggaacgtcgtagtagatcgcattgtattgtattgt

SEQ ID NO: 392318 - DNA, 513 bp, Cannabis indica
ctattgataagtaccaccaaaattcttcaacggtgtcaaaagtgtagacagagcgaagagaagtgccccaggcggcgccttgcttaggcttagattggttatcgaaccaaaaggtccatttcttatccaacttgtgtggctcgccttgcgtcttgttctcggccacaatagccgctgcagcctcgggctctgctaaaatgttggcctcggtggccgctgctatctcagtcgccatggttaggattcgttggagctttgaaatgaaagtgtatctctctgaaactgaaagggcttttggaaatggtgtttggcttttaggtctgtttttcttcaaataacaactattggatcatactttgcttcattgggcttttgcataggattgttgggctctttatgaaggcccaattttaaactcatgctgtttatggggctacttacaacaatatttttttaaaaaaaataaaagggttaatttcacaaatgcacaaaaacaacaaaaatacggtttca

SEQ ID NO: 392319 - DNA, 799 bp, Cannabis indica
acataaatgtatataatttttctcgtggaacctaaatcaatcatttttctctaaaacatcagcttcaataatagtaaaatgggttaaagtgggtcaatacgaatacgacacgattttttatgggttgggttgtggttgtaaaattaggcatgagtcaaaaaatagatcgatacacttgccacgaaatatagatgcaagtcacataaaatatgacatgaacacgacacgatgacatattttgctacccctacgttttagtttagcagtggccacttctaagtttgataccacttacgcacagtggaatgttaggatataatctaggtgaggaaattagggaaattataatgctatgtttaatgtgatttattaaatacatatattgtaggaaatttagctctaatacataagaattaatctctgtaattctagtttcaagatcacacttaaacaaacagataacaaacaaatcaagaaccaaaatcagcaaacacatattaaaatagaaagataacacagatgaatctagatagcttccagacacaacaacacacgagaactatactggttacgatcctaagttcaatgtgaacttggtcatactccagtttaaaaatactgccaccaatctttattgataaagagaattaaagatatcaatctcaggagctacaagaaaataatcacagtaagtcattcatggtgtaatccctcaacactcattaacttactaattcgagccaacataatcgataatgttgctcaatacaattttccaatcctagctctctctctctct

SEQ ID NO: 392320 - DNA, 1237 bp, Cannabis indica
taagtctatcatataatttacataaggggtttaatggggacattatttataaaaattgatatatcttaaaaaatataaaaataaaagtgaaaattaaaacaaataagataaagtaagtatacaatgtaatttcttcaaaaataattaatcattttattatttttgtagtataatttttttaaaatatatgggtcgtatatgtatgttgggtttttgagttcagaatttgctagattttaagtatgacctaatccgccttagtaccaattgagcctgtgatatatttatatttaatgtattaattgtgacataatgtatgtatttgtaaaatagaattaactatattttattgttctgttatgattgtcagtctagtttcgtttgattttgtcatattattttgatatttgatattacccaatatattattagtgcaccaatgcaaacaccaaaagaaaatatgtgatcaaatatatgatcgatcattattggttaaattgtctccaaaaaactttaatttgactggatcccatctgcgtacgcactcatctatcaataaagaagtaagctataaatatatttttatatatataaagtaattatttgaataaaaaacatctcattcattcatgtgtattggtcaatctcaattctcacaagtcacacttaggccgaccagattttatctccttattcttatatcataatcattttttcctaatacaaacactaagcgccaatcaggtatctgtaaatatatataatgtgtgtatatctattctatataaagtgtgtctatataactaaaattcttggtttatgagaaatttatgggtgactttttatttttatttaataaaataataaaatattatttatatataataaaataataaaaaaataaatcctattaatatttgaattgatatttagtatatttcaactctatatataatcacaactataactctagaaattaaaaatatatatacatataaaataatcgtccattttatttatattatttaaaataatttattgtggttcaagatcacaataaacagaaaaagtggcaaaaacacaaatgtagttcaaaatcatagtaaactaagaaagaatgagagagattattaagcattaaatattctcagtaacacactcaaagaatcgcattgagagaggaaaaaaaaagaataacaattgtgatatatataaataaataaaaagcgaaagaata

SEQ ID NO: 392321 - DNA, 1011 bp, Cannabis indica
agcgtaatacgtatagtcccatattctcaacacatttattagggagagataattcgatagcaagacatggaattcatgggacatattggatgttcagcattaatatctctggctattggctccgtcaaggacaaaatatactttatttgacttcatcaagagctttaggtcctttcggaggagtactctatgattatcttcgattcgaagccccatctcaaacataattatttcactatttaattaattataattgctcatgatgaataagtttaatattatataacttctattgtgtatttagtacattgaacaataatggcaaattaccatactgataatttatcagctgtggtataaaaattttgtatcttcagtgtattttacttctttgaattattctgacatttgtaaaagtgaaattttcatattttataattactaaattattatttaatgaattaattaattaaatatattcttgttataattaattaaattaccatactcatgaatttttcagtggtatattaattccttattttaatttatcaattattatttaattaatcatattaaggaataataaagatactgaaattattctgtagctataaactgagaatttgtaattctacagaccaaaaaacttgtaaagaaccctagtttaggaaaataaaaacacaatcaattaattaaagtatttataagtggtatcaacaattcttgcctatgtggtcacgcccagaaataagattcatcttaaaaatataaagtttttactttatgaacaaataaactctctcttatcatcacatgccacaagcttgatttattttaataaatgaacattgttgaaagtttatgtattaattcgaactctcttcgagtatttatttcaccttgatttatgacttcatctgattgaaccacttttgtaacgtccccgcttcaagcctccattgggtccttacacccacggactaatggctcttatacacgagtacgtca

SEQ ID NO: 392322 - DNA, 700 bp, Cannabis indica
aaaataattctttttttttcaaaaaaaaatgttatatttttgtaacgttttaccaaaacaaccacaaaattaaaaatttccctttatataattcaattttatcaatatattaaaatactttattcaaaaaatgtatatgtaatgtgtatatgttaatactttcacatttttcactttgcccactttatctccagtagttgcttaataatttgctctctcccaaacaattataaggactgtttgtgtttcaaaattatgtaaaggtaccttggttacatttaagtatttatctaagagttttaattataatttcttaaataaaaaattaagtccaacataattaatttaaaatattgtagtgtttaagttaataattaatcaaaatacaagtattggaattatatatcctaaaaacaaaatagagatttttacactagatactaaatttagccttttttttacatttttattcccgttagtttttttaaacttttttatattttatgtttttcatttttatatttaaaaaagttctttaattacaaaattacctttttgatgatgtcattcttcctcctcctccattttctttctctgttacatgttatttctctctttctctcactctttttttttttctttcattttttgttcattattatttctattttttcttcttccttctattcacacagcagca

SEQ ID NO: 392323 - DNA, 1269 bp, Cannabis indica
catagcaacctacatagaaactaacggagcaaccaaatcgtaattttttttttttaaaaaaaagttaaaaataatatataatgtaattccccgatttttttttttagttttgttattttcacctgcgaggtcgaagtttaaactactcacaatagttctacatataaaagatcatcaaagcatttatgattccagtcgagcactaaccctacggtcttttattttgattaattatcgcgagccatattttcatttttacccttataaatttatatttctcattttaatgttcacatatttttatatttattctcaaaaaaatttatttttgtgctataaagtttatattttcttcttcaatatatatatatatctttttattaatgcctatttttgaaaaaaaaaatgttttgccccctaacatttgtgactggtttcgctaatgatgatgtgacgccttataaataattagtattttttttataataattattaaattaaaatgtgtaaaattcaatacttaattatactaataacataacacctcattctctatattatacaaccaacttcaattagatagttactacttattttttttccacaaattatataattattttagttttgggaaaagctatatattgtagggatttaattaattttgttttaaaatttggtacaatcatcctttatttttaacaactgtccctaatttaccacattatagctacaattttaactcttttggctttggacatttggctagttgtagcttaaaccctagaagagattggtctttgcttcactaattaataattaattatatgtacgagcttttaagttacctcagttatatgttaacatatatttatgagttttttttgtttgctaaattttcttaattatcatttcaattatacttaactaggggactaagccgcgcttcgcgcgggttcggccctattattaatataatttatagcaacagtataaaattattatgattatcataactattaattatttttatgattaatgtagaaacgataattgacacaaattctcacaatgagaaataataagttgaaaaaaaaatgtaattaattaatgcttaaaaagaacacacatatatatacatccaaaattattatatggtgtaataataatataatagtgatatatacacaacttaaatgatactaccaattatttaaaaaaaaatggacaccatcaatacatcttacctatggacatgaattaaatttg

SEQ ID NO: 392324 - DNA, 846 bp, Cannabis indica
ccattttaatatttcatttgatattctattatatttatctaataataaaaggggtcccctaataaaaattgatacatcttttgaaattatatattaattacagaatataaaatatattttaaatcataaaaataattataaacatgttattttcccctttttcttctattcttcaacgatattcttcttctacttcttcaatgacgacaaggtcgtgagagcaaggtagaggatggtgatgacgagacgaagacgattgtctactggacaaattccagatctaagtttttttggttagacgagtcttgggtttttttttcttttgggatcgcccatcacgttttcgaatttgaaatgttgttgggttcagattcgggtatcaaattttgtttgtaggtttgatgttaaattgatttggggattttgaaattgtttacaatattacttggtttgagttttttttttttgtgttaggattagtttggaatatacttgaatagcttaaaaattgagttgatagaaaattttgaatgtttgaactttctctattacattgttctaattttgatttttattcacatgtttcacaaatatcaatattatgtttacaatgtttttttttaaaaaaataaattttatatttttttattaaagataaatcaatttttttattaaataaatataatagtacatataactgtttaactataaaaatagggtaatttgggaatattaaacctttgaatgcatttaaggtaccaaaatgagtagttttcccaaacaaagggtactaattcatcattattgaaaatagagggtattaaaagtgtatttgaacaaaataga

SEQ ID NO: 392325 - DNA, 3561 bp, Cannabis indica
tattattattatttattttttatgaatcaagttgttgtattgctcataaaactcatttgtacaaacaaaatagcatcctcatagaaataaggacgtatatgaatcatatatgatctatcttttttatttacatcaatgctagttactctatctttaaaatttataaaaccaatcttgatccttttccttaacatccttcggccaaagcaccagaatttgggctcttactatctccttggtgtgctgaataatctggtttgtgtttactgtcttcatgtcccatatgtgttcattccttgctttccaaatgttataaatcaaagaagcaatggctgctgaaaaaaccttctttctgaagcttgacaactttgctcttcttatccctctcatcagctgctgcattaagttggatttggagccccattgcagccactgttttatttccagcagacagtgagctgaagcctcacataagaagaataaatgttcagtattctcttgatgttggttgcacaagacacaagtgtcttcctgcagtatgttatgagccttcaatcttgcttttgttctcaggcggttgtgcattgttaaccagaagatatagcagtgtttaggaacatttagccttccccaaacttctctatcccaagtgatcctcggctgatctgggcaaattaacttatacccttcaacaatggtatatcgggttccaacaaaccgatgtatatgcatcatgctttttatttgatccttttcatacaccacctgtttccaatacagacatacttgtatagagcagcttgattccactctagtattttcctgaaaccaatgcccccttccttctttggagagcaaaccttctcccatgctacaagtcctgcaccttgcatcatgctttgtcccttccaaaggaaggcacggcatattgcttctagttcagaaattactttccttggaagcttcatcatttgactgcaataagtgtggatggatagtagaaccgagttgatgaggacagctcttcctgcaaatgagatgtttctcgagctccaagttttaattctagctgccatcttttctgcaagtaaagtacattctttccctgaaatcttcttagcacatatggaattcctaaatacttgaatgggagatcttgcctaccaaacccagttgcattaattatcctctgaatttcagcttcttgcataccactacaatagaaagctgattttgatggattcggttgaagtcccgatgtgagtgagaacaattttaaaccttgcatcatgaagtacacacttaaagtcaccatgacaaaagaggagtacatcatctgcaaagctcaaatgattgagttgtaagcttccacatctctcatgaaacttgaattcctgcttctgcccaatcttagtcataatcctcgaaaggaattccattcaaagcacaaatagcaagggagagaggggatccccatgccttaaacctcttttagattcaaaaaaaccatgcattgtgccattgaacatgatagagaactttggagtcctaacacagttcataatgagagttatgaacttattaggaaacttaaaagccctcaacatctcttctaagaagtcccactcaatggtatcataagccttttgtagatccaacttgatcacacaactaggctttgtgtttcttctcccataactcctgattagatcttgacaaatcattatattgtgcgctatgaatcttccctgtacaaatcccccctggttctgtgccactaactcaagaagaacatgtttcaatctagaacagatcaatttagttgcaactttgtatatgacattgcagcaagcaataggtctgaagtcaattacagtgtttggacatttcacttttggaatgagtgtaagcacagtggagttgatctccatcaatatctgccccgaacgcaagaaattctggactgcagcacataaatcttccttaatgagttcccaagaatcctgaaaaaaataacttgagtacccgtccggacctggggctttgactcctggtattgcaaacacagcagttttgatttcatcacatgagaattcctggcataaccaagtagcatgctgatcagatacaacagcccccgagtgtaccaagcttgataagacatgtcttctcccttgcattgtgttgcccagcagccctttataatatgcaaagaaagcttctgatatctttgtttcttctgttaatctttccccctcctaattctgtattgataacactctattttgccttctccttgctttaatacttgcatcaaaaatagttgtattttcatctccacttttgagccaagtcacctttgctttttgatgaagataggattgataattttttgaggaagcaatgtagttttttcgggctgctaactcctcctgcaacaaattctggcttagcgggtcctgttgtattctactttgaatctgatttagcaggtctttggctttctcattcaccatctgtatatccgagaaagcttgtttgttcagctcccttagtacccctttcaatctcttgagtttagtgactacttgatacattttatgccccttagtttgttgattccaggaggctgctactgctgttttgaagtctggatgagtgctccacatttcgaagtatcgaaatggtttcttgccactaggagccatatcatagaatgtcatgacagctggtgtgtgatccatcatctcttcattcataaaattcacctcagcattaggaaacttgtccatccaactcagattggccatggccctatcaattttcgaaaaaaatctatcatctccttgttgcttattgctccaagtataaaagttgccacaagatttgacattttcaagaaagcaattagaaacacaatcaataaagtcctgagagggacgatatttaactctattcccaattctttcttgtaaggatatcattacaatctcccatgactaaccaaggatcattttgagcaacctgccttaactctttccacattcctgttctcaataatgacctccatatcagtctcctctagaatctgataagcattccctgttactgtcatagcaggttgtttagactcctttggtttccagcctttctaaaccatctgaaagccatccgagtcagcagcctgcatcttatttgtccctggtacctcctcaggatttttcttaacaacccattcttgcttgcctcctgcttttttcctacactcacttgtttgatgccccattcccttgcagtgctcacaaaggactggtttccactcatatttaactccaaccgaagtgttgaaaccatgttcatctttgaactcaatgaggtcaggtagttcatgatgtatcgagacttcaagaagaactcttggatacattagcttccctctctctttggtgattgagtctaccataagtggttttcccaattgaccaataatcttgaataatgacctctcaccccaatatttcaattccaaattttccagctgcacccagattggaattacac

SEQ ID NO: 392326 - DNA, 694 bp, Cannabis indica
tatgctgggagtatatttaaaaggccattcaagagatgaatctattttgaaaaagttattagaattcaagattaaaagaaataattgattgaagaatagacacattatagtatcgtttgaaaagtgagaaataaatattcttattaattatgtaatcttaaataaaagaatcacttaaatgtgacaaggatgagaaataaaatcgatcattccaaacatccgacttgattaactatgagatctattgagttcattaattatcttaattaatagaatcaattagatgtgactaatagagggttttagattaatcaatttcaaaacttagttttgaatagacatatatttagtattgagaatatatattaaatgattaatcaaacaaaatgaacctgaaggaaataaaagaatgaatatactaaatatactagaattaaattctacatatttatccaataatgacgtgatggtctttgggatctaaaactgtattatgtagagggtctcgttattatgacttagcctgaacaatcgaatgagatacaacgtctataagagttatagaataagttgttagggtttataaaacacttaagaaatatataaatcacagatctaaacatattcataaagtgttttaatatagaaaacgctaaatcataaatctataaagcctttgctaaattaaagaaga

SEQ ID NO: 392327 - DNA, 1255 bp, Cannabis indica
actaaatccttgaataaaatttttcattttaatgattcctactcatatttgtttccttagcatgtatgtcacttagctaaataaaaaaggttaccctttaattcggctgataacatggctcctactacttttgacttaattcatttgcatatttggggcacaatgcatagaaggttatcaatattttttaactattgttgatgatcacactagatttacttaagtttacatgcttaaaaataaatctgatgtcaacactatcatatctctattaaagggatacgatgtgataatgcaaaagaactgaacttgtcctctttctttacaaccaaaggcattcttccttatcactcatgtgttgaaagacctcaacaaaattctgtttttgaaagaaacatcaacatatattgaatgtccctcgttctctagcttttcaatctcgtttatctctaggatattggagaatgaactacacaccatctgttttacttcacttttaaattctctttttgagttgttgtataacaggttaccttcttacgacaatctccgtatctttggttgccttgcctatgcttccatcttggacagctcaaggcataaatttttcctgagatcttgggcttgtgcgttcattggctactcggctagtatgaaagcttatactctacttgatcttgaaactcatcaaatatttcactctagagatgtcattttttatgaacatatttttccacttaaaaatatatgttcttatgacattatcgatgcttttttctctaacactaacgtttcacctagtggtccatcacaggttccttccaaagatgttgtaccagcgcctatacatcttacaccaatgcccgaacaagtgggcattccagccacttcacatacagcaatactgcgaccaccagcggctgtttcaggccctccaagtggccccaacatcacaaaaaaatttggaaggacgattatccgtccacctcatctccaagactatctttgtgagttttctacttcacatcccatgtcaagtttcatctcttatgacaagttttctcctagtttttgtactaccattttaagtgcttatttggtttctgaacaaactagttattcccaagcttctaaatctgccgtgtgggtaaaagtaatggatactgaaactgttgcacttataggcaataaaacttggactgttgtctctcttcctgctggccaccatttcattggctgcaaatgggtatataaa

SEQ ID NO: 392328 - DNA, 1372 bp, Cannabis indica
ttttttttttgctattatttttttcttaatttatttaaatttttttttaaaaaaactgtactagtaatattcctcaacaaaatacatgcaataattataatatgaaaaagaaaattaaaaatttactcatcaatcatcacatttcgaattaatttatattgatatatacttatattagtttgagacaatgagaaaggtataaaagaattcttaatttgtatacaattataataccaaataatacaaagcatttgttcttgagtggaaactgctatattatttgttataaaataatatagtatgagaaaattaaatattatgtttggaaaaattaatttgtagtgaataaattaatattttgaatggtgtaacaaattcggtaacatatttgtaattgtcaattcggattgtttcaaactaagttctcaaaaaagtgttttacgtatttttttcatcataaaaaataatgaagattcatgaaaactcgaagagaaaacaacaatcttgagaccccagaaatagggtccagcgcccagattgagaatccacctagtgtgctggtttcgatcactcaaatacaaaatctgattcgatcattgaatatggaatagtcaagaatagagtataggagacctcatcctcatgttctagaacattggaagtataaaaaagtcaacctaggagctcgaaaatgagtacccaacgcagaggttgacaaatggcttagtgagctggcgtcttcttattcgattttctatttcgagcgtccgtctattttttacaataactacgatccatgcgaagttagagaagaaaaattcacatttttcgcatttctattttcaacatgggaaactcactcagaaatgaagggttttgagtctctcatttcttcagaacagcaatctccaagaaatggtgaccagcttcgccagaacacagaaacaaactaattaaatgatgtcaaaatatcacttaagcatcttaaagtatatctcctgaacgttttttcattactcagcatccaagttgatggcatatgtcaacttggactctgggatctcaacttgggcgctgggtcatgaacatcattcaggaaaatgaccagaactcactcagtattggttcgattaatgcaattcaacttgtatttctaagaaattttaaggatctatcaattcatatctcacacttcaatcgtcattctaaagttattgaccctaaattttacccccaatggagagttacaaaaataagctctcgctattacccagagtgggtcccgccatggcgactgaaatcctaaaattgacgatcaattcccgaagttaattttcacctttagtacattatctatggtcaaaaatagcct

SEQ ID NO: 392329 - DNA, 843 bp, Cannabis indica
aaataaacatatgaccttaagaacttttactaccaatttttaaagttaggacttatcagcaccaaatatatgtttttaggacccatagtttttcctataattaatgcatatatacaaaactttatttggtttaaactcttcccatggcactataaatagaaatatatgtgcaaagtaaaatataagaatgataaaaaatataaaatataaggttttatttatacatttttttttatatatatttatataaatataaatatacggtgtaatttaccgaacaacttaaatcataacctaattcaaattgtaaccccaattgtaacttatagaacaaccccaaatcgtaaaaatagaaagaaaacaaaaattgtaaagaacaaaaaaagttacaaagagataaatggggtaattttcctaaaatataaaacacatttaaaaggtctttaattataattattcagataaaaaataataaatacagaaattgttcagtagagaagtaaattacattaaatatacgatatcaatggcaaaacaaatatttttaatttattacagtcaaatatttatattaattagattaattgcatttattaattacttaaattgcaaaagatttgatttgctcgatcagtacacaactactctctcccatggaaagcactataaatatatgtgcaaacatgaagaatttacaaagcaatattaagttgttacacaatattatatatagagagcatagatatacacatataattataattattcaaaaacaaaatggcaaagtcatttccactagttgcaattgttgttattgcaatggctgtaaatgtttgttatgca

SEQ ID NO: 392330 - DNA, 662 bp, Cannabis indica
ttttttaatatatagatattggttctatatatcctattggtatacttcccatcaatccaaaagaagtcaaacaaaaaggaaaaataatggagaagtagaatcaaacaaaaatgaaagaagcagaaaacaagagaataattttgccttgggtatatacataacataacctgatcaattattgaaagaggctcttgtggttctccttcgtaacatatccctttttcaacaatcatcgatcgacccaatataaaaaatgttaaaaggggatcttaaagtgctctagctattgtaacttaatatctattctcatatattttgaaagcattactattagatatgtgttacattaccaatagttaaatatttaataaaatttattacattatatatgtgagattggatgcttaacactagtagtataataatgtaataaattagggtactaggtaccatgtgtactttttagtaatatttttctatttttattttttttgagaaggaatatttttctattttgatttaattaataatgaatataaaaaatactaagtaggatttttatcttttaaactttgacatataataaactatgttccttgaactttttttgccctttaaaaattcttcttgattcattattgagtattgttagattttaaaga

SEQ ID NO: 392331 - DNA, 685 bp, Cannabis indica
atatatagaacactttttaatggatattatctgatgggtactaaacaaatttaactataaatattaattttaaaaatattgaactattaagttttggtccgataacgaataataaaagaaaattttaaattttttatgcttaatttagttacttaattaaagaaaataccaaaaaatacttctttttacactatatgaataatatatttacatgaaaaatatatataaatctcaagtatggatgacaaacatctcatttctataaaatctctatgattttcttctttacatttcttctttatcatcatgcagcgacattgtatacttattctatctatttataaacctactttcttctatttttctctcatttgatattctttatggattattttttctttctttatatattgtgtattttatttgtataactttatttgatgtcttaagtagtagtaagttttacttattatgataatatctaacctcttccaagtaatttttatgctatgaatatgttgtcatatttactattttctcatcattgtaggagcttgttggaattattttaccaggatttaaatttactaccatgtatattgtttaacatcttattatgaatttctaaaacaatgtaaataaacacatataaagtttaagaaatcttacattgattgcagcggaa

SEQ ID NO: 392332 - DNA, 719 bp, Cannabis indica
agaagaagaagaagaaggaaatacctcttgaatgtaagcctcgatttcaggtttggatagatcggaatgaagagctttgaggatttgaggttcgtgagagcttatgatattgataatagcttttaactgtgaaattctccattcgtagcttctagtcttaccagagccgaagctcactctcagttcttccgccatattcaatgcatctttgccttcgaacaccgtcatttctacactctcagccatccaacggtccagatcaattctctccgatcagagaggtgatgatttgatggtgattttaatttgatcttttttctttcagtgagagagaaacagagagttgttcttttcttgtgtatatgtgtggatatataaatatatttattataatacggttggagaaaatgatgccatattgtctcactctcacatatatatgtttgttttcgtactaaattcttttctttattattcattattggtattaatttattggtttgaaaatgatttatatagatatggataatacaaaatattttgctaattttgtttttgtttcctatgtatattcataactattatgttattttaattttggatcaaaactattttaactatacggacccaaatcactattttaactattttggtattaattctgttttactttttaattttttaagttgtagaatcaaaattttaaaaataaaagaaaa

SEQ ID NO: 392333 - DNA, 1571 bp, Cannabis indica
ctcttctagcagacacttttggtatatttgcagctttcaacctgaacagtcactcttaactatgaattagctacaacaacccacaacaatagggtttcaactccatatatgtacttattctttaggaacaattaataggttattttatatatatttaatatgtaaataagaggtgatatctcctcattttaagggatatcaacataatttgaactagatttgttgtaagtcctacactatataaaaggcattaggtctcactcaaaacttaagtcatgctaagtcattctaagtgctacaaaggctttattatgcctcatacacgtgctcctctctctctccctctctcaagtctcatatttgatctatgtctcctagacactaagtgctctcttctttagtgcttcacacgaactcatcaactcttggtctgcatagcattgttctcactattggactgttcaaagagagccatagctagaatcataaggttcttacctatgatctacatggtattatctctagaatcaatacaactaaaaggagagtaggtcattacccgctaaacaagggagacgaacttctatatatctttgtctctcttttatcatttattgttcataattacatcgtggtgattatctatcataaatacgactctatttctggttgaccaaattctgagtcaacactaaggatgaaaaataaattttatttatgttcagatcaacttaagttattaatatttccaatacgatatatctaaattactaattttaatcaagtaaatatattgatatttaaataaatagattaaataaaatagtaaaaaaaataatacttacgttgtaagttaattttttaattaattttagatccagttaagttagtaattttccattcatttattctggtaaaaaaattaatacttaagtattgaaaattaagtttggcaattaattttctggatacttaagtaataattttattaaaaattgtagaaaattaattttagacccacctaaattaaggaattttcatagtaagattttgaaaatttatacttaggttcaaaaataatttatttattttcaaatctacctaggaattttcattaatatatattaaaatttatactttgaatataaaattaattttataatgattttattttcaagttaataattttaataaatatattaaattaaatagttaacaaatagtagaataaaaatactactttgtacaaataatgagctttatttttataagcattcgatcttaattgttggtcttacaaggtaaattttctagtaggacctcaaggcacttgtcatccccctaataggtggtcaccattaaacaatttaacatcgtaagatatcgaaagataagtacttcatagattcatttttcagtagactcatccctatagatgactacttggaaaaatatttgtgagtatgaaacaatgggagaatctcatgaagtaggaatgagcttgactctcacataaacgggacaacgtcagatttttttttatcgataaaaggttgctaaaatagtgtcca

SEQ ID NO: 392334 - DNA, 650 bp, Cannabis indica
aaattaatataacaataataagaatagatatatgcatggtaataatatttgtatttgatataaaatgatattgtattattattattattattattattattattattattattattattatttaacattgataaattttactaaataaaatgtgatattttttgcaaaattacttgcctaattacaatataatgaaacaaaacaaccaataaaaaataaaagatatagaaacttagaatagacagaaatgtgaattcccaacatatgatacatatatatgatttaatttaaagcaaatatgacatctaatctaacaataaaataggatttagacgaaattttatgtaaaaaggtatataggctcagtatatagtaagatatatctttcaacaagtccacatgtcgccttaatttataataaatctaaaaagttatagaacttcactttaatttatttccttaaaagaaatagtacaacatattcagatatagtcatgaattaatggatgtacatgtactacatagttagaactgtagatccatctatgatacataataatatataatgaaaaaccaaatttttacaaatattaataatatatacgaaaatataaaattgtatacacttgcaaaagcagaatgtaattctg

SEQ ID NO: 392335 - DNA, 946 bp, Cannabis indica
cgaaatattattaataatacaatatatactttatgacaacaacaatgaattaattaatatgtatataaattttaaaaataaaaatgaaataattttaagttcaaattaaaactatagcttatcacattgaacctgactacttactttaattaatttgaggataatgataatatatatataaattacatcattgttaattaattaattaatgtacaaaacaaagtcctaagtaaccaaaccaatatagtgccaatcatcatgctgtttttattatgttacccaacgtgttttctgcctttttttattatttatttattagatttaaataaaaatattatgtacattatagtatttaattatttattaattaataatatataagtagtaagtaatctctcactcacaaattcattaatccaaaagtataagaatccaagttagtattttatatataaaaataataattttttttttctaacatgcatgagaggaattacatatatatatatataaataaattataaatgtatatatatatatatatatacatgttttgatacatatgaatagatattaactctacaagttaatcaaaggccatttacctaaaaaaaaaaagcagatcagaaagaaaagggattacgtacttaataatataattaccaatgtttactctagagtttgcaagcttataataatctataatacaaatatatataaatatatatatatatataatgtaggaaatgtatgtagtagatctattaaagggtacactaaaaaaagttatcgtgataattttctagtctcaacataaattttttatgactaaatgtgacttttagttacaaaaaaaagttacttgtgactaaaatatagtatttagatacaagttgtcactaatttagttttaatcacaaaaagtattgtaactaaaaatacattt

SEQ ID NO: 392336 - DNA, 820 bp, Cannabis indica
taatttaaaccaaaaaaaaaaaaaaaaaagtgggcatgaaagcaacattaattgtttaacgaggtaaaagtacttactcagacaatttgaaaaaaaaaaaaaaacttacgtagacagcatgcgaatataattaagggaaattatttgtttatattcctaataaaaaaaacccagagaatcaatattattttacttagaataaacatttcagtctgtcgaagcacctgaataatcttgattaatgtaaactatttttatatataatatgttgtttaatttgcatacacaaaatctgtcagtgattgttaaacaattccaaaaatgactcaattaatagttattacaaagaacccctttattaataactttcagatcccaaatgtaataattgtgttgatttagtagtatcacgtcacaaacttatcaaagtcaataagtaaaactatataaatagatcgttcatttatgctctcacacactttacataaataatgtaggtacttggaccttagctattattatttttttacaaaaaataaaaaataaaaagagaacaaaataaagatttgactctttgcaaatgatcatgcgcaatgccgtttaccaagctaataataatatgacaccattacacatttgtacttctataattggaatcaatttatttgattataaaatagtcttaattaatgaaaaatgttaaagggcaccaatgtacttagcacactcctatgtgtcaatatcgttattagtttaactaaatatcaggtgccacataatttaatataataatttttagggagtatcgctagccaatcac

SEQ ID NO: 392337 - DNA, 610 bp, Cannabis indica
tattggtaggttgacagggatgcaatgctggttgtgagtgatgatggctggtgggaaaggtagtcgggtagaggtggggaggttgtggaagtggcacattagtatttggcaaagtgttagcagggttatttgggaaggcagagtaactgggattagttgagtttgcatggaaaatgggaaatggagcggtagtagtacctgatgtgggtgttaaaacagagtgtgaagttgtgagactagacattggagatgtaatggtaatcgagttgggaagatgttgatgcagagtgagtggattttgagaagattctccttcaaagagaaccgggggaggggcggagcgtctagtatgcagtgccggaagtgtagatgtgagagtagttcgagccaaacgggtgaggagtggccaagcatttcccttagcaaaatcagtccagtaccgatcatagttgtgtgttggaagttttgcgcccttcatccaaggcccatattcaaagtcatcctcattaccgctatccatacgctccatgaaggcaatacaacgctcaaaggggtgtccaaggcaaccacactcaaaacagaattccgggagcctttcatagcgaaagtc

SEQ ID NO: 392338 - DNA, 526 bp, Cannabis indica
ctctaagatagtaacaaatttatccctattgtaaatggttccttataatgtagttaattggttatcactaagatgccaacaagtaatccaaataataattggttccttataatataggtaattatttacttctaagataataacaagtttcttgaagttaaccaattacttgtaatataggtaactgtaagataaggtaaccttcaaatttgggaaaaaaataaagtaaatatgtgaaatgtattaaaagattgaaaaaaaaaagtgaatatgttctatcaggtaatcaattacatagcctatcatcagtataagaagaagaaaggggaaacgacaaaattaaagatattagtaatacatatatttatatgttagtctattttatttattctcaaaaattttaaataatttataatacatataataaaatttaaaataagtaatttgcaatctataccctttctttcttttcatggacaaatttcgcctgtttataaaataacacttgtataatatcagctatgac

SEQ ID NO: 392339 - DNA, 1398 bp, Cannabis indica
atgctgacaattcaagctttttacaacaccaaataaattagactaaagttttggatcaatttatacgttttttttttttttaagaaaatttaaattcttttggatcaattattcaaagatcacaatatacatatattattttgacaaagacattccaacactatgtggacaaaacaagttgaattaataaagcattatatttatatttatgtcattatccatattttcctagttcataacttatcttagaatgaatcccactttaaaatatatagtcctctaaaatatataaaaatatttccaatgatgaattatcaccaaagacaaacatgtgtgtaaaagatttcaaattcatttgtaggtattcaaactagctaagatgacctagctagttagacaagtaaagtctaattcatgatccacacctttttcactttattatgcctacatgatcttcttcactccttttgttgaaagttttgtgttcccacacaaaaagattatatatacttctacatgtttgaattgtttagttgaattcatattcgggtagttattattcgttaaaataaaaataaattgtcgctttcgtaagaatccttaaaatttaactgaaattttgtctctctttgtattgtcactataaaaaaaatattatctttagtgataagctagtttttagtcataacataaattttttgtcactaaaggtgatttttagtcacaacaaaaagttacgtgtgactaaaacatagtatttagatacaagttgtcattatttacttttagtcacaacaagtattgtgactaaaaatatatttagtcataataaattataatttttacgactaatacctttagtcacggactttttaatcacaacataagtattattatttataattagtcacaactttttcgaaactccttaatttggttctttggaagttccatcaacaaaactgataagatcttgtgcttcaataaacgatattatcttaagtttccatagtaggtagttcgtctgtgtcaattttatggataataaatttgcgatggactcactaagtggctgaggagaacaggacaagcgccaaagagaaaacatgtcaatgtcacaaggtattcagaccacacttcacacaaaccaactgaacgttttcccacttttataaaagttaaatttcttgtaaaaaaaatttaaaatttaacacaattatgtacaaagaaaaaataaattaatgataattaagaatctaaataaattgacaaaaaaatttattaaatagttaattaagtgaaaccatacattcataataattacgctcgtgtaaatttaaaattatgattaaatacttaagtgaaattatttgcattacttaggtgtcgtttggtaat

SEQ ID NO: 392340 - DNA, 2004 bp, Cannabis indica
aaaattttaccgctaaaattttagcttataaagttaaatgcaaatgaaatgataaaaataggatttagccgccaaaaactcatttaaggaatgccaggaatagtgcattaatgtagtagtgtataattagttaagaaaaaactataatttaactaacatatataatattgaataataagtgaacaaaacatgttagaacaaaaaccaacatagcaaaaaacacaaaactaaataataattcataatgcaaaatatggaaagtaaatatcataatagctagcattataacataacaatataacaaccctcctacccccaaacttctaatttcccttcgagacagaacaacattaaaaacttaataacaaagtagtttaacatacaaaacaatacatgaaataaccacgattatcagcaactgataattaaaagtaaattaaaccccaaaagcctaaacccaagattaactagcactgatcatgagtttggtccatgatttgagccaagatttccttgcattccttaagctttttgatgctcccttccaacttggcacgctttgaagcaaccaaaggtgactcttctaacattctctccaaattcccatttggagccataatttgactcacaagctccctttccaaatgctcattcacaagcctatgaacactcaattgcaaatgtagagccattgagtcaacaagccttctctgtacaatgctccaataagccaccaatctcatcctcaagtcaaaagcttgatctaacaaatgaggagaattccttggtttgaccaagtcaaccgaaccaacacgctcaatagtcatagaattgtacaagtggagattcttcatgaacgcatccttttgagccatgagcttattgtattcggtttcgaattcggggttacaagtataatcagttaatttctccatctccacaatctccataacccacttcattgaattctctatcatgttctcaatcaaattaagcccagctattttcgctgagatttgaagctggtaatagtgtcgaacatggctcatcaaaacactcataacaacttcttccacataaccaaatagcttctccacaaaagccttaggaatactcgaaatcccattatccttttcttttagtatagagagaaatatattcttaggaagaaagttaggaagagaaatttctttagcttcttccaagtgtttaatctcatccattaagaaatttcgagtcggatcactctctggacacttcttaagctcatccgaaaaaccattgaccatctcaaccaacctagctttacaatgcattttcttatcattaggaaactcatcaaaatattctcctctcaacaaaactttccttaatgactctttgactccacctatgatcttcatcaaagcactcatagcttcaggcacagaagtcaaagccctaggaagtgatttaaactcaacaatgttatgactcaacttgtcattaattttcttgactatatcaggtaagtttcgagatatacttgtagcttgaatttgcatgagtttttgggacaaaacaggaattccaacaatagatttatcaatcatagaaagcaaagaatgtgtttcaaaaagcttagcttccttgaaacgagcttcttcataagattcttgaccaactctatttctaacacaaacaaaccctaatcctatattaacatcattagaagttaccttttccaaaagcccttctggagacttatctgacttggtcaccacagcaagagttctctcaccatttttgtcaacgctttgtgataacctaattgactcacacgttggaaagtcatcggtggctgataacacattgagaattatacttgttggaaattatttgttctaaccaacacactttaagaagcaaaattaatgttatatgcaaattggtatttttctaaaatttattattttatgtatctacaaaataatagtgtcaatttataactaatacaatttacca

SEQ ID NO: 392341 - DNA, 824 bp, Cannabis indica
gccccccccacccccccccaaaaaaaaaaaaaaacccctagctcacaagtaactcgagcccattttatttgagtagtcatcaacttagtcaaggcctctacttgtgctatcaacttagttatggcatcaacttcgtgcaaacccacaattttcttcggttggcttctctcagtagaccattgttggttattcatggccatctcttcaagcagtttataagccccattcgcacttttcctcataaaagccccaccagctgcgacatttatgagtgttcgggtactactacccaacttgttatagaatttatggaccaacatccacttctcgatcccatgatgtggaaactttctaatgagatccttgaacatctctcaagccttatagagagattggttggtgagctgacaaaaattattaatctcctctcgcagcttggcagctttagctagaggaaagaactttgataagaacttcattaccaagtcagtaaatgtaacaatgtagttgggtagcaaagacataaaccaactcttagctcgctccctcaacgagaatgggaacatccttaggccaatggcatcatcattaactctattcaccttgaatatctcacataactcgacgaagttaaatagatacaggtttggatcttctgatggcagtccaccaaactggactgaagattgtaacatttggagtatggtgctttatctcaaaattgttggcttctaaggtgggtcgtcttatataagactgaaaccatttcaatgtttgaagaacatagtcccttagacatgttgggaattattttaccaggatct

SEQ ID NO: 392342 - DNA, 555 bp, Cannabis indica
tattataatttattgatttttatgtaattttaacttttttatttatcatattacaattatttaaataattaaaaaatgataataatttttgaatatttttataaaaataataaatgatgatcaatactaatttttttatttatttattttacatcttgtgcattggagaacaattataaatagtgggccaaatatagtataaatttattttttgttctaaatatagcacaaattttacatgttgcattgaagatggtctaacttttaaaattacatttttaacaatgattattaattattgactttaatacacactttttaattacaatattttcaccaaatatttttaaatatttaatttatgagtgatcactaatgatattttactttttcttctaatttgtattttaaaatgttattatgtattggagtacaataataaatattgtagcaaatatagccggggtgtttgcggtgcgggtagtacggtttttaaccattttttcaaaccaacccgcacatgcagttttttcaattttctaaaccacacccgca

SEQ ID NO: 392343 - DNA, 2270 bp, Cannabis indica
tgtacatttatataaaaaaaaaacccttattttattatacccctaattaatctagtaatgccatattaaacgtttaaaattctatatttttatgttatattagtgttcatgtcaattatgtttaagtcaatgatacttgttcatactaataacattttgggtacttttacaattttttttctttttttttttacaaatgcatttctatttattttggtatttaaaataatttttagtttatttttttttatagttatttaaaacatctttaaaaatttggagaaattcaaaataattcataatataagaaacattattcaaatagtttatttcacacaaataaagagtcacgcttgcaacatattcatgttttcagcgtattaaatttttttgaatttttcaaaaatttataggatgtcttaaataattacagtacatgactatgaaaaaaaaaattaaactaataagttatttcaaatgccaaaacaggtggcaatttatgttcatcggtcatgttagtgttgtgttgagacttaggtttacaaacaaatgtcaaacctaaacccgacccatttattaatcgtttcaaaaattaaaacccaaactcaatcgttttttaaatggattaacctgacttgacctgtttatataaaaaaatcatgcttaattttagttaacttatcaactcattaacatgtttataaaaaacttaacatgtttacaatcttgttataacatatttatgtggaatttaacatatttatatcttatttaactaaaaaaatataatttacatattataaatttaaaagcatatactcttacataaattattatcgtattatttttaaattaagcgtatcaaactaaaagtaagcgcattgttattagggcaccagtgatgcctaacaccttctcgatatactgcattgcgattggctagcggtactctttaaaatttattatattaaattatatgagactcaatacttagtttgaccaatagcgttatttacacataaaagaatgataaacaccactaataccctttaacttttctctttaataaataaattagccttaccaacttaaaaattacccacaattcatttaaaacaaactggtttagaggtatatcaatatactcttttttttaagttagaatggtagaattctcctaagagttttaatccactaattttgatgtgaaaaatgacggcgcgaacaacaggttctcatttctgaaaaaatataaaaatatatattggaaaatgtaaaggcacactcaactcaacccctttcttagttggaccaacacggtgcgtttcgttctttctctttccagactcagacagagaaagagagagaagagaagggatcctatttcctatttgtaccattttagaaaatacagggtcaattttgtcatttaacaaaatagagagtccaatctgtaacttttgtaaaacacggggtccaaaatagtatttactcttttaataatatttatttggtagcttgtatttgaaaattatatatatttagtatcctaaattaattttattttcataaaattttatcaatacaatttagctgtctaaaattttatgaattttgaattcaaatttaattagttgattacaatttggttaaattgattaaattgtattaattaaattttactaggatactaaatatgtacaatttaaaaacatgagataacaattaaatattattaaaaatataaggtaacaaatatattgttttttataaaaacacaatgtactaaatgactatttttataatctccttcataaaaaatattttttccataagtaaatttaaattattcaaaaagaaagaaaaaaaataactttttttatatgaaatttcatttttatatttaaaaattaattttttaaaatataatcagtcctgataatttaaaatttcaaaaaattaaaaacaggataagtcatatagtacatcttttaggagtttatttttgtttttatttttttatataaaactatttgtaaaaaaaattaaattttttgaataatttataatcctaaaaataggataatgtatatatttgaacaatggtaaattgcggcataaatacttaatgtttcagattttatacatttaaatacttaatgtttatttttagacgcaaaaatacctaatgttacaattctcttacactgttactaccacttccattaactcataaatatggacgcgtgaagggttcagatgcattacat

SEQ ID NO: 392344 - DNA, 1153 bp, Cannabis indica
ttggtgttaatttaacattaaatatgagttcactattggaggttccctaacaatatattatatattaccaattattaatgatgatactagtaactaataaaaaccatggatatttcatgcatgttttttgagtgattaacagtatgtaacatttaaaaaataaataaataataggggagagagagagagagatagagaattatgcatgtttgtatggcagaggggccatatgtaggtggggttattaggagtgcatgcagcccctgatcagcatggtttaagggccactcgtgtgagtttttgttggtagtgatatgaaatagttagcaataatgtaaaataataataataataataataataataataataataacagtaataaatgtaaatttaaatgcattgaattgcattatataaatattaattaattaatttaattatgtatccattatgcatggatggaacgttctgcacctttcaaatatatatatctgaccagactcagactcagactcactcccaccccatctgagattcttctgtacactatgtccctttattataacgtaccaaacacctctcctttttcatttattatttactattatatatgataggaaatacagtagtaaactacatgatgtgtttacatatcaaaatattttaggtaggacccagttgttttctacattaaacaattaatatatagcctagtttcactgcaaccagcaatagtgtgtgtgtgtgtgtgagttaatttatttgtacttattttatttcttcttcttcgatcgcatcagatattgtggtgtgtacgcaacgtccacgcttgccttaatattattgcagattatggttctatcatatattcactaccacaaaagcaccaattgcatttactctttatttctttcgtttcttacatttttataaaagctacttcttaattgggtaacttaattgggtaaatttacaactttcagactttcaatctttctctgaactaatacttaatattaagaatttctttttgtttgtatcaattctattccgttaaaagagaatggtgaagtggaacatatatatatatactaggtgattgttacgtgtcaagccacgtagtgttagttttatttaatattttagtttt

SEQ ID NO: 392345 - DNA, 952 bp, Cannabis indica
agttataattaatttatttatgtgtaccccgtaactataatatactattattataattaagaaataaatttaattatattttacttttgctgtttgaaaagaaggaattttgcaatgtggagatagacttgcgaccattgcaacatcaatggttaacgaaattgacaccgctagctagttaaaacttttaattttaggcaatactacttattttgtgtattaattattcgtaaagacttaacatgttgtaaagtactttaattttgttataatataatccaaataattcatatttcaaattaaatccttattattataattaatttatattttgttaagaaaattaatctataatcttttataaaattaatatataatactttaaaaaaaataaaataacattcaaaattaaaaaaaaaaagacataagtcttctattattatgtaataattgaagacgtaagtgaactttatcttcagtcattacataataattgaagacgtatgtcttcctctccctcgtaatttttaattgcttcacctatgtctttagtttttttataataaccaaagacattagttccctttacctcttcgatattttctatgtctacgtctttgcttgaaatgactttgctaacgagtatatataaaaatcgaagataaacggactaagaatcgaagtaaggtcatttttctagcagtgtgtgtacacttgttgatgcgagccagcaacttagttttggtcctatgttcgagtagatccagatccgtagttataatcatgttttatgaattttagatctctcgttatgtattataagtgcatcgatataatatgatgcataattagttttataaacattagcgtttcttcaaatttctgtctgctgacactagctagtgagagtacatataggtgtaattatgtagtcaaagtcgaagaatattag

SEQ ID NO: 392346 - DNA, 680 bp, Cannabis indica
atttgttccaaattaaatattaatcatattataattaattaacagattatacagattgtgttatctcaatccctttgcaagcatattgagtctgggttttaatttttaatatgattaataaatgagttaattttagattaataattctttttattacttataagtctcgacacaacacgaatatgatttgcgaaaataacttatcatattcttacctatgtttttttcctctcaattgtgagcatatgatgcatgtgctaaagtttatgacgttcagcgtagtaactctattagctacagcactctcaacatctttccattagtaagatttgccttttttatattttactttaaattttacattaagctatatattaattttctttactaatactaaaacctcaataatattaatatgtacatatactcatatatacactataaaattaaagttaaaacctaaattaaatcgacaaaatatgtttaaactaatggatgataatctataaataaattaacttttaaagatatgctttaaaattaaaaagtaataagttaaaacatttaggtggcgtttggtaatatttttttactcagttttctatttttaaaagtagaaaagtgaaaatatttttcaaaaacatattttataaaactgtttttacttttcaattttataa

SEQ ID NO: 392347 - DNA, 1363 bp, Cannabis indica
cagcatgcaatgggcctataatctctcactgtattagggcatttcagcttgggtacaagcgtgagagtagtgttgttgatttctcgaagcaatttccctgttttgagtaagctgattattgcttcagctacttcagaacctatggtactccagtttttttgaaagaaagagctcccaaagccatctggacctggcgccttattaccagggatggcaaatattacctccttgacttcctcatgattgtaatctctcaagagaaagctcacctgctgctgtgttagagtccccccttctctaagtattttttgttgaaccatctttctatcttgtacatggctgcccaatagttctttataatactgaatgaaggcttcaataatagcctttggttcttcaatccttacaccttcagcattcacaatagtaatcacttgattatgtctccttctctctcgaatactagtgtgaaaaaatgctgagttttcatcacctgcccttgcccaattcaacttggctttttgctgcaaaaaagacacatagctcttgaaaacattagtgtactgagttctgagctccttctcctgctgatgtaggttttcattgagtggctgctgctgcaataaggcttgacactcatctaatttggctttggcaaggcattcctgcgcacaaatgtcagaataatggttcctgttcaattcccttaaaacagtttttatacctttgagcttggaaacaattcgaaacatcaaagttccattgaagtgttgttgccactgttgctgtatgatttcatcatatccgggatgcgattcccacatggaaaaatatttaaaaggcttccgtccgccaatgacattattgcgaaagttaaggactgctggagtgtgatcaaagacaagttcattcataaaaatgacttcagcagtggggtgggcagccatccattgttggtttgcaagcacacgatcaatctttgaatatattctatcatccccaaattgcttgttgcaccaagtatagaaactcccactgaatttgacatcctccaaccggcagtgagcaatacaatccacaaattcagtagaagttgagaatctaactctcttaccaattctctcctcctttgacaaaatatcattgaaatcccccattactatccatggcttcaaggtatatagttattgaagctcataccagagcttcttccttccactttcatcattaaacgcatatacaaaggaaacatagaaggactccttcatatctacggttgaaacttctaaatgaaccaattgactcgagcacttcaaaatattcacattatagctagttggtttccaactaactacaattctcc

SEQ ID NO: 392348 - DNA, 1209 bp, Cannabis indica
tccttcattttaaattcagaactaagtttatccttaattatttgaatttctatcttgtctttgctgatgatcatcatatcatcaacatagaacagtaggtacactaccttatgtgtccctaatcccttgtagtataaacaagagtcaaattttgatcttgagaatccaatactttgaacaaacatgttgagcctgtgattccatttcttaggtgattgcttcaacccatatagtgacctttttaacaaacataccatatcagtcttcccatttttctcctgaaaaataggtggttgctccatgaagatttcctcatctagaaaaccatttaggaaagcaattttgacatttaactgctcaagtcatagtgtgctgcaatggcaaacatcatcccaatggttttgtatttcaccacagacgagaaaatatctgtgtaatctactccttcaacctgtatgaatccatttgctaccaacctaactttttacctaggtggctcaccttgtgtcattccctttttctccttaaacaaccatatgcaagagaaaaccttctttccttgtggccttggaaccaaaatccaagttttgttcttcttcagggattgcatttcttctcccattgcagctagccaattcttctttgatttgcttgcaatagattcctcataagtggttggttctagatcactttcagattgtacaactaccaaagcatatgctatcagatttgcctcagcatatctgcttgggggttttatttctcttctagttctatcctgagcgagttggtagttggtcaaatctggttgattttcttgaccaacttcctgagtgtccacctcacaagcaccttgagcatattcctacatagtagcctgtgtttccacctcagtgtctgtctcttttgctagtctgtgtggtaattcaactgggacttctattttgtcaaaattgatttcgtgctcagccaaatcatctctattagtacctggaacatcggagtctttacctttcttggttgtcaagtgcatgaaatcatgctcattgaaaattacatctctagagatgacaatcttaggctttccattttaaatttgacacaacctatatcccttaacacctttaggatatcaaggaaagaaatatttggtggccctaggatcttatttatcgagcttttgatgagcatagtgttggaaattatttt

SEQ ID NO: 392349 - DNA, 1317 bp, Cannabis indica
agagagagagagaaatagccttttccttgatttttcttaaattgaaaataatgaggaaaataaatctttttctttcctttgttttaattatattctcagccataatatacttaagtaatcagattaataaatcaaattaaaaccactaaagacaaagcataaatgggcaaaatgaccaatttgcccttttcccacaaaacaacataaaatagcacttaggggtaatttgttaaactcaaaaatcccgagtattcccgacatttctaatgtctaacctattttcccgctatactaaaaatactaagatgtgattctaatagccaaacaccgtgttccaatgttgccgggcacaaaatatgcaaaattatgaaatttctatatgtgacataaaaatgcattctgaattcaaataaatcatcataaataattaattcaatattaataattaatttccataataaacctaattatctgttaatttccaaattaaagctaagcggtctttacaaccctaccctataatcatttctaaacatagtttaacacttaaatgcatcaaaaaccttataaagtaaaaaccaccattattgaacaagctttgagttctaaaactcaagcttgctcaaaccagactatagcagctaaaaccctcaaaaaccagccaagaacaatcataaatcaagctccaaaataatttccagctcattcaaactcacacaaaaccgaaattacaaaagacacaccaaaatcaagctgttctcttgaaattttaaaggaagaaataaacttcgatcttattttgatctttgctaacaaatttttccttaatcatatgttgagaatcgcttaggattgatgagttttggcttggaactttcttggttcttcttggtttagattaggtcgaaagagaaaaagaatgaaacttaggtttagaattttgagtttatctaatagctccttgaataatatattaactttcataatataccctttattattatgcaaaattcaataaagataattattaattaaagcttaggtgacaaaaaggctaaaatactctttacttcactactaagcaatatcttaaattaggggtaaaataatcataatcaaatacctgtgtaaccttgatattctaactatccataactctttccccgctaaacctcaaatattaaatcgtaccaaagtgacactatttaccaaaacgtcaaatttccacaattacagtgcatgcaacatgaaatgccaaaatccatgtataacatgtatgacacacctagaattcaataaaatctctgtaattgagaa

SEQ ID NO: 392350 - DNA, 1277 bp, Cannabis indica
acatttttaaaaactaaatttggagccttttttatcaaagagttttttagatttggatacgggccttgggcgtgagcccgcgctggaggaaattagactctatacttttttttatattgtagttttttatttttaccctttttcttaaaacctattatttttacgtttttttttaaacactttaccgattttactcttatcaccttaatatactctctatgtgactctctcatgtcagaatattttaagtacaatacatataaaaagagatatgtttcaatcaaatataaaattagaggtagatttaattaactgataaataaaagaggtatttttcaatataccccttgctgccatataaggccctgcctagctatataaggcccgatgtaaaatgttcttcttcttcttttttttttactttttaatattactgttatatataaaatggtaatattactaaattttagtacattttcatatataatgttccaaattccacaagcctcatcatctcaagtcaagtttttatatttcttttacaaataattagtgacataaatatttaagtttaactttcagttgtaaataaatacttaagtttaatttttagcagtagcaatacctaagttatatttctaaaactctggaagtatcttaatattaaagattaagtcattatccacatgtcattttcttattggtacatataaattatttttttaaaaaatacaaaattcatgattggaccaattagggattgtcgtgtggcaatttacttaacatttaacaattaggtacctacagaattttagaaatataatttaagtattattaccgctaaaaattaaatttaattatttatttacaactgaaaattaaacttaaatatttatgtcgtaaattactatttttttaccatttttttttcatagtaacaaatctatgcatattgatagttggagaatgttcactctccgagttcgttttcttttgaattgagaaagttaacacaaaattaactttttaataatttatttaaagttaatatataactttaacatgaacgtgctaaatatatcataaatgtatatgtatgttattaataaattaatgaatcaacatgtttaaataagttccatctataaacgagttacacaagtcttgttatgtcaacctcagggccggccagagggtggggcagccggggccttggccccaggccccacaattttggaggccccgaaaaaattaaaattaatatatacatataaaaa

SEQ ID NO: 392351 - DNA, 1275 bp, Cannabis indica
tccttcagagaaaaactcgaagccttcttcctatacctagccgccaccttctctctcttcctctcttctgaaaaccgagcctatagtgaatgagtgagtgcccacacacatcaagtggtatctcaatcatagtgtgtaaggctgtgaagaatccagattcaagagaaggacattcgggctcagatcttggtgatactctgctacagaaaggatacaagggttagagatctgagtggaaggagacattatattccgctgcaaccactgtaaggtttcttatactttatatgtgtttatttcatatcgttttagaagttcatatttaggatgttaaataacatacttgttagtaaatctaagatcctggtaaaataattccaacaggatgtactaagtatcttgcctaccaaggattgcgattgccaaattttggtgcatgacgaccaaattgcgagagcacgacctgatacgtcgcgaggccaaactcaagcgagaaccaaaatacaagagtgctccgataaacagagagtgaagattaagaaacatttagcaacaaaaaaaaaaaaaacataatagaatgcatcatgcattctcgcaacataacataacaaataaaaaagaaaacatatataatgtacaattttttcaaagcaatcctgacccactatgatgtttctccatgccaactaactcccaatagctatagaatccttgtattctttgtgatgtacaaagagtacgcacaaagagagcccactatcaaggattttagctgtttctaagacattaaaatgttggtcacgacaataatttttattatttaagaaattgggccatttcgtagggcaacaggatttaaggtgttatttcaaatatgggctattagaaattaaagtggttttatacattcacgctacctgggattaggatagattttaatcgacttggaagtatgttagtgcaattctatatttgtaatattttttcatattgtaaattctaacattattaattattctagcagcgaggtcagtttaatcaaaactcactagagttaggttggagatggtggatgtgtttggttttatgccctaaataaactacatttcaatgcaatctttatcttttaaatataaataaagaaacaaaagtatttttcatcactttgtgtgtcatttggttcatgttatcatttatatgtttatttgatttataaattcatccaaatccttagcacatttaagttcttgtttattgtgtcgtcagcacagtgga

SEQ ID NO: 392352 - DNA, 1148 bp, Cannabis indica
tttttgtccaaggcccccaaactgcttgggccgaccctgctcacaataacatcaagattaaacaatcttggatcaccaatacaatcatcatctcaaaagatggatacacaaagaaatttttttgggtctcaccaagttggtactgtagaagagcatcttagagaggaccatcactaaataagaactagtaggttggtagaacactttgcaaggattcactacctaaaacttgagctaaaatttgagaatcagtaccacttatctttaatgtaaaagagcaaaactcatttctctctctagctttctttctctcccgtgcttgttctccacgacatcacaaatgggttgatgccctgattttggtccaagcccgctaatgtggtggacccaacaaatctctttctctgtctgtctcagttagtgggctcaactaagcccgtttttcgcttacaagctttaagctttttttaagacagtttttctcaacatattagaaccattctcactggtatgcacgttttttaagtacaattcttttatctcaagcacatcgcgaatctaataataaatatcaaatgcgtttgtaaaacattgataaatgaagaataaaaaaaataaaaaagctaaaataaggggataataaaaaggtagtatatacattcattcatggcaaatttagatttgattttaaaataatttgtacacaacaaatgattcatgtttccaaacatatttaaagtttaatcaattggtatcttcttcatttcatttgacttataaatatcattcttgagcctcttgacaatcttctcaaactcattgaaactaactatagcaagtttgtttccttcatcatgatcaatgggttgttttcttaattcgttgaagttttcccaacattgctttgctaattctttatatcgacctcgccctaaggcaactaagattaaagcctgcattaacaaattaacactatagattaaccgaaaccctaaggaacactttaagtgtcaagcatcacaaaagaaactatttgttagggaaatttacacacattactaatttttcccaatttattactttttctactgtgacacgtttattgttacatttatactgtttttttttctactgtgtcaattattttt

SEQ ID NO: 392353 - DNA, 534 bp, Cannabis indica
ccatggaaaaaaaatactctccatttagtggtgttgttgactcctaggttttctttagcaaaaattacattaaaaattggcataaattaatacaaaataaaaaattacaccaaagaaagagtataaatacaataattgtacattaaaatgtaatatttatatatatatatatatatatattaaatttttagatattttaagaaaaataatttatagtgttaattttaacttaaaaaaaaattattaaaataataatttttgttaaaagcactacaccttataatataattttgtttaaaatggttctttttttttttttcttatataactttgaaataaataaactataaattcatgataagagatatcattctttcgattgtaaaattcattatatataatgttaattttcacataattatatagaaatgaaaaagaagacaaattagaaccattttttaattattattctcaatataatatctttatatattaaaagtgcctatctaacggcaattcttggtttaacagaat

SEQ ID NO: 392354 - DNA, 824 bp, Cannabis indica
ttatgtgtccaagaaagtcctgagaataggcctactatgttggaggtgtattcaatgcttagagatgaaatcaaagccattggttgtcctaaaaggccagctttctctatgaaaagtgaatacacatccacatcccaacaggaaagttgttcaggtaattttttgccaattactgatgtcataccgagatgatggtcagagctctcatggcagaaagcagtatcacagaagctttttattattatttgtcgagttcatagactcatttatgttgtttgtttctgttgtatgtcctactattggaccaggtgtatagtctgttgaagttgtatagaacaagatattattctgtgaatgaaaagaaaagcttaaaaactgttagtatttaactgtttatgaaaattcattaagaaaaaaagaggttacaatagaggatattcaggccaccaaatatgattctcttccatggacaatgtaagttgtggtaatgcatgtgcaattttaattctgacaatgctgacaggtagcagtaataatagccaaggttcttgaacttttctcttgctgatactattaattacatctatgtctaacaataaaattattcacctgattttgaaaaactacctagcaaattagcaatagagaggaactatgccattttgctctatcggtcctgcattattgtttccaatttttggagaaattataattcaaaaatttaatgagacattctaaattagagtaaatactattttggaccctatgttttacaaaaattactaattggactctctgttttgttaaatgacaaaatgaacctt

SEQ ID NO: 392355 - DNA, 1067 bp, Cannabis indica
aggttagggttaaggtagtagtagttttttagttttttttttttttttttttttttaaattttagtaagagtggaacgtgggtgagatttgagaattatattctctgtgcaacaccccactaaataatgtgtacacttgatatttcatccaatagtaattaagaatttaaggggtgcattgatgtattcaaatttgggtgtctattgtagaactaccctatatatatatatatataattacttttaaaattaaaataaaaaaatataatagtttaaagaagtggacgtgagaaagagagagaggaatatggttttttttttttttttgtgagttattttacccttttcattaccactgtaactgtaagtgttgctgtttcatgtttgtggccacatgggtcttcttccactcttccctattgcttctatttgggctttttgggtatcttttattgggcccacatggggcccatctttaatgacctatgtttataaatgaatagtttcactaaagaatgtgatgataagttcaacctttatttatttatttatttgacttattgataacttccaacttttgatttttggcttccttttaaaatgtagttttatttgcacttcgtgaatatatcttattttataatatagttttaatttatattaatttttctttcttattacattctaaataaacataaatataagtctatttaaataaaaattaaaagaatatatatatatatatatgaaataagcaaaaaataaaaatgtagacattatttaaaaaaaatatgaagacaggatgaaagagttataaaataaaactaaaaaacaaaaagaaaaaaaatttaagagtcaattttaaaaattaatttaatataagttaaggtttgtatacaatgcctcactttttaaactttctctagtttttacagaattagttttaaacttattacattttaaataggaataattacataaagcactattttttgtaaaataattatatttttaagttcaaagaatatttttttacattttacggtttttcaaaaaataacacgaaa

SEQ ID NO: 392356 - DNA, 1563 bp, Cannabis indica
gtagactggatggtgaagtaaactgctgagtgagagtggaagaatgactgttatttgcttcaagagcaaaaggaaaaatggtttcatcaaagagaacatctcgagagatgtaaactcttccatcttttgagaggcattgtaccctttgtgagctaggctataacctaaaaaggtacatggttgagatctaaattgaagtttgactttgttgtaaggccttagattaggatagcataggcagccaaacacctttaaggaggtataggctggtttgacatggaagagtatctcaatgggggagagattgttcaatttgggtgagggcattctattaatcaaaaagacagcagcacgataagcctcatcccaaaattttaatggcatactagcttgagctaacaaagttaaaccactctcaactatgtgcttatgttttctctcaacaacaccattttgctcatgtgtgtgaggacatgaaaccttgtgaactatacagtctgttgaagataatgagtgaaagcttgatactcatctccccaatcagactgaatttgtttgataggaaggccaagttgaagctcaacttgagttttgaaggtgataaatgtggaaagagcctcatattttgttcttaacatgtatatccatgtatatcttgagaaagcatcaacaaagctaatgtagtagcgatatccacttgaggaattgatgggagcaggaccccacaaatccgaatgtaatagttgcaatggagctgtataaactgtagtggatgttggaaatggtagcttatgaagtttcccaagacaacaagcagaacaaagagtatgagaaaagtctatgtttttattgcttgtttggatattacaagagtttagcacttgctgaactattttatgatgaggatggcctaatcttttgtgccacaaatcaaaagtattacatttagatgatacagtactagtattgctttgagttgatgaaggattacagggactttgtaaggtggctgagttggactcgacagtgagtaaagagcaggatgttggctgcttgtttatggaaacagattgagttggtggaatcaaactgtatagacccttctcaagcttcccaacaagtaaagtcttcaaagtaacctggtccttaacaacacagtgaaaggggtgaaactaaaaaaaaactctattatcttgagcaaattgagacacactaagtaaatttttggtgatatgtggcacatgtaaaagattgtttaggacaagtgtttgatcatgaaaaggagaaataaaggaggaatgaccaatattttgaatgctcaaacctgtaccattgcccatgtgaacttgctgatctcccatatagctgctactagtggccagattttgttcatttggggtgagatggttggttgatcctgaatccagataccagctaggatcagtaacaacttctggtgtggcataatacgcttgtatctcggctatgttagcattaacatgccctggaaagttgttgaaggattcgggtccagtaaaggacttgttgttgggttttatgccc

SEQ ID NO: 392357 - DNA, 658 bp, Cannabis indica
ataatataacaatatatatataatgagaacttttttattactaattaattaattttgtcttattttataagagtatttttattagtttcgaaaatgtggtaaaacaaaattataaaaatggaagagttcatagtaataaataatgaataatgttagggcagttataattttaataatttttaaaaataaaaaaaaatctgttgtttgttttgtagtgccacatacaccccgatcctttgtttttctaatatcattttttttaagagaattgttatttgatatggtgaggtatttaatattatatttatatgatattttgtaattaattaatgattttttatattatttattaaattaaaatatgtaaaatcgaatattaaaatgtagggtaaacattattttgaactttatattttgaataagttaccgattgaactctttgttttgttaaatgacaaaatagactttgtattttctaaaatagtaaaaataggaccctgagcttaatttttgacaactatttttttttaatataatcaacttaaagataattcctaatacgaacagatgcagaaaatataaatagttttgtcatatcacttttagaacgaattataattaaattttattttgacaaaatcaattcagaatcctattt

SEQ ID NO: 392358 - DNA, 1301 bp, Cannabis indica
tgtgatattgtttaatttactaataatttctattatatatttttttattagtttattttggcttaatcttatttttagtatgcttttgttgaaattttattgagatttttgaattgctgagtttcaatatgccttggaattttgtgttttgactgaactcgacaagaactcaccaaagagctcactgagttttgtgtttggtatgttatatagaatgtttaatttgtagagatttatttttgattgttgacaagaattctctctcacgagccagccgccactatctttaacagattcaaacttagtatatatattgaaaataatagcaaacataatacataatgaactttattatttctctaattgacttatatttttaatgagctttcaagagaattgaattcataataggtcgagctttgcacattgcttctaatggcacaagtttaggcattgcagtagctttgctttcagtcattctattttttcttcaccaattcttttccattcaaaacactgaatcaatgaccccaaagtcaagcccaatacacgttgggctaagccatgtccaggacaagctcttcttcctaatccaaatggcatcaagtacttttcgtcattaatcctctcaaatctttctggcttaaaacttagaggatcatcccataacttgggatctctatgtatagcccacacattaaccataaccattgtatcacgtggaatgtcatatccttcaatagtacaatcttctgatgaatagtgaggtaggagcattggagcgggtgggaacagtcgtagggtctctgagataatgttgttaagatatggtaattttgaaatgtcttcttcctccattaatttttcaccaattttttcgtcaatttcagctttagccttttctaaaacttcaggatggttaagtagatttgataatgcccattctaatgtcacagatgacgtatctgttccggccaataatagaacctgaaatacaaaaaataaaatgcaacttttatctttagattacatatttcttgatatataaataaaaataaatatatagaaagtaagtttaatctaatattatcatattaatcttatatacttaattatatacttttatattatcatatcgatcttaaaatcgttaattatatataagaataaaaaagatttagaggctgtttggctttaaagtttaaaaactgttttttgtttttaaaaactgaaaataatttttaaaaactattaggagtcgtttggcaaaattttttaaaaaattattttttaaaatttga

SEQ ID NO: 392359 - DNA, 1747 bp, Cannabis indica
gataaactgagtaataattatgtattttttttttaattttacaacctttaaaaaaattagaaataaattaaaaaatcatgccccatcttcttcattcactccatgcgtagttttataattttgtaggatcactttaatcccattaattaattaaaacaacatttaattaattcatcttaaataaaacaatgttatttaagacattaatttttcttaaacccataaattaattaaaaaattaatttaatttatccttaaataaaataattttatttcaaataattttcatattatttttcttttgattatttttaattaaataataaaacccattttattatttaattaaacttaagacaacttttgccttaaataattaaaagtggttttaaattaacatttgaatttcaaattcaaaaccaaaaataataactcattttaaataaaaataattaaaacaaatattatcaaaaaataatataattattaaataaaataataatcaaaaaaatttatattgtatatgcacatacacttatacatatatatatatacactatatgttatatacacattagggtcgaccatggtcactaccgtggccggcagctttggggagccaacatggccacggtggccttggaaggccacaagtatcatcgacggaccaagaggatcaaatgacccagacccttatgtgtcatcatctctggggacgactagggacatttgtccccttttgcatggaaaattatgctcgttgatgccgagagagagtcaagaggctcgtcgaacccgtttgagcagctgaggaactctcagacccgatcaggtttttttaccaatcgcacgaattaccaaacagacgagaatcgaatttctaatttagctccgttcggagctctgacacggattgactagagaccaagaggtcctgattgatgcccagtagcttggtcaacttgatgctcggtcgaccaccacaagacctaaacagtcctttcacgcgcatggtaacccacgcaaaagatcgaagttaacatcaatttacatagagaagaggcataatacgcgaggaccaatggtggtttatggtggcgcaacgttgtgcatggctagaatatatggacctgatcttgcatatgatggtggtcattagggtttgcacagccgagatttgagattaaaatttcagctccgtgttataagcattatagcgtatataatttatataaaattatttttagaaaaaaaattgggttcccagccatccacattattaggttcttaaaacagaagttgtaagaatcattttccttgagaaactttaacatgtaaatgaaaaaaactaatgacatgaccaagagttcatgattactcaagattttggttaatctaatattaatcatcattgtgatatgaattaggtctttatagcaaacgataagtttaagacggcctacatgtcagtacatgtcatatataatctctattatatacaagatcttcacttagatgtcatactacatcagcaattcaaattgagattgcatgcaccgaataatgggcatcagtgaactgtactaacaaccgttaattaaagatttcataactttaatatgtttttgattattttattcatggctaagtgattttaactttccgtacaattcaatgttatattattttatgatataataagtatagattaaaatataaaaaattatatattattatgtgtatggta

SEQ ID NO: 392360 - DNA, 389 bp, Cannabis indica
caatttacataatctcatctcagccgccaaaaagaaaaaatcatctcagccgtatatctaacaaaaatagaaactgtaattaaattaagttttggtaacaaaaactaaagtaaatactaagtagatttcaaaaaaaataaataaataaaatacaggaggctggctgtgttaagttttgagaattttgttttcaaattgagtgttaaatactattttgtacactcaattttgcaattattttttaaaatggtaaaaataaaatcttgagtttgtgtttttaatataataaacttgaagataatttttaatacgaacatatatagaaaatacaatcagttttatcataatacctctaaatccaattattattaaattttattttgtcataa

SEQ ID NO: 392361 - DNA, 1277 bp, Cannabis indica
tgtggtagagcagagcgccaagccaccagtggcagcggcaacccagaatataggagcagcttcatattcgactttcacttccatcaaccctaaagtctcagcctttcttcttcattctaaggttattgctctcatccattcatctgttattatgtatcaatatcaccactttgcctgatttttaacttttatttatttgcgtgaaactaagactctacaaattaggattgggatggtgtgtgtgttttctttgttgattgttgtgttcaaaatagaatgtatttaatcttccctttgatggttttttcttttttcgttactgtgtgttttggttgaatacaatcatgaattcttcttctttgttcatactatgtatgaatttagggtttttaggtgagaattattattgaatggcagaaacaaattaggtttcgagtgagagattgttttataaaaagaggggtcgaagttttggtgtttgttttggtcctacattgatagacgatcattctgtatgtttagacctttgttcaagggttctcgactgatcttgtgttcttgtttagtagggaaagtttcctaaactggtgtaacatttattgagctgaatgggtcgtacttcaacaaggagaagggctgcgaagggaaagagtgtccgatttgagagtgcatctagtcaggaatgtagtgatgaaaacaatgatgttaggctgcagaagcgaccaaagagaagttgcaccaatcgccaaagaattaaccaaaactctcacagcagcgcaacgatggctcggttagggagcttaggatctcatgataataataactgtgatttgaggtcagagaggcgattgaggagaaagagaacaaataaacaatgttacaagccaaaatctcgcagcaaggcttcaaaggcaacaaaaaagaacataactggagaaaaatcagagcttttgaaacctctgagtttttcaaacattagaagtaagcatggtgattatgatcatattgataatgataatgatgttgttgctctgtctgatgaagaggacgtgtatgatcctgtgcatatcaagttcttacaatgtttgaggcgaaatggaaactcatattcagctgagtttgttgatgagattggtgtgactaagctaatcgactatgacatagaagaggacgtgcgccctagtatgagatttggctttgaaaatcaacttctgccttttgatgaagatgttgatgaagatgattcaaaagatgttgatgaagatgatttacaagat

SEQ ID NO: 392362 - DNA, 1234 bp, Cannabis indica
gttgaaatctgttttaaccatataattaaacaactcaagagcttcctttggttgattgttttgttcataacatgctatcatagcattgaatgaaagaagttcttttctcttaatctgatcaaagagtaaacgagcagagacaacatctccacttttcgagtaccccgaaatcatggtaatccaagaaacactgtttctaacaggcattgcatcaaaatagcttcctgctaactccaaacacccacaactcacataaccactcaacacagcattccaagaagccaaattcttctcaggcatctcttcaaacaaagaaatcgcccgatccatatctcccgttcttgcataacccgaaatcatcgaattccacgaaacaacatccttacaaggaatctcaacaaacaccttttgagcctctttcaaactcccaaacctcaaataacccgataacaccgcgttccacgaaaccacatttctttcgggcatttcatcgaacaactttcgagcactaaccatatcacccgattttgagtaaaaatcaagcacagcagtctcaacataaacagagccacaaaacccatatttataaacatgagaatgaaccaaacaaccactcaatctatctccaatcttagcacaagccttcaaagaagaagacaaggcaaaagagcttggacagagaccaagtctaagcatttcaacataaagagacaatgcagtgttgaattgcccattatgggagaagaacctaacagcaaaactccataaatgggcatctgggttctgtaaatggtgaaggattctggttatgtattgagctatattcctggaatactgagttgttaagagaagaagttgattggccaaaagggtttcaagttgggtaagaccatgggtgattatgggtgagtgaatttgtctaaggtgatcaatagttcgagcatgggttagtaagaaggtaagcttcttgatcattaccatggaaagattaattctttagctgaattcattcgccattgttgtgtttcaggtgaccttttgggttatattcaagaagatgatgagaagaagtgtcaaaacgacactaagtggagtcatacgacatggcaactattattctatttgctattaggatttttaatttgagtaattggtgtaaatattaactttaatttttaattttattgaaataggtcagtttaatttttgaaagtaataatacttaatttatatt

SEQ ID NO: 392363 - DNA, 775 bp, Cannabis indica
aaaaaaaaaaaacataataattatataaaaatggggcatatgtaatatattcattgcggcactttcaagcaaagccaattcatttcatttagtaaataataataataataataatgcctgccattttggttacattattacatatatttcattgtgattttcaacaaaaaaaactcactccttggccttgcacgccagctatgataatcatcatcatcatcaatttactatttattttttattataatttaattattttaataaaagaataagatgcttaatcaatataagtatatttaatccaacattactagattacaatttacatgtggtatgtatgtatagataataagcataggtagattattactttacatgtgtttgacaacaaaaatgaaacatgtctaatttgtcttttttttggtcatgtcatattgtcatgtgccttagtataagtacaatcataaaagtaaacataaagaaagaaagaaaaagaagaagaaggtttcttgtttgttgtttgttgttatttgttttgaataaataaataaaattaagtttgtttttggaaaatgattgtatcgttaaatttgtgtgtaatttgaagtaattatacaattttatatgttttgtcttaccgtgtaattacattgtaactgtgtaattgaaattaattgagaggaattttaactacagtcttcaattttgatcactcatgaaaattgagtgtaattactaaaaaaaatatattttttatataattactaactatttt

SEQ ID NO: 392364 - DNA, 1483 bp, Cannabis indica
acccaaaaacaagaaaattggataccacataacacaaggccaatagataaatctagcagataaagagacatatatcaaccttgctaaagtaaattgatccatacaataaaataccgatgcaccaattgagaacaagacccgctccaaccgctagaataataaaaaaactctactaatccagtaaatcagtgacaaatcaccattactatgaaataaaattaacataaaataacattaaaattaaaacaattgaaactagacacaaaaatagacaaaccaataacgaatcaacccaaaacaatcaccaatctccaccgaactcacaaaccaagaagatgatagtgaacttttgccacagatttgtgcccactgaccaacaccacacgcgacatccctggaccccgacaatccaggacccaataccagccaaaccccctgccaaaatctagaaccatcccgacccacagcctctcacaacctccacaacaccaaacaagagctaagacactactgcccaacaactccatacgagatcagagatcacacccaaaccaacgacaactagaggaagactaggagagaagaaagacaacgagaggagaatcaattcgtgaagcccaccccaggaggggccagcagcctggctggactgagagatcaaataagaactttaaggaataataattaattaacaacttatattttatgtaattttatagttaaatctatgtagtccacgtgtctctcttatttttgggtttttttttatttacatagtacagaattcaagaatgcaagaaataaatgaagattttctctctaggtgatcacttgaaagattggtcatccgccgcacggtaatttcttcccctatttataggatttttaaagtgacagttattccttttggtcttatcttgataactgctcctaaaatatggataatccccacatttcattttatttacaacatgtgataaattacataactgcttaaaatccgtcttttgtcattatctacaaaaacagttattttaacgagaagctcatctatttcatgttgctcgcaattgactttgattattcttcgtgtgcatttcttaagtgcttctcatgaagggtttgtatcgtgatccacataatctagcttatcttatatattttctctgtcatacatttattttgtactcaattattcttaaaatgactgttatatatatgttatttgacctgacttgtcttttattttacaattaattagggctgaacatcgggcgggtttaccgggttttgggttcgcgggtttcgggttcaaaaaattgaaaccgaacccggacccgaatagggcacgggttggcgggtcacgggttggcgggtttcggttggtcgggtttagcgggttggcgggttgacccggtcaactcagtcaactcgatcaactctttaaaaaattaatttttattcaaataattatatttttttt

SEQ ID NO: 392365 - DNA, 1345 bp, Cannabis indica
attgatatagatagattaactaaaaaataaaatacaaaatatcgaataagtacacatccatgattattaagattttaagtacacatccatgattcccaatggcattttcacccttaaattgtaataattgatgcatataatgtgggatttgtttataacatatttagtaataattttttttaaaattttgtagatacataaatttaaatgggttatttttacattacaaattaaaaatgatcttccgtttcaaaaaaaaaaatagaaataatattgtgcacatataatgatgattataaatcactttttactaagtaggacaagtcactggctcatattaaatagaaattagtttcacattgaattattgatataccccaatccttgtcaaccccacattatctaacaaaatccaattttatctttacatgtgttccccaaagaaattaattcgtgtagacacttacccctactaagaaaagatcatggtggatatgccacgtcaaattgtaccaacttttcagagtgaacgatttaagacaaagacagattttctatctctatctacagtaccaaatagagagttgaagatttagtattttatgattcacaaatttttcatggtacaagatgttaaggaacacaaaaagccttatagaagggtgggttgggtacaagaacgaaccaatgagataaagctctagtctacactgctccactaggacgtggaataagtattgaaagatcgtccatgtctgtgtgtccacggatggtcaatccatgctcatttgctaaatgtaacaagcatatgaaacacaagtgaggtgagacgtcattgatggttgccgcagcttttgagtcactaggaaatgtgcccaagattttcttgaaggataatgggtcttcttcctcctgttattcaaagatgagaatttcatagtcagaattcaccttattaaatgatatgagagtatattttggttcatagacatctctcaaggaataaattagaatacaagacacctttatttaaccagaggtagctatcagcatacctgaataggtgctcgatgagattcttgtaattggtcccataaagtttccttcagagcctggacgtcaacttgtttagaagttttgtcatattggacttcaattttattcacctgtggtattcagatgagaaagtaaatcataaacacaatctttacatactataatgctattgtttaacttaaaattatgcactgaatcaaaattgtaagatatacacttgtctcctctctgtaaaaacataaataagtgagatttcaacactataaaatagaactcttatattcgggaa

SEQ ID NO: 392366 - DNA, 722 bp, Cannabis indica
atccttcattcaaagaatcttcaaagacagtaacaaactcccctagcaaattccccaatgatttagctagtgaccttgacttactgaggaaaggaagtctgtatgcttgcacccaaaacggagtaaaaatcatagattcaggggttacattttgcaaagccattggtggataaagaacaatatgttgattttgaaaatgccaaggctctttgtccaaagccctcaaccgatcaccttcacaaccaaaacaaaggatgaaaaggcctgagaagtgctccttaattttgaccttgaaacgaccatcccaatgatcagccatttgacgctagaaagtcgaaagccagacctttttatgcgtgatcactcgagcaaacagtgagaactcttcctggggaacttcttcacgagagccatcatcagtaatggcaaaaacaattttcattatcagataaagtcagtgtagccttcattttatgaatgaaaggatccatgaggagataatctaacagaagaggatcaagaagaagtggaggtattcaaaaatctgcagaacagaacagattggggttgaagaaaattgaaaaactgaaagaaaaccgttgaaggactgataactgccacagagcacaatattggacagacgctctatatttatgcaatcagcataaatcctaatctttgcatcatttttttttccacttttttacttttcacaattgcct

SEQ ID NO: 392367 - DNA, 1551 bp, Cannabis indica
catactgcagtatactgtgttaagtttcactggtgttatactggtgttttactagtgttctaatgttgttttgagtgatactgctttgtgttttactggtgtttataaaacacagtatttttgaaaaatttccgtgtcacagtattttgtaaaacttaaccaaattccagtatttttgtaagtttcccattattctatctcctacattccttattctcttcaatgattacactccatctcttctagtaatatttagggattgaagtgcaatccttttttcattcattcattttttttgggcaagagcaaacccttttgaagactaccttaaaaaaaagatagctagtggggtgtgaggaagaacaaaaagaatcctagaaatttcactagctatatatatgtgtgtggtcccaaaagcatgcaatgaaacattaaaagtaaacaacaagacaatttgagcacatgtattttagtactttctttttggctataaagattaaagatagtatctaatgttagattgagataaaaatgtgatatggcccttataataatctcacccacctcacaatttgtacattaaaatcctaatgatttaatagtaatgggcttttgattaatcattttgggtttggattatgggccctttcaaaaccttcaaaagtactacaaattgacatgaaaatacaccaaaaatgttttgtccacgtataggctaattagcaattttctttcccaaattttgacatatatcaaattgtgctccctaaacttttttggccgtaaaaattccccatgaattattgagattgttagatttaaggacttttgtctaattttagtaaaaaaattctaacatggatgaaagttcagggagtatgatttagtacatatcaaaatttaagggacatgatttgatagatattaaagtctaaggaacatgatttagtacataaagaatcactgaaatagtaaattgaatgaaattagataaaaatccttaaatctaacaatctcaatagtttgggaggaatttttaacgaccaaaaaaattcagagggcatgatttagtacatgttataaagttcgggggaaaaaatcctaattagcttaatataaattagaaaagttgggaaatcaatcattcatcaaacaaattattaaaatatatgataaaaattaaatgaatattttcatataaaaattgatttttttttctttccaataatcattttttagttttattaattttgttgttgtttgacatatgattataatgataaatttatgagaaggattataattaagtaggtgataaaaaaataatgtaattaaaattaaattaatttgacttgtacaaattatcattgttggattatgactatgagagtctttgtaaacttccaaattattactctaaattgacatgcaaaatatattcacaagaaagtaggggtgttcatcaaaccgcttaaaccgtccgtaccacaccgcactgcaaaaaaaaatacggtttaaaattttttgcggtgcggtcacggtttgaatttt

SEQ ID NO: 392368 - DNA, 1127 bp, Cannabis indica
ctagttaactagttaactagtaatgtatctttttgcctctagtagacaaggataaaaatccaacctcaagaacaatctcttgatttattattttattaaagaaatatcttaataataaactgattattgatttaagtccttcagtacatgtaaataattaagcttaattacaatttcataaaatcaagataagattttccattaggttcattggaaaatgtattcttcacatattctttatttgtaactgttttgtatttgggaggattttgtggagtgatcaagcttgaggctgggcctatatcatattctaaatttggattaagaaatgtagcaattgagagcctttcctccttagggtttactacaactctgtgctcaatgctagggtatagtccatttgttaaaatctgcaagcaccatacatatgaaaattacataaatattatatatattggattgatttaatcacactaaatataacatttttctaattataaaaactctatcatgaaattaagactcggtagctaaaactaatataattataaacatgacaaattgctcaagtatggataatgtgggagataacacacatacacaagcccaatcttaggctacggcaagctaagcccgtacttagggctcacccaaacggccaaacccaaagcgcaatttgattcttatatattgggttgatttaatcacatcgaatataacatttacctaattactaaaattttatcatgggactaagacttggtagctaagactaatacatataaacctcataaagtagtatacatatgaataatgtgggaggcaacacacatatagaaaaccaaccctaagctataaggcaagctgagcccgtgcttagggctcaatgaacacaagaccccaaaatctgattcatacataaaagctcccaaaaaaagacaatttttatttatttattaggttaataagtaggcccaatccaattgacattttctcttagggattatttcaaaaatacacaaaaacaataaaaaaattataaaaatatagtttcactgtattttaaatatttcaccatttttttattttatttacagaaaatacggtcttttatgttgtaatcttgt

SEQ ID NO: 392369 - DNA, 652 bp, Cannabis indica
tggtagttaatagtacaaaagtattgcagacagtgggcacaaaagtacctcaggggaatagcctctgtgtattcctagtctttgccggcctccaaaacatcgccagcctcaaatacgggctttccttcttcattgtagccatcaaatggtagcacctgagctactcccacttcctcatctcctttagcatcaggaggagtggcaggacggacctcgccctggtcctccatctcttggacttcaacgaccccaacagtatcctcctcttcggtagcaggtcaggcatgttctcccctaggcaaggtggaaaggaaggcgatatgtgtgtcgaacagtgaagatttatgtaccgtctgcttggtctgtgtcatcattctacgtttggacggagttttatttgtgtgcttggcgatagtcacaataaaagtggcaacgggtttacccgcagcagcaaggttttggcggccctcgggcagagtgtcaactacatctggacggactatgtacgtccagttagttgggagatagcgtctccaccccttcttaagttcccaaatgaggtggttgtatccctcgccttagatctagtcgggatagaagtgatgttgtgcctcgggttctgggaaggtgtgtgttcactacttatttccca

SEQ ID NO: 392370 - DNA, 1151 bp, Cannabis indica
atatccatagctgaatgagatagcatccttgagaaaatgacaagcaggatcaaaacatggagttcaagaaacttgtcctatatgggaagagtgacattgattaattcagtgttaattgcaattcattcatactggacacaaatcatgatccttccaaagaggctactaaaaggtgttgaggctatttgtagggcctttttgtggaaaggtggatcagatgcatcaagtcttgggcttattgcttaggaaaacttgtgttcatctaaagctttaggtggcctaggatttagaagactagtggattggaatgttgctaccatagggaagtatgtttgagcgattgcgaaaaagaatgataacttgtttgtaaaaaggtgaacaaccaaaattggtgggactatgaatgtcttgctgattctagttgttgattctagttggtattggaaaagattggtggttgtaaaaaacaaaatcaagctcaaattgagtcttgataactttgtttctcaaaattacaacatccaacttgggcataaactactatttgaactaagggataaagtcatttggactaaatgtgtttgggagagaatgatcaccccaaaacacaggtttattatgtggcttataatgtggagaaggctccaaacaaaggaaagcttgaaaagataataatgaatatggatatgacatgtttattatgtggaaatgctaatgagaacattgagtatttgttttttgaatgtgcttatagcagtaaatatttggagaagataaaacgttggctgaattgggatataaaaagcatccaacttcagccgctgttgcaatgtatttctcgagccaaaaactttagcaacaatcggcaaagcatgctatttgttgtgatggcagacgtggtctaccatttatggcatgtccataatgatgtcctttggaataataaattatggatgattgatcaaactatttttaagattcattgtgattgtaaacatagaatccttagtgttatgccttgtaaagctagcaccaaggatacagattgacttatgagattatagatatatatatattgtatagatatatgaatgtaatgactttaataggttgtaaatgtttagattgaggaatacaaagtacttattcat

SEQ ID NO: 392371 - DNA, 1844 bp, Cannabis indica
agagagagagagaggatttagaattgtcttaaaggaacagatagaagaggaaaaaaacaaaggaggcccctatcggtctggggcaagagaaggcgatgctaagtcaattgggactggggcattagttggctcctatagctctaggtttggctcaacgggatcttgagcaaacacttcctcgaccctgctagaggacacatcagcttttgcaaactcttgacaactcgagactttagcacttgtttcctcatcaccgttgctatcaactacgagaggaaactccttgagatatgtgttgttctgcatagtgagtactcttgtagtaacctcttccctgtctgtctcattaataagccgaagtatggaaggatctaccttccataagttgtgaaggactaccacataagacatctccaaggtgcgaaggcaatatctctccaccctagttcctgccctattagccactttacctgtgtcttgaatgagttggcgacagtcttccctctattttatgcatggtagactaaagcaatatatgccttcacaccatttgctggactctggtcgactctctctttgtaatctatccatggtctcttgtcaaagttcatagttatgacacggtccctttccaaaagaagctaccaaattaccatgatgtgcttcccaagaatctgcctatttcttctcattgtcgtgttcaactcggaggtcttgaatgtataaatccttttttatggatgtcctcttggaagcctatgacctattggatttgggtattgattgtttgggactgaagaagcacgtgggccttagcaacgtccctctcatttgttgctttggatatgtcctcttggagggagcgtacagtcttctcagcatcttgctcaatttaggctttgtgatctaaatacattttcagatttttggcgtcccacttctcctcctcgaccgccaacttggccttccaatcttcttgaatcctttggttgttggaggctgcttcagtttcggcctgctcaactctagcgcgtaaagcctcatttttggtagtcatggactaaactttggcatgaagtttgtttagttctatggtcacattccccacttctttggcggtcctctcagcaaacaataccatttgaagaaaagaagatagagataaattactaggcctatctttgtaataaaagttgtaccgcaactaagagtaaattacagagttaagacttacccctacaatctgttgtctagcggctattgacagtgtgtatagattaacactgatgctcactgcccacttctccgaagtaagctcgctcacactaaggcctatgctgtccaacattttcgcagcataagggacgcaaactctgcccaccttaggtaccaaattgtgactaactgcagttagatctaacactgggtcgagagaggaaggttgtcggatcccctctacaatcttggccgtcttgatagaagacaagcgagtagcccgcttctaaagatttacctacacttgctcacgacccttcttcaaaatggtggccttcttgagatattcgtggttgataggcagcttcatgagaaaggagaatcctaacgaaggagccatacctcttctgacgggctaaggtgggttcttgtgaaaattatgtacacaagtatacgtagtcaaacaagtaataaaatgataagtaagatcgtctccacatattgcaaacaaaactatgttgtaaaaccaactaattacaacttaaggtaaaaggaaaaaaaattaaaatggttgagcaatgattcaaaattaacatgacagtaagtacttgctaaaattaatgctattg

SEQ ID NO: 392372 - DNA, 913 bp, Cannabis indica
  modified_base (5)..(5): a, c, t, g, unknown or other
attanattacaaaaaagatattggcagctaaatcacctgaactttacggttataacacttaaccacaaaaactgaagttttttggcggctaaactcctaaactcccattccgttttgctctgcacacctccgtccaaaaatcaccgttaagtgccacggtggacagtccacgtgtacacacttgtacttgtacacgtggctaaatttttagtgttccacgtaatatttaattttaaaaataattatatataaataatttaaaaaaattaaaaaaaaaaaatcattaggatgtacgcaatagtaactaaatcaaatcattaattaataaataccacacgagaaaatatgtgagttaggctatataactttacatttcactctctatatactatacattatttttaattatattcgatatataacttaattaaataaatcttgttcttatcttcacatcaatataaagtatttataattattaatcttcttaatttgttcttatctctatctctctagagtgtataccccactataattaatgtagtcatcaattatttatttctcttaattaattctatatgttttcactaaaagtgtgttttttaaaattaatttaggcaacttaattaatttgaattttttttgaaagaaaaagtaaaaagaattacttgattttgttttcactattgctttttcttggacactttccactttgttattgctaattctctggtttatcacttgtagagaggaaaaaatgaagttaattaatgtggtctcaagttatctagattggatatacttgtaaaaaaagacagttgaaagtgtaaaaaatagaattttaataatgatttggtactataaacatataggtgaagaagatgttttatggtttgagaagctacttcaatat

SEQ ID NO: 392373 - DNA, 589 bp, Cannabis indica
atatatgtatatatatatcgtaggatacacctgagacattgaaaattaattagagttgaatgcacacattcttctattattttgttgcccacgtgaagccatgagtgaatgtatatatcatccatttgtatgggcctatatctcatgatacacattaagcatagagaaattatgtggctcgtataaatatatattatacatataataacgcatgaccaaaccttatgtatacatatttttacgccttttaccagtttggtatatatttcattattaattcataatatgtataggcatattcaaccataataatttgatcataacctttatgctaatcaaccaatacccaatcaagtatgaagtttacatatttattttgttatcaaggtataccgataatttttgacagcatcacatttattgaggctcgtttggaacgccgtattaagtcgtattgtattgtattgtattatattgaattggattatatacaatatttttatataatactatgttaaattttaatttatactaaaatattatatatttaggtgtccataaaaattaataccacatatagttttacata

SEQ ID NO: 392374 - DNA, 1349 bp, Cannabis indica
tatctcatgagttgataatatacagttattatataattatactcatcaaattaaatctaatagcttactctatttttgagtgttaagactaacttggaagacatgtggtgtgaactctacaataagttcttggattgggtgttcagtaaattaacatgaaaagatagtgaggaaacctcgatgggctacaagaggtattatttttcttttcatgtagtttagatttaatttatatatatttgttgagatccttagaattatggttcatactggattaaattaatttttaataaaattcgctttcgcttttctaaacttgatatggaccataaaaattaacaatatcttggtgttattttcattgctttatactgctttaattatttctagtttggttgctctgttcttccatgttttatctttgattattttttgtgaattattaatcttgtctttgttaattatttattgattaagtttttagttgatttgtttatgcacatattattgtaatttttccacaaattagagtttggtaatcgatcaagaatgcagaatcaagattcttttcgctgtaattcttgaagaaaaaattaatgtcgtcaatggcgagattcgaatttaagaagtttgatggaacacgagatttcgcatgatggaaagaaagtttgaaagggatcctagtgcactagaaagtctccaaacttcttggagatgagaaattattggctgagaagaaatcagtcgagatatctgaaatggaggagatcgcttattgtacgatcatcttgtacctgtccaacagtgtaaggagaaagctcattgcaaaaaaggcggctaaaggaatttagaacaagcttgaagaataatataggaagccattgattgctagcaagattaatttgctagaaaagttatatggttttagaatgatttttttctctttttttagatgataatactgacatatatatttaataagattattgtaggattatctaatataaatcataaagttgataaagaaagtcagaccatcattttgttaagatcgcttctaatcacgtatcaagacgccgaggctgtcatcaaatatggcagagacgtgattgcattgagggtgttcttgccacactcaagtccaaggattttgaattacaaatgaaaaaagaacttaagaatgaataagtgtatttgtcaagagggagatcacccaaaaagaaagtttgaagagtaaacaccatcactctcaatcaagatcaaaatccagagagaagaaaactcgagagtgttacttctgtgaaaggttcagacaattgcaaagatttttcaagaagtacaaggagcaa

SEQ ID NO: 392375 - DNA, 1172 bp, Cannabis indica
cttccacactgtcaaataatgagggacacaagtggctcgaaccaaacacaatcatatattttgaaaaacattaagcctaaattattatttgataaaacacaaagattgataagtaatttttctaaaatataaagtctaaaataatatatattcataaaaatacgacacatgaggcaacattatatgagtaaatatttaatataataatcaaattacaagaatattttttttaccaataccattaataatatttaaaattacatttaaattgacctacacaacttacattttccatgacaactttaagtctgtaacctcttctcttggccattagaacatagtgaagaaacaaaggtcatcactatttaaacatgattgcatggaccaccacttgctaattgataatatccgtacatagaaattatagaatacatatctttcttttgtacgtacgttgttgtcactataattactctactacgatgctactttctcaattattaagttgttattatctattaatccaaataataatcatcaattcaactttcatgtgtgtgtattattcgacataaaggcttgattttttaatttgaaatatcataaaatattattatgtatacaataattaatatatatatatagaaatacttttggaaatttaggttcctaaaaatacatacttacatctaatgtcttattaattacacttttttttaatgaaaaaatactttattaaacaaaataataaatcggttggaataaactctatactgaaacaataaataaataaaataacaaatttataagttactatattaattaattatttaacaaaaataataaaaataaaattcaactcaataataagttgtttaattagttgtccagatgaagaaaactataaaaattgagctttgaataacttgaaatgtcgttaagctgttcatttctaaaataacgttatgctatttaagttctttaatctaactcaaagactcagacacaccaactacaaattctgggtgacagtggttgaatggaagttggtgcaaacttaccaaaattaaaactaaagcaatatccacattaactttaatattatcaatttaatttaaactaatttaaatttaatggaaacacttgtatgatatattcttttataaaaagtt

SEQ ID NO: 392376 - DNA, 1822 bp, Cannabis indica
cataagcattcagaaaatcagtatgtttaaaatacgagctttgaggatagaatggatgagagagtctgtgtttagccacactctccaagctgcttggccaacagagcttgattatgaaaggataaggtaccaaaacccaagccaccaaagaacttggaaacagaaatggcaaaccaatttttccagtggactttgttagtaccctgagatccccaccaaaactttgctatagcactctggatttttagacaaatagatttaggcaccttaaaacaggacatagcaaatgaagggattgcttgaaccacagcctttataagagtttctttcccagctctagaaaaaatcgatcattccaagaattcagacgagaagaaacactttggaggagataatgaaaaatggaatcggtaaccctgcccacataatggggaacaacaaggtatttactgacgaaaccctccccagtgagatgtaaagattgtcgaaattgatgctgggaatcagcagaagtgtttggggaaaaaaaaatttaggacttgtccctgttggagactcatttttatcatttattgagtgagtgtacaaatgatataaagtcaatgcgggaagttttgaaccgtttggaattattttgcaaaaagctgaaataaaataactgttactagttaccagttactagtcttaagtaaattgccattacaggcgacatgtcacctgactaattttaaacatgtaattttaaatgttttgtgaatgttgtattcggttctaacaactcccataactcccaaagttacctatttaagtttataaatgcttaatttgtcattggtaatattcaaatgcaaatgctttatgatattgttattcatgttcaaataagagtgaatactctataaatagaacacataatgctacaatgttgaaaacatagaaaccttgttaagatatattcatccttaaacactagactaataatatgagacttgataaatatttaagagcaattttagactattttaagagtcgacgtgaatgagtaaatgacttttatacaacaaaagtgtttaagactttgagacttcttcttcttattcttgtatttatatatagtgttatgtattattattgtaaaatgttgtaattttctctcttattctcatgtaatcatgatgacatacatctataaatattttgtgtatttggttataatcctccatccatattctttcttagaacatctctaatagagtactttaaagatggtgtgtaaacattttttagcccgtttatataattaaactccaatgatagtgcataatgtagtctaaatttaagacatgctaaaaattgtgccaaatttaatataaaatataacgtgggccaaattttacactaatataaatatcaattatttttttttttttgccacccatgtaaataataacattttttacatcttatttatatataaaaaataatgttatatcacttcaatcaaaattgatggttttgttgattttttttttacacatttctatcaagaaataaaattaattttacccccaatatattaaagtataattttatactacatttagcataaaatttaaattgaagaaggttttataatgagataatttcccaatactttgaagagtactattctcatgataagattgtttgatagccaataaccctcaagatattttccacaattgcacaaccaatttcacagaaaaccctaggtgtcgtttggtaacacttttttaatcagttttctgtttttaaaagtggaaaagtgaaaatatttttcaaa

SEQ ID NO: 392377 - DNA, 615 bp, Cannabis indica
ttagtatacagatatctggtaatgcaagaccatataattcaacagtaggtaatataaccagccatttgcatagaaataggtctgctcatatatttgcattgcctaatcaggcaagcccgtgtcataatgcaatatcatatataatatcatcgcaccatctattttttgaatgtttggtccctggtttatgccttactcggctaaaacaatggctgcattggcatacaaagcctagcagtttacaggggctgttaaggtggataggaagaagcaaattgagcaagcttaagaagcatgattatgcttatacacttgctaccctggtctaccaaatttggttagccagaaatggaaaattgtggaaccagcaggaagcatcagtgcaacagatacgccagcaagtaatttggcaagtaaaaaccaaaatttcatgtgttaggccaaagagaatgaagcaaagtgacgaggaattgtttgagaatttagtataaatatactgagatactttttatagataatacatgtattatggccttcccatttgaaggtgcatttaggttgtaaagtttaaaaagtttagtggcaatgaaattcacagctgattcatcaaaaaaa

SEQ ID NO: 392378 - DNA, 946 bp, Cannabis indica
ctagttgcaataggggtttctaatataaatatttattaaattaattttgaacatataaaacttaagttttgtaagtgtgacaaataaatgagttttttattaacagtaaaattaattaagcttactaaaattaatagtatcgaattgatactttctaaaaatattaactttttattaaaaaaaatagataagagaggaatataaatgtaaattagtcatttacatttatatttcattcttcgccattagaagaactatctcaaaatttttaataatatctccgtggatatttctctttatataaatctgtaggaaatatatgaacctgaacttttttttttaacaaaattacactaagaggtgttaattatgatatgaataatactatggtattggaaatatgattgttaggtatggagattcaatatgattgttaatattgttcatataattttgattgatgcttttttgatagtgacaatacaaatatcaaatacatgtgatttcaataatttaattagcataaatgatgtccatggtttttgatgcatctaaagattttttatattttttatgcttatttgtgtatttttttttttttttttcactaagaattatatagatcacgactttataaaaatatcagtatttgtaaagtaatggcaacatttttttttattttacgatctgattttgttgttgaaaatcgtcaaagcaacaatcgaataggtccttatttaaaatagacacaagtcgcaactgatgaagtaaaatagatatgtagctaaaatgtaatttttggtgctccaaaagataagctaaaaggtgatatgtattatagctcactcaatttcctacttgctctttaaatatgtataaatatactaggtgaatgtaccgtgccgagccacgtattgctagtttcatttaagattttggtcttttt

SEQ ID NO: 392379 - DNA, 682 bp, Cannabis indica
aaatgagatcattgctacaattaaataaaaaaggacaaaatttcttagtttgaactggatatatattgtaaaaatgattaaataaatgacattattaatttttttttttgtgtgtatttcttattggctttttgttttgctggaaacaatatcaaaattttagttaaaaatttttaacattggagtagagaatcaattgtgaccacatattatacactagagtaccatcagaattgtacagtctgcaattcctctcccgtccgtaattcctctccaatgccgccatgtttcatattcttaaaaaaggcaaaaacttaaattcgaatcgacaccattgaaaatataaagtgatctgattctccttaaaagatttcttttgttcacttaagcattctctattgtactgatttgattcgggaatggaaatagagtatagatttaagtattgagctagatctgattggaataaaacacctcaaggtggatataaatggagttgtgattatttccaaaccaaaaatttcattaaagaaactttactactttatttcaattgtatatttacttttattttaaagaaagctaacggaaaaagctaatggtagcttttacttcaattgtatagttattttactatataatttatcaccaacactattatattttactttgctaaagaaag

SEQ ID NO: 392380 - DNA, 1354 bp, Cannabis indica
ttaaatggacgcccagcgaaatatgaggggtcaaggtaacatggtcgagactagaggcggttggggaggttaaaatcctccaaatccccgtgggcccagcaatggtcgtggaaggtttcagggtgctagacatgaaaatccacctcaagctcttccgaattgggagcaaaggtttgtagaaatgcaagctcaaattctccagcaagacgaagagattctaaggctgaggcagcatggtcttcctattgttcctccatagtaaagcaccgactgctatggttcaagcgatgccagaagaacaacttgttgctggcaactgtatggagccacagcatgagagatttctcaagcacgcgcttccaatcttcttgggaggcccagatgttatgaaggctgagtagtggctcactattatagaaagaattcttaatttcatgggaatcatcggaaatggccgagtgacttgcgccacattttagttccaagaggacacgctcgtgtggtgggaattagtgtccctcaccagagacatcactaccatgacctgggaggagtttcaagaactgctcaatgcttagtattatcacgaagcagtacgcagtgcaaagcgaaaagagttcactgatctagttcaaggaaaaggcatgtcagtaacggagtatacaacgaagttcgatcgtccagccaagctagctttgggtatagtgtcgaagactttagtaagaaagagaagtatctggcaggtcttaatgaaaagattaaacatgatctggtaattactaccaatgaaacactgacttatgccgagttgtttgacaaggctccgcgagccgaaggtgcagtaaaatttcttctagagcctcgacagattccaagttttggtggaaccctcactcttccaacttctggatatggtaggaatagtgttgattctaccactaatcaaaaaaggaagactaccccgatatctggcaattcgagacagaagaaaaggttttgatggaaccaaggcagaggtgaacgccaagtgtaacgccctaatactaaggcacgctacagtgatttttcaatcgatgtgctatctttgcaaatcaaagaattttcttaaaaattgtgtcaaattaaaacttttaaaattaactatgaaaccttataaactttatataaatatttacaattgtcgggattccattgttaaactttttacaaaatattccaaatacaaaagacaggtcgcacagcgactacaaaataaaaaccccagatgtcccgagagtgaacactctaggtcccgccgccatgacatgtacaacctcatcctagctcaagctcactcctgttcagccttcgcctt

SEQ ID NO: 392381 - DNA, 1968 bp, Cannabis indica
agagagagagagataattcagacatagagcttagggtttagttagagcttaaagcataggattttagggtttagttaaggtcctttatataagagagcttaaaccctttaattagataaaataagtaaatatttacatattaaattagtaaaatacaaatgactaaaatgtccctacaaaaaaagatattttccctctattttacttggctattaagacctgattcatagtctagcttgctatccacgcatgaagctgtacaccaaagtcctgccaggccaatgtctagccggccatgcatctgcaggatgcaggctagtcggcctcatgctgtcttgaagctagctggcctatgctggaggggtggtcggccagcctccttgaggtggctagtctttcattcatcatcccatttgactgacatgactccctgtcagttgaagtgctgagtagatgacttggccttcttgttggtgagttgcactgccatatcgcgttgatatcgatcacgtagatacgccacgtcaagtgggcaaaaatcgagataacattggcccccaagtccctatgcggacgtctatgaagataaggactttgtagccttaactgagtaaatattgctacattttttttttgaacaagaagagattctttattcaataccagcaaagttcaacaaaaacaacaaacagccacccaaaaaccaagcagcccttctaccagctattgattacattgaatatatattcatcaatcttttttgtttttcccccactactgcaacaaagcagcctatattccaccacctccttaatctctttgctaatatagcttatcgcattacatttcaaatcaaatatacaacaatttctgtttctccaaataaagtataaagttgccaaaacaatcgcatttagccccttttcttgcaggttgttcgaaggacgggagagccactccaggatgttgttcggccaaataaagcagccacaccaggtggttatttcctgctctacttttttggttaaacaacaacttataaacacgtgttgatgggtttcaatggctgaattgcaaaccgggcaaagggtagaaggaatagagaaagatctgccaagtttgtctctagttaatagctgctcattgacaatttgccatcccataaatctatgttttggcacattcatcccattccatatattcttcgcataatcaaccatgtgagtctgactaaaatagaggtagaaaatatttgctttaaaattacctcttttctcagccttcttgacatcttcttcacctatcactgagcgaagacgaagaagcttcttcaaataccaacttgcgtcttgtttaaaagctgttgtccagaaagtctgacccttcaggtatatagcatctatccaccgaacccataagttgtcttgtttactcgagatagcccaaatgtacttggccatcatagcagcattccattttttaccctctcgaaacccaatgcctactaactttttagggagacagaccttttcccaggaaggaatgtgcattttgcttctattgccgttaccgccccaaagaaaatctctgcaacatttatcaatagctgcaataactttttgggaaagtaagaacaaactcatccagtaatttcgaactccaaggagaatagaatgaatcaactgagctcttcgtgcaaacgacaaattcctgctagcccaattatgcaagtgtttgcggactttatcaataataattccacaatcagagaaacgccattttgttggcctaagataaactccgaggtatttgaggggaaagcttccctcatccattctcagaatttccatgagcctttgtttgtcttcagcttggatccctccaaagtacactgtagattttgctttgttggccattaaccctgttgcttcactaaacttctgaaaagcttctgttgggttttatgcc

SEQ ID NO: 392382 - DNA, 629 bp, Cannabis indica
tttttttttttttaaaaaagattccaacagcaaacttttgttttgcaaataagcctcttgcttaattttaagtaaacttcattcaataagaccagtttactctgaatcgaattattttaaaaattaagcaattataaaattgtgtcaattcaaaataacaaagaatccagtttttaagtctttttttgctttttcttcactctccgacttctccacacttaataaagtaaaagtttaatttaatcattaaactaataataaaatatttatttatttattttttaaaaaaaactaagtgtatgattatttttgattgatgataaggaaactcatgtgctatacatacatttttggaacaaagaatagacagctaaaaaaggcattatcaattgagatgacctggagggcctccattcatgctctttggtttttattattattattattattattattattatattattaaagactaattgattacaaaaacaactgttctgactacttggattgaacttaaaacaaaacaagcatgaaatgtcccaataacaaatgaaactcaataactcactctatacattaaaaaaaacttctaaaaatcttaagccaactaatttttattttagttt

SEQ ID NO: 392383 - DNA, 1171 bp, Cannabis indica
atatgattttattttagttttttttgtcaaacaatctcaaaatcaggcaattgattaattagctcatttttctaattctaatattggtcgtgtccaataaaaagatgtctcaatataattgcaaactattattttatctaaattttatcaataaaattgcaccaattcatcaaaaaaaaaaaagtaatatacatattttttaagaatctatttatttaattttttctaaaattactctaaagtcatttttctttcttctccttaattttctcacttttttaaacttatttattagagcttaaaccaacaaatacctttatttatttccttttcaattctctctctttttttttaatttttttattggttttataatttttttttaactaattttgttctatatagatttttaactaaaatatcctttgaacaaaattcagccatacaaaaattgaaaaaatatccttaacaaatatatatatatatatatacactgtattttttttagcttaaaatctctatcgatcaaatattttggaatcatgatctattattattttgacaattagcttgaatgtagtgacgattacaagtaaattatggtgataacaacaattttaaaatcatataatgaggtttttaataaatttatcaaataatagctttttagatctcttatttgtgtgaggattcttcaatttttaatttttttttcttactaggtttgaaaatatctttgtttactttgaaattgtatgatgaaattttctacaatattattatttttttttagtaacaataattttatgatttattaatgatgattaaacaaaatacaaccgtgtttcctagttaattgattaaaactagaaagaatatatcattataggttggaaaaggttattgtagctatatttaaaaaacatgtttagtcaattcatataccgcaatgagaacttaagaaatttttttggaaaattagacaataacattttcagcaattctgtaaagcagaatttcaaccaaattaattttgttccattgtgatttatgagcttgaaagtgttagaaatgatatgtttgattcaccattaaatcaaaaactttatacaaaactaattagtttaaaataattagctcatttattctcttatatatatatatatatgca

SEQ ID NO: 392384 - DNA, 621 bp, Cannabis indica
tattttcttgtatgtacttttatttagtcataacctcttaattataataggggtattggcagtaaactaattgaattttatgatttgtaacacttaactctataaactcattttttgacagcaaaatttactaaattttcattccattttgatatttacactccatccaaaagtctcaagtaagtgccatggtggattaccatgtatatatgtgtcaaatttttagtggttcacgtaatattattcattaaaatattataaaaattaattaaaaataaaacaataagtaaataaattttgcttactttttttttcatttcatttttctttcttttacttttttcttcttcttcaacctgcaaatctcgaccaaaatccttcttcaacttccttcagcgagacctaaatccaagcgatcttcttcttcttcttcttctgtcaccatctctctgtttcccttttccttttcgtgtagccactgcacagccttggcaaggccacctttggccgccttcaacccaaaacaaaccctacccttcctttctcagtctctctcgtgctcaccctgttagaattttataccctaaataaaacttatttcaatataatcagatttactca

SEQ ID NO: 392385 - DNA, 663 bp, Cannabis indica
tttacaactaaaaatttaaaaaaaaaaaaaaattaagttttttagaaacagatttaggagataattattaactaaacaagataggattatttttgaaaaaaaagttattttcactaaaagagttaaaaaaaaaagtagttttataaaaatttacttttacaaaatgggattaagaggagagaggaatttcactaaatgagcacataagtttagcgacaaatggaaatataagattatttttgaaaaatagagttattttcactaaatgaataaaaaaatgtttttaagtttagaaaatggaagagataggaatttcactaaatacattaaaaagttaatttttagaaatggatttaggagataagaatttaactaatagaaagataggattatttttgaaaaatagtggtattttcactaaaagagtaaaaaagtgtaattttacaaaagattacttttacaaaatggggttaagagatgagaatttaactaagggaaagataggattatttttgaaaaataaagttatattcactaaatagttgaaaagtttacttacaaaatgaggtaagagaacagaattcggggtatattgaaaaatatctcttttatttatcaattaaccaaatgtacttctaattttatatttaattgaaacatacc

SEQ ID NO: 392386 - DNA, 1248 bp, Cannabis indica
gggtgttttaatcaatttggagattggctttatgtggtgattaacatttgaatttctaaattgaagacataccttcaaagctagatggttagtaaattttgtcttcttttttattacaaaatataagtataattattattaaaatattgatccttaatgtgtttaatcttcttatgtatttgcagattcatttttggagatctcatcttggagaactggcaataaatttttttttgtataaaacataaattttgtttcaaagggtggtttctagcaaaatgtctgcacattttgttggtgatgatctttaattatggccatctgattttgattttattatttgtgtgagagattaacaggtgcattaattatgaaaagaagatgaagacaagtgtttgactataacttctggatatggttttagagttttatgaagaggagttgtaattaaatagtcagtaaataagcaaaatctagaaatatttaaatacattatttgtagcttataaatagaagtgaagtgtgtacttaagatgtaagtttgagcaagagaattcaagtgtgtgagaaaaggaatctaaagtgcgagtgtctagtaaataaaagtgttagtgcaattacttttttaataattaaaataattacgtttttcatgtgtcgtggtgttcaacacctttagtttacctaataccaattacttacaaaataatttctgaagatcaacatgtggtggtgatttcaccaaatataggtaaaagataataacataagtaagttgaagattttgctaatcagcacaattatttaagagtcaattttatgcaacaacaactaaaaaaaggttaacccaaaaatatacttaaaaagatacctgaaagaaattaaacacttatatttatacgaatcataaaaacaaaagcaagagctaattaattagcatccatttgggtttggcaatggaactatgtttgattgttggtattccatagcagaaaatagctatatagttgaagctatcttacttaaaaacaaggctgagctacattacaaaaatatagacaataataaaataaataacacttgaattaatatatatctattctaaataaagtgtgtctatataactgaaattcttggtttatgagaaatttatgggtgaattttaatttttatttaataaaataataaaatattatttatatataataaaataatggtttatgagaaattcatgggtgaattttagtt

SEQ ID NO: 392387 - DNA, 698 bp, Cannabis indica
gtgatgttcgagtgggtttggagcacatgtgtatcgctgttgtcgctagagatcactagggtttggtgtgttgggtggttacgttaagacttgacttcacaggcgctttgtgtggagaggtggctacttattgtttggctttgaaggcggcagctgagaaggggtgcaaatttgttattctaaggtggtgattaactctctcaacggggtggattctagatgggagattaaaaattactcgagtcattgtttaagcatttcttatgtttttgtgggttgtgctttttctaatattaatcggtcttgtaactttaaggcccataatgtggcaaaatgagctttttctcataattggtatggttggttagatatcaaggccataccttcgaacttattgtataatgaccatgaagtctaactttgatttatttgtataatgattttttcaaaaaaaaaataaaaggtaaaataaacaaaacctaatagaaaaaggataattatataactgttaaaattttctaacaaactttataatttagagacaaaatcaaagggaaatttgacaatatatactaaaaaatagtatatattgttttaatatactaggaaaaaaaataaaaaaaataccctccaattaactttaatcccaacattaccctccccatttcaaacttccactctccctctaactctcactt

SEQ ID NO: 392388 - DNA, 984 bp, Cannabis indica
attaataatagtatataaataaaaaaaaaaaaaccgagtacaagtggaaatatatatatatatatatatatattttaaggagtgaaaataaatatttgaatgcatgttcatcaatgattaaagaattttttctttctaaaaaaaattattatatagagaatttgaatttgctcttgtttgtatgggctccacttttcttaatttccttacacacattggtgggagggagcttgtggtgttatacatagttttatattgtgttgtgaatgagtaagtaaaaagagagagttgtagataagcattgaattttgtggatttttttttttaaaaaataagaataaataaatgtgatgcatacctttttcactaatatatataatataatttcaatgtgggcttttgattttgtccgcagcttttattaggtgggcttttgttttcattttttggacccatcttcaacatagatatgtgtttttcttttgtttatgttttttttctttttttttatttgaaggttttatgtttgagagaaagataacttcctattcctaatggtgatttcttttttcttctcttttttcatatgatagagagaaaaaattgggacataataccacaattatgatttattaaaataaaaaaaatgtaacaaaggtaaagaatttttttccatgctaaaatgtttattactaacccaaaaaaaacatgtataattatgttatgagacattttattaaagtaagacaattaagcttaaataattatatacaaatgcacaatatattgttttaaaaacttcaatagattctatgcttaccctaaaaaaaaaaacttaagtaactaatacaattccttttggttagcaaaagaatagggattaaaatatgtattttttatttttatattgtacttttcttattttgttgtttattttttgttatttgtatattatttttttatgttatttggatgttatttttt

SEQ ID NO: 392389 - DNA, 824 bp, Cannabis indica
ttttagccgatttgccattagtctcaattaatttgttaaacgttctgtaaacaaagctgcacattgtcttgctcgtagctcttgtttctatccagatcgtatttttagagaggatgatgttcctcctgattttctttctattgtaatggttgattcttcttattaataaagttaccattttccttcaaaaaaaaaaaaaaattgtatgttatatatattattatttttttctttctccatataaataatccaaaaataatgtgattagaattgatcgtgtaaatcattaaggttgctaattattagatgttgtaaattaatatgcgccatttatggggaaacatgatataatgggcttccaaattaaaagctctcttcagatattatatatatatataattaattaggtatgattcgtgcgtttgtggggaatgaattaattcgatatggtagtgcttatctatctatatatagatataaattttctttgggatatttaatcataaatattttaaaaagttaaaacaaattttaaaaatacaattatagaaaattttaaatatttttaacatttgtaaatttttatttacaaaagaatatggattattgattgttgatgtttttatttatttttatattgtaattttattattttttttatgatttgtatgttgttttgatgttatttttctgttttcgttatgtagttttttttttattaattttataagacactacaaaattgtaactaaataaaataataatcgtaaaattgaaaaataatattttgtaaaaatataaaaaagtttattttactataaaaa

SEQ ID NO: 392390 - DNA, 632 bp, Cannabis indica
aaaaaaaaaagaaacaacaagttgtctcttgatcttcagctgaagctgagtaccgtgccatggctgatgcaacctctgaagtaacctgaatcattgctttactaaaagattttggcatatcactcaacaagcctacgtctctatactttgacaacactaaagccattcacattagtgaaaatcctgtctatcataagcgcacaaagcacgttgaaattgacttccatttcatttgagaaaaaatccagcaagggaccctcaagctacttcacattcaatcacaacagaacttggctgacatcttcaccaaagccttacttctctcatcattcaacaacattgtgtatccaacatatacacgccatcttgagggggactattacgaataggatgttagttataagttgttatagtcttggctttagttatttagatttcttggcttaagcttggttagttgtctttcaactaactcaactaccagatgtatatatatatactgctcgttgtaatgatcgagttagactaataaaaatagagcattttccattctctcttttcttcctgatattgagtactttgtttctctcataccttttataggtggtaccctacgattggttagcgatatt

SEQ ID NO: 392391 - DNA, 635 bp, Cannabis indica
aaattttacaataatttacacgattatgaaaaaaaattaagtaaaaaattctttcaaatgttaaaataggtaggagtgtatcggtgcatccgttttataggagtatattgtagaagcacccaataatttttttttttaaaaaataataaaataaaattctacaatgtactcttctaaaagagatactcttctaaagaactttttaatccatttttttttaatgattttgtaagtgtaatatggataatattatatagttttagtcatatagtttttaacatataaatttagtcatataattttttaaaggtttgaagaactttgtctactatctaaatagaaaaaaaaaaccatataaattttgttaatgaagtaatgataggtgataagttgttaccatactaaaaatgtagaatttaagattcatgcctcttcaaaagtgcatgaaattaaattaatgggtaaattgaggcataaatacttaatattttttattttatacacttaaatatctaatgtttatttttagtggcaaaaatacataatgttacaattctcttacaccgttactaccagtacttccgttaactcataaatatggacacgtgaagcgttcagatgcattacatttattt

SEQ ID NO: 392392 - DNA, 847 bp, Cannabis indica
aagtacgtaataagtcaccgtgataaataagcaaaaagcaaacagttaattatatagccttatgtgtaatacacatcaaaacctctaaacatgcatggctttagtttttgtatcatcagaattcatactatgcatgcattatcgtaaaaatagcattgtttgcctctgcatgcattattactacttttgttaccatcttcttcatcctaatttctattgttaggacagtagatggacaattccaagaagattttggtatctctagtaattcgatacacactattattgttgtagctatttgtgtatttttatatatagtaatagcaggtctttattttttatatcagtactgattactaataaggagattgcttccaaaattgtaatgtttgagctaagcaaatatccatgcgaaggatatacaatatttgcaaaccaatacttaatatgtgcctataaatttgaaaatggtgaggaagtaagaatcatcaaatgtggccattatttactcagtagagactttattttataataattaattaataaaactgtgtttcttaattaattgttggtttttataatttctatgtatgtgtatgtagtattattaataatatactacttaactagggaataataccgcgttttgcgcggttttgtttaggcatattattttttgaataaaaaaacaaataaagtatatatgtaagataaaaataaaaaataattaatggaagtaatatttttatcatatgagagaactataaattgaagttaacaatttaatcttagatgtcaagctcaatgtaaagcccgcttagttaatttggaaattagcagttgttta

SEQ ID NO: 392393 - DNA, 1006 bp, Cannabis indica
ttatgtataacatatgacgtccaaattaaatttagacacgtgtaatcatctgctccatgaaaatatgctttatatataaatataatatatttatatatatatatatatatatagcgtttttgggttgctgcataattatttaaagtactatatatacattaatgtaaaataaagatagtaatataccaatcaattgtaataagtaataatgttaattatatgaaaagataacaaataggtcaatttgtacataattagggttcatatcatattgatgtgatgaaaacttgctattattcatacgactccaaaaacagatcatattttcttagatttatatatatgtatgtatttatatactcaattatccgtaataataatttacaagaattattgtactttaattaattgacgatattcatgatgatgaaaataatatattcatcattctactcaattgggattatcattaattataattgtgtccttaatttatgtgtcatgtgaacggtctaccttaaatatggatgattttggtggccctatacaaataatgccatatatatcataataattatatttatgaattttcattttcaaatatatataaatggataagagcgttgttattgggcacaagtgcgtctaatattttttataggtggtactttatgattggttagcgatttcacaaattttatttttttaagttatatacttaattacaccaataacagtatgatactgagaaggatgttaggcaccaacgataccttttaacagttctctatatataaataagcattgttatgaggcactttagtacttagcaccacgatgaagcgttgttctataattagttaaaaaaaaaattataatatttattaaagtaaaacaagtaagacttgatattacccattcaaaaaaaaaaagacttgatattacccattactatttttgttagactttttatttaggcttacattaaattttattggttttatta

SEQ ID NO: 392394 - DNA, 950 bp, Cannabis indica
cattcatattcactattcaatttcgacagtcacatatcaaagaccatcgacaaaaaaaaccctacaagaattaaagaaactaccaaaggcagcagctgctgcttcttcttctctagcagggcccatccaagcggccggctcaatctagcgagcctcatccctaacatccaaagtcaaaaatccttctctgccctcttctattttttccaaaatttgtctgcccgtgtctgtttgtgttcgcctgtgtccgcccataccccccgctggtgtctgcccgtgactgttgagtgctgaggtggtgaggtatgtttcacagtttcagtttccgtttctccactcttattaatgtttgtgttatataattttataattttttattttataaatacagcatttaattaatttttatataataaatactaaatatagtataatagctattgtacatacaataaataatttttaattttttacatattgtactagtatatattacagtatactaatactactagtatatattatacttttatatataatgataataataatgtactaataaagataagagtactaaaaaaagggtacctcctattgtgcctattcctaagaagaaggaaaagtctgatgtttggcttcatttcactaaggaagacaattcttcccgagatacagaggatgatgatgaagaacctcaacctcgtgttcctaagtgtatgtacaattattatgggagtgattttcatcgtgacactaaaaaacatgggactagtcatttatagagtcatttgaaaaaaagtgtgtgagcttagttcactcaaaaatgaagatgaaaaatagaagattttaagttttgagcctcttaagggtggcaaggagggggaaacaaattcagtagttgtggcctatgagaaagaagcttgtaggaccgccctcacataatatattat

SEQ ID NO: 392395 - DNA, 505 bp, Cannabis indica
cttctttttctctattgtacacaatttattacaatttatatatatatggagaataaaagattaaaatataatttttaattatagttgatgtatatttattgttttcacatcattaaataaatccttctaattataaggacataacactctctaaaacacagtacatatatatatattcaggctccactcgagcttgccaattattttcttctttatttctcttcctaggtacagctccctaattaataaccacacatacatatattatatatatgagcattgctattaggcactagtggtgtctagcacctttgcgacatgtcgcgttgcgattggctagcgatactccctaaaaactattatattaaattatatggtacccgatacttagttgtatcaatagcgatattgacacataggaaggtgctagacaccactggtgccctttagtatttctctctatatatctttatatattaaaagtgcctatctaacggcatttctt

SEQ ID NO: 392396 - DNA, 494 bp, Cannabis indica
tcctttttatttgaatcaacttgttttggccttgcatcttctgaattctgatatatgcaactgaattgtgcatggggtttggggcagcatatatcacaataaagtcatgagattattaatttaattttgttgagaaattattattattattattgaactataatatttatatatatatatcctttcttttcttgtcatttgggccaaaaaaaaaaaacgtaggttttactactacaacttcctatatatatgtatatatattactttcttgtgtgttcatctaatcttaatagcgaaagagtactggagaatcatattgtttttactttttatcaatgcatgggcatttgggcacaacagacaatgcagcatgcaaatatatataatattaattaagcaaattaggttttttacctccgaacttttacatgtaccaaatcatgtctctgaacttttaaggtcgttaaaaatatcccctgaactattaagattgt

SEQ ID NO: 392397 - DNA, 934 bp, Cannabis indica
ttttttttatactgaaagacatatgtataaatattgtaaaataattgattaataataagattttcagtctgagtattatttttttatattttgtttttacatttaatcccgatttttataaaaatcgagataaaaggcctaattttattctgatttttacataaaaatctggattaaaagttctttgtatcccattttttataaggcattttatcctactagcatatatcttgatttttaaattagcgaaaaccggtatataatgcccctaaaaattgggataaaagcttacatttgtagtagtgacttatttaggcgtgttacaatgttttccaaattaatgtgctgacctttgctaatcagaaggattttaatgaaaattgtgatttatttaaacttttgtaataaaataaatataaacatatattttataatttctaggattccgtatttaaacttttaaatatttcaaaatatattataagtaaaaggtgtcacccagcaactacaaagaataagcctatttcgtcccaggaaactatgctctccaagcctaacaatcttcatatgtacaatcaccaatgagctccagactcactgttgctcaactttttcattttctttccatacacatgaaacctgagtcaacagactcagtgagaaaagtataatttcgagataggttggtgtctcgtcaatataggcattaatagttttgtatccttacctcgcctaagactgtacaattagcgagttataaatatactctattgattccatatgtaatgagttatttctttttgcattaaatgatagaactaatataacgttgttatatcaaagtggttcatattccacttaattgacacgtgtcactctttgaagtgtagccgaatttcgggtataactgttggaatttattttaccaggatct

SEQ ID NO: 392398 - DNA, 566 bp, Cannabis indica
ttggcaaatattatgttactttaataatagaaaaagaacactactgcttacttcttactttgttgtttatttgtttttcattttttaaatcaaattcttcatttttattaaaaaaaatagaaatgaataggaaaaaaaattattagatgattagtatacacatcctttgatttggttagtttttctagttatgccaacatgctctagagaaaatctagaaaaccattttatacatatacaatatctaaatttaaagaaatgataaaatgaaggaagaagaagaagaaaataataataattacttgtcttagaaacttggcaaaatgatcctattttaatttgtgaataattgttttaacttataaaaaaaataactattttaaaagctagttaaaaataaaaataaaataataatgaaataattaattacatggttcacatctcattttaattctatatacctttattttaaatcaattaaaactgaaataaaatactcttatggtaagagcaaaaatagtgctctcacctaagaaaaatcctatatatttatatgggatatgatt

SEQ ID NO: 392399 - DNA, 3041 bp, Cannabis indica
tctctctctctctctccatgtgtcaactatagcaagaagaaaggaattcatgggttttttcttgtttattcagatcaattgaggattatttgagcaagttttcttatctagttaaggtaagtctcttgctcttctttgtctttgtgttattgatagaaaaagttagagttcatgcttgaagttctaggattttgcttctgtatgagctgagtttgttttgatgagttttctgctgatgttttatgattaattaagttgattctggactattgtggttgttgttggtgggtttgaacaaagtgtgagtttttaagctcaaacttggttctctaatggtgaaatcaaatctagggtttttcttgcgaattctagttattttatgtttgttggggcttaattaggtggtctggagagtttggtaagatttggggtagttttgagcatgtcctcaaatttttagggtttcctacaaagaaccagttaactgttttcccaggcaggaccctagaaactggtttaccattttgggaatttagtttaccgtcgtaagcagttttagaaccctagttttttatgttttatcgatatttaggatatttgcaaatgatatatcgataggaaaacttctagttttaaattgaagtcctcgagaagtgatttagcgtatcactatcagttttacgaatgttgtgacttaggggactataaatcgtcaagaagtagattccacttaacttgaccagcccacctgaattcagaattaaggtatgattagtataataatgtcatatgagattacatatttagcgtgcatgtttatgaatacctattagataacatatcattaatggtagaattaatgtaaatagagttgcactgaataccgagaaatatatatttgggatattattgattgaagctatcacatcggtacgacaagagtactgagtataaactgatattatggtcaatagtattgtcatacaaatgttctagattcagtacaggtgggactcaagatagggttatagttgggtgtatgtgtgcctagttataatctggtttatggtatgttatgattatgcttttcttattgattttttttgtctcatagttatagtttacatgtgtaggaaagggcaaggcaaaggttgaaccacagtgagctcgagttattgaagattacacatatttgggcggttagacctgaagtgttcgatcttcatgacatcaggttttatttttatagttgctaggcaacaacatttgtagttaaatattttgtaatacagttgtaaattttaaagacgagatcccaaggtatgtaaagtttttacttatttaaatttaaaggttaatcaagaaaattttaaattatcaacccttcaattagcaaaggagtgctcaacattaagaaatcacgataacacgactaatctagtagggtgttacagaatatctcaaccaacttaaaatatatttaactacttttcaatttcaaatatttatctaactaatattttagattctcataccggaagagttctaacttttagttctctctaaggaccatcctttgttaaacgatttattctatctaggctaacatggcctaaatgtagataccatagataagtttcatcatcatttaaaacattttgcctcttattttgttaaggcaatggatagtcatttaaactttattaattaattatgtaaatatagttttatttatctattcttaagggatattagggatgtaagctctactatatataaggcattagtcaaaccctaactctctaagtctaagggtctcaattctaactctcaagctctaagtctggaactcatctcatctctttctctctcacacgcataggcctttctccattacttggccaactccattctcatattttaatcttgtagattcaacaatatctttgatcttagtagtattatctttggcattaatacaactaaaaggaaagtaggtcattacttgtgaactaagagggttgaacctctataaaatctcgtgtcttctttattttcctgttcttattgcgtaacacatggcaaacatcaataataaatacaactctgttgttggttgaccaaatctgaggtgaacaattactaacattttaattgataaataaatatttatcattgttactattataaaagtattggatattttaatgtgttatgcttttaagttaatctattcgtacttacatgccgtgctagttcgtgtctaagcccatatttttctatgtcgtacctaaacctagttttcttcaacatgtcgtgcctagctcattttttttcatgttgtgcttaagcacatattttttgggtcttgctcgtgctgatttcatattgtgtcaaaaaaaatctaacctatatttacaggactatatcaacccaacacataataattagaaattaatatatatgtgaataattaattttttatacatatagatttgtatcggttgctggtcccgactcccttccctattattagcggtagtcgtactaattctatttttccttactgtgacaagattcaataatttcaatttgtaattgtacatgtatgtccaatgttaaattgttattcattaatctgagctaaattgtattaattatattaaataatgtttcttttaaaaaaaagtaaaaaataaaaaaattatgttcaattttgtaatttttttaaaaaatatctaaataattttgtcctataatgtaattcaagggacatgagaaaagccggtttagaactactgctctaaagatttaagaatcaataaaatattattaatgtaaatggtcaaccatttctaaaaaaaatcattggctagtgaaagaaatgaagccacgaccataaccaatattagaaacccattttttttgttttcgaggaattctaaaacaagaaaagattaaagggccaagatgcaaaatgaccctaaatttaataattaagttaataaatgtctttttttaaaaaaaattaataaaatgtc

SEQ ID NO: 392400 - DNA, 1016 bp, Cannabis indica
aataaatttattgttgagaaagaaaacttaatcaattcacttttttttttttctttcatttttaaattcaaaacattgacattaaaatcaaacgcacacgttaattacaatagctgcttttgtatagtcaactttttgaagaacattttagtgactaaaaataattaagaatatttttttggaagataaaatatacatgtatatataagtcgtaagcaattacgtaataagttacaaatattagaattaatcactggaaaaccattatttatatttccactacttaaacaacaattatattagaagaatgaatatataaaaatcgtaagcagttacgtaattatcaatacaagtttatgagtgtgtgtagctagtcaaaatgatatatgttagggattatataggattgaatgtgtggacccaatgcacgtgtaggggaatgtatgggactcaagccccctacttagtaacaaatagggaaagggaaatttgaaattctatacttaataaatatcaaaattggtcccctaacttaatactatacataatttgtaaaatgggataaatttcctaaaacccaattttacccccatttacattaccccctcccatctctcttcttctctcttcttcacgagcctatcccatttttttttctcctcactcattctctactcatttttttaacttcattacaatataatctactacactacaacaaaaatttggagggagcatcatacacggacacacatatgcaagcaataggtaaattttttttgttagtgtaatcttgtttgttgttattatatttagtttagaatgttgttttgatgcttgatctatggattgttgctgttattttgctattttttctgttaaaatgtttgctgcctgtgaaaactggattttttctagttttctgctatttttttttgtcgggctcgatggggtccgatgctggcccgatgggggcccgatgtaagggaaaaattgttggcaggagtgaagacccg

SEQ ID NO: 392401 - DNA, 1039 bp, Cannabis indica
agtattcacgaatctatacacatgagatatttacactccaaggaagttggacactaaaagagaaatatttgttaacaaacaatgaaaatcagaaacatgagcttgagaagactagaatcctttaaccactacgagagaatcagtctcaatatagtgaactgataaataaagatccttaagacattgcatattgtacattaaagctattgcttccattactttcggtcgaaaacaaccactgaaaggcattgacattactgcgatggtatcacccttgcaattacgtaatatggtgccaaaactagaagtatgtgtgacattgttaactgcagcatctgtattaaatttcagtttacctgaaggtgggttcagccaaggggtatctttagtggcacaatttgaatatgaagaatttgtagcagcagcaggcggtttgacaacttgagcagcatgatattcatcaagataggtgacagtaaaataaagaagaacatcatggggctttgattttgtttcatgcctctctttttatttctctcactccaaatactccataatattgtagcaaattgttccaattacaaattagtccaagtaaaagagacatggagcaacaactctttaaggctcatctgcctatatagaaagcaattcaccaagtgagaaggtggaagattttcaaacacgcttaggatgatggcaatagaacaaagcatgagtgagtatttctttatcacaatgacacaagaaacaaaagggagaatctgtaatatgtcgtgtatggagaatagtagccacaaggagacagtcatgaattgcacgccaacagacttttgacgaaaatgatagcgactaaatttttttccaccattgtagagtacgggttgcacagactgtaggttgttgatcctccaactgagtagccaaaaaataaccagttttgatagagtataatattgggttctgtgccctaaataaaacccatttcaatataatcatatttacttattaataaagatcagaaataacattttatgtt

SEQ ID NO: 392402 - DNA, 463 bp, Cannabis indica
tatatacttacaatctcatcaatcaagtattccatcttattaaaagtaatcttaataatttgacatgagtttaaaatgagtttaaaattcatgtgtaattctagatctaatttttaataaatgataccatgagcctcattctatgttaagtaatagggttcatcattactgtgattatagtgttttgtttttatttgaaaaacctttaagtatttagggttttgtttcatgtgtatatttatggaataattacataaaatgctatgttttgtaaaataattatatttttacgttcaaagaatgtttttttacatttttacggtttttcaaaaaataacacggaaataacataaaatcaacaagaaaattatataaaagtaacatgaaaataacaacaaaaaataacacacatataacaaaaaatcaacaataaattaacaagattacaacatataaaaaccgt

SEQ ID NO: 392403 - DNA, 488 bp, Cannabis indica
agagagagagagagttgaaaaaaccaattcttattggcttgtcaaagtgttattatttatgatactatatatacttatataatagactaaaagagctcatatagcagtaaaaaaaagggctcatataggaaacccaatgtgtaaactacaaagtgacatatttctcctctcatatcagagaaaatatactttttttataagatttctgttaagaaaagatataatgtacatgcatactatttaatgtatttcattttatttttatgcacattcatatattattcactcacattcatacatttatatttgttctttaaattatacgttaaaaattcaaaatagttcacaaaacagaattgatgtataatgtattagaagcaaaaccttgtatcaacatctaatatacagtagaacctctattcaagaatagactttggaccaagcaaattatattctaattgagaagttataactaaatagagttatac

SEQ ID NO: 392404 - DNA, 641 bp, Cannabis indica
ttttttttttcctttttcaaatgaagcaaatctttctaaattattatatatctaacattcccaattgatttgtttgacaaggtgaaggattgtagcctcataacacatattttacaactaaaacatgtgcaaacctgaaaagccaaactgcaaagcttacaccaaataactgctcaccttaatagctaacctcatatgcaggggcagagctatattgagctccaacaggggccatggccccccacatcttttcatatatctatatttatacaactaactaatgtattcttgcaaaataaattattgtatttttatatattgtttgtgttggcttttcaaagtttttctttccaaatcaataatatatatgtataattactgtataatataatagtatatgtgcatcaatttcttaatgaaaaacaaaagtacacctaataaaactaatataaagagtctagtgtacaatatatttttttttattgcatttctattaataaactttatttgataaaaacttttaattctacaccaaaaaatttatttgttgtactcaagaaatgttaaaattttaaaattttgtagcttattattaatattaggcgattttaaaatttaatttgaactcaatgattttctaa

SEQ ID NO: 392405 - DNA, 1163 bp, Cannabis indica
aaaaaaaaaaaaaaagatatataaggaatcttatttaacattttaatatatagcttggttagagagaatgcatcaaattttggatgtcattgttagaagaaaattccatcaaaagtctccatgtataactagttagctagcaattcagcaaaaaaaaataaaaacaaatctagctagctagctaactagctaggttggtaccattaccactcagcttataataaattaaaatatatcaatttaattatttccaattaacgaagaaattacattatttaagtacttttaatttataaccttatgtctagagtactgttattgaccccgaatcacctctagaattaaaagaagaaagaggagcaataaacttttattgaagtaagattataatcttacttaagttaattgtgtgataatttgtgtaaatttaatatatgattaaataaaacataatttattaattacggagattttatcaaattatgtgagtattataaataccttttttttttaaataatatattttcaggctctacggccgtggaaactcgaccggttggtctgcaggggaaaatcttggtttgcttcgaggttggatcttggctcgggctgatttccagtacctagtttggggtatttaggtgttgtgtagcctattttggagctaatgaaagtgagagtttgtccggtttcggttttagggtttgtgtcaaaatttggttacatttttatcagattttgttgtcatgacataggacccagaatcgtcgagcatggttccacccaggtcggcccgcacaccttatactagtttaaggtaagaaaagctgcaagtattgctaggcatgtaatgtgagaaatgatcattatcgtttgtgactcgattatgatcgaggtatcgattattatcatttgtgactcgattataatcggggtaacgattattatcatttgtgactcgattatgatcaaggtaagatgagaaacgattattatcgtttgtgactcgattatgatcgagtgaaagatacgttcattaacgttgagaatgaataaagatacagtcattactgttcataaaaatgagtaattactcccttgaaaccgcatataggtttcttacttatcaggtgttttatcgggcaatgatagtgacatacata

SEQ ID NO: 392406 - DNA, 755 bp, Cannabis indica
ttaaataaatttttaaaattactatactacttatgtacacatgaacaatctaatatcagacttaatatctaaaataaaagaaaactgtaaattactaaacgtttactaattttgaagttttatcgctaaaatttaagttttaagttaagttcaatcaaagtgagtattagagttatactgcaataatttctatttatatttatgagaaatgctcccatattcccgaacacccttgtaaggtgtactatcactattcgtgcaactcaataataaattccatttattatactttaataaatgttataaaaaatggctaatcaattattgaggaaataatattaggtcgtagatcataaatgtcttataacactgctttaaatttatatatttatgctctcagcttataacatatttttttttgagcaatttgcggcgaaacccccttatgttttgatttttatacacttaacccccttatctttatttttggtggcaaaacccccttatgttttaatttttatacacttaacccccttatcttttttttggtggcaaaactcccttatgttttaatttttatacacttaacccctctatcttttgttttggtggcaaaacccttcagtttacttttctttgcaaatttaaagttttagttaaatattaccgttaaatactaaccggattactactgtatcgacttcgaggttttaccgttacttatacaaaagtgtatacagtggtcatccagttga

SEQ ID NO: 392407 - DNA, 1066 bp, Cannabis indica
tttttttttattttctttatgtaacaatgaaaaaagtaggaaactaaaaaatttaaaagagactttcaaaatagatgattatgtattattattctcttcttcctctctcatagatatttaggcaatactaatctcttcttcttctctcatttcatatctattaaagacacacacggacccgattattttttttaattaaagttcatattttacgtgttttagatgtccaaaacctacatatatctcttaattttttcaattagattattttagaattgaaaaaacgaaatttggtcgtcgattttttttttccgagtgggtttggggtcgggtccgtaggacccgtgtttctgtgaaacgagtcaaatgaccctactggaggttgatggtaaaccgtaaacgatgtgtcgttttccactctatgtggaaaaatgacatgtcattttttcagaggctttttttacaaaaaaaaaaaagtagaggaaaaattccaaatttttttaaataaattttaatttattttgaatattaattattttcattatttttgttagtttggttaataaattacatttaattaatttttctattttaaaaaatatatgtatttggaatttatatgttatttcgtataaattaaaattggaaaaagataatttggtaattaattacatgattttatttaagcaggtaattttaataagtgtgttgactttaacatttaaatttatacaattattatatttatttaccacatcaagtaatttattgtctaaactatttatttttgaaaaatatctcccattaattgcaaattataaaatttaatatttaatttattatcaaatcataattttgctattttatatttattttagtaaatttattattagtgcaatcaattaagatttatatgatttcaatactatacataaattctataaatagtgctagatatattaagaatatattcaaatattaagatatgttgaatatttttttagcacattaagttttataaaatttcataaaatattcttaaaatgaataaaaatatgaataaaac

SEQ ID NO: 392408 - DNA, 784 bp, Cannabis indica
ttggtccccctctttcaactaaaagggcatagctctttgtttttaaaagatcttcctttgatcaagaataacaaaaagttgcttcctaaccttaccgcatcgagcaacagaggcatcatctttttttttttttctttccagctgcttaagctcagttttgcactctcttatgtgtcttcaaaaattccatgtaatctcctttccccatagagttaatgaagtagcacacaagttcaatttattcttaatctcacccgagctagcattgtcctaaaagtcttgaacgatttggtaacacataggttcttttaggtcattttcaaaacaaaaacaataaatctttgatgattgatcaataactataggttcaaggaaaattggagagtgatcacagggagaagtttcaagattaaagagtttggcaccttggaacatttgagaccaagcttcaatgactaaagccctgtctagacggacttcaatccacatattcttctcccaagtgaacgggtacccaatgaggtccaaatccaacaaattacagtcgcatatggctttttgagattttttttcttttatgtgtctgtgataaactgacgggaatagtgtaaaatatgatttttacactatttttgtcggttttgaaaggaatccaatattttgatactggcagttattaattgatgcaaaaataatattatttgagtttaccattattatgtcaattttatcaacccatatatttttttatatgtcacttaaaaaggacagaaaaataaaaaaa

SEQ ID NO: 392409 - DNA, 993 bp, Cannabis indica
tagggccattttgcatctcagcctttttgttttagaaactattctatcttttgggcctattgggaaagccatgtatgtgtctaattagatgtaattgaagggttatagttatacttgttatctattttccccaatgctgtgtatgtggcaattacggaaggatgccacatcaaattatgtatggttagtgttatttccttcgccccttggcctcacagaaggtgttatgtactagaagttactcagaggctccccttgtcgtcaaaggcggaaaggactctgggattctcataaattaaactactataaagaaggattagaagtcatgagtgcaccatgatggtagcaggttagtccggtctgggaagcctttaaccagatgttcctagaacctattcgggtgtgtcttatccagatctaaatgcaatggttgcatactttctaacaccaaataagatcttgtcccctacatcagaccttggtagtgcgcgtacgtgctctgtagctcctttttgtctaatgacttgtctagacaccaactttgcatggtgaaacatttgggcgacacatgtccttagttccaggaattggattgcagcagccaaacaccacacaatgaggaggctccctacttaccaaccgtcagattgccatgttgtaaacaccaccaattgtaacatgctgagactttgaccattaataaatgtgaataaatacattatgtatattaattattaaataataatgataaatttttacgtggttttatagttaaatgtacatactccacgagtcattttttttcttggccttcttgttttacagaatacaatttggcagaatttttctaagttagaaaatcgatcgtcctttctacaatgtggggactgctacttataggacttagatagcaattattgttggaatatatttgaccaggatctagatttacttccatgtatgttatttaacatcttaaatatgaatttctaa

SEQ ID NO: 392410 - DNA, 772 bp, Cannabis indica
attaatcaataaggtcttacttagtttgagaggctaaagctgaactctccctataattattgacttatagttcagtagctaagccattattctcttcatacagttaagccacatcaacaaacacacaattcaatgcaatctaactttcaaaaaataaaaatgagtcaatctattgaagttcctttatgcgaaaaatattgatcaaatatttattagtgcaacaaaaatgaaaatatcgactaaatctttccatttttaattgtttaatcagttgttattctataaatacaaagaaaaaatcatagcacaatgtatatgttgtcctcagttgtccctaacaatgatggttccaacttaataattaattctcattatatatggcagactaatttgtctttgaaagacataattaaataaagcttaaaaataaatatcaaacaatagtttaactttaaatctcaaagctaataagaaatatcaagtatgaataatattcacacttgttttctttggttgacactaattgtgtgcgattaaatcagctattccacttattagccaaagagattctatttctaaaataaattaagacaattagaaataaaaattatcatatatatacaaccaaaaaatatcataaaaacctccattaaaaaaaaataaataaataaatatcataaaaacctaaataaacagtcaaaaaggccagagctcatatgagtagaaaattaaaaaaaaaaaaaaaaaataaaaatagaatcattaataaaaa

SEQ ID NO: 392411 - DNA, 1100 bp, Cannabis indica
cccttttttaaaaatgggataatttcacaaatacacaaaaataacaaaaaaattaacaaaaatacggtttcacaaaattttaaatatttttacgatttttttgatttaattacagaaaatacggtctttttatgttgtactcttgttgattttttgttatctgtatgtttttttttttgttttttttttttgatgaagtgaggggtgttcaagaacaccctttcattaaaaggcaaaagcttgccgagttcaaaacaaacaacagggaaagtacaaacagaggaaaaaaaaaagcagcaaataggaaaactccccaaccaaacaaagaacagagtaaaaaaccagaaaaaattacaaagggattacaggagcccgggtcccaatcattgaagtcatccaacacatttccatggatatcttcaattccaattctctcggttttttgatgcatcattgcccactttgcaatgttgtgcgccatgtagttgcacaaacgacaaatgtgcgcgatttccatggatattttttgttgttattttcatgttactttaatgtagttttcttgttgttttcatgttatttctatagaaaatcgtaaaaatgtaaaaaaaaaattcaaacgtaaaattgtaatttttttttacaaaaaatagtaccttatgtaattattcctttaaatttagttgaaaaaacaacctctaaagactcacattgtagtaatttgtaggaccaaaccacaaatgatttaggaccgactcaagggtgggacaacttcgacccatgtccaaggctcaacaaattttttaatataaaagcctacaatttgatctttaaatatgttatattttgtatttttactattatattttgttaaaaaatataggaaaattcttcaatagacactccttttatgggctcactagtgtgtccaatatcacaaaatataattggtgacagctattaaatgaaagatttttgtggtaagggttgttgtagagaatcaaaccttagtaaaattgggtccacctatacaacctttaaattattatttgattggccatataactctaatacacagtaaataatatccctaaaaataa

SEQ ID NO: 392412 - DNA, 546 bp, Cannabis indica
cgtcgttgattggaacgatcgtattaattgaaagagagatttctggagtgattagtctgcgaccggttaacagacgcttcgctagcattttccgaagcgccattactgatgatagagagagagagagagagagagagtatttggtttgaagttagaacaatgggaaagagtagtcatatatatataaggtcggaggtgagaggaacttactaacatagaacagaagaatcttcaaggcttacgcctttctcctttattgtcttctttctatttttatttatttttataataacctataatttatttaattattttttttgcggttgtttttgttttggaattaaaattgcatggtatcttttgtgagaaaaaagaatctacattttattttttaaagaagagaataaaaaaaaattgtgtatatataaattatggtatgtaacagtgaggagtaaaaaaatatatataaaatagggaaaaaaacaaaaaaatacaaaaaaggaaaaaaaattacaaaaatactttgggccggcccattaaacattt

SEQ ID NO: 392413 - DNA, 1647 bp, Cannabis indica
cttagcttaattctagaaaaatatcaagttttaagggtgattccttctggtttgcttcagctgaaagagagaaagagagagttctctaatttttttttttggctttttccttaatttttgatttctttcttaattaactaacataatgcatcattaatcaattaaaaggcagctgtcaaaaaacccacaagccacctaatcctccaatgactaaaatacccttaaagcctaaacttcggctaacttaagcttaggggtcaaattgtcaaaaaccataaccccgcttacactcggtatgctatttcctccaatatacattccactaagaaataaggttccagacctacccatgtgatcaaactagtcatccatcgcattttccgttgtcgtcgagcaaaaattgtaaaaatttcataattcacatataattcatataatacacctagagtttaataaaatctttggaatttagaaattataactcaaattaaaatgagaaaagtcacctaaggttttataaggtccatattaaaccactgtcataaggaaatggcagtgcccatcaaatttgatgggcacttccataatggagtggcagtcgtcggctactacaaaaggaaatgagatttattgggaaaattatattttcaacatctatgtatcaagtacaagtgagaaaaacaacccatggcttcccacaagccatggccgaccactgccactgtctggctccaactggtggcagtggtctcctgttagggtttcaaatgtcaaaataaagtttttgggcctcgagacccccaaaatatgactcaccataaaaaaaaagtcaaaacacaccccgagtggtccgagaacatgcaccggcattaccatttggccatgtctgtgctcgcaactggtacaagtcagcataaactaccttcagcaaaatgagcataactatctcaatttgtactcatatgaactggttcaacttgcataggaaagataatttcaagactgatcaaattgtgtctcacagccatggctcaattttggagttatcgggtccaaaatttgctcacaaggcaggctggtacattttactcgtgaattaagtaatgtggttaagtgagggttgttggaggacactgccacagcccatgtggtattttatgcgagcattgacactctaaaatacatgttttcagtactcattaccaatattatgcatttctaggcaagaggtgacatcccatcactctatttcaaattgatgcatcctcaaccgaagataacaactttccccatatgtgtggaatattggcctagaaacaagggggatttttataggtatttattttcttgtaatattttattcattatgaaggagtcattactacaatttggacttttagtgatgccatatagtgacacgcataaaagtgtgggtcactaaagagttatgagtgatttttagtgacacacaaattaaatattcggtgtttatcacccggaatgtgggtcactaaaaatatggagtgtcactaaatactaaaacccaaaatttataattttataaaaataataaaaaaaaaaccataaactatagagaagtgctacgtgggtaagtaaatgtgtataccaacacgctatgcgcgtcac

SEQ ID NO: 392414 - DNA, 556 bp, Cannabis indica
gaaagaaaaaacaaagaaatagatttttttttgaataaagattgtatttttaagtttgaaaaggaataaaagattgtatcaaaccataaaaagaaaaagaaaaggaaaatagattagttagagtaagtttttgtgttaaaacatatatagttagctgaagtcgaaggtgccaacctgacgagagtccacaccagaccaaaaccctttattgttttatgtaaaatttctagggcaattgcaagtgcagatcgttgatcattgagattattgattgaatggctcgggccggaggaataaccaatgccgtaaatgtagggatagcagttcaagccgattgggagaatcgcgagttcatctctcatatttccctcaacgttcgccgcctcttcgatttccttgttcaatttggtatgtaatctaattttcccctttttgttttcaatctaaaggtttttctttctgtaatacaattgccccaaatcaataatatatatatatatatttatgtttatgtctttatgtgttttttcttttgggggctgtcagaggctacgac

SEQ ID NO: 392415 - DNA, 595 bp, Cannabis indica
aatgagatgagattagattagaggaagaagaagaaagatatgaacttttaattaagatcatatcatcatgtaatagatagcatgagacagatataatacttaattttgggagagattaaaggaatgattatatggctaatataaaaaatcaaaagatttttataaataattttgtgttgcatgaaaatttattgaagctaattttctacatttgaagggctcaaatttgattaacttaaacaaattttagtttaggtaacgtagtaaatctgaaacaaatttcaatttttgtagaaaaacaagagaaatatatgtataaatattttctttctatagtgtttaatagtgaaataaaacaataaaagttagaacaaactttaagtgactttacttattttagacaaatgttatcacattacaaaactaattaacccaatttgttttatcataattatatatataaaaatatgataaaaatataagaactatatgtacttatacaacaaaaaatatcttaattaaattatgactaaaaaatatataaggtcacaacttgtttgtatgtagtactaataattttgttttttttttctta

SEQ ID NO: 392416 - DNA, 1554 bp, Cannabis indica
ttcctatgtattctattttattttcctattttattttccacgtcccaccttggctgagaaatcacctaaaccctagtagagcaccatcgtccctcctactaaagtttaagatccaagtaatacagaaaaaaattatttttatttgatagaaaaaaagaaaaaggaggagaagataagtttttaaaatataactatattcttacaattaatataaaaggttaacttcatgataaggttttggtatttagataaatactatgtttggtatgattttataaaaaaataatataaaaggatttttttttaaaaaaaagattgtataactttatgtagtttttctttaaaataaattattatcttaaattaaattaaacaaaaataataccttgctcttcaaaatcattgtttagaaactgattttcagtcacttttcaaaaatcattgggaattctatgagtacaaaattggttactaactactcatacattaattaattagtattttagtaactcttctccacttcttagttaaaccaaattatgaagaagcaacctaaaagggtgtctactgagtaactagccttgatctaggccttcctctgttcctcatttaatcaaatttacaaagcaaaatagtttacttcttaattaattatataaaatatttatttgtaaagtacctcgtaatgttgacgaattttatagaaagactagtatttgtctaacaatttgaatttgggcctctaagcccattatgactcctgacacaatttcatgtttggtttgaaacgtgttggcaccgaaatcatcaactcaaaaaaattcaaagaacactgaccacactgagcactttgatcataaaatcagattcttgctttggaaaagaatttatttattttttttaaaaacaaattttcaactgtgtcgggtagtttgatctgggtttatctctttttgactctcctaatacaaggactttaagcttaaatgtcataattgtttatagaatttagaagactaaaaggttggtgtttaatttggtacgtagtagcaaaaatagaaaacaaacataaaaatggcaccaaactgtcggtaaatgtatatagtcttaaactttatcattgtttaatactacgaacagagtctttcaagttagatgtatattatgaaaaaattatggttttaatttatgtactaattattataagctggcttagaacatgattataaggcaattgtattgacaactaattaagaagtagagaaatgatttaattagaaaagttgagatgataaggttagagcatcacatttaaccagacaaaaacctcatcaataatcttcaaactagtacgcagtactcctaatatataactcagtcatgtttgattaccgattaaaaaaagaaattaagcaacacataagagaaaaacgtgggaaccataatgctagaaaatgtaaaccaaacaattagttaattaataatacaagtactacaatagttatcacaaaacaaatgcattaatatgatatgttaattaacacatgatcatat

SEQ ID NO: 392417 - DNA, 947 bp, Cannabis indica
gtgaatgaattcactagggaaagggatttagacctgaattcgtactcacacatctaaaatcactttgttaaaagatattctttgtaaacacttcgagagccatagttagaattcattttgtcttccttagtgatctacccggtattatctcataaataatacatataagggagtcgaacctctataattcaatgtgttctatttaattatttattgttcccaattcttcattagcgattaaccatcgattattagatttcaagttagttggttatttttgcagtcaataatttttttatgtccatatttaatattatttatttatttatttatttattttataattactgtcaaaaacattattattcttttcttctctctttttcaatacagactacatatatacttacggggcaagactatggtaggacctagcaaaagttctctatcggtagggaattttttttcaccattgattttagatcatgtggttatcatatgatgtaaggtgtatactcttacgataggactgcttgtatacgattaaactttataatattataataatatttaatgatatttattttttaaaaaataatattaataattaaaaattttattattttttattttgaattattattattttttaaagttactttgaattatttttatattagtatttatgtttcaaaaaaaattatttttctaaactcatttttttttacttttcataatttactactgttttttttatacgagtgcagcctcacacaaaaaagctcatatcatgtttatatcctcaaaacctatgaatagtggaaaatatatatatctttatataatttaccctcctttatgtaccaaaatttcagtatcatcatcttgttcaaaaaatttcactatcatctagtcaaatttatttgacactcatgtatttttaagtg

SEQ ID NO: 392418 - DNA, 516 bp, Cannabis indica
acttatgtcactatttaccctacaaattattttaatcattaattcttttttaaagaatgattaaaaaaattaagtaaaaaattaattttttaaattaattacgtggtgctgatgtgagagtaatctaaacaaccactatgttatcattttgtttgtgtgcaacaaaccttgataataggaacactttagagtatctccaatgatagcatcctttaaggatgttaaaagtttacacataatattttattttatctcactttcatattattattggcactcttatttttaaaaatactcttatatagtactctttaaaatattataatttttaaagtgacatcattttttctccaatagtataatattttaatattttgccacataatatattaacgtcactgagcatcctctaaaattaccattagagacgctcttatggcatgtttggtttagggcccgtttggcgacaacttttggaaaagctaaaagtctgttttttaaaaaaactgtgataaa

SEQ ID NO: 392419 - DNA, 1144 bp, Cannabis indica
cagacatgaaaaaaaaataaaaaaaaaaaaaaaaaaaccttttaaagtaagttactcaaaaaaaaacacactttaccagaaaatgggtcaaaacattttcagaacattatgaaattactttcctaaaaagcaaacctttatctcacccctaaacttacggaaaattgtaataacataaaaaagaaaaaccttttctttctataactttcaaatacagactgaaaatttagaaactgccatagatagatgtaagttcaataaaaaagaaagaaaaacataccaaaaaagaaaatcaaagtgattggagaaccatggtggaagaagctttgtttgggagatgggttgttgctggattgtcaaaaaaacaaaaataacaatcaaacccagaaaagatttttgggggttaatgttgaatgagtaagagagagagagagaagagagagaaagttcgaggaaatggagggcggggtcctttgaggactcaacccatatataataaagtaataataattaattaattaattaattaaactaaacattgtgatgagtccaacatcagcacagtaagtatgtgtgtctgtctctctgtgtgtatgtgtttcttagcccaagaattttgtggccaatgagtgggtcccactctcactcattattattttttttagcactgttattaggtacatcagtctaacactttctaaatgtattatcttacgattggttagcgctattgttagaaaatactattagtgtctactacccttttcgatatcatactactattagtatacttacgtatcaggtctcatataaatttagagcatctctgagcaacacttatagttgtcaaaaatacacacataattctaaaatattattttttattttctttcttatataaaatttaacaactttttgtacaaaaattactttaataactgacaactccaaaaattatctatcatggtcacatgctactatttaaataataaattttattaaatattataggaaaattttacaatgaacccccttaaaatagatacattgatgcaccctaatttgttttagcacccaaaataatttttagtcaaattttttctcatggtcatgtacgttatagttatttaagacattctgcaaa

SEQ ID NO: 392420 - DNA, 2172 bp, Cannabis indica
tatataaaaaagctgagtgagaaagaatgtggtttgggggatgaatttttgaatgatgaagggatgaggctgtgtgtgtggaatcagtttttatcctgctagctatagcattgcccctttagtcccaccattaaaatggccacctcacactaagaaggttttcacaaattaatgtgtcatactctaagatcaacacatgccaatatgtatacatacacatgtatagggcattattagtaatttttatacactacttcagtaaattacacatatttcaaccttgacccgaatttgaattcgaacatagactcggattcggaccctaaattcgaccctgaaccctgaaacacgaacttagactcagacctagacctggaccttgacccaaaccccgacccgaaccccgactcggaccctgaaaccagactggacctggactttggcctaggacctagctcgggtctagggttcaggtccagtccggggtccgaggtctggatctgggttcgtgttctggggttcgggttgggttgggtctggggtctgggtctagggtccagattcaggatcgggttcaggtttgagtcttgagtccgggtataggttctggtcgggatctgagttcgcgagtttgaagtcaaggtccaatctggagttggatgagttcatgtcatggtaaaatattattttttttaattaaaaaatattaaaataatcttaaaaaactgagccaaatactcttaaatttttaaaataataaaaaataattttcaattctcacatttgaaaatacaattttcaaaactaaaaatgaaaaacacaaccaaatacccattattcctaatttttaaaattagagggaatgccctataagtaaagacaaaaataatatttcttatcgtaattttgttctatatatactttttaactatcttaatattaaattattagtttatgtagttatattcgttgtatttaccgtgaatattcggtacagtaaattaaggatggtaaaatagtgttctaaatttgttattatgattagataatagtactactttttcaatgaatttgttattaccacaatttatatttttatatatattattaatccagataataatggtaatctaagagtcatttttgaactaataattgagatttgacctataatatatagtataattataataattattcatgtttggcaatttcaattttaggttggtgactgatattcctggaactaccgggccaagcttcggtgagccgttcatacttcataataatactcttatttactattttttatattatattaaattaagaacgctgtaaacaaaatagtgcggattaataacttttttttaataatattaaataattataatagatataatgttgtattacaaagtatataatttgttttttaattaattgtttattatgtgtaggacaagaggtggtgtgctacgagaacccgcggccaacgatggggattcatcggtatgtatttgtgttgttccggcaattgggaaggcaaacggtgttcgcgccggggtggcgtcagaacttcaacactaaagactttgctgagctttataaccttggtttgcctgttgctgccctttattacaactgccaaagggagacaggatctgggggaaggaggtcctccacatagacatatatatatatgtatcatcatatatcatatataggtattaatatatgatgatcattcttaatgatatcatggctttttattatcaatgccattattaatataataagctttatatatatatattatagaataagatggaagaaaacaggactgcatgtcatgtacgtgtatgtatactgtatatgtattaatattaatgtaattgtatcttcattattgtacttaattcagctggtatgtacttaccttgctaatattatattatgtaataatgagatacacacatatatatggaagttagaatatatatttatagaaaaattttaaagtgaatttcaaaattagcctacatgaggaatttattgtaagttattatattaccaattacaaatagtattgaatgtactataatatttttaaggtgatcaattattccatatattatttttaattttttttaaaaaaattacggtttgggtttctaa

SEQ ID NO: 392421 - DNA, 1427 bp, Cannabis indica
tatatttaaaagttagaaaaaatttatagtttttttttcttcttcatctttcttcttcgttcgttcgttcttcctagaaaatccaaaccccccaacccccatgaaccccaaccaaaaatcaaaactccaacccaaaaaatcgaacccagaaaatctaatcccaacccaaataatccacatataaattaccccaacccaaaaaactcttaccccaacccagaaattgaatcccaagccatctaaacccaacccatattcgatccgacatccaaacaacccatcctaaacacctaaatccctcccaaacacaaccagacaaactggagagatggcaatggcattggagaacgacgttgggatctcggggttcggatatcagtcctcaaagttcttggcgattgtgacgaaggttgatcttggggtcttgggttttcggtgatggtgacaacattggggtctcgggggttctcgatcaccggtgtgggattggtcgacgagaacacaaaggtctcgggttcagtttagaaggaggctgggagggagagagaaaaggagaagaagaatgaggaggaggaggaggaggaatctacgttttaggaaaaaaaaaaaagaaaaataaaagaaaaaaaattgtaatttatttttatttttaaaatttttaaatttataattattttatttaaataattatttttttttctaattttgaattttttaaaattattatattattaatattaagtagactaataaaattctaccaagtgtacacttatgtacactactgtggtagtccactttagtacttaacagactaaagtggacgaaaagactatagagcaaaacgattgttgggtgcgagccataatttttcgagtaagggggtttaaccataacaaacataaaagtataagaaatttagccgcaaattcccctttttaataaccatgcgtttatcttttgccataaaaagtatatattttggcagaaacaccattttgaacaaagtttgcaatctctctttattatcttgggctcttttcataaatatggaatactttagtagagtttacttttatattgtataaataaataatgtaaaaagatatgtgattaaaaaatagagtaaattgcagcgaaatcttcaaaagtttcgctctagttgcaacccaaaatctattttttagtagtaaaacccataaactcgtattttgttagcatttagccatttctatcaaatttttgctttaaatgccatgtgagcatatatccatgtggacacagtatacacatgtcataatttttattatgagttcacataatttaattatttaaaaaaaaaattaaagatcatttaaattttttaaaatgtatatatttactaaataaataaaataataaaattaagggttaattgcggcaaaacc

SEQ ID NO: 392422 - DNA, 976 bp, Cannabis indica
ctaattgtactcgaaatcaaaccaagcatttgtactctgtttcgacaagaaaaactcctccgtttttggattcaactgaaggagaaatcaaccataatttattcaatgtgtttcatggcaaggggtgatcatcaatatacacttttttttttgtaatcttattgttttacttggtatattttttatttttatttagagcatatgcttactttcttgtcgttggcatttttttggtttcaaaaactaaataatatattatgcacacacacgcacaatgcaataattaaattaccgaataacttggtgagagttccgcgggagtgagctgccagcagcggtgacaggtagtgcggcatattattgatagaattaaattaagggtaaataaagatacttaatattttaatattttaagtttttaagtgataaaattaatatttatttttagtaacaaaaattttaatttaaatttattaaaaaaatatttacatacttatatcgttaaaaataaatattaaatttatatcacttataaaattaaaactttaagtacttatactgcaatttattcttaaattaaaaatttctactcgagctattaatatttaataaaagagttttttagattgtaaagaaatgcattcacattctctactttacccaagctattagaaatatccttattatatttagtggcttgctcacccaaattgaatgatctcttgaggtttccataaaaaaacatatacacatatatataatttatgaattatttttttttttcatatttttcatcttcatcaaaaataaggaaataaatcttttggagaagaaacaaaattatcccatttttactagtcctataatgtaatattttcaaaagatattaagggattacattgaggtgccaagtacaacaaaaagtatattgctattgcattctgttgaccgaggttttcggcaactattaaaatat

SEQ ID NO: 392423 - DNA, 708 bp, Cannabis indica
aaaaaaaaaacgtaaaaaagtaacatataaaacaattcccatatatatatatatagccctaaataaggcacccaaggaggaccaccatgcatgtgactgctctctttctctctattataagttataaggaatctatctctttgtgtggaattgtccttattatatatatatatatacatatatatatatatatgtgttagatgtaaatgtagggttattggtcccctacttgggttccatttttcacttgatgatatatcgacaagtggattacgtaccaactttattttgtaatgttgtaatattttctaacatcatttgaaccatctcatctcagtgtatatatatggggatatgattttctccagttattgtactttcacggattgtaatccataatgtacgacagccgtcagatgagagagttatttgatctgacggctgagattgatctaggggtaattaaggttaaaaagtagaaacgtatcctgagacccatctaatgtactacggaatacattccgtgaaaatacatcccgagacaaaatcatatcccatataggctatctgtacaaataggctatctgatactaaataattcatgtggagtaatttgacacacgtgacaacatgtctgtacaaataggctatctgatactaaataattcattcttatttaagaaaaaaaaagataatatatatatatat

SEQ ID NO: 392424 - DNA, 715 bp, Cannabis indica
catactttattttgactaacataggacaagataagttgctctttccgtggaattaaaaaaaaaaaaaaaaaaaatactttgaaatgaaagttgtcattttgtataaaacacattatgataccaaattcaaagcaatttaaaataaagtatgaaataagtcaaaatacggtacaatgttgtataattttggttttgtttatatttttgactgtttggataatttattgcaataataagccgtacttatcagatgggaatgtcttcttaagccgaaaggttattttagtaatttcgtagattaataataaaagttttggatttgatttagtttcttaaaaaacaaatcactttgcaacataaccatgggaattcagatgcgtggcagagcaagtagctaggatcaggagcgtttaggttacgcgccaaaaccaacaatttgcagggaaaagtggggaacacgtgtgacccacacgaaaagggtatagatcagtaagttgttgtagtgagagttatgttgtcgttcccattttctttttacagttatgattaatagatgaagttaaattattagtttagtgaaaagaaacaagttttagtcactggtaaccgtaagtggtcatgcattaatgaatttctttggtaatggaattcttttagagtatgtttggtattgttttttgttttaagttttcaaaaaattgtttttagaaatgag

SEQ ID NO: 392425 - DNA, 1316 bp, Cannabis indica
cccgcactagggacactaacttgaacctggacctgaacgcagacttggacaaggacgagaccccaacccagacccaaacccgaactcgaacctgaacccagacacagaatttgagtgcgggtttgtgtttgagtctgggtcatagtccagttacaattttgggtctaggtcctggtcctgctccttgtcttgatcctgggtcccgatacgcttctagtctcggttccaatttcatgtcacgcggtatgggtcgagtccaagcatcgagtcccttatcccaagtctcgaggtgggtcttaggtccaagtttgggtttgggttcagttctcggatcctgatccaagttctgaggcccaagttctagtcctagtttgcgggcccaattcttgggtctgggtcccccatttatgtttgggtcctaggtcccgatctgggtccaagttggtctttctgtttgggttcgggtctaaggtccaagtgtgggttcgggtccgaggtcaggtcccaatcctaatcttgttctgggttttgggtccctagtctgagtttggttcttgggtcctgggtcttgccttgattcttaggtctgggtctgggtccgggtcccggtatgggtccaagtcccagtcttggtttagatcccaggtcaccggtctcggtccgggtccaagtcccgatatgggttttggtctaagtgtgggtttaggtttgggtcctgttacagtcccaggtttgggttctcatcccagaccatgtccaattctaattttgggtcttggtacggatctggattcgggtcctggtgttaggttatatttagcctatgttttgggtttgtaaagtaagtattttctcgtctattggtgtctttcggagcggttttacgcttgatttttattgtttcaggttcccggggtatcaaagttcaatttcagtgaaatgatgaaaagacgggacaaactggcgaaaaattggaaaaatctgctcgagaggcatcagtagtcgcgaccaccaatgagccaggtcgcgacccttttctgtggttgcgactctggtcgcgacttcgagattttggcagaacctctgattttcgaggtttgcctgtagtcgtgaccagcttaaaggctagtcgcgactaggtacggacgtcgtggttttgacctaattttgatttttctctcaattggaggcacacctctcatccctatataaggaatacgactcagaaggtcaacctaagcagaaaaagacctaaaaagtggatgaaggtggagaggaagctatcttgaagacccggagcgatatcaccttctagt

SEQ ID NO: 392426 - DNA, 884 bp, Cannabis indica
tattataatatgacaattgaaaatttatatctttttaatgatataataataaaaaaaatgtaacatttctttttaataagctgttttcttttatttgatataattttttcagttaatgataataataataaaaaaaatgtaacagaaataaatgacaaattgacttttccttccccctcttcaccgtttaaaaattacaagcattcattataataaaacatttattattataatagtgatctattaaataaaaagtaactgactatagatacattgctaattatatatagtccaatagagtaagtatctcttttgtctctccatctatccctctcactcaatcccattgcaaatcacctgtaggatacatctctccttctcaatctggctattcatgtaaggatattttctaccttattctataatgttactctattttttctctttatctttgaatttgatttgctttaatgtgagttttgttttcatttcaagattaatgttaatttataattttgagaaataaattttgtattctttaccatactatgacacatctatttatattctcttatcattttttaaattttaatacatgtatacatataattcattttttagatgacttttaactttaattcagtttattttgatgttattaatatttttttctctattttgttcagggtataaggatatgttggataatgtttgtcaaaattcaagtttttcattttctttatataacaatatatgttcgactttattttttcctcacaaaagttttggtacccaactccccagtattatatgaatgccacaatatatccattataagaagtctaaaagactgcagaagtcaaaaaagcatatagatatattat

SEQ ID NO: 392427 - DNA, 645 bp, Cannabis indica
ggatataaagtgattataaataagtaaataaaatcatcaattaagctacaaataagagaatgaaaaattctcttactttttggttcccattttaataagtatttaataccaaagagaaacaacccacttgtttaagcacatgagtggatattatgaaatgtgagtagtaagattgttacataaaacattaaaacattatgatgtcatttattttgattaatttctctccaaaatccctcctaaaatatattaactccacaaattttcatttttttttttttttacttattcctgaatttacaaaaaaaaataatacctatatatagtaagttgaaaatatagctagatttgaaagtattctaataatttaattgatctcacaaattcaatttataatagatataatcaattgtagggtttgagcaggtggtaaaaaaaattaattgaaaaaccaatgagtgtatgactaattagaaaaagataaaatatttaccgatttcaccaaaataaatataatgtactccaattaaaaataaataaataatgatttttataatattataataatataataataaaagttggtgtgatttcatacctatataaaggactaaaaatcaaagccaaatctggtgaatggacatg

SEQ ID NO: 392428 - DNA, 895 bp, Cannabis indica
ggagtaacccaattcttgtcaaatcgtaatgacagattggtgcagtgtgccaatatttcatgcacaattgacataggggtttgttggtggaagagggttgaccatagttacgaggagggaatattgatgagttctcattattgttcattctcccagaggcaaaatgatgtcgataggggccatttcttgagccaaaggtgagattgccaaccattttagtggagatatccatgatggaagtgtgtctttcaagacgagtttcatgacataaggagtgcttgaacctcttcaagtgtgagagcatcacttcgagaggtgataccaaactcaacatgattaaactccggacccaggccattgagcaaataaaaaataagatcaagatcagtaatggagtgaccagcaatagctaaagaatcacaaattgagttgatcttatcaacttagtgagagatgctaaggttacctttatgaatgttggatagttgttctttgagttgaagtaacctagctttgactgacttgaaaacgtttgctcaagggccatccaaacagcatgagaggagttgtagttggagacagttccaagaatcgcttcagtcatcaaggatcaaagctaagaaagcaacaactgatctttctttcaccattggagataaattggattgggttcaccattgacgagtttttgtggaggataccagtaaaaaggatctcatcaaggtcatgtttgatgaccgtgggaacgacctaggatttccaagcaagaaaattaactcgatcgagcttgatggtaagggaagaagtcaaggaattcgagaaaggattccattgaggagtagcagaggcagcagcagggggaggcgcctgaggtcaaggatcagtgacaccaact

SEQ ID NO: 392429 - DNA, 583 bp, Cannabis indica
tcacgcccttccttgctaacatttagaatcaatactagactacgaacctaagcaaaatagccatattcagctcacattaggtatatatgaaatgtcaaattgtatagtataagcacacatctttgaattaaaactccatactttcttaatacgacgatgtaaattataattatagaaagcattttgttggttttcacaaataatttatattgtcaaaataagatttaaataattaagtgcaacaaactattttgaattttatttttgatacaataaattatttagattcagaaaacgtaaaatatctattataacaataatatataatacgatatataaaacaaaaaattaagatataatttctttagtatcgaaaataagaaaccattgtaagtgatcccctacctaagaaaagaagttcatatatatgtgtatatatatgtatatatatactagaagaaagttacgtgcttgcacgtatatttagttttatgttatatgttctataatttaattaagaaagattcaataaataatcatataatttaaaataatttaaaaactaattttaattagtgtgtgg

SEQ ID NO: 392430 - DNA, 737 bp, Cannabis indica
gaactttgctagatttttgagtacgtatcagttattaataaagaataataatacaatctgacttgcataatgtattgttcctatgatggtggaactcttacaatatgtcaacaaaaaatacaataaaatttattgaactgcctaagacagatacacaatcttagggagaaatataaaggaagaagtcattcatgaaaaatagaaagtaaaataattgcaaagctcttcaacataaaacaaagactacaaagtaatagaagacatccacataatagaagactacaaagtaatagaagactacaaagtaaaatgaattttagttaagttaaacaactctttgatcttgaagattcgatttgaagaaaattgcaaacagtttcactaacaaaattgataagcacattaataaggaaggctaatgcaagagtgaaacaattaacttccatcatataaaagttacatacactaatcataattcttattaccaataaggtggaatgttgaactcacagagatatataatactatttttcactatacactaataactcattgtattgtatcattagaaagcatttcaataatctcaaagaaaattgattaattcattgaaaaaaaaaaagaccttggataactctctggcatgctatggattaattaagatgactctattaaattgactttctcctccttgagccagcactacaaaaaaattgctacttttagtgataattttt

SEQ ID NO: 392431 - DNA, 987 bp, Cannabis indica
tttcttttctgacacaagatcagatattgtctcttgagtcagatcatggtagtgcacacacctcctctctatacacatgtttttttcaagaactcctctaacgactttgtctgtcaagcgtggtttctgcctgatacgtgccatgcgacgccaaaagttttcctacttttacggaaccatcatccatgagaaaatatcttctaatgggccctatagtcttgtatattgtgtatttttccctgatagtggaccttctttaacataaaactgaaacggttcacaggtatgcccgaacccgaagtttagcctatataaagccatttacccttcatgttggggggcaggaaaaaaactagccaaagctctgcaaaaatattttctaaagctttcttcttccttaagagaaacttagaaactttaccttatagctagttagggttttcattgtaatacttatttgtaatacatttttaaagcccaaaaggccaatatactgactcgtgaactagggataattatcacccgaaccacataaaaattatccatctcatgtactgaatcattatttaatatcttacgctttcaaatatttgtttctaaaaatctcggtaaaaacatactaagccttacagttaatgattctattttcagaccattaagataattttgcaacaaattcagctacaatatctatggctaagaactataacagttttggtataagctagcatatcaacgttaagtatttagccataaagaagtgttacaagtggtcattaagcccgcaacactgaattgaatgatcgcggtatccttgactaaaggcatggtgcaacataaattcaaagatcataaagtaaatatgagattcagctttacccttatgcaacttttctttgtacaactaaaattattaacgaagctcttatttcgatattttttccatattcatgtgcaccttaatttcatctgagaaaattatcttca

SEQ ID NO: 392432 - DNA, 2083 bp, Cannabis indica
gttttattgttgagttgagcaagtttgaattcaaaaactcaaacttggctcaacatggtgaatttttcatgttaggttatttttggttctattggttgggatatgtttgttatgctattttttggcatcctggagcctagtttgaagtttggtattcgaatttgggttttttttaggtcttcttttttttttgtttttttttttttttttttttctagcagtagaaaacagtaggccgtttctctggaaactgtctactagtggtagtatacctagaagaacagtctactattttttctagcagtttttccagagtctcactttttcgagtttcctcgatatttagagtattgccatactatttatcgatagtgaaactactagttttgagtgtaggtctgccaaaagatgttagcaagttgtttacccgatttacgtgattgtgacatagggcctccatttagcacgtgattttttcgttcaggttggccgacacacttgaataaggaaacgagataagactagcataacatatgtatatgtgtgtgtgtgtgtgtgtgtgtatgtaaattgcatgttgttaagtcattcttatactaccaacactagtatggtagcggtacagagtacatttgtacagtatatgatgttcaaaaggttatgatccagtgttaccaacactagtacgggacgagtacgtattgcatgtggtacaacactcagtgatactcagggtaagatttaatgctaccaacactagtacgggatgaatacttagtgcatgtggtataaaggtcatacttctattaagaacgttcttgatgcatctaaagcctagtaattaggtgtatgggtgcctagatacaagtcggtattatgtattatgtgtagtgattttcttactgattttatcagctcacaggtattgtttacatgtgtaggtgaaggaaatacaaaggctgagcaccaatgagtccagagctcgagggtgattgtacatatcaggatagttagacctggagagtttggtctcgagacaacttgggctttcattttgtattcgtaaagtgacatgtctataaagtgcaatttgaatatgaatataaattttaaagatgggatctcaagttttcgtacggatatatatgtttataaaagtttaaagtataattaaaagtttaaatttgacacgacttttcgagaaaccctttggttagcataggattgcataataagtagaaatcactgtagtgtgcctaagcatatagggcgttacattagggatgttaacctgggtgctaggtgaaaccctttcggggtgtaggttcgtgtaattttagctcccatggcttagatttggatgcttcatgtcttcatgatacagaatagtgaaagattctgagttggaaataacttattgggatccaaacacccatttcagagttctcgaagtcaacttgtcgcagggctagggacccctcccaggtcgacttacgatgattcggaactgctcaactctgagatattttctttcttgccacgtgtcgaacattgagttacacgtcatcaggacacttttagtgtaaacataaactaaattaaatatatatattttctttatttttctttctttctttcccttttttcttcttcttctctggaaccattgagagacccactttcttcttcctatcacctacccttctcttctaacagatttgttctatctatttggaaccataaaaaatttcattattttaggggccctccgctgctcctcttcttcgaaccacaaattcaaactgtaccagccttatcattccaccaagttgggttcccaactccacactattaattttcatatctttagccctagtgtgagcccagggtcgccgctttctgaaagctcaattcaagaggcaaaagagattcttttatgacttaaaatgaatttaaaagcaattcaatcaggtcattcgcgatagcagccattactaatagataaagcctcttagtacttgactcgaaatcaataccaaccaaaataataaaaagttgtttttttgaaaggtaaaatcaatct

SEQ ID NO: 392433 - DNA, 1163 bp, Cannabis indica
atagttctttagtattgtggttgtaacaaaaccagaatcaaagtatattgtcaacttgagcactcgatgcttggtgttccgggtgctcaaaactaaaaatactttgattctgattttgttacctcaaatatatttgtgatagatttaattcacgtcccagtaaaaagtttggctcattttcactaaaatggaccagaaaccaaaaccctagtaggtttgtcaacttgggtgctggacacctgcattacttctaggttgttgtttcatgtatttttagtttccaatccttggatttaaattcttcatgtcttcaaggtacataatactgaaagatagtgagttagaaataacttagtgggatccaaacatccattttggagttctcagagttaacttaggtgtgcagggctagggacccctacaggttgactgccatgactcagaactactcaactcctgagttttttctttcttcccacatgtcaaacattgatgtccatgtcaccagagttagttttcgggtaaacatatttaacgtcaaggtacctccaactatcaataaattgtaacgttaggtattttagaccgaaaaaaataaacttaaatatttaagtgctataagatataaaacttaaatattttcaccacaaattactttaaaaatacttataatacggattgtatgtggcggttattttttcattttttattgttttgttggacttaaaataatataatatgaattctatatttatattttcttttattagtgcattatttatttatttatttatttcttttgaatgaaagattcattaagataacaaattaattgttataggagtactaataaattaaagacaagcatctacctaaattgagactccacccgaagccgtaatagatttagctagtgcaagaattacattattcgtagaacacaaaatagaacaacaagtccgctaactgcagctaataaattaaaaacagcaaaaataattcttaacttctaaattaatttaaaataccactactgacgagtcacaattagcctgatgcacctaaaattccagttgagatgcccataacaacctctcctttactgccaaatgttagataaattaacaattaacccaagatctatttgtatataacatagaaca

SEQ ID NO: 392434 - DNA, 1075 bp, Cannabis indica
tattatcagtatattatttagaagctaaactttgaagagctctatgggagtagcatttttttagcagtggagatatgtttcagcaaattctaaatgagaggagaataatgacaagggcaaagttggtagattttttaaaaaagaggtagaaatgaaagactataaaagagagggtaaaaataaaaaataacaatataaaaagggtatagaatttaatttcctctaagaaaaccctaacaaagctcaataaaatcctaacaaaattctagccgcctaaaccacaaaaaaaaactaaagaaacgcccattctttctctctctttctcttctctttccctctttatttgactcaccaaccaccgtcggccttcatgaaaggcattttttttctttcttctttacctcttagcccacctactgctagccctagcaccgacgacgcctcaaccataaagatcccaccaccgtcgacaaaaatattgttactctctagcatcgacggcacccaaccttaacttcctaaccaccaccgaaggtcccatctcttttttttttccttgccatgtttttctctttgtgttttctcttaccggtttacttttgttgtttgcatgtggttcttgtagctaactaaatttgtagtgaatttttttttttaaaaaaaagtgtcactttacgtttagatctatgatttcttggtaaaatcgaattctctagctctatttatcattctccgtcgttgaaactgcatgtcattaaagtaaataaaaaaaaaaaatacccatggtggtggttatttgtaaataaccgccaccatagggtccctttacaaaaaatctcacattagtcactacaaaacttgtaaccaaagtaaaaaagtttggactaattataaacaataattcgtatgttgtaactaaaaagtctgtgactaaatatattagtcacaaaaatcacaatttgttgtgactaaatgtatttttagtcacaatacttgttgtgactaaagtgaattagtgacaacttgtatctaaatattatgttttaattacaaataattttttgctgtgactaaa

SEQ ID NO: 392435 - DNA, 1605 bp, Cannabis indica
cgatgcggttagtaattttaaattattaatatgcgattcaaactgcactgcaatgcacattataaaactaccaatttttatatttgtttaaatctaatatgtgaatgttcaactcaaagtccactaattattatattattgaaacttttttttttcatatttattttcaaaccttatggtatttttgacaagtattgctcaagctttgttgtatttgtaatagttaaattatttggtaatagtccaaaccgcaaaaacagcaccgtaccatttttagcagtgcggtttatgtggtttttagtttcgcggtactggtgcggtttgagaaattagaaaaaccgcatgtacgggtggtttgaaaaaatggtcaaaaactgcactatccgtattgcgaacacccctagtatagagaaagtttttactacccgctaagtgaggttaagtaagttaaaattatttaagactaattaatttttttaaaaaaaattaagtgtggaaaataaataaatattttgttacatatgaaactatatagtaaataatttaaaattttattaaaatatttattacctgtataactgtctttttttaataaaagaaacaaataaatatttgaattttatttttataattataaattatttagaatttgtcaaagctttacacatagccctaaaatattactatgtaagtttttccatacatagatattttgtttggagaaatgttaaaaggcatcagtgttgcttagcactctcttatgtgtgaatatcgctattagtccaattaactatcgggtcccatataatttaatataataatttttaagaaatatcgctagctaatcgcaacgcaacatgtcgagaaggtgctaggcaccactagtacctaatagtaatgctcttttatttgagataattggtaaaactaagagtggagttaattgatgaggcgtctcaatccaaccggggacatggtttggtgggaaggtgctttttaagtgtggacactaataactgcaatgtttctattctacatatatataatttttataaacaaaagaaaaatctttgcatcattattgatgagaaggagaaggaccatgtgctcagagtgtaaagctagtacattaaatacttttgcttcatacattaaatgattgacaaccatttctcccataaagttgtgtgcctcctttcattagtatgcaatgcattggtagaccaccgccaacccaaaacttataaaataaaataaaacataaattttattttagacattatattttctaaaagttattaattaataaacaatttattttattaaataataaaataaattatatattttttaaaatggtaaaaataagactctaaatttaattttcaaaaattttattttttaatataactaactataagacaatttttaacacgaacagatacaaaaaaatgtaatcatttttgttataaatcggattattattaagttttattttgacaaaaaataacttcaggatccttgttgttactgatatttcgcaacaccaaaaagtataatttaactggaaaaagaaagaataatttgagagatgacagatgcgag

SEQ ID NO: 392436 - DNA, 828 bp, Cannabis indica
gccgaccggtaaccgccccggtaggtgtaccgaaaccgtgaagtgtcctcggaaatgcatataggtgggagagaagtactatcattgttgttgtcgtttattgaatattcttgccgttcaggctagaggtggagttcttcatctagaaatacgcagcctctcattatttctggcttccaccatagtttaacgtagtctttcctcttttcccatgtgttcttgttcgaagcgattccgaacacgatgtgttccagagaggtggtggtggtggtggtagtactcctccgctgtgaaaacaagtcttggacttgaaaatatgtgttcataaacttggtgtgtacgagaattaaacagacgaggaagtatagtatacatgttgaagatgatagtatgataaagcttgtcaaacgagaataaggttttgaagaagtactactacttagttttaaaatttgcattttttttgttttgtttttgttataataatattgggaagaggaaaattcataccttataaaacatctcttatttattaagagataatgtagtttgaataaaatacacgatatggtaagaaaagttgatgatgagttgaattttagactttgacaactaataaattagttacataaccatgtgtggaaccaaaacatatggtacgtatactggtatatataatatagaaaatagcactaattaataaagtgcaaagtcgccaacttagaccatctctcccataattaaggtagaagggaaatttgattttctatacttaaaagttttcaaaattttttttttgaaccaatacattttacactatgaaaaata

SEQ ID NO: 392437 - DNA, 906 bp, Cannabis indica
tgtttaatttggacaggatatggtcatgagaaagaataatgtaggaagcctacaaagaaaacttgggtttaaaaggggaatatgccatcaacatcagttacagagaggagtgaagctgatttcactaatacaatggcagccaacaattctgaaatgcgggaaaatatcttatagttgaaatgagaacgccacatcaatgggtttctccaacaaaaagtggttgtcaaaaaacgggaagtaaaggcttcgaattcaggacctgtgatcagtaatgccttcaagcatttggaggatttaacaatgggagatgtccaagtgggacaaatactgtgtgaattaatttttactattgatggagggggagatcctccacaaatagattgatagaatcatgttcttgaatgttcgaggagctaataattgaaataaataagtagaaatttaacgtaatgtcaaagtaaaaatgttggattagttagcctcgttaaaacaatagttaaagctccaaatcttagggctttattgttggaattattttaccaggatcttagatttactaaccagtatgttattaatatcctaaatatgaatttctaaaacgatatgaaataaacacatttaaagtataagaaaccttacagtggttgcagtagaatataatgtctccttccactcagatctctcacccttgtatcatttctgtagcagagtatcaccaagatctgagtccgaatctccttctcttgaaattggattcttcacagccttacacactatgattgagtactacttgatgtgtgtgggcactcactctttcactataggctcggtttagaagagaggaagagagagagagagagtatggtttcagctagggttagggaggaagctcaaattttatctgaa

SEQ ID NO: 392438 - DNA, 549 bp, Cannabis indica
ttttttttttttttgtaaaattccattatcaatacatgataataaccccaataaaatatcaaattttataccttccactaatttttacaaaataaggacattattttcctaaactactcaaaatactctttttatttaattttctctcctagactttctctctcttcctcgtgctctctctccaccacaccgagaacccaaccgatgtgatagaaccaccgagagaccaaacgatcccccaaacggctacaaacccacccaaaggcctaaagtctcatccacttcctcattctagcatatgtctctctctctctctccattccccgcaggcgacccaacgcccaccaccaccaccacgacaacgaagaacaagattcaacctagagcaggcgacccacgacaaccacgagcacgaaccaccggcagcaggccaccaccaagagactccagagtcaaaccgtcgccaccaccaagctcagtaaaaaagtaagttttttttttaaataaaaaaatagatttttcataaatttggatgtgaatttgtgtatg

SEQ ID NO: 392439 - DNA, 420 bp, Cannabis indica
aatatattattcacatcattatatatagggtgatatataataaggcaaataagtggagattttattttatctttactcaataattaaacgatttgtattggatggttagtggttaattattatgttaatggtgtaataagagtaaattaatattttgagaagctaattcaataattgcaggataaaaataattttttattgttactaaaaaagtaaataattaaaaaaaaatgttgtgattgaaatagtattctaagggtaatttggtttttttttagtagcattcgatcttacgaccaaataaattgagggtaaatatcattttagactttgtgttttgcaagagttattaattggaccctgtgttttgttaaatgacaaaatggaccatgtattttttaaaatagtacaaataggacc

SEQ ID NO: 392440 - DNA, 1229 bp, Cannabis indica
tttatgaaactttttctctttgctaaccagataatgttattataacttcaggacacacatttctttacatctcatatatatccattaccatatttataataatatatatgaatgtacatgcaattaaagtacagtacaaaagttcaaagatctagtttattagtgcattaaatatttgaaatgaaagggacatagaaaaaagggggtaaagtatttaaagaattaagggtgcgttctgtatggtttttttaatccatttttttttatttttaattagaaaagtaaaaatattaaaaaaaaataatatgttctataaaattattttcaatttttaattttaaaataagaactattttttttttaaaaaaaaaaatcattttcaaaaaatttaaatagttttttttttcttaattatagtttatttgtattttctgttatcattatttttgaccctcagctcgaccctagccctagatcaggcctggcctcagccctagccccgaaattgaactcggaccccgactctagatttgaatttcggagccaaaacaaagaccatgtaatatccagattaaaataatatttaatttgtttttaaatattatttacatgataataattatcttatttatttgtgttgttagtgagttgagattattgcttagagtagttgtggcaattttcaaagatagttagagttgtattaactgtgaaggtaaaatattatggtatttatatgtaatcatttaattaaagcccaatataaaaacatgattttgtagtttatttagtggatttaattatttgtataaatggtattaaataatactattatcgagttaatgttgagaaatttgtaagtttagagaaatttacaagtttaaaaattgtcatagtaaaacaatcatatttaaagttgtataactctgattaaagtgatttcagtagtgttaaagataatcaaagatatataaattttgtaaaaataagggtaaataccattttggaccctgtgttttgcaaaagttatcaaatggacaatttattttgttaaatgacaaaatagaccctgtattttctaaaatggtacaaataggactctgaattgattttttgtcaaaataaaatttaattataatccgatctaaaagtatcatgacaaaactgtttacattttctgtatctattcgtataaggaattgtttttaagttgattatgttaaaaaaaa

SEQ ID NO: 392441 - DNA, 973 bp, Cannabis indica
tggtaaaacatattccaacatcagcaacaaggagtttcttatttacctctcctagtcctgtccgcacgacctcgagctgggtccgcgcatattcagtgtcctttttagccaagtccacttcccatcatattatgttagaggtggcgagattcttgacagcgaccgacttggctcgagagtatgcataagccatcttcacaccaatctgtgcggagattgcattaaaatctaaactacccaaaaagtaatgaaagaaaagtgatagagggaacttactcgagaaatcttcttcaaaactcttcctaagactagctccaaggaaaactcactgtcggcccgggtcagctgttcgttcactttctgaagcgaccgagtcacgtagtggttacgcatgtattttcctctccttgtctccgtgcacaacaccacggttggggtaagggcgataacttgctcaaatctgccattgactagctccgatccagtcttagcatgctcaggtccgtctgaactccctcctcgacaacttttcgatttagcgaccttcaaggtagaaggatacacagtaggttgcttcccagagagatcaatgacctcttcaactggtaccttctccttggtcggagtctcaccacctttagacttcggcgccggaagggacaagctcgagctcccacctactctcttcttcaaaaactatatcatcttcaaagatatttctgcacggaaaaaacaacatagtcagaagaagacataaaatataagaaggccttaaaatcaaggaaaataaattcaagttgaagtactctgcacgccggtaggagcgttctcccgaacaagcacggatggagcatctgttgggttttatgccctaaataaaactctatttcaatgtaatccagattattcaatatcaataaagtaacaaaattattttttattcatttgtgtatgttttggttcacttaatcaa

SEQ ID NO: 392442 - DNA, 1628 bp, Cannabis indica
gggatttacaaaagtttaaacatgtggcttctccctatggccatatactttctgaatgtaagactatgtgttcgagtgttggtgatgtttcttttaattttgttaagcgatctgctaataaggttgcgcatgcaattgcgcgatcttttcttgttgaggctgattgtacttattctgagaatgcattatccttgaattatgcttctttaattttgaatgatttgatttaataaaatttcatcatcattcaaaaaaatatatatatatataaaaacttaaattagtatttattcaaaaaaaatatatatatagtagaaaaaaaagtttttgagtgttacgtaaattggaatgaaaagtctaattaatagaaaataatggaaaaagaattaagtcaattttcttgataataaatagatctttggtaatgaaaagtgatgaaatatttggtgagaagacattacgtgtatgagtcaatcacttgtccatgttttgggcacgtggaagagttttagaataatgatgagatcaactcaccttaaatagattttaatctcatcctcaaataaataaataaataagataataatagataactcttacattaaaaaattgataacctattaattaaattattagtgtttttaattaactatgatagcctgataagtcttgagtcaaattctatcgcttagcctgaacattgaagatgatgttggtttttgttaattaatattttttgttaattaatattgagaaaaacttgtattttatttttgggtacatacatcaattatgtttttcttctaatatttaaccatataaatatttaaaatatatttttttaaaacttcatatagttgtcatttgattagtttgtgcaatatacttttcaataggtgaaaaattaacaaaaataaaaaatttgctgagttgggatggaagaagttatatgaaaaatgtaggaattttctttcagcatcaaatcaagaaaggaaaaaccattttcaacatcacatcaaatcagtatcagattataactataacaataacaagcaattaatagacaatattttgggccaaaccaaattatgggcttcactcattgtcaacaaatgcatccaatgaaagatatgtgaatttaagaaaatgataccttatataggaatatatataagtggtcgaatacaatacatttatttatgtataaaaacaatataaatgacatatattgctatctagataattaaatataataatttttatagaatattattatttataaagtgtcatttcctactagcaatctcggtgtgtgataacaatgctttaaaataaaatagaatgattcaatactaaaaatttattaaacgatatgcttataaggctgctcattgtattgttagagaattttcttttggaatttttacatggtttactgtattttagcattttattacttttatactgccatacagtagaaattacaaaaatactgtacatttatactgtcttttatactgccacttgtcactttgcatgcatttctctattttttttattaattaattttttaaaaaaattgttgatgtgatgctcatggtcaaatcatggcagctcacatttttttt

SEQ ID NO: 392443 - DNA, 1268 bp, Cannabis indica
aaatacattagttttttacgtagtttttataattaaatttacatacttcacgagtctaatattagtttttgaatatttacttgaaaaaatattttgtgttatcccaaatcttgtttggatgacgtgcatgttcttttaagtgacacgtaccgtgacattaatatttgggacgaaaggaaagatccttatagaatcttcgcccaaggcatatgctcagtctgatgtaaataagagacgagcaatgtaaaactcactgcacagacgaaacgtaggttgacctggttggagagaagaggtcgaaaactcgtatgatctaaacaaaagggaaaaatacgtgacagaatgcatcaaagatagtttcctattttaaatgtaatcaagtcataatataaaagaatttccatatatatttctcatgatttaagaaagtcatgtattccctattttcgtagcttgatagcttttgagaaactaatttttatattgtaaacctcttctataaatagtggagcgatttcattgtgaaagaatctgaaatcatttgtttgagagagttattacgctgttcattttttttgtaaagcacatataaaatctttccgagtagctaagaaaatcacatataaaatagaaggttgggagatcttcatatttaaattatatcgtgtagaacaaaccatctttcctttccaacttcatttttcgctttaaaggttgatcaactcgaactgaaacccgaacacgaaaatagtctccccacactcatataaaattctttaggtcttttccgataaaggttcctatatagttcgcaatgtcttgaactacttttttttatatatatatatatatatatatataaaataaaacccactttcatctcatgcaatagcaaattcaactcgatcaaatggggatcctttccttgtttgactcgctcaaagatcaaaggaaggcgatcaaacgtccatggactatcttctaccaccctagtaatattaatgtcatgataaaactgaaataaaaaatggttatgattcaattctttcacatacagcgtgtgccctagttgccacgaagatgtcattttatgttgcatagtttggagaatattaaatgtccgatttgtgagaaatcatccaaccaaacaccattcctcatcaataacagatagttcttttcatatcgcaacactgcttcctcttcgtcctccatggcaaaaccctcctacctttcctcaatccctatagtgcctcgatcatttaaag

SEQ ID NO: 392444 - DNA, 867 bp, Cannabis indica
aaaaaaaaaaaactaaacttataaatgtagtctgtattattaagtaatattaaattgatagttttagtgttaaatttataaaaaaaattatttaaattttcaaaatatagaattttattaaataaattgataattctgcttaatagtttcaatatagtatttctgaattaatggaaaaattaataaaaaaaaatttaaaaaaaaaaacaaaaaagttttacgatatttaagaaatctatatgtaaaagtatagtgacattgatttttcttttttctttcactagagactaatacattgtaatggttttggttatctaatttgtattaatggaattgaagcttgagattgagagtatataagaagataatttccaaccaaaaagaaaagaattgaattgaataggccgggaaaactattacaaaaaaagctaagaataattaagtacatcaagaaaaggaaagtagtgaataaagacagacaatattgtataggaaataattcctttccttctaatgtttttctttcttttttttctttaaaaaaaaaacttatccattacattacaacaattaatggcacatcttctttttttttttttattattcttttaaaatgtaaattaatagattgggattgagggtgtactatgctaatataatattgaacactaatatcttagattttgtgtgtaaaataaaaaaagtggaatcaaaagtctaaaatacggcaatcttgagcattatttaaaaccttaagggctcgtttgaaatgccgtattaggtcctattgtattgtattgtattatattgaattggattaaatatcatatttttatataatactatgttaaactttaatttatacta

SEQ ID NO: 392445 - DNA, 842 bp, Cannabis indica
agaaaatgaaatttttaaataacataaacttttatataattataatatagtgaattagatataacatatatcattatcattataattaaaatcttaataattaacatcaatctaaaaatctgtaatttgtcaaataattagcacaattttttgtttaacctacagttattttgttctcacaacataacctcaattacttccctatttactgtactggtcccatataattttaatcatattcattttccgtatgtaataatcagaaaactcatcattgcattaaatatatatcatggtcattttcaatattattattattattattattattattatttattatgccggtcctttgaagaataatcttcaatctggccttgagatataattgcgttctcggatagctttatcttctaatgaagtaatgattatatatgttgttcatttcataactttaaatatataatataaatatagatacatatatttatagatattaaacaagacatgaattataaaaacaagaacaatttcccggcatgcatgaatgaattaataattcggtttgttacatatttctaagacacaagcatgccttagtgactcaattgggatgattatatgtattaatacaagtgatttttagtccctaaattatcttagaagcttcccttttaaccttaagttgttaatataatacacaaacagttaaatgatcataagatagcaaggtttaacaaagagaaaaatgaaattagtcatagatttcttctccttattttcttaatttgcatcatatatgatgcaattttatttattagtttggttctaagttagggttc

SEQ ID NO: 392446 - DNA, 2405 bp, Cannabis indica
gtttctaggttagagttatggccttcatataggaggccttaaccctagattacaaattgaaaccctagacatttgcatagtttactagttaattacaaaagataaaaatgccattgaatctggatattattcagctattctgttgggcttgtaaggcccaatttgctgctcatgagttgctatctacgtgtagaagtgcacaggaaaccttgcagagcacctcttggctggccacacccttgtggaaggcaggctggctgaccatagggccagccaggggtggcctgccagctcctatgagggtgctggtgtgtcacttgatgcccgtttgacgttttgggggttttgtttgcttaggcgttgacttgaccttcttattggtgagttgtactgccacgtggcactaattttgtccacgtaaacatgccacgtcaggaggacaaaaattggggtaacagaacaatttttccactggtattttttgacataatggttcacttagtgatccatttacctaaagtagtgatacttgggggaccagtgcgctacaggtggaggtatccaattaaacgagccatgtccgtgtctaaataatatgtaaaaaaaatcattccggatcggaaggatttatttgtgaagcttatgcaactaatgatgcattaagctttcattccatgtacttctgggatgttgaaactcagtttaactgataaaatcaaaatagtgatgtcctcccacataagcctgaaacagaattctttatattcaagcatgttgggtgatccatttgtaagaggaccatcgtgtctttacgaatgcaagaaaaacttaagacagagtggtacattctgaagaattataatgaagtggagaagtttatcaagtaagatactttgtgcattcttaatttagttttattcactcacgaccttctcttacaaaattctatttatgtgtagtgagcataggaatgagctacaacttaacggtgatcaaaatcttcacacaattcaagagaaagagtttcctagttgcttcatgtttgagtaagtattgcttttgactaattttgtcatcaaaataaggtttcttgtactagtattgatgtaaagaccgcttaagatcaatattttagattattgaataattaggatttattcatgagatttaattattatttataatatactgtggagatttatttaagttgatatacattaattattctacatatgtgaatctctcgttttttgtaattgtgtttggcagcggtggaaagtgaaattaggccattagagagtcagattttgtaaggtatagaattttatgattaatgataaattacccttggatagttttaaacttttgattattatttatgggaaaaaggtctttttactaggttattctttttgtctttttgtgcaccaataacctgaatattagattaaaattatatattagggatgcttaaccttgaaggaattggagaacactttgaaacacatttcactttgtaccattcttctctctttcgaaacacctagagccaacaagggggaaagagctttcagctaaaattcaagagatttcagccaaagattaggagttccaattcaaggtataatacttagctttcttatctatggttttctttagctcaagataggttaattgcatgattttagtgatttgaggttctgtagttgtgcaactattttgggtttgaattctaggattaagagaggtttattttagttgattttgagctgagatagctagttgtgccaaggattactcaaactcaaagttagagagcttaagttggctctctaatggtatttttaattttagagttgtttatgattttctattgcttgatttgaatttattggagcataagcaggtattttggagattattggagtgtttggggttgatttttgtttaaggggtcaatttttgggtttccctgcactaaattggcaaaccggttttgtccctcaggaaacctagtgaaccggttaaccggttggggtttttccagaaaccttagttttccccaaattattgatatttactgtatggtcatatatttcatcgatagggttattcttaagtggatataaaatgtaaagaccgcttagtttaatttggaaattagaagttaatcatgtttaattatggaaaattatttatagatatttaaataattatttatgctgctatttttgaattcagaatgcatttttatgtcatatagtgaaatttcataattttgcattttcggtgtccggcaacatggaactcggtgtatggctcagtagaatcacaaattagtatttcagtatagtgggacggtttatttagacattgggaatgtcgggattagtcgggaatttaga

SEQ ID NO: 392447 - DNA, 1724 bp, Cannabis indica
tatgtgttctatttttaggttattttcatcatgcaattcagtagaaaaaccctagattttatatgcatgtattaagtgtttttagaatagacacttaccagtttattgctaatgtgacttagggccttcaatggtcaagtagttttccaatcagggtgactagcaaacctgaattcaaaattgaagtaagattaatatataaatacccatatgcacatatttagtatacatatattatgaattgccatgtagttaacatatgagaaatggcaatatcggtatacatagagttgcactgggataccgataaatatatatttggcaatactgaaaagtatgaattaacgctaccaacactagtatgacaagagcactgagtgcagtttgatattatggttaattatactatgttaagaatgttcgagactcatacatacacattggatgcgattagtagacttatagtaattgagtgtatgggcactcaattacaagtcggatatatattgtgtatgttatgattttttttactaagtctattgactcacgaatatgtttctatgtgtaggtaaagataaaaccaatgttgaaccagaatgagagcaaaaattgataaagattgtaaatatccagatgtttagacctggagggttgctatctttgagacatcgccagcttagttttaaatatgtcgttaggcgacacttttgactaatatgtatatattaatatattttataaatagattttctaagattctaaattgtaaatgttttataaatatgttaaatgtttagtaaaattgtaattattaaaaaatttcataaaacatacttttatgttaaaatgctttgattagtaaagattagtacaatatttaaaaaaataccataacgtgctttagctagtaggacaacgctaaacggttttttttttttttttgttaaacaaaaatgttcaaaccataaaaataaaaaaaattctgtgttaacgtatttttataatttttttttcaaaattttggtgtattatgtaaaaatttctatatatcttttaaatatttactttacatgcttctacaatttagagggtgcactcatgtactcctatttgtttcgacatacatgagaattttttagtccaatatttttttaatagttgtgtatgttatagttatttaagaccaactataaaattttaagatatttaaaataatttacaatataaaaaatagtgttcaaataatttatttcacatgcgtataaaataaaagagtcatacgtgcaacagactgtttgaactctgttttcggtatataaagtttttttgaatttttcaaaattttgtaaaatatctatatctatatataaaggaaagcacaaacatgatgatgtggaggtctatatgagttctccttcatcatttttagtttcttagttttttaatctttttcaaacttaatttagttttataactcctattattaataatgtaacattctccattaattcaagtctttttatcttcttatatataattaattaataagtaagaattttaatgtttagttaaggaaaaaagaatttaatatttcatttttactcatcttttttaagtgacttttggtatacttgaaaataaataaataaattacaataataatatgtagataataattgaattggtgataatagaataggaaccatcttttgagctatttaact

SEQ ID NO: 392448 - DNA, 571 bp, Cannabis indica
gtgaaaaaataagtgatatatatataacttagaagtatatcactcatataggtttctaaaccatagtagaattttttcaaaataactctaataatactaaaagaataaaaaataaataagaaaatgtataaaagatagaagaaaaaaaatacaatgaaaattttgtagcatgccacttcaattttgtttgtgatatcttttatatatattgatgatatagatatagattggtaaaaaaaaaattaatatttttatcatgatttagaaatgtaaaaatatatattacattcataaaaaatatactataagaaagattaatttcttaaaacttactaatcaatcaaatcattgatatatataattaaaaatataaaagaaaattaagatgaaaaaaatatcatgtgtgatgtcacttcttttttataattctaaaagatattataattaattgagcaagactaaacttttagttgtccataaaaaataatacaatactaattttaagacaaactgaaatggaacaaaaatgaattacagtagaatctctattcaagaatactctattcaaaaa

SEQ ID NO: 392449 - DNA, 947 bp, Cannabis indica
cctggtggatgaatcatgaccgtgtgatcagagcgtgattaatggcttgatgttcttctgttcatcgtggctgtagaggatcgttctcagttaagcttcggctttactgggatggtcacccggttgtctgacaggttataatatatttttgttttggtttattttaaacattaatgaaaaattaaacgtcaaataaaaaagtgaaaaaagaacacgcccggtgggactcgaacccacaatcgcctgattagaagtcagacgccttatccattaggccacgggcgctttttgatattggtttgtagttaaaatatacatatacattgaatggagacttgtagtcgtgactcgtgaaaacgtttgttttgttgcttcaaatattattctaccacatttacaaatggtgattagtacacatttaaaaattcaattttaataataaagactaattagaatttgtcatgtactaattgtttcttcaaatttttcaagctgttaaaaattctttctgaataattgagtttgttaaatttgaagatttttgtttaattttactaacgagtgtctaacgtgaaagaaaattcaaaagacatgatttgatatatggacaatcactatattgggtatctgttagtaaaattgaacagataaaaatctttaaatctaataatttttataatttaaaaaaactttttaacaatttgaaaaagttaaaagaatacgatttaatagatttaaaaattcgagagtaaaactcttaaggtgtacatctcccttttaaaaatttatatttaaaataaaaaagttaacttaaatttttatcaagaataacgtaaattaactcacttaatttttactaaaaaattattttttttagtaaaaattactctaaagtggtgtttggttggaagtaatgaaatggagtagaatgaaaaggaaattatttt

SEQ ID NO: 392450 - DNA, 1318 bp, Cannabis indica
aaaaatcttcttttccttttttctatttgagatgaagaaaaataaaaaaaataataaaaacattgaacctgtaaattggagtaaatgtcaaaaaaatacgtaattaatatctaatttaataaatgcataattttcctccctatcataaatagcatatagtattaattgttggttaaaatgataaattaagcatagaaaaattaaaaaaaaaaaaaaaaaaaaaccaaaaaacaaaaacaaagaaatttagaaattaattttctttcaacaattaaatttcttttattctaactttgttttatttgcatatatttaggttaaacaattacttagatttgatttctaattttaaaagatgatgtctctagtttttttgcaagcaataaatgatttattttattaatattattaattaactaatcatatttatttaagatgaaatctacttattaaagataaataataacaactaatttcaagtcacacataaaacatggtggtaattacacataattatcatttctcaccaataaaaaaccaaatattagtggaagttatttttcaaagtctttgcctatcttttgtagattagttagtctaattttaattagcacattttgtttaggtgttgcctataaatagatttggataatttatttgccatcaaaaaaattgctttatcatttatttaaatttattatcttcatttaaatccatatgccatttagtttatatttgttattattaatcctttgttcatataattgtactatttgttaatagtcacactctttttttttaatgctttggtatttctttgttagtttaggtgaatcttgttattatttaatctaacagttatatatagataaatattacttttaatactcgtgttttataaaacttattcatatctcttaattttattaaataataatttaaattatatatatatatattgttgtaatttcagcggaaataaccttgaggattcaatcataaaatctgcaatgaactcacaactttgacagtaaaatgaacataaaccaattaatctccacaatgaatcaaatctgaaatcaaacaaagaacaacacacgattttatcctggttccggtcctagagatcaatatgatccctggccatactccagctgagaaacatcaccaatcttcattaatatgtgaataagagagcaacagtacaattacaataaccagagcaatcacagctcagatggtactcgatacacaccagagaaaacagtcacagatttctctctatcaatccgagtacaccccttgttcttgaccctct

SEQ ID NO: 392451 - DNA, 570 bp, Cannabis indica
cgtgtgttacaaaaaaaattcaaaactatatttttcagcacttataaactatttagaaattttttcaaaaaatttacagaaatgatgtgtaactataacgaacatcgccatgaatttttttttgaaaaaagtatctgacatgtgttttcgagcttaaaggttgctaataggttgtaataggaggttaacggtaacactccttaactttttaaagtaatttgcggtgtaaatatttaagtttaactcttggttgcatataaatgcttaaatttaatttttttttacaattataatacttaagttatatttgtagaacttctgtatatacctggcttgttaagtgttaagtcattatctgcgtgttttcttattagaatgtttaaattatttttaaaataaaataaaaaatttaataacttgaacaacttaaaaactgccatgtagtgattgacttaatacttcacgaccaagtagctactcggagtcaaacttagagcacttccaactacttctctactctattctttaaaatacatcaccaaaactctattttatctattttacctcaaa

SEQ ID NO: 392452 - DNA, 1567 bp, Cannabis indica
ggttaggcctggtgcgtacgatctttaggacagcaggctatattttgaatgggcgctaggcgacaacttttgtatcgagtattttatattacgtttgcaaatattttaagtacgggatcccatattatgtaaaaagttgtatactttcaatttaagggtaattaagtaatgttttaattaatcacgattttcaataaactcgttaattagcaacagattggataattaatataaaatcacggtaacacgcctaaactagtaaggtattataatttggcatcagagccgccaggtggtccttcaaagatcgtcacgatatgtacaatcatcatcagagataagctcgactcacggtttagtaagcctttattacttcaatagtttattttactagtatgttataagaaaagcatgttagtagcctgatagctgattaggcacatgtttcattttctcaagtaagtggtaattagtaatttattgttgatcgcaatctgactaggctagctcttggttttgcaggctattctattagaatggacgccaggaggagcacgagaagctagggtaattcggttggatccagtggcagttagggagttcagtttcccccgaatatttgtggccgaggcagaggcccaagaggtagggcacacggacggggaaatgttaacccaccgcaagctgcccaaaattaggagaacaagtttgccacaatgcaagccagaatcaatgaacaagatgaagatatcaaacacttgagacagtagggtgctcctgctaaacctgtgtagtgcctgtggcttctgcccctgttgtacaggcagggccagttactgttgtgaattgaatggagtcactatatgaaaggctccgaaagcaggctattatattcaaagcattatttattagggatcccagttatcttgcaaaatttgacgacaaataggctaacggatccaagcatttttaaaacaaaatttctttaaactaaccaccagtttgaacaaattaagattcaaccgaatgggacagtgatcaaaagaagaaatctctaaattttctaaccttgcatcagggaacaacatgttccaagcgcgagtgatgagagcacggtcccatctgacttcaacccaagcagaaatgtcgttccccttctctcaagtgtgcgggtaacccaccaggtccatatcaataaagttgcagtcagaaacatcttgaaacccctgaatcaaccaattaggatagggatgacctcctcttttatcattatggtgcagattgttcaaatcttcaataaacactatgggagagaagactcctcagccacttgtttaattattctccatgaattcccatgcaaactcctctgaggttcaccatagaagtgttggaaatatttgaccaggatctagatttactaacaagtatgttgattaacatcctaaatatgaatatctctaaaacaataaaataaacacataagggtttaagaaaaccttacattgttgcagcaaaatataatgactccttccgttcaagagctgtagcccttgattcctttctg

SEQ ID NO: 392453 - DNA, 800 bp, Cannabis indica
gaattatagcaacacttctatcatgatcatctcaatttatacattactttaaaagttttttaatgtttctaatcttttaaggataatagcaacacttcaattatgattaattttaatttatacatacatttatttatatctctcctttatatatatatatatattgattttaatatatgtctcacattcttcattctactcatctactcccttttttattaatcctaacatgttgggaaaatataaatttgtaattaatttgacattaatttttaagtctttttttaatttttttttcttcattgattttcttttttatttttacttaatatctttacagatgggctccttatacatgttttgaattatagagatacatttcattatatatgcttcatacttttattttgttttttcttaaagtaatttttttttattatatgtgtatatacaaccaattgtcatagagattttggtgaattttgcatttttatatttattgtgatcttattattttttgcagttcaacccggaagaagtaacattcttgaaagattcaattattgttatatttatctgtgattaatattttgtattcaaacaacctaatcaaatcatgttatattttttgtccttatttgtgtgataggggtttttgagaaagttgacaatatttttaattttttttttaaacaaagattgtaactttcattaaagcaaatcagctaacaaaatagcttccaaaccagaagggacagaccccctactgaaaatacgatcaggacatgaaccagaagaac

SEQ ID NO: 392454 - DNA, 1356 bp, Cannabis indica
aagaagatatttgtcaagggggtgtgcggtttgagtttttgacacacataatcctttgaagtggcctggttgtgattgttctgccagcttagtttttggaacggtagggagtgtttgagtagtgttttctgcaggaatggatgttgcagattctggttctacaggatactggtgtgagagaccaggtgaaattcctgtagggattgtctcggccatgatggtgggagaagtggtgttgcaatgcgtgaaagtgggaggtctaggtggtgttgctgcatctgtattatgagacctgtgcataggtgttgtaattgtaggaactaagcacggtctggggttagttgcagcagtatgagaggagaaaaaaagatctagattatggttggccgaacctttgagaggaaatacattctcatagaagatgacatctcgagaatgaaaaattcttttggtagcaatatcgagtaaagtataggctttcatgccattgggatagcctatgaagatggaggcatgagatctaggtgagaatttatgcctcttacttgggagggaagatgcataagctaagcacccaaaggttcggaggtgatcataagcagggggtttgtgatatagcaactcatgtggtgttttgtgctgtaaatgaggtgtaggagtgcgatttatcaagtatacagcagtgttgataaaatatggccagtagacaagtgcaagagaggattgaaaagctaaagctcttgcaacgtttaagatgtgttggtgttttcgctcaacaactgagttttgttgaggtgtttccacacaagaattgtttattttgatgcccttttgggcatagaaggaggacatgttcaattctttagcattgtcacagcgaattgctttgatgtttgttgagaattgtgtgtgaacaagactatagaattgagggataagctgttgaacatcagcttttgattttaacatatagacccagcaaaaccgactgtggtcatctactatagttaaaaaataacgaaaaccttctatgctttgtatgtgaaaggggccccatatatccatgtgtataagatcaaagctagatgcagcaaaattattattggatgaaaatggcagccgcttttgtttagctagatgacatatagaacatggtagaattttatttgaatccttgaaatggagcattttgtttacaaagtttgtagtggacatagaaggatgtccaagcctggcatgccaggaatggacattgttacaagaattatcaaaagtagatagatgaaaatcagtaggtggcacatcgggctgttgcagcagaaaatatagatggccaactcttttagcaatcccaat

SEQ ID NO: 392455 - DNA, 842 bp, Cannabis indica
aatattatgcaaaatattacaatgcaataagcaataatcaatattatttattaaatctgtaagaacagatgtatctttgtgactcgtacccttagcatttgtctttatttatttatttcattcaataaaaacaaaaataaaaagaacaaataagtacatattaattgcaaaggctaggcaagtacctgaattacagtctcctgctgaaggcgaggggcattggacatcatcctacacttgagtcgatccccagactgtcaaaattggagacaaatacttatcattcattaataatgaatttaaaaataaaattgaaattgaaattataagcaaatgtagaatagaagacatgccttactaaaccaatgtagctgaaaaggaaacgatgatgcttgtttaatcttcaatctaataataaaattaaacaaaaagatttcttttcaggcacatatattcattatatcttagttaacaaaacaacatacaaattaaaaattagaaagaaagaataaggagaatagagaatgacgttaccccggagcagagaaaggcggagatcggtaatgagaaggattagtttggagaaagttagcggagcggagcatgtttggttctctggccaagatataatcaaatgaatgaaaaaaaataaataaatattttggaaagttgaagagagaaatgctggtttcaatgtctgccacgtgaacggacccaaagagaaagactgagcaagtgagatttgagagtgatgatatcacgtttttctcaactcttctattctgatctttcaatatataatgactatatataaataaatatcgtctactcctaatgtaaat

SEQ ID NO: 392456 - DNA, 1084 bp, Cannabis indica
gtaccttcaatatttgagaggaggttggaatgttcaattagaatctgactcgtgaaagaaactgtggaagctcaaggtccctccgaaagtgttccattttgcttggtgtgcactgtcaggctgtcttgctactcgaacacaactatacaacaagcatctccctgttgatatgcagtgtatcttctgcagtggagaggttgaatcaattctccatgttcttgttaatttcccctttgctcgttcatgttggaacagatctgcaattgatctttttccttctgctgctacggtttttagtgactggtttgctaagttttggtcaaaaaaagaggtggagcggtagaagaatttctgatggtgggatggtcaatttggaaagctcgtaatgagcttttatggaagaatttcttgcagtctgctgctgctgttgttaatttagcacataagattcttgatcaatggagatatgctcaatcttgttgtattgagctactactacacgaatcggatattgttggcagcaaagattgttggactaaacctgtgttagatgcgataaagattaatgtagatgaaactacttttctgcaaaaaactcatatggaactggttttattgctagaaattgtgatggtgctgtcatggaggcttttgctacgtattcaattgtggctcgcaagcaaccgtggctgaaatgatgagtattaaggaagccctaagttggataaagaggaagagtttgaacaatgtagtggtggagaatgattgttttgttgccattcaagctattaatggctctgttgacatgccatctatcttcggtcttctagttcaagattgaaaaaatctcttattttttttgaataatgttaaagtttgtcatgttaaatgatatgctaacaaagccacacattttttagcttatagttcttgttattggtctggtcgtatgttttctgagagcaatattctttctgctcttcagtccattgtaatagctaatttagctatttaatgaagtttctaatttcattaaaaaaaatgcaatcttattattattttttttgtttagttactttttttt

SEQ ID NO: 392457 - DNA, 1045 bp, Cannabis indica
aaaaaaaaaaacttaaaaatagtgatctgtctagattgattaggtccttctcatttataccgttctttctcatttttattcaacctactgactttcatctgttcttcaattttgtttatataataattataattattattacaaagtagagtttatggagcaatgaatgagtatgttacagccaatactttttttttttttcaattttattttattaaatgattaataaactcttatcatgtattatttcctaagagggttttggataagtaaatttatctaatacagcaataatggcatctgtaacaaacatatatgacaagaacgtatatatataatcagagaatttcatttatttactattgcttttaaaagagaaaacctctttattgcgctgcacagagaaaataagtcattgtcttacttttgtgcctttttttctacttttaagtgtaagaagatgataaaagcatacaaaccaagggaaaggaaaatacttcatgatatctccagccaagttaacatgataaacaacttttagctttgtctttttgaggtgagagaaatataattatcatatgttggtcttctagctgggcctgggtgtgtaaaaagacatgagtggaaatcatcatgattaattgtagttcggctcagccgaaacactgtatctgggcatctgtagcatttctcttatggcgtggcagataaactaatgtgcttcttttttatattatataaagtcaatttggcaatcggagtagcatgcaatgcaatcgagtgcgtgtttacagacaaaatggttttgagtctaaaagaaaagaaaatccaacctttacaattcgcaacaccacaaagtaattacttttgaaattaccctcaacaatgataacaaaatccaaacattagatgtttatggaacctcaaataaaaccgaaagtaatttcttgaagctgaaatgatggtctaggtgtaagaactttataataaggtattttttttaaaaaaattaccaattttaattttatcaataaataccaagata

SEQ ID NO: 392458 - DNA, 3256 bp, Cannabis indica
tatgtcgtgattcatcaatcgcagcatctacatttgagttttcaaaagtaccccggagggaggtggctgccatatagcaggaggtggagtccttgccgaagacagagaagggtttgctgccggtgttctatatttctgctgtgatgtacgataattgtgcaagtagttggaagagaaggaggcaagggaagcagcggtttgcgccgattttccatggacaacctgaatgcgttcattccaaatgcaccagagagtacaaaggatgtgttccatttcagctttagagtgtgtagaagagagatgtttcaaatagtcacctttaaatagtgcagcagccatgttccaatcgaaagtaaaagaagcacattgccaaacaacccttgcatatcgacatccaaaaaagacatgaccaattgacttccaagcatttcggcatacagagcaggtggcatcggtaatgactttctttttgactaaagatgtagccacggggagtgcatcatggatcacacgccaagtaaaatttttaaccttttctggcaattgcagggacaaaaaaaatttccaccaggatgtttcagtcattgagcttgatgagatgttttgatctgctacctttgttgcaaagtggtagcccgattgcgccgtatacacaccatttgtactatggttccagatcaacttgtcatttcttgggaagtagctcaatggaatggtaagaatcctttcaatatcagcttggtgaaagtattgttggaaaatcccattggcgctcatcatttatgagattggcaactacagcattcgggggtcccttataaagaaatggcaagaaagtgtcatgaccaggtagccatggatcagccccacaaaggatattttggccttcccccaattttccatctaaggccagccaataagagttctcgaccatgtataataccttgccaagatagtgatggagaatgaccatgtggtgcatcttggaaagtattatgtggaaaatatctactcttcaaaagtcgaaagagcattgaagtagggttttcaaggagtctccaagcttgttttgctaataaaacttgattgaattgttcaaaagatcggaaacccatacctccttccatttttgttttacaaatcaacttccaattgcgccagtgaattttagagccggattctgttcgtccccaccaaaagttagaacatcattgattctagttgattgcacatggtgaccggaagacggaaacaactcatagcaaaagttggtattgattgaaccacggctttgagcaaaatttctttccctcctgccaaaaagattttttcattccagctattcatcgatttccaaatcttgtcttttacatcacagaacatgagttgtttatcacgtccggagtaagccggtaaacccagatatttttcatgacaatcacaaatcggcattgagagtgttcgatggaaaaaaacttgtgcagccagggtagtatttggtgaaaaggacataactgatttttcaacatttaaagattgaccagatgcccggtggtaggtgtctaagactcgcttaatagcaagacatgattcctcattagcatagcaaaaaagcaggctgtcatcggcaaagagcaagtgtgatatgggttcggatctcctagtgagtttgtaaccatgaacatgacccatgttttcttcatgctgcaacaaacgagaataaccttctgaacagattaaaaaaagatatggtgagagagggcaaccttgtcgcaaccctctagtaggtatcagagaacccattgtttcaccattcaattggaaagtgaagttgttcgttgtcagacaacccatgagaagtgaaatccattgactgaagaaacccattttttccaatacccgctgaacataataccactcaactcgatcaaatgccttgcacatgtccaacttcattgaagcaacccccttacatcccgacgttctaagtttgattccatgaataagttcaaaagccaccaatatgttatccgtgatgagacgatttggcaaaacggcactttgtgtttcggatataacataaggaagaaacttcttgaatcgagccaccagaactttagtgatgagttttgagatgacattacatagactaattggtctataatccttcacataaactggttttttcttcttaggaatcaaaatgatgattgttgaattaaggggtgttgggtcggcaccattatttagtacatcaaggacaacagccacaacagaatcacccactatgttccaatatttttggtagaacattgccgacatactgtcaatccctggacttttatcagaacccattgaatgcaaagcttcctccacttcaggacgtcagaaaggatgggtaagttcagagttcatctcagttgttaccgtagtaggaattgcattgacagtgtcttccacggtagttatatccacaggctgtgattggaaaatttcagcaaaatagtcttgaattgccgctaacatatcatccttggaagtgactttaattcccgcttcagtagtgattgagcgaattttgttattagctttccgtgctgatgctttagaatggaagaacttggtgtttcgatctccaagctgaagccaatcaatgcgggattgttgttgccagtacatttcttcttgttcaaggagatcatcgagaactgattcatgtttttttagtgaagcagaggtagtagtggaatgtgtgctgagattattaagtgctgtcacagtagcttgagcatccgtgattttcctcttcatattgccatacttacggatatgccatcgttggagactagtggcacacatatccaattgttgaatcactttaaagatgggatcagcaactgaagaatcacaccaggattgagtgattatctctgcactctcggggtcagcaagccacaatttttcaaaacgaaatttggtgtgctttttggtggagagaggagtatgagtcacgacctttactattgcaaaattgctcgatggtcagaagtaagaaagtctaaatgagttactggtggtggttcgaaagattgatcccaagtagcatttgtgaaacactagtctaaacgttccttgatagtagcagaggaagttctattcttaacccatgtaaactagtttccttcaaaaggcagctttttcagttgacagagatcgagagcttgacggaagttttgaatttgtgtatcattgcgaa

SEQ ID NO: 392459 - DNA, 709 bp, Cannabis indica
ctatacagtaactatataccaaataattataacctaataaatatgtttgttgttgagcaatttacgacaatatagggaatcttatcctaaattttagagaaataaaaaaatcaaataaaacttctaacaactatctaatctaaataaataaataagtctatccaagatagcaaaaagaaaagaaaaacaccactaaatctaaaaattagtatcaaaactcaaaagtcaaaagagcacagatcaatccaaaattaaagcagagttaaaagaatcacttgtgattcaaagatagtgagccaaaaaagagttgtttgtgatcgagttatctaaaatagtaaacaaaaaaataattacgtaccatcttggcgatattagaaagttacatattactaatgtatagtaaaaaaataataaaatatataagatctatgaactagtccttatcttattattttgattgaatcttatcgtaataaattctaacaatatttgtcacaatataatatattgaaaatatgtacattttgataaagaagactagtgaggaagaaagtgagaaattaacagaaaaaatagtcacaagacataaagatagggcaagaatatgtgtgttgtggctgtcaacttttctgactaattaataaattgttccaatgtggaccaaaaatgaccaccgatttccatacacaatgttatatatatatatata

SEQ ID NO: 392460 - DNA, 1891 bp, Cannabis indica
gaaggaagaattgctcccctagacgcactataaaaattgatataagtaaagtttacgatacaattaattgggattttcttgagaagcttttggtggcctattgcttccctgctaagcttgtcaagtggatcatgaactgtgtgagaaatacttcgtattctttacttttgaatggaagaattcaggggtctttcaaaagtgagcaggggcttagacaaggggatcctatctcccctctcctctttgtccttgtcatggagtatgtttcctgaagtatccaaaaaacggccagagataagaatttcaggtaccatcctttgtgtaaaaaaatgaaactcactaatctttgtttcgcagacgatttagtgatattttgtaaagggtatgagggttctctccatgctatcaaggtctttcttgatgagtttagtaagtcctcaggtctctccatcaactttgctaaatctcaagtttactttggaggactctctcagctgattcctcttgctcaaaagataaacctatctattggagagtttcctctcaagtatctcgggatccctctaagaccaactaagtggagacttgatgattgtggttcgattttgaagaaaatgaaacttaagcttcactctagggctaataaacacttatcctatgctggtcgggttcaattaatccaatcaactttgattggtctaaggaattattggatgagagtgtttcttctccctcaaagtgtgataaaagaaattgagaaactttgtcggggcttcctttggggtttgaaggaaaatagatctagagttcacttgataagttgggagatggtttgccttcctaaagcctatggtggtcttgggtttaaggatggaacaaaatggaacaaagcttctttagctagatttatttgggacttgatgaacaaaaaagacttgctttgagttaaatggattaactcagtttatctcaaagggagtgatttttggtcctctaagatgaccatggatacaagttcgtattggagaaagctttgtaggctgcgtacaacctacaacaaaggtgatatcattgcaggaggtggtgagaaattcaaagtcaacaagatgtattgtagcatgttgcaccaagtcgtgttctcgggtgctggtgcaatctggtgtggattcattattccaaagcatgcttttcagctttggcaagcagctcaaactaagctgttaacaagggatctgctttgccgaatgaacatccctattcgaaacaagaattgtgtagtctgtgacaatgaacccgagagccactgccacttatttttcaggtgcattttgtctcaacaggtgctgttctctatttttcattggctgggctttgaaggttggtccaagctctttgaaagctggacggtttggctgcgcaacacaagaccggtcttggttgacaggataagagtgctaattttagcagccgcgatatatcacttatggagcaaccgaaatacttgtttgttttcttattactcaaactttgtttattgcataatgagcaaaattaaaagtgacgtgaattatagacttatgttaattaaagacagggaaagttctagggaggagaagaagttacttcaaagattgatgcgtaattagttggagcttttgttttgttgcttctctttgagaagtgtaactatttgtattaggtgtgttgattaattaaattttcttcttcttgataaatttatatatatatatatatatatatattgtatttcattaagtttctcttttatacttgtttataagataaagttatatttttattgataattattttactaatataatttattttaatatatatgattttaattatttatctaaaaaataaatat

SEQ ID NO: 392461 - DNA, 502 bp, Cannabis indica
atggatgataagttttcacagtagtacatgaaattttgctggaaaaaggacttgtctcgttgagagtacaactgagggaatataatggtggtgtgagtttggttcttctatttgctaggggaaccttagaatgtgttgatcatgatggttcattttgaatgaaacttgttgcaaatatgggtggtaagggtagagccatagaagcattcaagttaaggaagatgtccatttgcacctccaaagtgggttaaattttcaagtacatatcctataagaaactacaagaaaagttgtcacacacaattttggaatggtggttttaaaaggattaaatttaccgttacacctccagtaataaaattgtccaatttacatttttggatttcaaatagtttatcttctttgttggcaaattgttcagtagtatagtttcgaagttattataaaaccattttttctgtcaaaatccaaatggggacatggggcatcatttgttagaact

SEQ ID NO: 392462 - DNA, 1829 bp, Cannabis indica
cttggttgcctcattaggcaatagcgggtaatggttactttattaagcaataactttagtttatcttattagataaatatttgttaatgatgattgtttatgttaaatattatgattttttctaaattatggattgaatatataattacatggttatgacttgacaagtttatgtgaataaaatttacgtgttgatatatactattgatgcttctgtttttcttattgagtctttgtgactcatgggtgctttgtggtgcaggtaaggaaaggattgagctaggtcaaccatgagttagacctctccgacaaatatacatatcatcttatccggctgacagtaccaagtaattagggcttcggtttaaggaaactatgaaaagaataattattttgttgtaaaactgttagcgacatcttatgtaaagtgttgaaaaggggatccccaaccttaaatgatttataatgtcaaaataaactttatatttcaataatgaattgaatttttaattaaaatcacaattttcttttaaatggttagtttattattataaattcatttatgaaactacacacatggcgtccctatgaattagggtgttacaaaaaactcaaataataagtcagctttgtgtacacaaaaaaaagtgacttaggagaaaatactatccctaaaaaatttatcagtgtacacgtaaatttttatgcaataaatgagctagatatgcgaaaaatatctcatagttttaacttattttccataattcaaatcattggttttcaaattaaaatatttaagttttaaatttgaatatttatcttgtaaataagtgaagagaagatggtgttattttttcacttatcttttatagtttggagcctataaatagaggactcgtgacttcataattttctaacttcacttgaatgctcataaaccacggtaatgagtttagatataatgttagggccttcccaagcacattcattgtgtaggagtgaattctgcttccaaatggatgaaagggtatacaattatggggtattgttactcctaagaggttgacattaacactcagtatcttaagtctggcctaagttaaaattggaaaggtaaaagtacacgagatttattatatagtctccacttataaattatgatgattaatactaaactattgtgaatgtctattcactacttgttgatgggtacggtaattggaaagggagcagtgttcctataaaaaaggatatatgttgtcacttgctggtcaataataggaaaaaaaattaaaatggtaatcaagattaaaattttactttttttattgaattggattggttggatacaaaaagttagatggatatgatccgatccaaagaaaaatactaggtctaaaatattaaataaatctgaatcaatgcatcagatatacatgaaatacatccaatgaatagaattgatacaatctaatagatgttagaccaatcagataattggaattaattcgaacggatcagatggtaaattctaacatttaatatataattagattggatctagatagacctaaaacattagatgtgatccaataaacatccctacacgaagctttgtttaaaatattaaaaaaaaattatcattttttgagttgttaccgtccatattttacaagtcttcttgtatgtaggtaattgcgactagagtaggttaaagtaaaataatgttaatattgttagaaactagttgctgcagaaaataaaaggaacaaagttaccgaaatagaatctaggttgagtcgcggactaggtcgctctctttaagacgt

SEQ ID NO: 392463 - DNA, 902 bp, Cannabis indica
ctattagcggcggactatccgcccctaatagtccgtcgctaatgcccctatatataacccatcagaccctcattccccattttcctttcttttctcttcaaactcaaaccgtaattcttcatccctatttcagccgaaattgtatgtgggtgttcttcttcctcaaaaaacttccaaggtatgtgtattatattactccgcccattcttctagttttatttgctttttgtgatttttgttcaatattggtatgtttttgaaatgggtttctgttttctgtttgttgcttcaattgatattttttgctttctttatttttgcacctgcggaagaggactgatttcggccaaaaattcaaaataaacggtcccaaaatcccaggcaactcattgtaagtctgttgggattttatgccctaaataaaacccattacaatctaatctaatttgttatcaataagagatttgaagtgatttgtagttttcatgcttatgggttaatatatgcacaaaatctgttaagtctagaacatatattcattcacaattacagtgatgtcaacacagtggaatgtgattgtgattatatgattcaaaagactaagtcactgtttcacagtattttggatttacactgatgtgataatcagggatgaagtgtacttacacttggagtaagtgtacttacacttggagtaagtgttatattctttccagaacattggcaaagtatacagttttcgaatgtatggagtatatattggactggaccgatattgaacttagttaagatattataatacttaccgttgtatctttccaagtcaatatcactagttgatcttagatcaaaagatctaaatcctgatatgcttaggctcaatcccaggagtgttattcatg

SEQ ID NO: 392464 - DNA, 1356 bp, Cannabis indica
ttcctcctgttacacaatattctcccatcttctttcttatctttatgcttatttcaaatttggtttttgtttttgtttttggattatatatagagattgattggacaaatataataacaacaaaataaagatgactgttcaaagggagaaaaatcaaatgtgtcatgcactagatgactgctctagttttttttatattaagtagaaatagtggtaggtgattcattccatttatcaaggtaattaattaattggaatttttttttttatatacagaaaaatacaaaattattatgaaaataatatgaactatattatattagtttgtatttatatttgtataatattatattgttttttatattactttatggggctctgcaaaaatataattataaaataattcataaaaagtaaattatagttcataaatatatattttttaaatttcctttcaaaaaaaaaaaatattttaattactttgtgtaaaaatctcatactttaactaattataattttgtattattaatgggtattaagataattattaataatatttaatgatgaaaatattaaaatttcacttgctcttggcatgttgtacatattttttatttgaaatgatgtgaatcatgttcaagctaatattttgcatggttataataataattaataataatataagaattggccttcttttgatatatttctacttcatttcaactctacaccaaataggccatagaaattattattattattattattatactctaagcaatataacaagaatagcaaatcataattagaaacttttatcagcaaattctcaataatttgtgacctaattaatttcaagctagaattgttatttcccaagtttttttcatagttttaattgtttgggagataagagaaaaaccccactaagtccttttctaaagtaaattgttgaatatattaatggataatataagtgctcaaagcactaggtgacattggacaatgaattatggcccaataattttgtttgttttgtttttcttcattttgttgttattccaaaattaattagtacccaaatttcgaggtcaatgtcaacataggttatcactagtatcttaatcaaataacttagaaaaacattacaaattttatagcttaattaatataatgtgtgcaaagatataactatctactttttttttttttgtatatcattaaaattcttaagttatgaactttaatttatgtattcgtaattatttgtttttatctataatatttgaactatatcataaaaattttagaaagtataatctgcatatatttgcaatataaatatatattaaaaaa

SEQ ID NO: 392465 - DNA, 872 bp, Cannabis indica
cccaccgccgtcgacagccacaatattaacgattgagattgattgctccattaccttgtcaaacaggaaaaaacctaacaacaacaacaacaacaactccggtccttcaccggatatgcgaaacggatggagtttcggatctgaatcgggtcaggaagaaggatgagggacgattattctgtctggtcttgttgcgaaagcgagaggatattacgaaccacattgagaaactcgatccgacattgttgagatgtggtcgtatggatgtgcgtatcttcatgagttaatgttcattctcttctctgaatattttgcttaagaattaagaagataacaagacaaacgacgtggttttgggtgatatcaaaacgtttatagaaaaagcccaaatgacgccagctaacgtcagcgaggttttgattaagaatcgtcgtgatagagctaaggcggtttttgagttgttggaagtttcgaaggttaaagctaaggctaataataagagtactgcgttggggaatcggacgagtggatgagttgaagaagtagaggagcaagagaaagagctttggagagtcctaatgttgactttgaccatgttagtagttgtaataataagaatggtgaaaaagaagaagaagaaagtaaagaaaaatgaagggagaaagagagaggaactggaaggccgaagggagtgaattgaaaaattgaaaaattgattatggtacaatcggaatttttaacatgttattaagcttcaataatgagggcgttttttttttttttaagttatgtaatatatataatatatgtaattattaattagtgttagtattattattattacgtaggtagcgagaatgaatagagataat

SEQ ID NO: 392466 - DNA, 1010 bp, Cannabis indica
ttttattcttttttttatgatttatttttcgttttagattttagttattattaaatatttatttaagtgtgccaataaaattgtgttatgtgtataatatgtctacgtgaataatactctgtgtatatatggacatgcccacatgatactgaacaacaaaaattagattgaaatgactaaatgttaacaaaatacgaattttaagaattttgctactaattaatgagttttagaaattagttgcaactaaaataaaagttttgagattttatcgcaattcactattagtactattacactcaaattatttgttttaaaaaacaaaaaggaaaaaataatttcttttttttttaaagggtctttatttaagtccaatataagtctctcataagttaaaatagggttaaaaacttaaaatgtagatagtgaaatattatttttaaaatatttacttttattttttatttattgaagaagtatgcaagttaatttcaaatcaataagtatataaatgcatttaatatatcctagtcttacaagaatcatactaatataaaataaaatttaagtttaagtagagttataaaataatgttaaaaaaccatactatctaaaagactataacatttttttttaaaataaaagagcagtaagataagtgtcacatttattttaaatgagatttaatttattaaatatatctgtcacttcacttcatttataatttgttttattattatactagggaactaagccgcgcttcgcgcgggttcaacctcacttttataattcttttaattattttaatgtaatttttttacattttatttaaaatgtaatttaaaataaataatattcattagcgtttagcttactataaattaggcaacaataaaattatagaactgtaaaatataaatacatgttgcttttgaggtctaaaaaaccacttaaaagatgagtatattgaattgtatgaatttctttttattataaattataaaaattgt

SEQ ID NO: 392467 - DNA, 1034 bp, Cannabis indica
aattcagaagtaataaagtatttagtgagtgaatactactcaataaaatagtaaatgattttgagaaaactaaattgttattcataaaaccattagtgtttctaaataaaattatgatttccaatggaactgaaccgttttcaatgaatgagatttattgaaatacaagatataccaataaaagtttgaatgtttaactaatttaaattagtgattattttgacatatagaacatcaaatccttatgagaaagaaattaatgggaaagttaacactttctaatgtcaaactcgggagtcgaaatataattatataataatcatgcattaataatctcattgaattattcaatacattaagatgatatcaaatattggattttaataaatacgaaattgtaatcttattaagatatattgattatgataatcaataaatgtatatgagaaagtttagagaaatatccatcaaaggaaggatgacttggtcattgcttcataagatgaacatttgagttattatatttagatttgaattgcgatgtgattaaattaaaataatataacaaagtagtaattattagatatagatattcttggagaatatagtatttaatatccgtaatgaataattactaataaatatcactattaaatgtggatttaattatacaaatatagaaataggggatgttattaaagtattggatacataatttgaaatagatgtcctaagtatgagatacaagttttgaatattataattgtttaactgttgaaatttagggatacttgtacaatgagattaaacatgtaataaatttcaaatcataaaataagatcagtcttaattaaaatgatcaacgatagtggacaaataaggaattgtctaattaagtgggagtattaagtatactaggagtatatttaaaagatcattcataaggaactgtctaattgagtagagtattatgttgttgggttttataccttaaaaaaaactccatttcaatctattttattcaacatcaataa

SEQ ID NO: 392468 - DNA, 1036 bp, Cannabis indica
ttgttgttgtttttgtgtatttttgcaataatccctatttataacgtggtgtttggttcactctaatcagggccggccttaggcgtaggcgggctaggcccgtgcttaggactcacacatttcggggctccaaaataataaataagttttttattaggcatttatttttgtaaaattaaatgtattataaaaaataaatatttatagcttagttggttaggttgtataatatattacctaatgttttgggttcaaatttcatgacccttatttttaataatattttagagacttttttatttttacactttaaatcattttttttttttgtatttttacgaaattccaaatagaaattcctatagcaactattagagcaacttacatcgcaactaaaatcggtatagcaacccacatagaaaccaccgtagcactacctcaaaagctcaaaccgtaaatttgaaaaaaaaaataataaaaaaagttaaaaaatagtatatgagataattttttttttttatatgagggctcaaaaatataattcttcttaggcacatatattcttaggaccagctcttagtgtaatggaatagtaataatgatgtaataaaataaaaataataataaaaacatattataatgttttgcttgtcgttgagataaaggttgttatcaaaattattttatttgatttggtgtgaaaatgtaataatggaatgcaagatgaaaatatccttattccctttatttttatacttacaaaatattctaatgaaaatgtaatatagatttttgacttttttttattaaactttttttaaaatattatattacttttataaaagagtgttattgtattgagtctataatcaataattaatgtaataactattacacttatacattgtaatgaattacaaaatgtagttcacctactcatttaaaaaatatatattaataaaataaatatctaataaaataaaatagcaaataattaacattagtctaattttataatttaaattaataaaatata

SEQ ID NO: 392469 - DNA, 1361 bp, Cannabis indica
cagtgatagcaatatatatatatatatgttatttgcttggtactttctaaaaacaaggacataccaattaattttgatgttggcgttcatagattacgcttgcttttttgctttattctcatgcaaaagcgaaacaagttttaggatatgagagtgaatctgtgtacatatgttgggctcctgcaccttgcatggctttggaggaaaaggaaaaggcaactagaaagagaaagggaaagggctataaataatgtagtttgttgttagttttaaacatgtaatgtgaagaaccaatttttgatgcaaccttatcagaaacaaacaaaaaaaaaaaaaaaaaaactgattgtagaaaaagattgcaaattttttatttatataatgtaatatttatttaatagtatccattttaagtatattaattcctatggaaaggctattttttaagaaaaaaaatcctatggaaaggcttgtacttaatggtttccatttgataagtttatagtttccattccaatgcaaatttaattgacctaagtataagcttaaatcttgtaaaaaaatattattacctttcaaatctttgaatccatacatatgatttttttacttgcagcattcttcagattgcaaaacatatgaaatagtatcaccttatactggagtatcattttttgaatgagacattttagatattcattttaattaagagacggtgtcattttgtctcatgaaattattttattaattaatgatgcaatatcatgatacttggaggtacaattaatattaaatgcatatataagaaaccacccataagaatttctattaagaataaataatgtgaaacaagaaactatcattttttatgatttttatttctattttttatgatatttgttttcatttcacatatagttattctcatttaataaactataattttcatttaaagattagattatttctatttttgaggtgttatacccgaaatttggctggaggtcacgtgtcaaggtaaaggaaatgtgaatcggtgtggaataactcattaatttcataagtatcagagtatgtttgtaacccgctgactgtaaggttataggcaaagaatcaatgtacgaactggtacttagtgtattaacgagaaatcatatactgctaaaggagaatagcgaggcaccagggaagagtaatacataccttagcttataataagcaaaccaagtgtaaatgtcagatcgactcgaagaacaagaatgcgagatgaccatcttgttggaaatattttaccaggatctagatttactaacaagtatgtttcattaacaccctaatatgaattctaaacaatgaaataa

SEQ ID NO: 392470 - DNA, 664 bp, Cannabis indica
tggtccttcattgggtccgccaataggtatactcatatttaccctaaattaaattatgtgagaccaatagtaatatgaaacgtgcatgtgcttttttagcatttctcattgtattatctttgtattagagatggtgttagctaaaaccaatgcgccattagaagagagattcatgactcatgaccttctccaacaaccaaaccatgaaagaccactcaggtcaactaaaataaaaatccctatcgtgaaaggtacacaattattaattgtttggagtacacgcgctcaaatacaacatcatcctaaaccaaggttaccatccatacgcggcctcgtagaccacttttaaatggacggttaatatttttctaggaagcaacactccttttatactcttaattttgttttaatattacttaatttagaaaaggactctctctccctcacgtgggttaaaaatcctttgctgctgttgcaaatatttgaaaattttgggatcacttgaaaaaaaaaaaaaaaaaaaaaaaagaaggatagagaagacttgagccttagccacctataaactaaccccttcactttgaagaaagcaacattgtccttttcttcctctctctcccaaccaaactctctgtgttcctttttctctatcatctcttctctt

SEQ ID NO: 392471 - DNA, 640 bp, Cannabis indica
tttatcttattttgtagatcattgttaatatgttaatgagctgttgtgtagtttttttatgttacaagttgaagttttagttcttttggtgtgttgtttgaagatattataattttattgtctaaatttttagtctcagttttatctcatattgttcatttactttaatagtttatagtttaacaaagatacattttcagttagatgatgagttatcataattctaggaaatttttatactatttgttgtagatatttgggtttatctcatgttgttgcattttaagtttatgagtgattataattaagacaaaaaaaaaaagtacaaatggccaaaattgtcatatcaaatgcttttctttccttcattttaattttatggaagataaagaaactttagaaacgcggtcgttttttttttttttttgttaggaactcaactcggtttgaacgcggctgtaccacagcccaaaaagaaataggaaagaaatagattgacccaaacctacaatcgacacgtgttcaaactaactaaatatcaaccgtccgattggggctttcaatggtacatccatatcttaatatattattattattcttattattattttgttgttttctacttgtgaggagatcatga

SEQ ID NO: 392472 - DNA, 857 bp, Cannabis indica
atgattttatttataaaaataccgtattttgatatatgtatattatatatatatatttagattgtactagtcaaataaataaccttattaaaatgtttgacataatgttttttttacagtggggtgaaaaaagttacaccaatgatgtagcatatgctgtattgaagtctcttaattttgaaattctttctttccatcagttcaaaggcatagaaaggccaaaggtacacaggagaaaaaatattttatatctaactaggcctttgagtacgaagtgataatgatgttgattttatgttgtatgtaacctctattctaaccatcattaacttttaaggattttatttctatacaaacgataacaaatccttacaatcatggtgatgacaatattgccgatgatgatgatgatgatgatgatgttgatgttgaagatttgtcatcaattgtgagttggtagcttcctatagtaaagttgtattcttttgttcttttaaaatcgttgtcaattcattattgaaaattttccaaactattaattgagcagagtgtacatacaccaataaactagtgttagagtaattgcttaattagtaaactctacctaagaagtactgtcatggaatagatattaattataaacactagcactagtagtgttatgcaaacattagttacatttttatatgctatttagctaagaagtgtgtgccttgaatgatttgattttgcaagctaaaaaagagaaacggaaggagaaaagcaaagaacgatctaagaaggatgattcaactgataattatagtgttacactatgaaatagtgtagggtttattagtaatttgcaaagggtgtga

SEQ ID NO: 392473 - DNA, 968 bp, Cannabis indica
taagtttacttgtaacgtcctgatttttaaggatgtcacatatgtgcttttataatttagtttataataataaactaacaatgtaaaggaaattgtgacttaattaaaactttaattaattactttaaaatataaaaatcatatttttggcgttatacaaaaattagggttagggatcccttttaaaaatatttacaaagattattaaaattttacaactaaacacttatactttacagagttgccataaaccaaaaaccccgactactcagcaccaccgatcggataagctgatatgtacatttgctagggaagacctctaactcatggttgttctaatccaaacattttcttacctgcaccacaaagcacctatgagtcacagagactcataaaaaaacctaaatataacaacctacattttagttcaaatataaccaaacatgatcatataattaaattcaaatatcaatcactcagatacatccaacatccagctaatagcagacaactagcataaataatcttaaagtatacaaacatctagtattacacatgtattttgtctagtaagacaagctattatcattactttataaaataaccattcccattgttgtgtaataaagcaaccctaataaacctaaccaggcatccaatgtcactgtcgttaactaatgaggtaaccgacaagtaataaatctaacaatggtttcagattatagtcatgacttacagttatccgataaaataactttttccacagctgctcaataaaacaacctttctactaggggtgggcatcatccaatccaatccaattgaaccgaaccgatccaatccaatccaattacaaaaagttggatatccaattacaattggattggattggatgctaaaagttagattctaattggattggatcggttattggatgtcaatctcaaaatccaattaaaaaccgatcc

SEQ ID NO: 392474 - DNA, 1081 bp, Cannabis indica
ttgagaaaaattatgaaattaaatgtttgtccaataaaaaatgcaataatgccaaattcagattcttcaatttttgaagaggttcaacatataggttaaagaaatcgtgttgggtttagatgtgatgaatatcaatctaaattgaacactaaatttgttaaatatgaaaatatgccttctagtttttctgatcttacactgcaggaatctgtttttacaattgaacctcttgttcctaaagaaagggagaagtcaggtaagaatgagaattttcataaaagaaggtaaaaattcattcccgcgtgtcacttctgtggtgttaaaggtcacattcgacctaggtgttttaccatgataaatctattcaaaataaatttttaatcattatggaaaacaatttgttaggaagaaaagatcaaaattcaagaatatttgggttaaaaagataaatctaaatgtccttctaattttgcttgtcatactgcatgtgataataccagtgctatacatatttctaaaaattaagtcaacattctcatgcaaaatacattgatatgagacatcattttattaagaaacttgttgataatcaaacattacagttagaatatgttgatactgaaaagcaattggctaatattttcactaaggccctagattcaagtcggtttgactcccttaaaaaatctttaggggtttgcattgtttaattctttttatttggttctctattttgtaaaaaaaatttgattagttcttattttgcatctatccttctttcatctttggtagacaaaacatgattatgcttttggataataattagcttagtgtcttgctttcttcatactttttaggttgggttgaaagattcaagttacttgcatatgtgtgatctaaataaagtaaagtattaatgtacagagttgagcgatttttgtttcaatttcttgtcatatcccttgttggaatagagctacccctactgaggtgtgaaagttatcttttgagtaagctagaactttgtgattgagagttatgaagaagatgcactaccatagaaaagggctaccttcagtat

SEQ ID NO: 392475 - DNA, 551 bp, Cannabis indica
tttggtttgtggaacataaccgaaaagcccgcgaaaacattcccaccaccattcatccatggaaaattagggttagggatttcgttctctctctctcttccttggtaatggccatttttctgtggaactgaaaccccggaaggagaaccctctgttatctatttcctttttgttatctaagattcagatagacagacagatccatggtgatggatgaggagagaggagatgaaattggagagcaagaggaattgaatgtggttgaagaattggtgggtgtggtcgaaatggtcgcccaatttggagattatagaaggacccagagaaaagaatgctacaatctcgtgagacgtatgaagcttttgttgcctcttttcgaagagttacgagacctggatgggtcgatctcagataaggatattgcttgcttgtgtaatttgaagaagacgcttgttttggctaagaaattattgaagacttgtaatgaagggagcaagctttacctggtaataaatgggattttttttataagaacaagaagaagaaaataa

SEQ ID NO: 392476 - DNA, 1408 bp, Cannabis indica
taattcacatttcactcgtccataaatcattgctacatattcattaagcgaagatttactttaatgctacaaaagtgggaagtaaatttaagagcttttgcattgctcgcccataatataatgccagtgttttccactccttccttttagttattttcttttacaatccatttttcttatcccttcttgttcaatttttgggttgtttgaatcagagtataaagtacaagcaagaaaggctgaggttgagatatgtggatacctgtattagcagtgctcgtgtctatcttgctgggaacttttattttaatctctcgagattcaaaatctggtaactgtttttctaattacaataatacctgaaatctggtgagaaatctgattaattatgttaaaatgggcacaggtcgtaggaaagatgatcattcaatcgctaaacatgacaaggtaattctaatttttagtaaatactaacttcttatagatttactatacttttgttgttgtgcttaaacgaatatacttccaaatcctatttttcctttttttttttcataataaaaaaacagaaaagtatttttgattcttttcttatagttgatggaatgagcttttctgaactagtcatgtgtttggttaattatttatgtatttggggtggacaattttttaatagggatccaatgtctacagcaaagctgaaatatctttgcataataaaagaacagattgttggatcattatcaaagacaaggttattttattttattttcttctttttgtctctaacctttagctgcttacatttaattgtcttatatatttatgtataggtgtatgatgttacttcttatgtagaagaacaccctggtggggatgccattcttgcacatgctggagatgattcaactgaaggcttttatgggtaaatttttatttattcatttatttggtatggaatgggtaatctatttattcattatctttttttgttcatctcacctaatttggcttttaattgctttcattctcaatgaccaggcctcaacatgcaactcgagttttcgacatgattgacgacttctacataggaaatttggagctgtaattacactctgtttgtcaaaaaagaaaaaatttgagacctgaataatacaactttctagttctaattattcggtgttgcagctgtacctttcgtaactcttgttgtggttcatttgcctttaattccaaatgcccctctatttttaatttgatgactttgttgattttagttggttagtctgactccatgtttttggtgaagccagtataaagattcaggataacagcacaaccgaaaaattggatggattcatcgtgtttcagaactaaatattgcaagggaaatttgcatggtatacta

SEQ ID NO: 392477 - DNA, 782 bp, Cannabis indica
gtaaaataaataaaattgttatttattatgggtacttttagacaccctgtgcctaataataaaattgttatattaattagtacttaattaattgagcacatattaattaaaattttcaggtctattaccaaatggggacttcgagtatggtccaaaaccatcagaaatgaaaggaacattagtaacaagcaaaacagcaattccgaaatgggaaataacaggctacgttgagtacataaaatcaggtcacaaacaaggtgacatgttactaatagtaccagcgggtgcatttgcagtgaggctaggcaacgaagcttcaattaagcaaaaaataaaggtagcaaagggccaattttactcactaaccttcagtgcagcaaggacttgtgcccaagaggagaggctcaacgtgtcggtatcacccaactctgagcccaatgactggggcatgttgcctatgcagaccatgtatagtagcaatgggtgggactcgtacgcttggggattcttggctgaggcttctgagattgaaattagtgtccataatccaggtgttgaggaagatccagcttgtggtccactcattgactcaattgctctgaaactcttgagccctctaaacgcggaaacggtacgtatccacatattaattatatatcttattggctaattttatcatgcatttccttaaaatggtgtactgatgcactcttgatttgtttcggcatccagaaaaaatttttagtctaattttttttcatattcatgtacgttataactat

SEQ ID NO: 392478 - DNA, 1371 bp, Cannabis indica
tccaaaagtgttccattatcttacattatataaggtctataccactgaagttcctagatacataatcacggtaccttgtcgtagtgggagggtttttagggacccaccttgttatgacttggatgacactggtgatgatgattcattatttgctcaagcaagcaatggatagtcctaataggttcctatcttatccttattaggactatccattgcttgctataccataactcgaagcgtagagaactatggttagccattcccatggagcaacctaaagtttttagaatgcaaggataagataggaaaccatgatcattctattcaatggacttaagaaaacttcccattcctaatatcaagggtttgatgagaacattaaaacctatgatttgtggtatacctagtaatttacttgctctgtcacaagcaacttacattagtaaggtgctagagcattttttttcaaatggctaattctaatggaggtcacttgacttccagagatggagttcatttatctaaggagttattttcaacaattttaggaaagataaaggccaagaaaagaattccctaagtatcaatagtaggaggccttatatatgctcttgtatgcactaggccagatatctagtgttgagtgggagctgtgagtaagtatcaatcaaaactagaaaaggaacattggaagataatcaaacatatcctaaaatacaagaagatgaactatatgttagttataagggtgatattttaaaatccttaggctacatcaaatcagatttcaggacttgcatcaatgctagaaagtcaacatatgagatggtgattactctaggagtagagcagtgatttctagagaagtgtaaaagcctatctggaatcactaactctaccagtaagagtaaataataaggctaacctaaaggaaattagggaattgttcaaactcaagaaattttgatacagactttggcataatttcagacatggaatgattgtttagtgtaactccgtgataacacaaatgcaattgccaaacaataaagaatcgtgtagtctaagaggaataaaatatatagaagaggaattcacaaattcataagttttgtgactaaggaaaatgtgatgatagagaaggttgatattgagtacaacctatcagatcctattacatagtttatgccaaatactacatttgatcaagacatcaagtatatgagattaaattgaaatacacttatagttttatattagtacaagtgggaattcgttaggattttatgccctaaataaaccaattttatgtaatcttatttactttaataaagatcataaatcatagcttgactttgtcatatgctttgt

SEQ ID NO: 392479 - DNA, 992 bp, Cannabis indica
ccttaatgttttcatttttctctccttttttttaagtgctttaaagtaataattagtaattacacaaaataatatagttgacaattatttatgaatttttagtattttgtttagtaaaatagttagtaattttacaaaaaaattaaagtgcttctagaaagttagtgtaattagaggtaagtatacaatttggcatatttgtttataattatactgtaattgaatgattaaaggtaattaaggggttccaattactctctctctattgatgcaaaaatctggacacagatctttgggccacactcactcactagattgatgaaaatgaattataggttaagtatatttatgagagacacaaagatgtttatgtggttcatgcgttaacgatccttagtccacgagtctatattattgacctctttgggtaagcattttggattaaaaagtgttacaatattgatctctttgtttctcttgtgtgaaagctttcttggaatttttgcagagtgactgcaagcaaaaaattattctcccattcatcaagaaaaataagactatttataggcacacatgaggtaaagggcatacattttacctacctagggtttcgtcttctacacgctactaaggcatgtactgcgagaggatgatctgactattagctggtagaaaccttctgcatcatgcggtgcacagcagctggtgaggacttttgtacgaccctggacacatgttgcacaaaggtctctcctttgcaaaaataatctctaaccaggttgttaggcaaaaggtatactcgagggtgcgtacgcgcaataccacgatctggcataggggacaagatttgattttgtgtcagaaaaaaagtgtaaccgtctatagagtgatattttgcaagatgttgacgtggccaacgtctccaaaacccttacctataagaatatttctatattgggaaatatatttctatttaaggaaataaataaata

SEQ ID NO: 392480 - DNA, 785 bp, Cannabis indica
tttttttttttttttctggtttaaacttgaaagtgtaactaggttaataaactttataaatactaaagtttaactcttaatactaagtttaatttttaagttatatttatagaacttccgtagatttctagccgttgagtttgaagtaaatagtagtcacttggtagtctctaattgggccaagtcattaagtttttatttaaaaattaatttaaatttaccaataaaaaataacacgtaggtaataacttgacacttaatggtctgtcaaaaattaaatttagatatttatctgcaactgagagttagttaaacttaggtattaattaagagtttttataaaaatactgaattttgagaaaaaaattataattttattgtgacactaatttttttacaaaaatactgtcttttaataaaacaaccgtaaaataataaaagaacaattaaaataacagtaaaataactgtaaaacaacagtaaaaatttaatacagtacatagcattttctaaaaaaattacgtcccacaataaaaaaaaaaaaaagaagttgaaaatttctggtgtaaaatccccattaattatgccgaaaattattgaacaagataatattgggccgaaattctttgttggtctattgttaatgggcttttgcccataaagtttcatcaggcctaactgagcaagcggcccaagtcggcccactgctagctagctgaataactacgataaacgattcactgtcacgattatcaccactttcttccttttttttttcttttttt

SEQ ID NO: 392481 - DNA, 525 bp, Cannabis indica
acactaaaatagtttaggctaaaaagcgcaccaagaaaatccaacaacataacaccaaagtccacaaaccaagtctcatcaacttattcttgttcgagtaacaaagggcgagtcatgaaggactcgactcagctccactcagcaacaaagtcgattgtgaagagtgacaagggcaaagccacaacaagtttcaagaagagtttcactgctgatgagtttgtcgacaagaccactggtcgtttagggtttaaggaagaagctagttttactcgtacggacaagtataacaacaaaaatgatgggtttgctcatgagtttgaaactcaagtcaagttcaaacatgttgcttaccctaataataataaacctagtactactacgaaggcagataacaacaactatcagatcacttattatgatgattattactactgctagaattactttatatatctagggtttcttctttttgtctatatatatgtttatccttttaatgttgaaaatgttatctaatattgtatt

SEQ ID NO: 392482 - DNA, 698 bp, Cannabis indica
gtatttgtgaaattatcccttatggaatagtgaacatatatgacttaggctatggacgtgggcctgggaaggctttgatgaagcttgggccatgaatcttctttttaatcatttaccaattttttttcccacaaaccttaaatataacacaacatcaatcaaagaaaattgaatatttctaactaaaataactttacaattaaaatcataaaatatttaatttaaatttattttatatacataattaaaggtttaaaatatacaaatttgaaccttaatcagcattaatgagagatttaactatgacaagaaataataaaaaaaaaaaatactttcgaaacacttaagtaattaacatattgtttcaaatttaatcaatcttgaattattgagaaaataacataaagtttgaaattgatttatacttatgcagtatgtttgtaagacagagtatacaatggatgagattgacatgcagtgacgggcccagaatttttactttgtgggggctaatttatattaaaaaatatttatacctatagtataattactcttactagatttatttaattttgtggggagttttttctactattttaatctataattacaaaattaaaaaattgcatttaattttttaaaaggcagtatttttgttagtggagtgttgcgatatttagcacacgcaagtgtacgta

SEQ ID NO: 392483 - DNA, 735 bp, Cannabis indica
atttaagtctaaaatacctattacagaaaaaatcccaaagtgaattgataaatgaataatatgaatttattaattaatcatattataaaaaaaaaacaaggttaattaactattgataccttaccctcactaaaaaaaatttattttttttcaagtgtggtatagtatttgttttaaagtgttatatgcaaattttatgtagtggggttttcaacctcttttttaattttttaaatacatacatacatgcatgttatacaaagtttttttttcctcattagaaataatgttatacaaaagttgatgtgtggttattatcctatatatgtaactccccaccatgagtttagagtatgaaaaagagagtacacaaagttgatgatacaagaccatctatatagaaaaggccttcctatcctatattagatatatccttattatttgattatacaactctcaagcaccatacaccttttcattctatattcaattatcatcatttctacaatttaatatatataactttcaatttcgtattttagtatataagtggaattttgttattagacattttggaacgtcgtattaggtcgtattgtattgtattgtattatattgaattgtattttatgcaatatttttatgtaaaactatatgtgttattagcttttatggacacctaaatatataatattttaatataaattaaagcttaacatagtattatataaaaat

SEQ ID NO: 392484 - DNA, 636 bp, Cannabis indica
tatcaagatagagttagttaagtggctttagttggttaggaaggttgttatgacagctattagtgttagttagaatcggttatttttcagttggttagcagttagttagcttctctcatttcatcactgtatataaaccaattcattgtactatgttcatttttcaatgaatcaataatacacaaagttctttttctctcttttcttgcttgtttggtaaaagagacacttattttttttttcatgtattatatattaatattttgtgggctaattctctttgagggcaacacacaagaaatttccttttgttcttagacctttcctcccacaccaccaagtctttcaaagttgaacatttttttttttatttctaagcacttcaataaccacataaaaacttagcctatatatacacacaaatgtcccaccttttatattcatcaaccaactagaataatataattacaatattttagatttcgagataaatttttgtgttttactaccttttttttaggtcctttgggaaacattttgattgttcatgtataacaaaatatatatatatatatgtatatacaggggcggacccacattgtagcgagggggggcagtcgcccccctgaaaaaaaa

SEQ ID NO: 392485 - DNA, 2448 bp, Cannabis indica
atagatcattagttgagaccccttccttaggtttcggaataaatccttgcaagtgaggaatccaggggtccctccaaatgctagtcgtccttccatttgttacaactttacaagcccccttccttaaaatggatttggctttgacgacgtttttccaaaaccaggaatcggaatccctgtagctacacttgagaaagttcttcccttttaggtacttggcttctaagattttgcagcattaagattgggagcctttcagcaaattccaaccccacttggcaagaaaagccagattcatttcctttgttttcctaaatcctaatccacccaaagatttgggaagacacaacttatcccaagcttttagatgaagaccatgatttcctttttcaaaaccccaccagaaatctctgactaaaccatcaaccctcgtgaccatactgctcgagagcttagtggtttgcatagcatagacaggcagcgacaaactcatagacttgataagagtagctcagcctgctttcaataacgttttggctttccaaccctgcaatttagaggtgagattatccagaataaagttaaagtcagcatccttctgcctagatccgaaaaggggcagacccaggtaattaatagcaccatctggtattgtatgcccaatgctccctttatccctctcctcatgccctcaggggtgtttttgctaaaaaatattgatgttttaagtttatttttctgtccagaccaagagcaaaactgctccaagcaattccaaacacaagtagcttcagttagattggccctacccaccaggatgagatcatctgcaaagagaagatgggtaatagtcggcccacccctacagagttttataccatggatatttctttgtcccaaagctttttccaagagtctcgagacaacctctgcagcacaaataaataggtaaggggagaggggatcgccctggcgtagcccacacgacggcgtaatctttccaacctggctcccattcaagcaaacgttaagtgttgtggtggaaatacattgcgaaatccaagagcgcagcttcggagggaagccaacacaatccaaaacgtggtcaatgaacctccaactaagcctgtcataagctttaacaagatcaattttgattgcaaaaaatccctccctacctttcttccgtttaaacgagtggatgatctcctgaactattacattattatcttgaatatttcttcctggaacgaagccacttgagtagggcatattatagaaggcaagattggtttgattctatttgtaattattttggatatgaccttataaagaacgttgcaaagagaaataggtctaaattgactaggtctcttcggattctggaccttagggataagaactacattcgtagtatttattcctttatgcatgtgacccttcctgaaaaaatcagaaactgcctcacaaaaatcatcccccacagtctcccaataatgtttgaaaaagagtactgacattccatccggtcctggagccttatgactgttcatagcaaacaaggtactctctatttcatcctgagaggggcagagaatagtcccctcctggtcctgaagggacatcctcccctgaaacaaacccctgcaatccaggctctggtcaatgtctgatccctcaaagatactcttgaaaaagtcggtaaattcacggccaatagcatctctatccgtgatccagacattgttcttgttcaaaatactctcaatggcatttctccttcctcgaattgttgccgtaaggaaaaagaattttgagcatcgatcgccttccttgagccaagaaatcctagctcgctgcttccagtaaagctctttccgggccaacatttcattcagcgatttccgaatttcacattccttcctccactccctggttccggctgggagtcgctgaatactatccagttgcttttcaaggtctttaataacccaatcaatcctaccatactgcgttctgttccaactcagaagcgcaatcctagtagcacccacctttttaaaaattcaggctggagcccaagaatgagctaccgagcgccaagcattggtaactacaaatttgcttctatcatccctcgtccatccttcctcaaacttgaaaaatctcttgaagctagggggaggaccactagtatccaggaagagaggtctatggtcggagttgctcgtctgggaagagcaaataacagctttagggaatatttggatccacgttccattaacaatccctttatcaagagtagatttcacatgactgccccctgacctgtggttatcccaagtcatcttgtcgccttgtatacacagattgattaatcctctggaatcaacaagattagagatgaaagggataaaagggtcccttcctgaagaaccttctctttct

SEQ ID NO: 392486 - DNA, 1075 bp, Cannabis indica
agttacgaaagaaaataaaaaaaatttaaaaaaaagtaagctaaatcaaaaattgacgaacctcaaaatttttcattatatatgaatatacaaatatacttatttaaaaatatacacaaaaaaaataataatccaaattattttctaagaatggccataaaattaatagttgtaagatataatcaaaaaatggaaaattgtataagtattgctcagccataataatatatttgagcaagaacttgcttaaagttttgtctcgctctttaaaaaaagtctggaattcttacagaatttattgacatttgatcctctttaatgttttaaaggtcattcctgcaatgcatattcaataaaatttcatcataaaatgaatagaaattcgagtaaaaataactaaataggagcttaaatgttttatgcgtaaatatatttttaaccaataaattacttgaaatattatatcatacagtttatatatctcaatagaacttaatatcttttacttcacttttatatacatacacataaaacatgcaggcatggatctcaaaaagacaatatatatagttaatttttgagttcctattataaacatttggtttggtgctgttgagacaaaagctttccaaaattttcaaccccttgtggacataagaatgtcctaataatgttataatattgaagaacatttttttaaacaaggaataaaaatatacacaaattacacacactaaaaaatattttgtgagcaatacaataatttttatttaatatataaaactataatatatattagtgcaatacaaatctaaataacttctaaaaggcaaatttgtggaacaaaaaagaaaaaagaaagataaattaaagtattttaacaaacacttacttgaatttagttagaaatgacaattatgcaaattcttcactcacatatatatactattgtttgaccatgtggaaatttcctttcttttatatgtatatatatattctgatttttttaaattttgattctattttgttaattatatatgatgattctatgatgggaagattaaaagttttgaaa

SEQ ID NO: 392487 - DNA, 625 bp, Cannabis indica
ataaaagtttcggttcggtccgttagtggtgaaatttagttttgtctcatcttttgatgatacatattacatttatatcttttcatgcactattcgattatgatttctcttttttttcgcttcagattggatacataatctaatcttaaagaaaagatatttgttatatgtttttttttttatttattattattattatataagtgttacataaattttgagttgttgagatatatatacatgactttcatataaatggatgaatttgaatttgtatgttttattttaaggattgagacaaattttaagcaacaatttaatttaaatttttgtgttagtttatgtctaatactgaagtaaattaatagaaacaatatgtcgctaaagtgacctcttttgtgtagaataatttatttaaatattaggatggttgcgtgtttgtaattgatgcatatattgattgacccaaaggtaaatgaatatttcgctaaattttaaacatacctgtggcaataaatgtgtgacaattataaggtattttgtgtgaacaatacgttagtccaaagattaatctattgtttgacacagttttattgtcaatatttgattgctacaccaagagtac

SEQ ID NO: 392488 - DNA, 697 bp, Cannabis indica
tattacaattaggaccctaggttaaaatatttctaaatatgactgaaatacccttagttataaaaagatttatgcaattttttggatcttatattttaatataatggcacttaatttttttaataataagaaaaatatatttttgttttaattttgagtattaaattattatttatttgattcacatttataataatttgattatatttgaaaatattttgactaagaagtaattttagttcctaatttttattttattattttttaataaaagtgaggtcctaaataaattttttagaaattaagtgtcaatattctaaaatatagagtttaaaataatatatatatttttttttataactaagggtacttttgtcatagcaaaaaatgaccttagggtcctaattgtaatcttttaaaaaatataaggtctaaaacagaaatttttaaaatgtaaggtccaaattggtaatttgtcaaaatatatgatccaaaatgatataaatcctaaaacaaaaatgaagttaggatggccatggtatagtgtgtaaaaaagtagtttttttgcaatgtataattaaatctcaactccttcaatatcttaatggcacgtttactatacagttttcagaatcggaataaattaatggagaaatgtaacggaataaatgaaaaataatcggaatcaatatttgta

SEQ ID NO: 392489 - DNA, 1338 bp, Cannabis indica
aagacaaaagatggacctccttcaatcccgccagtctccttttggaacgtgattggaacatcgaaaagcttctgagtccaaatagcatcatatgaggggctaacggttttttggagtttgcctaaccccgtcacttgcccatcctccaccattcttctttttcctctgttatgcttttcattaatactcgagtctcccaaaatctcattcgcatcatgcttttgtggtgccaatttggtttcactcctcttgcttgcttccactatgccactcaccttatcccttaccaaaggtttttcagcagagcaagtcttccccttctccattttctctataagcggactaaaataattcgagatcctcagtccctggcttggtagaatggcactcggctgttccttatcacccttctataattcctttcttaaacccctcattccttcatgaaatccatcccttgtctcattatccacttttaaccataacccgtcagcctttgctctttcccctgctacccctgtaatttctttgaaatccaaggagcaatctttttgattatgtccgattcgcccgcatcgaaagcacatgaaaggaagtttatcgtatttgtatgccacccacacctttgatcccccacacggaagcagataacccggccaaataggcttgttaatcgacatccaaatctgaaatctaaagaaaccattagtcaccatttttgaaacatcgaaattatggattgagattaccgtccctgccatagaagccaatctcaatgtgttcttttcagtaagataatctattggtaccccggagctctgtcccaaatagggaaaggtgtaagatcgttcttccaagattcattagtattcaccatctttcccaaaatcaataacccattagataaataccacgacatcttagctaaaattcttgactgggtttgttcagaagcaaaacaaaacgataggaacatacctgaatcatatttttcctgaatctttatgttccaatctgcctccttaagcctccatattcttcccagtactttcttgagaaaacccctgctatggtccacattagaacaaagtctccccctaagattgtttttagcaatcgtagaagataaactctggtcaacctcccattcatcttcatccgagacatgaagttgagtggttttggacagcaattcctccattgcatgcgaatacacaccagtctggtacatcggaagcccttcgtcgccgagggaaaagtcaaaaacccagtccgagccctagcagagcaaaaaccatctaatattattttataaatattaaattaaaatttatattt

SEQ ID NO: 392490 - DNA, 1047 bp, Cannabis indica
attattattattatataaaatataaaagaagttgaaaagaaatggataagaataaaataagtggaaggacctgttatgtaattatgctccaaaaattattgagaggaaatttgaaaagaatgaagaggtggagtgtgtttgtcaaaccactactaagtagcttcgaagaaatattaaatagagggtttatgcacctttgatatatcccatgtcgtttcctgttgcttattattctcttccattgttactttcaaccacaccaatggttaccctttaattaataaattacaaaactaaattacaccataatatacttgtacatttatgaaaactctgaaatagaaatagttggaatatttttgtgaattattaagggaaaatttgatttttcatatttttgtaaaatagaagttttatttgaatgggaacgatgaggtatgatggttgtctgatgttcagaatgtctagttttttccttattaagcactatcgtaccaagttattgtcccacaatcatccctacatcgtccccaaatatagactatcataccataccgtggttcgtcctatcatcgtttcatatcagacttaacaaaaaacttaaaaaaatacacatattttacacaaatagagtgtatacttgttcattagattttctaagcaatagataaatacatatttcatgtgtacaataaaaggcaagattttttcaaaaaataaataaaaaagctacacagtccatgataaataaatctacaccccatctctctctaaagagctacatgttatcatcatttacaaaataatatgggaggtttagaattttatgcttaatatgctctaatatatacattctgcaatcaccactgtattaataaataaacaataatttagtaaattatggtcaacatttatgaaaattttaattaagctacttagtaaatgtattcgcaaaaaagttggattattaccttgtattttccgtggtacaacctttttgtcgacgagtttccaatcgaatggtctgacctgactttcagaggctgt

SEQ ID NO: 392491 - DNA, 801 bp, Cannabis indica
taaaatattaataaattaaacggattcatgtgggagtgtcatccctatctaagtcccatttaatatttgaggataaaaaatgatctctgtccccgccccattccccaaatagacagaaaatctctgctcctttcggagcatgtaccccatagaaaaaatgtatagttagatgagtttacatgggaatttatcaaacatttaataaataaacaattaaagataggattgtagatggtcaatttaatgggtttgtctcatatcaatgtaaaagcactttcatcatgtgccctaaaataaaaacattttaaaatatttaaagaattaagctaaaaacatatgaacacttctaattaaaagttcttttaaattttttaaattgtgtttgattgaaagtaataaaatggaaataaacatattataactataattattactttttttttttttttgattttaagcgtttatgtattacaaccatgatttacctgagactcgaacccaagacctccaagacacacacacccacctacggccacttgagctagcctcaagtggttaaactataattattacatggacattacataaatatatataattgcatgttattaatgtttacatctagtaaataataaagcttcttcaaatgagctctggcctaatatgcaaattcttccattaagggaaactaatacatggaagatataaaagctttagaaatgaaaatggactagttaacatatcactacatatacatctaaaaatagaaagtgtaatataattaagaagaagggttttttt

SEQ ID NO: 392492 - DNA, 1878 bp, Cannabis indica
attgtgagaatataaaaattcttgcacgagtaaatgtaaaatgaagattcattaatttagagaagcaacattgcatctctagatgtggaaaatacactatagtttatttaaatattttttataaattaatttctagctcctctttcttttcttatttttctttcattatatgcttattctttttaaataaggatatattataaatagttagagaaattgatgtattgtaaaatataaaaatgtgcataaccctacaaatacatataatctacaataaaaaaaatgataattttagtgatatattttaaaaaaaataataaaaaaattattgtgagtgcttttaaagaataaatgagatagtacaatattataggattattataccattttggatggaagatataaattttgtgctaaattcaatacaaaataataagtttgtgatatatttgattcaatatttataattgtgttttaatatacaagatgtaaattaagaaaaaatatcaattattattgatggttatttaatattttagtaagaatatacaaaataatattatttagatgttttttttacacttcaaatatatattttttttttttacatttttatagaattccacacagagttcactatagcaactaacagagcaacttaaatcgcaacctacatagaaaccacctgagaaactaccagagcaacccaaattaaaataaaaagttaaaaaataatatatgaaacaatattgtcaaaattatggtaatatggtaaataatattttataataagtaaagtaaagtaattgtaagttaaatttaacacaatatattttttttttttgctgaatcagataatttgtattgcttgaaacaaacatatttacagcttaatcagcgccaacaaggcctgaataatactctaattacaaatataaagaattaaaccaatctctctcttctatggtatttattgtatctagtaagtcattgattctttgtttcacattcattttcacttgttagaacacacctttgcatcgtttgcattttaccattcaaaaaacaatcatttctattacttcatatttgataaatcaaagcagtcaccgctgttgcaaaaattttcctcctgaaattggtgcttttggcccgagagatccatttgagcatggctgcgaacggtttgttcgaaccatgccatctcaaccatgttttaatctcttgcaaacacatgctgctgaaagaacactcaaagaagatatgttctgttgttttaaggtcacataataaacaacttccttcttgacaaacttgaaacttcaactaccggcttatggtttgaagcctcttttgtacagccaaccacattataaaactatgtttatgtatgttatatctattctaaactttcttatgtcatgaaactcgatttaacacagtattatatcttatgtcatatttctacatttgatacatttttagaaatagaatgattttatttacttattgataagtaaaatttacaaaaatatgacatttatctgaaaaagttattttgtgaaaaattaaaaaaattaaaaacaatttaagataactagtaactaaaggggtgaccaattacctaactccttagggtaactagttaccttatattatatttatcatattttctgttgttgttttgaatttttgccattaaatacatgattttttttaaaattgtattaaaacccataaaaatgtgtatttttcagaggtaagttgaaaaatgccttttttattcatcaattcatcaaatttacctctattttatatttctttgaaacatactttttttcatatgtattgtacccaaaatacccttacataagagaa

SEQ ID NO: 392493 - DNA, 716 bp, Cannabis indica
tctttctctcttttcttttttttcatttttacacaaaataataacatataattaattccaaccatattgtaaaaaaaatacaattcttacttaaaattatttgagtaatattacatacacatttaaattatacgcatttttttttttgaaacagaattatacgcatttattacacaaactaatatgtatatgtgtggatttataatgacattttgcatggttaataaataaattaattaaattaagaaaatatattaacttgtcccataattgatgctaattaagctaaagccatattaatataatatatataatatataatatagtggtgaagcgggtaagaagggtggtggtatctatcttcttgtgttgactattgaaatggtgatgtgagtatgagaatttaataattaattagtaaaaattacaattaagggtatatagcattttgaaagttattgatttctgttttattaaataatatttcaacaatacacattggtttgatgaaccagcatcttagctctctttttcatgtgcataatcgcttttagaacaatgaccttgtacgagatatgttcaataatcgagatgctgattttattttgagcatcccactaagctcaaatgtctccattgatacatggtcttgggtaggaaaaaaaacaggcgagttctcggtcaaaagtgctcataacatgctccaacaacaaaag

SEQ ID NO: 392494 - DNA, 952 bp, Cannabis indica
ggtaatctatcccaaattgttgggagtaccctttagctactaagcaagctttaaatctttcaatttcacctagggcattatattttattttatatacccatttacagccaatgaaatggtagccatcaggaagagaaacaacagtccaagttttattggctataagtgcaacagtttttgaatccatagcttttacccatacggggaattttgaagcttgggaataactagttggttcaaaaaccaaataagcacttaaaatggcagcacgaaaattaggagaaaacttgtcataagagataaaatttaaaataggatgtggagtagaaaactcacaaatgtagtcttggagatgaggtggacagatgatcgtccttctagatttttttggtgacgttgggccacttggaggggctagtggtggtggacctagtggtatggttgtatgtgaagtggctggaatggccacttgttcaggtagcggtgaaggatgtataggtacgggtaccgcaactttgggaggagcctgtgaaaggccactaggtgaaccgttagtgttagaaaagaaagcatcgataatgtcattggaacatatatttttaagggaaaaatatgttcataaaaaatgacatctctagagtgaaatatttgatgagtttcaagatcaagtagagtataagctttgataccaaccgggtatccaatgaactcacaagcccaagatcttggggaaaatttgtaccttaagcatccagagtggaagcataggtaaggcaatcaaagatatggagatgatcatacgaaggtaacctgttatacaacaactcaaaagaagatttaaagtgaattaaaacagatgttgtgcgattcattaaatatatagcagtattaataaagtaactccaatacccaagagataaacgagattgaaaagcaagagagcgagcaacat

SEQ ID NO: 392495 - DNA, 951 bp, Cannabis indica
ccaggcttccataaatcagcaatgatgttttgaaagatctgaaagtcagacacttttccggacagaaggcgacccactagacaccatctatcatcaaattgcagctcttcctcatcttcattatcttcagcaagtgaaacttcatgttcctcctcatcttctagacatatatcagcccatctcattgacattaagggatcctctgtactagatgaagccataaggacaaaaagaataaaaagaacaaagacactttctgataaaacttacacgccccagacagtacaagaaaacaaaaaatcacactctaacaagagggacaaaaacactctctaccaggagagaccttcaagagtttattttttttttgatccagcaaggcatgtgttaatgttaaatccgcagctccaaaaacttgtacagggttgttagtaaagttttaatacttagaaaagttatgaagccacatgattattaaattttactaattattatactttttaattttatacttagttagataacacaaaattaaattataattaagaaataaataaataaaaaaaataaatagacaaacaacaaattttaatcagaaagtaaaaacctaaagcattgatttccctattttaaactatgaatctaaatttactaattatctaaatttatcttataatttgtagtttcaacaattctaatataacttattaacccctctcaaacgatgatagattcaacttaaattaactaacacgatatctctattcaatgttaatcaaataagcactcataaagcaatatgattctttttaaatgaaacttatagaattagtggaatatctcaatctcacacttttactatgttatacaattcttagtccgattttaaattacctccctcaagtgtaaaacctaaaatctctatattaattaatagtgatcaagcattaa

SEQ ID NO: 392496 - DNA, 1551 bp, Cannabis indica
atgttcatcagtattaatctacgtaatccattgaaccaaattaagttttctgccaactttatttattatttatacctatataatttgttaaaattatgataattgatcgatcgatcatgatcatatgatatgataatatatagggaattgatcttgaagctgctattagctgttaatttttttagatctggaacttaattagtgttaatcttggtagatatattatcttatatcaagacgtgtccatcatataatacatatttatgttgtacgtttaattaatagtacctatttaatagtaatatagaggattgattaattacagaaggacaatgaacagtgtggttgattggaatattgccaaaataatgagcatatccacgacgatattgattggcaattgattcaccaaactctcaaaacatatatggcatatataggaggacgactgctgacccctaatataaatataaaaagtaaagtattatcaataatttattaacgatattttttaaaaattattattttaaattatatggacctgatacttaattgttctactaagaatataatacaaaagagattattaggcaacaggtagcatttctcaaatatgtacatactttttataatagaatattaattgttattaggcaccaatatttagcatttcttgacatgtcgtcttttgattgactagtaatgttttctaaaaattattacattaaattatataagatctgcaaaaaagtgctagctagacatgcaccactgttgccaatttttctttataatatatatttgtatatatatatatatatactatctctcttcttcttttttttttttaatgatactatgcggtcttgttttattattgagtacattaaggtactgtcaagtaatttagaaataatattgtatattggtaataataatgctgtatattattaattaggagattatacatctgcgctctctctaatatatatttatgtgtatatattaagaattgtttaatcaagacacattaattaacgtcgatatatatgtacaccccataataacttttatacaacagcattgcaaaaataaataaaacttctacacagcaatttttgaaatttttagcgacgacaattatcaccaaaagtcctgtttatactatagtaataaaattctttgccaatagtaataatttttagaaagtattattaaccattcacaaaatgacatgtcaagaggtgctaagtattggtgcccaataacaattaatactctaaattctttgccaatgtaataattatattttgactatcaaaaataattttgaattttgatgtttataaataactgaaaaaaaagtggggcgttttcttttgccatctaacatctctatatgttagcaacttaaaatgctttaaaaaatcgaatctcagttatggttttatagatgtaaagtatttagagaaactttgaatataagaataaaaaaaaaggtaaatagtaacttgcattttacttttttttattttagttagtaaagtaaac

SEQ ID NO: 392497 - DNA, 1066 bp, Cannabis indica
tatattttgacactccttttgttaattaggttcttttagaaactacaaacgatggtgcatctaaaaacataaaatataatgcttgtttaatttttttttttctaaaatataataatcacataatttcactatgtttcttttgttagattttgtttcttttaccgttaatacactattgcaaaaaataactttttacttctgctgtaaagtgacacataaataatagttggtaaaaccgacgtaataacagcagacgcaaatagtcttactttttacttcaatttaaaaactgacgctaaagggtttttttgcttacaattaagaaccaaaacaaatagtatgcactattggcatcgttctaaagtgaagcaagaaactttacttcaatctgtaaccgatgctaattggattattgcatcggttacagtttgacgcatatttgtacacttaagttttttttttttttttttactttttttgtcaactataaaatgatgcatagttgtaggtaagggaaaattacaaatttctctgcaatttttcccacctacatttttagatattagacttagtttgtataacaatatttgtatgactaacaataatatttgtagtgtaataatgatattatttttcgtgtaaccaaaaaaattgatataactgttaattatggtcggtttattcagttacaacaataacggaaaagcgagatacttaattctgttatttccttcgtttttggacaagctatatatatctgaaatctcactcccttgtgagtaacttgtatccaatattttattagaccagaataacaaaacacattctttttccccaacaagtctctctatcttttttctttctagtttgaagaattgtgttcagttcaatatacaatcatgcctagttaaatgcatatgttgaatcgattattttcccaacaacctggtatcagaactggggcgttctttgagcttggtgatcaggtaaagaagtgttcttgagctttgaagatcgagggaagagctcctgcagatagtgtgaagaacgcaaggtgggaatcatg

SEQ ID NO: 392498 - DNA, 632 bp, Cannabis indica
attaattctaagagagacttactttgggtcaaatgggtcaatagcatctatttgaagaacaaaagtttttgggagtatgaactcaaacaagattcgagttggtattggcgtaaactttgccatgtgcgagacaagttttctagagaggatgtgcaagcggctggaagaggtaagaaattcaaaactaattggctttacaatagcaaattagtccaacattctttcccctacaacacagctgtttggagttctctaaaccttcccaaacaccgattcatattatggcaagtggtcaataacaatttgttaactcgagataagcttgctcagtttcgagttgtccctgattccttggattgccctgtttgtgagttggaagccgagactcatgaccatttattttttgattgtgtgctgtcgagtagagtgatgcaaggagtttttgattggctgggattgcaggcttggccgactactgctgccggatggagaagctggctacaggtcagaatcactaacttcagacacagattttttgtagctgtgatggctgcaacggtgtatagcatttggaacaacaggaacaattgtattttcaatagacattctttttctgtcaactccattgttac

SEQ ID NO: 392499 - DNA, 1017 bp, Cannabis indica
ttgatagttaagggggttttgccgcaaattactcaattttaaaattatgatattttacttaatcgacacgcatcactcaaaaaaaagtattaattgtactaaaatttaaaattgttgtcgctaccttatggtacgccctccctactgtctaattctcgcttcaccttgagtgttatgaaaatttaattttttaggcaaaaatgatgcttgatgctataaaaatttgattttttaaggcaaaaacgatagtaaattgatgcttaacgatagtttacgataaaatttgataaaaaaaatggtgaaacataacttttcacatggttgttgttgttgatttgaggtgaaattttgttatttgaatttggtatattttcaaaacttacacgcttatatcttaaactttgagtgtacatttaagtcttaattttcattatggcaaacactctaagtttacaaccttaggattgattctacatgttttaaacatgtaaatcttcaaaatatgttatttaataaaaaatataaaaaattgctaactacttaaaatgcgtcatattattatgatgtttaacactttaaaataccaaatagcaatgctccatatagacatagttattataatttgcaagcagtggcggaaccagacgacgagataaggaggggccaaataaaatatattttcacctaattttttttagtatgtaatattttataaatcaatataaaaagttaattacctttatacaatgtatataaaataatgaaaaataataaagagcgccttatagtgccaagtactaaaaaatactataaaaactgttacttttagtgacaatcttttagtcacatcataaatttgttgaagttacttgtgactacaatatagtatttagttacaagttgtcactaatttaattttaatcacaacaaatattgtgactaaaaacacatttagtcacaacaaattgtaatttttgtgactaatacttttagtcatggacctttcagtcagaacac

SEQ ID NO: 392500 - DNA, 956 bp, Cannabis indica
aaagaaaataaatttatagagtattaaactaaaataaaaggtgctatttagtttacatgtatttttcttcgtttttaagttgatattaaaaattaagagtgtaattaaatatctaattgaaaaattaatataatccaatttctgattattagattttgatgtctagttagattggatcgaataataattttgtagatctagttactaattagatttgatcgaattaagagaaaaatgttaaattagattgaatttccaactctaatcactacaaaaagaattaatattttacaagtattgttatagaaaacaatccaaaaaaaataatataaaaataaatactaaaaaatatttgtagtatttaatatcttctacaatattatatattatattataattattagacaactaaatattaaatctcatataatttaataatataataatttttataaaatatcattaactaatcacaaatattatttctataacactaataataagttgtagcaatataaactttgtatagtatttctttagagggaataagttttttatagacatctaaaaaagtacttttaaaattgaaaaatattatgcaccacaataaagaggtctgaatttttttgaaaaatataccaaacacattaaatgcatctgcaaaagcatcataagcttttggtgggtacttccttcaataattgtagaaagatcaattattatcattcaaaaaaaacaaaaaaaaaataaataaaaataattgtagaaagatatttgaaaaattaataaaaaaaattagtgtgaaagaaaattttatttttttcaacattatttaagtataaaaacgaatcataagttacatgatttcttcccatattaaaagtgttttaatagtgttgcgaaaattattaattactacgcaagtgcacgcaatcaagtagtatactaacgcaagt

SEQ ID NO: 392501 - DNA, 783 bp, Cannabis indica
tcttagtgatggtgtacaaaatcaaccttaattatttgagtaaacccaactttgttaagcaaaaacccagaaaccagattattcctcatctcaggagtattcattacatcttttagcaataatgaaggtctttctcaaggtaaactttagttccacgtttccaattccagcaacaatagtggtgtgggagtcttccaacaacacttttttgtcatcagtagttgtgtatgtttgaaacatagcatgatcatcgcagatatggcacgaggcgcctgtgtgtacccactacccttctaatccaccaatcgggttgttcaaaaatcatagctgcaaaaagcttcttcagtcaaattagtttgaagagcagtgctaggttcgttcctacactttcgtgccatatgacccgacttgtttacaattgtaacataaaaagtgagtggggtcattcttgcttaggtggaggtggctgccttccatgttggttcctattatggttccaactctgattattatttcgaggagggccgttgcggttagaattgaaattcgagttgcaattctaattcttaaaatttttgcctttaggcttcagaaccgctagtgtggacttcttagtgttgctgttagaaacaacaagaactttctctttctagtcttgttttctcgcttcctcctctataggaaggcgggtgatcaaactctcttaggaaaattccttagtcttaagagtacttttaaaatatcaaggattttgtgattgagaaaatgtaatggtggaggaaa

SEQ ID NO: 392502 - DNA, 697 bp, Cannabis indica
ttaattgattattgttttcatgtcgatggatggttgtgtattatatagcgaatgagaattgcatattgtgtcgttttttctttttaggagattgtcatgaagtcgatctggtacatacccataattagaacaattttaacttacaatcttgttggagtaggttgaatattagtgcggtaaccatgtctcctttgaatttttagagttagtttattgatgtgttatggtaacagactataagagtgtgtgaagagctagctatggtggcttgagcgatttggaaggctaggagtaaaataacttagaaggacaagacttctttagttagaatggtgcttaattaatgacaaagtgctcaactaagaaaaatgaggttgttatttgtgcctgatagtgtgaatagtgttttagaacattgggttgaacgacatttgaattcaattaagataaatgttgatggaacaatctttgacttataaggtcttttcagaaggtaggggtacctcgatatggtaatggtcgcgaggaaattttttctattagttaggactcgggttggtcgtgctcaacctgctatggcgtaagtggttggaattaatgaggttttgagttggattaagtgtaagaattgacaattttattattgaaactgattgtttagtcgttgttaaagcaattctatagtacggtgctatat

SEQ ID NO: 392503 - DNA, 1159 bp, Cannabis indica
ctataaaactgtaaaaataataaactcaaaaaataaaaaatcaacataactaactaacgaaaataaaataaattaattgttttttttaatgccaaccaaacaataaaaataaaaataaataaaaaaaatctaaaaaaaaaaaaaagaaaaaaattgtaatgtataaagaaatatataattttgttttagttattaattattattattattattattgatgtggtacatgcctagactttgcaattcaacattcatacataatttatgacaacaatattcacaatacgcttttccctttcatagtgctagcaataactagaaaatactcatcttgaaaaaagattgacagcatatacaattctatacagataattataaatataaaaaagtgggaattgtcatataatttaacttaactatttttttgtttgaatataattttagttaactattacatgcttaagtaatttttttgaagactagaaatatcaataataaaaaattagcattaatttccacacacacaagaaaaactccacatataacttttacatagaatttcctgatttggttgtagttttatgctcaagttagcccttgaaaattgtcatttctttagaatgaagcaatagaataatgtcaacaatctaagtactgtaccatgcatgtatggtctccaaattaaattatttaaatgataattgaaaagacagatattattacttggttgaaaaacataaactatatatcttttggtgaaattcatttattaacagttatgcatttcaatgatgaacaaattgttttaacttttatattacaacactaattgctgctatcatagttaagaagaagaaaaaaaggcctttctttcaaaaataaattaaaaaaaagcaatgtaaaagccaaaatgtatcacagttttatcgcattcttcattttgatattctttgttgcaaaaaagttccttttgttcttggcatattgcactagaaaaaagaattgctgaaataaaagtattactactgcctaacaattttttcagtataatacctgttgaataaacataaaatttccaacaataccactattcatataactaaatactatcttatatcatataacttaacaaaataatatttaaaaaatatacacacac

SEQ ID NO: 392504 - DNA, 1354 bp, Cannabis indica
actagtctggtaaaatgcaagtacgaaagaatatcaatatattaatatcacatagtaactgttataccccaagatagtaaaatagagtatgagtgattcaaaaaaatggtatttgagtcattgtattgaggttagttttgtgagtaagaatatgttctatatataggtgagtaaaggaagaaatgagttatgcatgaattgagtatttttatctctgcatcatggagagtccaggcctctcaaaatcctaagtttttttcactgcaactatcaaatattagcaatactaattcagatctattttcacctattatctacattcattcattgctatttctctgtatatttactactattctattgggtttacatcagttcatatcagtaacttattatataacttcttagcctttaaatgtgaaaagaaaaagcataaaacaatacactacaattctacataccattcactttggaacaacaaagaaaaacaaatccaaaacaaagaaaatcagactacaaataaaacaaatcccaaaactaataacagttgaacaaatcagtcatcgaaaccactttcatcacactacgattcaaagaaaaacaaatccaaatccaaaaacaaatcaatcatcacactacaaatccaaaacctcatcggcttcccataattcatttcggttgctgaaataatggccctttaggtgtttgttgaatagattatcaagcacaagcaatactatttaactgttttatttaatcccttaaataaatatttaacttttattttaaacatataaatatgaacacaaagttgtcactagtcaccattctgatctttaccataatcaaataatcagaacacaaggcttgttaccagtcccacccaaattcacgttatgcaaaattgaaacaatattatctaatctaatctcatctacctagaagtcagagcacacaccggttcgacaagggaggaggtgaacagagttgtggtcgcggagctggaagtggatgcagcggtggcggtcagagattggatgtggaagaagccgaaggtagtggttgcagagaaggagaagcgacggagaagatggtggtaatggtggcggttggagccccgtacatgtttctccctttttctgaaacaggtgttatatttttatatatatatttcctttattttatatataagatgtctttatttaatagtttttgttagtttaggtggcgtttggtaacacttttttaatcagttttctatttttaaaagtggaaaagtgaaaatatttttcaaaaacatgttctataaaattgtttttacttttcaattttataattagaaatcaattttttt

SEQ ID NO: 392505 - DNA, 615 bp, Cannabis indica
gttttttatatatacatatattagtcatttacataatacatattacataatataacttaactagcagataataatactttataacttgattttctattcgtccaatatatattatgggaaaaagaactattaatttttttagttatataaattttttatccaaaaaattaaaaaacaagttgtggctataataattgtagctccttcaataatattagttatgtacactatcttatattttatatgtttctatatgtatatacaaggtgtatgatcatttatgtaggtttatatttatttgtaattatattaattaatatattgccatcaaattttctaataatatatattatgaagaataatttttactataaaaaactcataataactttttaattataatataaatttttcatgactgaatgtgacttttagtcaaaaaaaaaaatatttgtgactaaaacatatcatttaaacacagtataagttgtactaatttaattttagtcacaataaattataaattttgtgatttatacatttagccacgaatctttattttaatctacaacataagaataataatttataattaatcacaacttttttactttt

SEQ ID NO: 392506 - DNA, 513 bp, Cannabis indica
tattaggtaagatatatattattaattaagcttgaattaaagaattaatgtacatataaattaatttcttacttttgattgatagtagaggaccccatttattcctataaaatggtagaatcagacttatcaccagtcccaaaacccaaccttggctgcagttttattaattaattaattaattaataatctccgaaattaaaatgtacaaattattctgaataatatataatcaattaacttacaaagagttccaaggagcaccagtaccaccgcctgaagctgctcctgcaggatcaacactgttacacatcgtcttatgcctgcatcaatcaataagaaattatgagtcttttatacataataaagatttaaagatattctttataaatcttaattaattaagatcaagcaataaattttgttcatggcttaacaacattatgatctaaataattaaacaaaaaaacgtaatatactcgttgtatgcatcatatatatatatataaaaaa

SEQ ID NO: 392507 - DNA, 1009 bp, Cannabis indica
acaacaaccaaaataacagaattggttttattgcataacagtaattaatcaaaatataaggtctaaaatagtataaatttaaaatcacatgtttttttaatttataatcatacaacaaataactaaataaccaaaatgataagtattattaaatggagttcatttccaacccttacgtaatagctaagggggtgccaataccacaagacatgacgcacttttattggtgtatattaatattaggttccacacatttcaatttaataaatgatataggaaaccgttaaccaattataagatgctacgtgggtgtggtattgagcactaccaaattgcaatgctcaattactaaagtccatagacctcagaagagagacgaggtgtcaaaagaacctctagtggggttgccttaggaatagtcaaacccgggctttcactcatgtcaataggcccatcaaccgagtttttgaactcaaacccttgaagtaaacgggcgagtgtaaggtggagcacttgaattgcaaaagatgcgccagggcaagaccgacgacccgacccgaatggaatgagttcaaattgttggcctctcatgtccacgtgtgcatggcttgtgagaaacctttcaggttcaaatttctcagggtttgaccagactcttgggtctctttgaatcttccacacattaaccactaagcgagtgccagctggaacatggtaacctgctacggtgcagtcttccaaggcttctctggggccaaggaggggcccagctgggtatagacggagggtttcttttacaatggcttgaaggtagacgaggtttttaatgtcggaatcatcaacttgtctatccctacctacgtggaggtctagctcttcttgtacttttttcaaaacttgaggattgttgaggagtaatgagattgcccatgttatagtccctgctgtcgtgtcgccccctcctagtataagtgcctatgtatatattatagcaaattttaattaatat

SEQ ID NO: 392508 - DNA, 646 bp, Cannabis indica
tggcaaacaaacggatcattaactaaagaaaaaatagaaagtaatttagctaaacaagttcatctatgaagagtatggatagttaattcttgcgtagctatattgattgtttgatatacgattagtaaccacttttagaaacttactatatcatctaacaatagatcactaaaaaagaagaagcatgtgcttaatatatctcttagatggcgttagattagaggtaataaaatgaaataaaatggaaagaaaattaccttttttttgttttttggttgtactttaaagtattagaatatcattctaaatttctaataaaataactttttattattttggtgggatgactattcaattttgaaatggaaggaaagcccgacgaaagatgagaaaaaacttaatatttttttcttcaattttttttatctgctttaaaatttgatttcattccattccatttatattctcattcttaatcttatatttgtatcatttccaaccaaacgtcaccttacattgataaatgaaaatgtgtctcactaaattatgatatggtgggctcaatttttgttttcggcttaaatcacattgaaactaaataacatttaagcttgtgaagtttacaataatatatattatttgtatc

SEQ ID NO: 392509 - DNA, 1177 bp, Cannabis indica
agatttgcttaaatgttcattttactcatactgatgtcgaatggatacttacaatacaataccactgcatttcttcccatcgcaagatcgattgatttggcacaatactattgctggtatttatactgccaactaaagtcttcacttagttgtttatttagatgaagctaataactaccctccctctacaaattatagagattggtaaaaatccttctagaataaaaattttcgacaaaagatagagatttttgtatggagggttatccaaagtgcattacctgtggctgctgctctccatcgtaagaagataattaattcagctgtgtgcatggaaattaattgggcatgccttatttagttgtagatatgcaatgtttgtttggaaacaatcaaaattcactgttgacttcaacagagctcaaaatatgtgtataatggtgattatttgattaatttgtcatctctacattctaaatctgatatggagttgattatttgcctcatgtgcaatttcgaacggaatgaaatcaagttttttatggaggcacaaggcaagatagtgcttatgtggttaatttttctatcacttatatggatccttttctaactactcaagcaagtaaaataaaccaattgagattatccaaaatccaccccatcattatggacccctagaggggatcccacgagaccatctgactcacaaggtctaaaagtgaacgtggatgctccaataaatcatgaaacaaaaggtttttttttttatgttggcacaataattagaaattgttataccgaaattaaaaacaatgaaactggaaggaattaccgatagaaaattttggctgagtcgcaaacaatgtctctttcttctagacatttcgtgcctctgcccgaagtgtgcacaatagtctagcaaccacggcgaccccaggataaaaaagcctctgtatacgtacgatatgttctggaccgaactatatcgctatattacaccctaaattttgctttgagaaaaatcataaggaagacagaaatttttttttgatgttgaaaaagattctattattctgatacgacttatatagggaagtcgatctaagaacaaatcgtaatattatcgtggaggaggagttggatcatgacagtaaaaagcggatcattgactgatcgc

SEQ ID NO: 392510 - DNA, 2123 bp, Cannabis indica
attagaaaaagtaactgattacctttttgagatacagagaggccacatagccctagattcttaaagttgtccccccacggccacggccggcagattttacaaaatataagtttcacttcttttttttcttgttcttcctctgatgactttgaattttctttgggagtgtttttggttgctcactctaaaaaatcacacacagagttttcatttctaaattattctaacttaatttatggatctctattctcccacccacatggcatggtcctgaaagcatttccagctaaaaaaaatcagcacgacttttgtatgtatttgggttacaaaaagacaagacatagtttcaggctttcagccgttctcgatggacgtgtgtgcactaagtgaattaaaaatttggatgtatagagatcatacacacaataaataaaaaatactattttcaaactaaagatgatataatatggtaaaccatttaattatatacctataattcaactagagcattgattacccacttaaattaattatttatctatctatatatgtataattgtccaacgcataatttatctaaaaaatattattgacgcttaacatctttttcggtcggtgacatattattattgctataattaattattatcagtctcatataaaatatattttaaggaatatcgctaattaatcgtagagcgccacctataaaaaatactaaaaaccactggtaccaagtaacaatgctctacttgtgaagactcagtcaaacccatataaaatagtttttaagaaatatcgctaaccaatcgtaaaacatcacctataaaaaaatactaggaaccacttgtactaaatcgcaatgttctatatgtgaagactcagtcaaacccaatataagaaaaagattaataaaagaagtgggtgggacccacaaaattatcttttttaatttatttaacatccccaccgaccctttctctgtatcttcgatttctctttctttctctcttcaaaacaccaaagacaaccccccataaccacaacctatggagcacccacaacccacctccggtcaccgttcgatcacacgcacaagagctacatgaccaccgattgatagtgaccttacacctcaagtttggtggcaatcagagcaagggcgcaaccatacgaaagcttcaaagttttgcgtcaaaactttgaggcgacatttcgatcaactccggtcaccatttgaaaaatggttggtaccgttgaaatcagtgtcgcgagaggaacatccccactaagtcatttcgctcaactcgttactttttctcgatgagatttggggtatctccgaccctttggaagcattttccagcgaattcggcattttgtttgggctaatgggttgtacatccatgttctactcatcaaggtggtcgttttgatatatactattcctattttcagtgatgttttcggtacactaatttctactgccaccgatagttaatgtgcgccgcttatctaaggattcagaactccaaactttaaatatagtcatattatatgtcgttggactcgattttgaatgtagaatgcaatgatgataattatttagtcgcttgatggtataggtgacactgatatctaaaattggactaagcaattggagctcgagacttgagagcttaggatcgttttttagacaaagtttaacgacttgagagaggtaaggactaaacttgattattggacttgattttatatgtgttgaataatattagacatattttaatttttataatttgtaaattatttgaaaaattgaaaacttaatctgcatatttttctagactattctggggcactgaaggtcaaatataattttgtacaaatatttatgcaagttatgatttttgaatttatttttattatttgcctacttttggttatattgatgagagccatgttgattatgatttgtgcatattgttgtttcacgacctaatctctgtgtcatcataggtagatcaagtgtgcactcacctgtaggtgaaagacctagaatctgtacagggagtgaagtgaatttaagccccgatattatggtagttatgttgggttttatgccc

SEQ ID NO: 392511 - DNA, 954 bp, Cannabis indica
tagtgtgaataatcaccttaatgatgcagtcacgcttacaccagttgcagttgaataaaagaatatattgtgggactggttaactatacaagtagagttcgttgaaagtggctattccaattccgatgactattacaattccaaataagctagcataacaactagggtttataattgaaaatgctaagtggtatctcaccgcatgaggtggtatacatagtgttattattagtgtattttaatattgagttctatatattttaaattaataaatattttagagaaccgctgataacttttaattttgtctttaattaagctatttatatttagtattttttaagtctttctcttttctttatgtgacttttggtattttattcaagttggtaacttttgaatgatttttgataaagaaaaggctctatgtgatgcataatttttgtgcagattttgatgcaccaaaagtagttgtggctgatttctctacattaattgatgtagacaattttgagacttaggtgggggggatgggattagtgtacgtgcagcagattcactttttttttttttttttttttgtgtagtgtaggttgtttaacacttttatttttttagtagtttttttgtctaccgagttctttattatactgagtagtttattttttatgtatgtttatttgttatttaaagataaaagtttactgtacagttttctaatggatcgtatatatatacattttgtattttagattttctagtgtgttttttgtttttaatgtgtttgtgattaataatttatgatttagtagtttttttttgctataatttttgttggtatactatttagtttctattgtatttgtttttttattaagtatatttttaataagactgcgcttgatctatgtaatactgttgtattactttttattttaaattagttatttaagg

SEQ ID NO: 392512 - DNA, 1287 bp, Cannabis indica
ctctctctctctctctccaacaagcatataaaaactagtaacccgatgacatgtaactcgtgaatctgataccagtgaacccattctcacaggttttgactctgctcagccctagttaaaacaataattaattatttctaaaatcataattatttaaataatactttattatttcttaaatcatcaaatatcttatttgtgttatcaaggtagtttgggaaaaatgaatatgtaagttctaaaatctaataaattaagtatatcgcaacagtagtttttaactcaacaaattaatttattagctatgaaaattcgccctaagaaaatcatagtcacactctcaaaacttcgatgttgttattcgcattttcacctgcataacccgttggaaataattaaggataatatttggagacaaagagtcattaagctgcctaagggcctcactccgtgatcccagaaggttaaggctctaaccctgtggaccagtcctcacagacctctgcgagtgaggtctgcaggaatggagaccaaaagaaggtgtccgcgagtcagcaatcctctcctctggaaggtaagacattttactcccgcgaagatcatgaaccttataccaagatgtattagttcggggtactcctttgaccatggaggttcggtccacacgtgccaagctaagggcccaccgctcgctcatttcctatgtacaatgtcaaaggttgtccttcatgccacatggagtgtgcatgtccttgtgtactgtgcaaaacaatctaacggctaggaggaggggtaattcaaatgaggcaggccctgggatgacacgtgtccaaaacaccgtcagtaccaccagtacaatctgtcatcgataaagaccacatggaaaatatgccacctatcaatccaatggtgggggttcatccttatgaagattcatcaacgacgctctatgcgagggaattgacctataaatacccccaaagacgcaccatgcagggaatccaaaaaagaaaaagcttcgacttcttctcctttaatcccttcaactctccacctaaaaatcgaaggtgaattctttgtaaagacattactgtaattattaactctagaatattcctactaagctttctcttcttcaagagaaacacggtggattggagtaaagtccatccctttgtgtatatgtattaacattcaccggccagagtgcctaataatatggactcgtgtgttgggaatattttaccaggatctagatttactaacaagtatgttgaattaacatcc

SEQ ID NO: 392513 - DNA, 1628 bp, Cannabis indica
gtacaattcacattcccactcctttatttttattattttcttcattttccattctttcatattttaaatttttcctcttagttatcatctactaggaaaaaacttagtaatgatagagacactaacttctattttattttttttttatttttttttctttcatgaatcagtgattttgtattgcactaaaccaatttgtacaacttataggcacctcaatagaggcccaaaaatgattgctaattacatctttttacaaactttggaaccatattctatcctctctctttgttttcttaggcatgaacatggtaactcttagtttgatacattgctttatgccctcaacaattttatttactgtactcttctcctttctccaaataatcaagttccttgttgtccataaattgtagaccaaagcagcacatgttgctgccagcagcagttttttaaacctgctggtttttgccctgccaatcaatcgaatgtgctgggatagattgttactcacagcagtccagccgagccacccctttaatttcctgcaagccttctcaaaaaaattggcattggaaaaacaagtgatcacttgtttctttccctttgttacagaaacagcaagcctccttaagttgtaacccaaatttgaggagcctatcctttgttttcaacctattgtgcattgccaaccacagaatataacaatgtttaggagtgtttagtcgagcccatacctcattattctaattagttttgatgccatccgaggtgcacaacttgtaaccattagctatagaatactgctggctggtgaattgttggatgttagtgaggtctttcggctggtttttcaaagccacaagctttttccaatgccaacttgcatgaattgaagtagtgtggctcaaccattcaactttcctaaggtacacactatgcacccatttcatccatagactttcttgtctatttgcaattgcccaaacatacttggacttggcagctttattccattcctcaatctttttatccctaaaccccctactgatttgggagtccaaaccttgctccattcgattgagccacctccttcatagtttgctaagcctttccacaaaaagatctgcatattgcttcaatcctcctgtataatttctttggtaatatgcagatttggctccaataagcttggatggctatcaagatagaatttgtcaacactgttctagctgcaaatgacaaatttctggtactccagctacgaattgttgctgtcattttctcagcaaggatctcacaatcagccccagaaattttctttacattgattgggattcccaagtaggtaaagggcaacacccctcttgtgaaacccgaggctctaagaatctgatcaatgtcttcaccctccatattactacaataaagagcagttttattagcattcgggtataggccagatgttgtagagaaaagtttcaaggcttgtagcatgtacatcacactcttcgtctttcctttgcaaaatagtaacacatcatctgcaaaagccagatgattaagcttcaattctccacacctgtcatgaaaagagaaatcctctttttctcctatcttccccatga

SEQ ID NO: 392514 - DNA, 668 bp, Cannabis indica
tagctctccattctttacttttagtggcaaaatctatcaatctcaagtttgttggcaaatctgcagtccataaaagtagtataagtgagtattgttataaggccctcaacaatagggtagcttgagatggtgttggttgtctattggaataaaaaatagtttttggcagttaaattttctcaattatcttttaatttgcagttaactcttcaggctaaatttaggcagtaaagctttccaaactactaaactgttaacaaatttattccaggatattttctcacctacctagcatccaagttgacgccaattgtcaacttgggcgctgggatgtcaacatgagcggtggctggtgggtcttaaacaacttttagtaaaatagtcataactcactcaatattgatttaattgacgcgattcaacttgcatttcaaagatattttaattctctatcaaattatgtctcacacttcaatcgaaattctaaggctatcaagtccaaattttactcccaatagagttacgaaaataagccacagcttgcccggagtgggtcctgtcgtcgcgacccgaactccaaaaattgacaatcaacttcagtgttagaaaaaaataataataaacccaagatcaatttgtatatagtatagaacacaataataatatat

SEQ ID NO: 392515 - DNA, 567 bp, Cannabis indica
tttccttttttatttttcaaattggtttctcttttattcttcttttttatccttatatataccaatttgtatttcatttaaatctcacaaattctctctatctacccgatctctctcttctttattttttttctctctttgttttcattcttactttcagaattccatggcttaaataaagaattcagggcgtccaaggaagatagatgaatcagagactgccccattgaatgaatcgcctgagccatcacaatcacctcctgctactgcaactgcctcgattctagttaattcatcgcctcctcagcgtgaatcaaagaaagcttcatcctcaactccttcttccagcaagagaacacccaaaaccctagctcaaaaatctatgacggacaccgaatttcccaagagttataggtctggttcaaagtcttcttctcattttgttgagggctctctttctcgtggttctcaatcaccacctgttgctagtggtgtggcttctgcagcatcaacctcaaaaggtacttcatctcagacccgtgcccagcaagcctctcttgaaaagaa

SEQ ID NO: 392516 - DNA, 699 bp, Cannabis indica
acctgtcaagaacagatcaaagcccttatgaagacattttgctgcaactttcagcaaccatttctacatctgaatttgaactcttcttggtttattgttggagtatatggcatggaaacacagtaaagacacctgctgatgttgcctcatatgcaccttcctttctcaaagaattccaagcagcccgtgctaagcatcaatagccccatcgatcacaaccttccgctgaataaagattcaaggctttttctgaattcacacatgcgccaagatggacaaccccacccccaggaagactcaaactaaacacggatgttgcaatagacactactaataatgttgttggcattggggcggttctaaaaaactctaaaggttgaattgttgtagcattgtccaaaccattacaaggtaacttcagagcaaaagaaatggaagcattggggcttgccttcagtctacaatggctactatcgaacaacctttcggtggacctcatagaaatagattctcttttggttattcaaggactgaaatcctctcatttatttatttctgcttttcatgctatacttaaagatgtaaactatctagtatcctattttccacgagcacaaatctctcatgtatcacgatctgcaaatacttatgcccacactttggctaagttcactcttacggtggatactgattgttctt

SEQ ID NO: 392517 - DNA, 2211 bp, Cannabis indica
agaagaggaagaagaagaaggtgagtgtgttgtggtagtgaaacttgaattagggttttgagagggagaagaatcgggtatatacgaaaatgtataaaaaccagcttcaagagcaattccaccaaataaaaaatagaatagcaattccattagtttggggaatagcattactatgcaattcttttccaaaattgttattttctaaccaaacaaaataattaaattagggtcattagtattcaattccattcctttttggcccattacctccaactaaacgggccctaaataaataattaatattcaatttaaaggatttttattaaataaagataaatataattagtaacaaacacagtaattttctcctttttattcatttttttttactagaatcatttatggtaagtatgatggatttccttttaatttttatatagtactatatttggtttttttttttagaaaaaattaatgtgggacttgattttgtgtctttcattttttgtaatgcatttttaagtcatatacatacgactaatttggcactatatattgtggtttttttagtatatcataatagtattttacaatcaattaaataattaatagcgtaaaggtctaagttagaacccatggttttttcttttttctcatctcttccctcaccattagtggctttatatattgtggtatttaaataatatcaacagcaattcaataaatattgtgtttatttatactgtttataaaattttgggttttttatcctatattaaccatattaaaatttaggatagaaagtattttaggccaaaatatgagagatacctatcaagtatacatttatacttagtttctattttttttgtttatcaattccttaaatctcaaatgaagattgatatgatatccttgtttggtagcgtcattcaagattgtaaaatgatgcttgcatctcttaataatgttgttgtgtcttttgttaagcgatcagccaatgtagtggcttataagtttgctagagctgctagattatatcctgatcgtactttcagtttggagactgttccaactgagttgctatctagtttggtagctgatgtgagggtttaatttcaataaaagatgaaatttccatttaaaaaaaaaaaatctcaaatgaaagaagaaaaaattaataatataattttcatatttagatttaatttcgatttataataatattttatgtcttttttagatttttataattatcgttattgaagaattcaatatttatatatatatgactcagatcacaatgacatatttattagctagaatatatatttttgaacaaatgatatgatataatgattaatgttaaattcaatttgagatatatttgggatatataatattattaatggtgttctctttttaaaatggatcgagcttgggatgaaaataataagatattattaagggccttttcaatgagagggatcatgtgttgattaaaagtgtttaactgagtaataatgttgaggaaaattgttggttttggtggaaggaagttgttgcaatgatttgttggtgtatttagaacgtttgtaccgactttagagataataagatcggcaaagaatttggtaattaagttgtgaaaatttagtaagcttaatgttgatgctactatattcgaagatgagattaagttaaggatcgggtgttttgcttgagatcatgagttaaggctggtgcaatgtgattgtagagtccgatagtcttgtgagtgttcaagcattatctagcacagttcatatggtctctcaatttagtttttcagttgaaaattctcgtttattattatttgaattgtctaatatttctttacgttttgttaagtactgtgctaagagtcattatatttttacatatttttttctcgtattgtattgtggtatgcagtagaaattacaaaataataattttcattaaaataatatatataatttagtgactcctttttgaaattttcgaaccctccttctagtgaattttattttttaatattacattacattatcgccttgagttgacgaaacagccgattcatatgcttttttttatgaggttttttctataataggcattttaggcccaaattttacttttttagcttggtaaggaaaattaaacaaaaataggaaatctaaaagttttttt

SEQ ID NO: 392518 - DNA, 607 bp, Cannabis indica
gggagggggggaactgccacaccaaaaaacacatagaataagaggagtgaagaaagagggataaaatagggattttacatacgtagggtttctgatatttaggtatatttataaatattatttttttaaaagttgaaatatgatttttttttaaatttaaaaagaaatattattaaggacaacaaattgagtttgtgtttgtaaagtgatcaataagtagggtagcacatggctcatgcttcttgttttatgtttgattgtaatgttgttaagattgatgcttctatcgaagttagttttatgtttgagtgatatttcaaattaaaaaatgtgatcctttattcataaaaaatagagaaatttgcagcaaaagtccttgaaaagtttaatttgatatagataagtccccaatgtcgaaaagtagtggcaataatcctcaaggtgatatttttcgtaagtctgttagtccttttttttaactgagtcgatactcatttaaaaatgtcacgtattgaaattttattagttcaaattatattgtatttaaaatatttttagaaaacaaaatacattatttaaaaatcataaaaaagattttttttttttt

SEQ ID NO: 392519 - DNA, 778 bp, Cannabis indica
attgtctaatataccctcacattaacattaaaggctgaaaattaaatcttactgttttgggttgaagaaagagtattatatgaacattaattataaaagtgggtagaaaaataaaatattaaaaaagggtaaaaattaaaataattaacttaaagtgagtacccagctaatttcctcaacccttataaaagaattgtccaatatatatagagacattcttatagctttagtatatttaatatcaaaaataatttaaaatatgttactttttttaaaaaaaattattttatattttaaaacatatattttttttattttaatagaaatttacataacaacctacataataaagcaacctaaatcgcaatctaaattcatataacaaatcacataaaaactacggaagtaaaagcaactcaaaccgtgaatgataaaaattttgttgcaacatcattatattatttaaagaaaaattatattaaaaattttaaattgatatgaatttcataaaataaaactaaacaaatatatagtagtgaaatgttactttattattagtttttgaaaaaaataataataataataaatcaattattactttaaacaaatttctttaaggttgtaaatagacaggaatcttttgaatatttaaacttcaagatattcgtgctgcacaaaagaaaaaaaatatgggaaaattaaaacttgcttaggtaccgtttgataacacttttattttataatttgaaaaacaaaaatacattctgtaaccattttt

SEQ ID NO: 392520 - DNA, 788 bp, Cannabis indica
ttagaggcagttttttggtaaaatatgtaggtatggaatatatatatctatatcgtcggtgggggttggaaaaaaatcatagttttttaataaccctatggcgtcagttattttgttaatacttagactcattttacaatatttgtgtaatatttaattacttctatgaaataaaattatgtattttgaccaattctaaaattaatttaaataatatttaatttaccttttaaaaaaaatatataatttaaatttaaattaaataaaataattaataaatatataatttaaggtttagggtttagggtcctcttcgtgacaggacaaatcaccaattgataaataacgagtcttcttcaagataagacaaatttctaaatgcactcttcgagtgagtgccaaacttccaattaaatgattgtattatctctgttgcagtttatggcatttcacatagtcaaaattcagttttatgggaacaaacgtttcttgtgatttatgttcttgtagagaatatagttaatatgattactgttagattttaattcattaattaatttgagtaacttaagattgagtatttaaaattttgaagtaatatataactggtgattcataaactataatatacaactaatgaagacaaaagcaatccactaaaatatatatatatagatgtaagaaattttaagataggcttttactatcctgcccctacaccaacaaacaacactaatcaataattaaggtcaatttcgaccttttactgttcaatgacttttcaaagt

SEQ ID NO: 392521 - DNA, 746 bp, Cannabis indica
tatttttaaaaagtattaaaaaatatgtatgttttaaaaaggtatgtttttattgagcccttaaaatgagtgagtccttgctatataaaaataataataaaatgagtgagccctagcgcaagcctaacccgcttatacctagcgccggccctgtcctcacagcaagtcccatggccaactcccgaccacaatgattcattttgaccacgaaatcaacacaattaaaagagtgatccgatatcaccaaaacattacaaaaatataaaaagatcaataattcacttgggagaggagctaaccagcttcgataccttgtggttcaattcccacaagtccaatctctattcttctattctcttccccaacacactacatttttcttgaactctcttctaccaaaactaaaacactcactctctctcacactccaacacttttgacccactttttacctctagccaaaaaactatttattatgacacactattagagttaagcctttaaggtagaaatatgccatattttagttaatttaatacataataactctgttaaaaaaatacataataactttgataacatttcgatactgacagtaactccgacaaattttttagtattgactccattgactttccaatcatcggtggcaaatccgccgatcaatgtactttcatttatttctaaaattttattagaaaaatataaaatggattttaataattttttatggtaatacaagtgat

SEQ ID NO: 392522 - DNA, 866 bp, Cannabis indica
ctctggttatttctatatgttatctagatttttatatgtgtccataatttattcgatcgtccttcgacaaatatatatgaattgtgatttgctagtagctagctagattagttgcacatgcatacgtataatcatcttcaatttgaattgtggcccatataaatgcgcaccattcattcatttgtagaaaacaataactctctctgaaaagcatttatgaacctatgtcccagctcaattagttttgttgattcattactcaaataaatgagcttgggtaattgggtacggcaggtttttgtaatttgttagaattttaactgcattccatctcaaaatatattagtaacaagagcagtaatcgccatcaatctaactagtaatgtgagattctttaacatacccttcaagacggtgattatttttgctcaccggccaatcttcaacgacacaattacaagtgtatatttggctcactagcagttcttttggcacgttttcttggactggagacacttggctcacaataacactttttcgcatcactattcccaaatcagaagcagtttttttggctggctcatatttttaaaccaattcttgaatttagatcgagtgggtatctaatttattatttatttttggccatttaagatttttgacatctcatatgtattattgtgcccctaaacttttaagttcttacaatggttcctaaactattcacattgtaaattgataattctgttaagttttgtcacacatagtaaacaaaatgataatatgactcatatcagcgctacgtgtatgatttaacactaaaaaataaaaattagatattttaaaaaaataattaaacaaaaatt

SEQ ID NO: 392523 - DNA, 1604 bp, Cannabis indica
ctgatctgttggatatttttttcaatgcatatatctttgatttggtcactaaaaaccaacattttattcattgataacgattttaattctctgtacaatacaagtcacaaccttatatatgaataattttttttttcgatatttatatataaattattcaatataaaatatcaataatttaacattcaagtatttatcaaaagttcaactaatatttataattataaatatttttacaagcttttcagggcaaaaactctagcactatggctgttattgttttagggagggtttgtgcccactgctgatgcttcttcctcccacgatggctgcctgagcatccaccagaggagaaggatttagaacattgacagtcgggtcttcaccattatttcgacccacttggctagctggtcgtgctactgtgtttctagtaactaccattttttttaatgataaagaatggtaaaaaaatttcttcagctctcaatgacaataccaaaatatctaccgagtatttcagaaatcgactataataaagattaagctaaagaaagtaagactaagaggaaaataagacaagacttttaatgtggctggggtttcaataaatcttagtccatgagtcactattataaacttttagctatggatttcacaatgtatttactggtttttaacccaagaaatttcaactctttgcatggaggagtaatgctatatttataagcacatatgcttaatgggttggacggatctgggtcccattagggttttgtacaataaagcccactgatggggtaaaatatatttatttaatattatgacgagttattgggcagggtaggtgaggcccaactcaaatttgctgcttgtcgtacacatttgtactgttgacgaatgtaaatttctcgggatgtaaattttagaatagtgggtgtccgcccaaatatataaatttctttttgttctatgctttttcatggcttcaccaaagggacatgtcgtcaaatttctcaggatcgtgttagaagagtgccacatggacgaccttcgggatagcaagttgtatcgaacgcccttttatattctattcccggatgacccttgagagtatcctccttaagtttacaagctattttgtgtgtaaaatcttaatctgtgacttcacatgtggattcatctctaaaatacgacgcgagaatcagaccaaccgtccgactttgcctattctcagtagacaagctgagtggttgatttgctttgggctaagtaatgagctcaatatctatggtgggcctctgtgagagtccacatgtcacctattcgaaatcactaataacaacttcaataacatcgtgtcctatcgtagtcttttttttttattattattattatataatttttatattatttattaagttattcttattttttattttatcttttcttaaaagggagttagtcttatatgtttgggactatattgagttatttaccatccaataggttggttaatttagtcccagactttgtgtccttttccttcttttaattaatatgtattatattttttcaaaaaaattaatatctttatatattaa

SEQ ID NO: 392524 - DNA, 865 bp, Cannabis indica
aacttcacatcttccaattgacaagttgatacacagttaataaaagactctgaggctttatacttgacccgaacaccaattctctcctctttttccaagatatcattaaaatcgcctagtaccacccaagaaccatcaggcctgaggctttgtaactcttgccacatgctttgtctacccacatcttcattgaaaccatacacaaaagttgcaaagaatttgcacttattgtctatggaagtcacatggagatgtattaactgagcagaacaaaacaagatattaatgttaaaacttcttggattccatgcaactattatacgaccacctttgtgccacgcattatttgttgtaaaacaccatcccgcaaacatattcgtgtataagacccccaacttatgggccttaactcgagtctcgaggagaccaactagaccagcattatgatgagcaataaattgcttaactgagttctgtttctgctgactattgatccctcggacattccagcttaggattttatccattgtgaagaggaggatctccccctcctcttgtatcttccccttctgcacttgataccctatgagctgtgtcaccaaattcagcaagcatctgaaaagaattgtttacagtagttgaactcggcttatctactgatttgactttcacaccatttgtaacttgttgaaattcatcatgagacttagtcatcactccttgcttctcctttcctgccttgccttcctccatgttcttctttgttcccttgacaatccattctggctttttagaatccttcctacgacaatcaatggtattatgccccattccatgacaatgagcacatatagttggtttccat

SEQ ID NO: 392525 - DNA, 1364 bp, Cannabis indica
tagctgcctccttgcctgtgcaccctatgtctacttctaaggttccaatttcaatttgtcgtgatttagatgctctcatgaggaaattctggtggatcggaaatgcagataaggaaagattcatggtgttgagacctcgagattttatttgtcaaccaaaggcacatggggtctgggtctgaggaaatttgaagatgtaaacaaagccctactttcgaaattggcttagagcttggcaaggaaggataataagccatgggtttcttgtttactcattaagtattgtaggtataaaattttttggtcagtggagcacaaagctagggattcttatacttggaagtgcattctggattctcgtgaagttatcttgaaaggtgctcttacgttggctgctgatggaaggaccattgatgtgtggcaccaaccatggattcccttgctgaacttcgatgattttaaagctttgatggaaagctcgatattgaatcattttacaatgcaatcagttgctgatatttcctctaattctgtttggaacaaggaggtaatagtgcagatttttggtaactccttagccgctcatatcatgcaaattcctaggatccctatggagtttgacaatcaactggtttggaagcatagcaggaatggttgttttttggttaaaggtgcctatctttgtgatcaatagattagattttcccctacgaagaatgtgtggaagtggatttggcatccggatatacatccttgagtttccattatgatctggcgtgttttcaatgaagctcttcctaccaaatctagattgccctttcttctggaaatgaattgtcttctttgtgaaaacatggtgaaaaattgtctgcacctctttcgtgattgcatttttcgctaaggccgtttggttttctggtctgatcccttgtagaattgatttaattcctagcgatttagtgatgcagttatttgaagcctttattatggctcttccaagcttcaagccagtgcatcacttattttgggtgtgtggttttggcaatttggaaacggagaaaccttttgtggttaaaaggaggtattttaaatgctgttgatgtttgcaggaaaatgaatactctcttttctgagttttatgagttgcaggattttagcaagcgaactttaacggccaagttaaatgaagttggtacttgttgcgataattttgcacacgcaagtgtacgtatcgtttaaagtagtagactcaccaggagtgaggtcgatcccacaggaagtgtagttaagtacgttaaaattaaatttttacttctatttggttaaataaaaataaagaaagaattaagaataagaaactagta

SEQ ID NO: 392526 - DNA, 591 bp, Cannabis indica
tttttataatggtgcaactattgagggtatttgtttatcagtaagaatatgcttaagggtatttagtataactttaattgtgtttagtaaagaaagaagaattaactcataatatcccttctctccacatgtagggatcaattaagactaattggagcacgcaaggtacaatctatgtcttagggtcggagtacactatgtacctatgtaaattttctattaattcacatttcaaatttcaaattattttttactaattttgtgtagtgaccttcatatgagccctataattaatatatatatatttataataaagtatttattagtctccatctcaatctagatctatgtacctacatttcacctaatcactacaatttatttatgtaatttgtaaataaaaaaactaattattatcctaattgccatttagagtattcctattgttatatttaaatttaaacattgatgataaagaatacaaatgctctacccaattaattatcattaaccaaatataggcatgtcaagttatcaaaaacttacttatatttttttttcttctttttttcccctaaaaagaacagctta

SEQ ID NO: 392527 - DNA, 2020 bp, Cannabis indica
gtaaaaattaaaataaaatagagattaaagactgaattatgaaaaaattgaaacgatcataaaatcaacgattaaaaattcatacgcgacaaacagagagagtttcgacgttaaaggtcggagaattgaaattcaaaaacagaaatgctaaaattcagtactgatcataaattgatttgatctaaacaaacaaaaacaatcgaattgaaaaactatatatacaagccgatctgaatatatgaagaggaaacttcaattcgaacctgttatgtaaagattgatcgtacggatttgaatgtttttcttttttctttaccaaaaaaaagcttctactctctcatgtatagcgtgacccaagaggccaatatttatagtgcccacttaagctatttttaactaataatttaatttttttgactaattaaaaaatattaatacatagcccaaaacggcaaattatatatatgacactctaggaattatcttatatttaatatatatagtattggattattacaaaaaaaaatactactactttcttttttaagagagaaaaaaaaaaacagatttacaatctctttttaggattttttttttttttactttataataaaaataaataaggaaaagaaatagtcataaagaccggatatatgggaaaattttatagaaaatagagagtaattaataacaatttatggaaaaaaaaaaaggataagatgaattaatctatttttttagtaaataaaataaattaatatcaatgccactttacacggaaatggatttgcttttgatttttctgcagtgttttttttttatttaattatttaatgttttgataagtattaagtgtgcttttaaaaagtgtgtaatttttttaaaattgtgatatgataagtggagagttgatttttaatttgaattataatattattaattattaattaaatataaaaggagaaataattaaggaaagagtgaaagaagcggcctaggactcagtagcggaagaaccggtaatgtaattaagtgaataaacgacagcgtattggggttgcagcgtgataatcagtggtgactagtggaaaggtgacgatgctcataaatgaccaagcttatatagaaaccttttatcataataatggattaataaaacctttttatgatttatatttattattatgtgttcaataattcaataacaaaagaaaaatcaattctgtcagttatctacgagttcgaaatttgtaaacattaaagaattgtattgactttttattctcttcattgatattccattatattgggaatagaaaatgatgtttcaaagctttaagttaaaccaattcacaatttgataatcaataaaattaacttaattgtgcacaatcccaatgaaagcttctggtgatcagaatgttaatgatttggcacattttatcttaattttgataataatttttaaagaagtgctaattacaacttcttattataatcatatgccaaaatatttttttttaaatttttttatagtgatattcgttatagttacaatatcattcttgtaaattttaaaaaaaattctgaatagtttacagtattgaaaacagagttcttcatattccagtttattaccacgcgtgttcaaaaaattttaaatgtattttcggcgcggtaaactatttgaaatttttcaaaaatttacaggaatggtgttgtaagcataacgaacaccgtcatgaaaaaaaatttgaaaaaaaaatatttcaacgtatgtttcgaatgtaaaaattgattaagaagttgtaattagtcatcttctaatttttaatatttgcaagacaaaattttacaaaactcgtaattgaataaaagaacttttatttttttgaaatggaaaagaactcctatttattataggtaaataatatttaagttgttttttttttttaaaaaaaattaaacattagttctaatataaaggacaagctagttactataaattgatatgacatga

SEQ ID NO: 392528 - DNA, 1328 bp, Cannabis indica
gatttggctttgattgatactggactcaaagagaagaaatggagggagaagcgaggaggtcgagccaaagaggaaacgaaagggcaaaagtgcaataaatagcttgataaagtctcacctgatgagagatttggaggataataatcgtcagaatcattaatgctacaattaatgagggcaaaggtgaaaatgatgagggcaaatatcgcagcaaacacaccaagtaccaccacaaaacaaatctgggtggaccaaaaacccacttgggataccgaaaggggaacaaggaacatacttcctgaaagctctaaaaaggatatccatttcaatttgcaaggaaaagtatagataacaaaaaaaaaaaaaaagaaaaaaactttggatgcactgaatttgaaatatttttatgttggttttatgatgctttacatttatactacattagtttgttttcatggggatctataataatgtcattaaaaaaaaatcttaaaaattaatcgtgtagtctgtaaaattatttaaaaattcatgtgtcaatgaaagagtaaaaattatttattttagacattttgtgtaaaaatctctcatatttgtctaaagtgaatattgtctttctaagactaatctagggcttctactataattcgagagtttatgtgaaaaatagttgcatagataatactctaatgataaaatcaaaaattgtgtatccgtaatttaaaaattgatatttggatgctttagaccattatacttgattttagctagtttaagttagttaaatagacccttatactgtaattatgtgtgtagcttatcgccacatcaataaattatcttaaaaactaagcaaaatgtaattgaaaatgataacttacaattagttctataaaaatactatttattcttaaaaaaaaaaaatgatgcccataaatacagcctgttggaatgaaataatctgtagattcattgtgaaaaactatatatttacaaatgactataattttactaaattacagtaaaaatacaattgtaacagtctgcagcagcagaatgtaattctatcattgtagaacatagatttgcagaattaaactagaaccagaaataaataattgcataatttaaaaaaacttaacacaagagaattatacgtggtattagtgttctttcgaacactcttagtccacggggttatgcccagagaatgaaattatttagtaaagtctcaaataattacaaatataattgacttaaacaagtttagactccctctaaatctttgtcgcaatcctttgtaattcacttcacaaatctgatttcga

SEQ ID NO: 392529 - DNA, 795 bp, Cannabis indica
aaaacacaaatagcaaaagtaataaccctacctataaaaacacactcatctaattaaatatatttgtatatatataaatatataaatatatatgtatacttacgagtataaggaggtgtgtagaaagttgcagttcctttttctgcaaatgagattaaggattggcatatcatgatcatgcctacaaatactatgattactctcattgttgccatattgatgatcaatttgatacccaaattaataattaatacgtactaaattaaacagttatatattatcttattctctttctttgttttttttttttttttttatttttgttggtacttaaaactcaaaactttccttctaatttatagatcaagactaagccaatcattagtgagtttgatttggaaatatttaattaagatatagtaaattaaatactgtacaggacaactttgatattttaatttggaccaagatcttctgtcctacactaccccctcatgataatcatcgatccatctccattttattttttatttttgtatttactctgttagtcattttcactcttatcatttttcatgcatgcatgtaaaaatactatattttgttttattgactcattctaggaaccctaaaagttattagtaaacaacttatgaaaaataaaccataatttatttataaataaaaatttgggagggccgaagccgtctcacaagacactaacctctctattgtaacggtttgagtcgcaacaaaaaatcatttgttattgaaaattaatatttagatacaata

SEQ ID NO: 392530 - DNA, 805 bp, Cannabis indica
aaaaaaaaaactatattatataagttactttctttttgtcatagcaatgagtacctattatttgatacactataccaattaacggtaactttgttgaaagcaaaacttgaattaatataaataaatgaaatataataaaactccttatctttactccataaattttccaaaggatgttagatgaggacattataaagtagtgtacccaccatgtgatgacaactccttagtataaaaagtattaatccagctctaactactactactactgctacttctacttctctctgaagcaaagtgtcaaactttgagtcaatttttccagtggtccagaacctttttctttcatttgatgctcacatgcatgcttctgtgatttttttttatgtaccacaacacagtactgctcttctttcatatacaaaagtttttaatttcgttgagtacgtacgtactcatcatcaatagcgtaatatgtatatatatataaggtggaccaaagtgggttcttttgtgttctataaaattacaacaacaccccacccacgcctggtctaatatcaatggtcaaattcatgtgtaaaatttggtcaaactttgttgttgaggcagctgagacgtgaatcaaaaagaggaagacattcattgagaattatgttcacagttgagttagaatgacaaagcatgggatagaaaggttaaaaatgatttttcttgtctccccttgccttgtctgcaatagaaatgataacacctaagattagggcatcatattcattcactctgctcaaagaagagcaagaac

SEQ ID NO: 392531 - DNA, 894 bp, Cannabis indica
tttaaaaattaaataaaaaaaatcatcaacatgtgaaagggacattttaaatccacctggttaacttacccttatcccatgaattaataaaattgtttatttaaaaaatgattgtaatatattcatcattgtcgagtcttttaacattacatgataattaatttacaaaccttataattaatgcatgtcatgtgcaaatatgtttctttcagttaagaaacaataagaaaaatccatcattgtgtctaccattgttcattttggtttaaaataaagagtgtaaattaataaagtaaactttgaacatgttatattgacacctttttaataaaaggtttgtgtctctgattttagtatttatatattttgatcaacacaaatctttaacataaatacaaaaatatgtatatatatctaataacaacttataaataataatgacacacgattttgttccgtgatacttttacggaatgtatttcagattacattatatgagtctcaaagtacattaaatgagtgtcagtgtacgttattattttttaactctaattgcacttagattaatctcagcctcagatcaaataacttcctcattaacgattatcgtacatcacaaaatatatttcataaaagtacaattacgaaacaaaatcatttccttataaaaatattactaatcaaatataatatgccctagctttatgattaactaagagcatcaccaaggaggcatcaaatttggtgatgcagtagaattagccctccaacgtaacatcaaattttacactaaattgctgtgtgtgctacagtgcacggcatatatgccgtgcactgttcacacggcattactttttttttttttttttattaactaatttttgtatatgtcta

SEQ ID NO: 392532 - DNA, 578 bp, Cannabis indica
tatgagtaattatgctattaaactttcattttcttttacatggataaataaattaatattgtgaaaaaatcatcatagaatagagatatcttcaaacattatagtaaaaagaatattagaaattgaagaatttttacacaaaatagagatttaaaaacagaaattgataaatttataaaaaaattcatcatatgatttcaaaatattattatcatctcacttatagtcgttattacatttaaagttgttattatcgccgcatctcatttatggtcctcaacattcattgtatatattttttataatcaagttttgtaattaaattatttgaatatataatttcatcaaaacattttttaataataaaagtaaatattcaatacaatataaattatatatttttctaatttattttaattaaaacaaattataataaaaaattatagaaaatatatgtaatgtcattgtctcattcttcaattttatgtctatatatacataaataaatagtagtatgtgatactttaattttttttaataaaaaaaaaaatatacttgatttattttattaatattat

SEQ ID NO: 392533 - DNA, 773 bp, Cannabis indica
tatatatatatatagatattgatccttgctcgatgtttgttggattgtttattatatgtagaatgatattatttcattgtattattcgatacacatcagtatatgttcgatatttgtttgatatatatctttgaagatgttctttttgtattaattttatttcgtttttaattgatagattttgttcgattactttatgtactaagacttcttgtctagtaaaattcgattatgttcgatactgtttgttggatgcttgatggtttatgtgaattattaatatgggcttataaaaatttgattttagatatcgttcgaaaactcttcgatatgtactcgatagaaaaatagtttatgtacttatgtcaaaaacaatatagaaataaattaggttacctttgaaaatattatatcatccaaaataagttagggtacactaagcttaatctaataaataaaagtcctatactttctggtagaacaaatccacacaccaacagtttctggacaatgacatgttgacatctactactctatctaacagaattttaagcaatgcatgatccaagtgttatatcgtatacatgtcccaatcaccactgcaatgaatacattaccaagataaatattagtcatttaaaggtactttggtcagttttattcaaaatataggaatatgaatgggaatgggaatgggaataggaatggaatggaataaaatttaaaatggacaaaaaaattgataaaaaataattaattttttttcttgttac

SEQ ID NO: 392534 - DNA, 1271 bp, Cannabis indica
attattattatttttagtttttttttttttttttttttgtgagagagagtgacttgaattacattataaaaattgtagacgtagaggaactcctaattaacaagctaattgtctagtcaaagatatacaaagtcacaatattagtcactacaaacaactcgacttatataagaccaagttatctcaaaaatttaggcaaaataacttgagaccacctttaagagctatcagatataaacaaccaattggactaaaactatctacaaaataaatagatatagaaaagtagattagctcactatacaacgataatgttgtgaatttttaaattaaggatcaaacacaattattatttgaaaaattagcaatttttttcctgaacttttgagaatactgattttgctccctaaaatatacgacttgttaagatttcccctgaacatttacatttacagagtttttgtccttcttttaatttttcgtcctattattatgtttaaatactgacatgggttggagtctattaacttcaaatttgacaagatgtatcaagaatttgaaatcactagacgcgaaactgcagtgaagaccctaaaataaaatggcattgctgaaaggataaaccgaaccttgttaaaaaagttagatgtttactgtttggttctagattagaaaaaccattatgggggaaagctctagcaaccgcaacataccttgtaaatagaagcccaaacagagtgatagacttgaaaataccttatgaaatgtggcacaacagaacccccaacctaacgcagttaagagcttttgggtgtacaacatatgtacaccaatccattgacaagctggaacctagatccgtgaaaaaaactttcttaagctatgccttaggaaccaaggggtatagaatgtatatttttaggaagggtaaaccagaggttgtgattgctagaaatgttgtttttaatgagttgaaatatcctcacttgatctccaaaaaaggtagtctgtctctgtgtgatgcaggaaaaatagaaaacaaagacactacaagtatggaaatggagtacggatgaagctcctagaagaaggttcacaggagaaagatagtgtggaactggaagacaatgcgcagacgaaagttgttgtggaatcagaataacaagataaagaagaccaaatagaggtgccgaaagggttcggatagacaagtctagaaggttatcagttggctcgtgatagaaattggagagagattcacccttcaacaa

SEQ ID NO: 392535 - DNA, 902 bp, Cannabis indica
ttgatttgaatttgaattttttgcgtcgttcgaggaaccatcaaatgtcctcctcaaagctatatcaggaaaacaagcatcaccttttccattttcgaatatcacagcctgaactccattaccattaccagaaatcttgggcgcaccaccaccatgttttgacttaggcacccacgctgccgacttcggaattcccagagatgcaggagatcgatgggtcgctttcttgcccattctcgagataccacctacagtggcaaccgtacgactggaacggtcaatcctagtcatcccacctgcattgataatctgggaagggccgattgacggtggctgggaagaaatagctccggtcattgtcgtaggaatcacatcaggggagagcaagtcattctgggtttcgaacagaatcgtcttggtcttacgcgacgctcgctcatgaaccagagccttcttcttcatgaaatagtcggggtaggaagaccccacaatcatccaaaggccgaagaaagggaaggcaatcccatcggcgttcgagatcatgtcaggggaaacctggagcgcatccaacctgaaaatggccaaggcgtccacagtgatagcagaagacaccgatcttctcacatttgaatggtatccactgtttgatgcctttccgagtctcaaaaaagcttggtggagcaatcttccaatcaagaaattcaacatcaacaatatattttccagttaaaggaacatcagcagcccagatgaaatcttcattatttttaagctgtgtatccttaatctcaggatgaatcaaagccttacgatcgccaacagaacaaaccactttaataatacaagaagcaatcggtggagtctctggtgaaattagatattacagcatataatttaaatct

SEQ ID NO: 392536 - DNA, 884 bp, Cannabis indica
gaacaataccccttcatgaaaaggggttggataaaagattttgggatcaagtcctaagaattagggttcatcttctagggaaaaaatacttgtaaaaaatacgttgaagctattctagctaaataatattgactcgtcgactaaggatcattaacacctcaaccacataaattcttggtcttcttcttcttttaattatctctttcttaggcttaattattatacaagcagtctccgaaaatctcaaaaaatattttggtgctttaattgagagttgaagaaatattttccatagttgtcatctacaacaatggttgcaacccaacccgaaaggtagtggttaagccgcctactcaagatggcagggatgaagccgccaacaatagtgagaaccagctcccccaacaaatgctcaagtgggcgtcgtaggtgatggggaagcgtcagatgtgggtgactgtcaacacctagaagaccaagaccacgacaagtaaattactgatgatcccatcgacaaagatgagtggattatcatgaagatgaccctaaggatgaccacaacaaaaactacaaccaagagtatgaagaggagtactatgagaaggatccttaagttatacgactctagtaagagcttgcaaacaacaaaaggaggttagtagagcaagaagaagtatcatgtaatgactgcatatatagaattagtagacaattagtagtgatttaattatcttatttgatctattagaaaattaagacctatttctaggaataggctttagatttttattcctcaattctgaagattttattaaattctcagagatgatctaaatagaaggagagggttagacgaacaatatgttcaaccagccactcagccc

SEQ ID NO: 392537 - DNA, 1895 bp, Cannabis indica
gggatatcaacctactatctcttttatgctctctcctatatatagagcatttactaaatctaaatctttaagttctatgctctaagttctaagtcttaagctttgaagctccaactcttaagtcatagagttcaagcactgaaaaccctagctcaccttctattctacatgccattagcagtgtagtagagactaagtctcccacatctcatccacttgagattagcctcttattctcactattgtaatcttaagagagccattttagaatccacaacacttatgatctgagttgtgttatcactaatatcaatgcaaccaaaaggggagtaggtcattacttgctaacaaagggagccaaacctctatagaattgttatgtcctttttatttacttgttctcattgtttacacgcggtaattttagtcataaatatgacttcgctctcagttggctaaatatgaggtcaacacgtttgattagaaaaggtatgcacatcaattagaatatcagtgtagcatgtttaagtaaaatgggtgttacaatttggtattagagctgccaggttatttaccgaagaccatcaagatatgtataatcaacatcagagacaagctcaactcacggttcaataagcctttacttgtttagtaattcattttaattagaaaatgtatcacatgaagcatgttagtaattttatagttgaatattgcattgcctaaaattccatgtatgcagtgtttggattgtatttaatcgctatttgacctacccgatttatgggttcgtaggctagtcctataatatggaggcctaatgaaacacaagaagttaggacaatatggttgaaagtagaggcgatcaaggaggtaaaaatcctccatatccctgtggatgcggtagaggtcgtggtggatttcatagaggtagttatgaaaatccaccacaggctcctcaagattgggggtaaaggtttgtacaaatgcaagcccgaatcaaccaacaagatgaagagatctagaggctgaggtagtagggtcctcctgctatgcctcctcagcaagtgccagctactcttgttcaagtgctgccaatagaacaacctattactggcaactgcatggagcttttgtatgagcagttccacaggaaaatgcctctagcctttttgggagccctaatgtcatgaaagtcgagctgtggctaactatgattaatataattctcaactttatgggtgtcaccagcaatgatagggtgacttctgcaactttttaattccaagaggatgccttggtatggtgggaaatggtgtccttacttgggactactagaatgagttgggaggaattctatgacctgttaattgctaagtactacaacaaagcagttcatagtaccaagagcaaagagttcactgagttggttcagggagagaatatttcaatgacttaatatacaacaaaatttgatcgactcgccaagttggctttgggtatagtacccatagacttcagtaaaaacgagaaattgttgggaatattttaccaggatctagatttactaataagtatgttgaattaacatcctaaatatgaattctctaaaacaatgaaataaacacataagggttaagaaaaccttacattggttgtagcggaatataatgactcattccgttcaagatccctagcccttgattcctttttgtagcagagcattatgaagatctgaagctggatctctttctctccttcgagtttggttaccaccgtcttactttctatgattgagtacttgacttgctatgtgtgggcatggcactctttcactatgggtttcgaatggtgaagaacaatgaaggaggctgaatcactaaggaatgaactct

SEQ ID NO: 392538 - DNA, 1965 bp, Cannabis indica
gcaccgactgtatcctgatgtggatgccacatcatgatgattgttgccaaaatcgtgttctattttcatggagaataaagacacattaaattcttgatcgccaattactgtctttccatattgggaagatatgatctttggaaaaaatcctgtgagttaaatcattatatagtgggatctggtaattaatggatgagatacagagctaaatgtccagatgcttgccaaatacttcttcgaacactccacctaatgtctttaggattcactctatgctggaggattgtcttgactagacgagtcatatgtctgtcatccagaagagctgacttcgctaatggatgtggcccattatcttagttgggccgactgttgggcctgaagtaattaaactgtaactggctttggaaattacatgtgtcctcatttggaaacacggataacatttatccctcaagctttcagaactctaggggttatggaagcttgcacccttcctcatgaatgatgtgaggacaggcggaggctaaaggtggaatcttctcaaattccaaaccaaattgttcctagttgacaattctaacgccctacttgactaggcacgctgcaatgattttataattaaaacttttcgatttaatttatactttaataaatacatgtttactcggaaacccattaaaagtttataaaagtattcaaaatattcttttcacaaaaggtgtgatatccaacgactacaaaatatgagcccatgttgtcccaaaattgaacactctaagcttaaccatcccaatatgtacaatcacccacaagctctggactcactgatgctcaacctacacatttcctttacctacacatgcaaacataactgtgagtcgacggactcagtaaaaaaagtataaaaaaaaataatattaccgacttgcaactaggtgtccatatacctacctacaaggcctaacagataaatcaagaatgttcttaatagaagtatgacctctatactagatgcactaagtactcgtcccatacaagtattggtatgggttgatccgtacctcgagcacaactgagcaatattataccacatacacgttgtactcgtcccatactagtattggtaacgttgtgtcataccacttaatattatattgtaccgatgcactccgtacaacaactgtaatgtgttcgtagtgtacaaatcacataatttttcatgcatattacatacatacacatacacatatacatatcttatgctaatcttatctcgtttccaaattcaagtgtgtcggtcaaagtgaatggaaatatctcttgttgaatggaggtcatatgtcacatttatgtcaaataggtaagtttcttgttaaaaccttttcagagacttaaactcaaaatcaaaagtttttctattgataaatagtgtggcaatatcctaaatgtcgagaaaacaacaaaaatatgacttttgaaaactccttaaaaaacagtaggccgtttttttaaaaatgccagactatttttctgggtcactgccagtaaaaatggtaggccatttttgagaaaataatctaccattttctgctaaataatttccaaacatctcatttcaactctaaactaacacaaacttcatgaagctatccaaacacctaatttgagtccaacaaacatatattaagcaaaaatagtagctaaaacccagaaatatgaaaatcaccattgttgagccaagtttgagttcttcaacacaaacatgctcagcacctcaaccagccatcaaaaccaacccagtaggcatcaaatatcctaaaattaacctagaattcaaaccataaacatctagggtttggacagaatctaaccctcaaaattgcatgcttgaactaatctaaaatttccaaaaatgagagagaagggtgtagtgttgggtttgtgccctaactaaaacccatt

SEQ ID NO: 392539 - DNA, 1535 bp, Cannabis indica
aatgtaggtgttagatccaagttggaaataaaatttaggtgtgacctccttgaattttcaaaaaacatctttaattaccattgtatcaaataattttatttaataatatttggcaagattagtatttgtataagaaccaatttttttattcacactacataagattttaatttcaggtgaggctattgctttaggtggattccgtgcatcattacctaagaagaactttatgggctatcaaataagctcttctgaaataaaaatttcaatttcaaaatattaatttaaagttaaaggatacgtatagtctgctcttataatatcgttattggtacaatttaatgttagatcatacatattttactttaataaaaaaaaaaaaaaacgaactaatagtagtattagacatcttgtatcttgatgctgcataataataacaatagtaatgctctattaaataaggtgttgccaacatattggattggacaatgtgcatgtcatcatctttggattttttttattattttattttgaaaaacaatttaactttaataaaataaaaaaaaataattatgtatattttggcaattttgagactattggtctttatagaagaaattctcaaatcttaggaagaggagagataaaatttaaaaaataatattttgtgataaatgtgtttatttttgatataaaaataatattggatcaattattagaacataattattgatgttgtcattcctgaacagagaagcaaataccatccatatagtgtatcatcttaaatggcaaaacttggattagctggagtccaagatcatcagtgagtgagtggggtccttccatgaaatcatttcaaacagctctaaacatggtcttcgattcgaccctccttagcaactgtccatgcacggagaaccttgagatttatttatttattaaaattttactcttttttttgctgacaaaatcaattaagaaaagagaacatgaatggagcttcagatcagatcagatcagaacctgaacaaaagttggtaataagaaggcatagagagactcatggtgggacctttacaaaaacgttttctgggtttatttatataatggatttggccttggtagtgggtcaatctaatcatttcattgcccagataacaaacatagctaataagaaaagtctaaaagattgcctaccttttattagctcttattgttcgaaagattagttttttaatgatttttttgattacatacacttatgtttggactttgatgctgagaaaacttatattgtaacattctttactatgatatagagagaggggtaagttaattttgacgtgaagatagtatataaatacaaataataaactaataattatcacagcagtaaaaggagccaaatttccaataatttgaaccgtgacaatgcccctactgcaaagacagtactgctcttctcgccagtgattcttctttcctgtctctatctgtctttgttaaaatataaattcactctctctctctct

SEQ ID NO: 392540 - DNA, 749 bp, Cannabis indica
cgagggtttttgcggacctcactactccactttccagtctctagagccaataagcagcttttgcacatgattaagcttacactccaactctttaatagtagcatcaactttaccatattgagtataatgctagtgtaacagcgcaacccaagtggcaccaatctttttaaacatcctagttgaggcgaaattgtgcccaattgaattccaagcatggtgaccaccagtttgctcctttcatctcgggtccacccttctttaaatttaaagcttcttctaaatttttctacatctcccctaaagaataggaacatcaacaggggtctgtgatgcgaattacaagtctgagcagagcgcaaaatggcctttgggaataacttgatccactcaccattcacaatccccttatctagagcagattaacatgtccctcacccgaatagtagttatcccaagttaattggtcccgttggatatgtagactgatgagtcccttcgagttcaccaaattcgagataaactgatctctccctttcgatccttttctttcgaactcctttagcagaaagttggtgtcactaacaatcaaccaaggccctccgaaccgatccccaatattatacattgtttatataaaaaatattggaattttctaaaaattgtggttatttttatatttttactgtcatactctttttttaacttttttactgtactaagttttaaaaaaatattgtgtttcagtaaaa

SEQ ID NO: 392541 - DNA, 586 bp, Cannabis indica
atatatatacaaataattaaattgaatataatgttatttgtggtataggaattattgcacttgcctatcaccttctctacaagggttatcagttatcaattaaagaaattaaattgatatttcgacagacttattgcagaggctgtctaccttataatacatgtatatattaattatataattaatggcaatcaattcaaggtaataactgtgtcacatttaattaattatttaattttataataatcatcacatggtccaaatctaaattatgaggttttttttatcaaactcattatttgggtggtggagttgaatattaattcttagagtaatttacggcgaaactggcaaaattctttgaagtttatttttttttacaaatttaaagttttagttagatattaccgttaaatacatactggattattacgtactgtatcgacttcgaggttttactgttacatatacacaagtttatacagtagtcatccagtagatatttaacgataatatttaacggtaatatttaacaaaaaaaataagaaggttaagtgtataaaaattaaaacataatgagattttg

SEQ ID NO: 392542 - DNA, 560 bp, Cannabis indica
atttgcattaggtgtactatgacttcaagatttttttttttttcttttttctttttcttttgttttttcctggccattttagttgatgataatttttgcaagtgtgaaacctcaattgaatgactgtagtttacacttttaagagtaattggcagaattagactttataaagtaggcatactcgataacactcaacagttaacattgttgagtaggtgttgagtgtttgctaagtatggtactttgtaaatcatttttcaaggtagggttcatttacgaaaacatacttagaagaaagatcattttgcaaagcatctcatctagaatatgcagccaaacatagtgataagtatctcttagattctgcaaggacactacataatctgacatggatttcttgtttttactacctgtcttgcttccttttctccataatgttatttgttgttctggttctggtcaacatgttgaggctttgctaattcgaattgaagggtgatataaaaccagtctatttctggcattatatccatagttatcgcattcatcatagttagaag

SEQ ID NO: 392543 - DNA, 798 bp, Cannabis indica
gaactcttctctttcttctctcaaaacccaaatacgacactgtgtacccccgggaaatctattctatgaacagatttgactcttatgctacatgaaattaccaaactaccctcctttttcttttttttctctctcttttgtcacactttccgccgctaaacaaaattccatattagaaaaggaattataataaaaatagagtctgttattttttattactttaaaaaaaaaagtttgttatttttatatgggcgtttttgagtgatttggccaagtgggtctagtactatagtactacttgcattgtcacacacacaccaccacatacacatagtttacatttgtgttgaggtgacgtctttttgcctgcatgttgttgccagttgccactctcaagtctcaaccatgttttacataataattatgttttttctaaaaataaaaaataaaaataaataaagaaagaaaataatttaaggaggcatttaataaagaaaataattttaggacgcacctagtactgtaaatacttgcatggtgccataaatataaggttatgatttttatccttttgaattttgatatgtatcaaatcatatctcttgaatttttttgtccgttaaaatttcccctgaactattgagattattagatttaagaatttttttctaaaataacatagatgaaagttcaggggacatgatttagtacatatccaagtttgagggacataatttggtagatatcaaagtctggggagcatggtttagtacataaacaatcactgaaacagtaaaa

SEQ ID NO: 392544 - DNA, 2494 bp, Cannabis indica
attatatttcttgtgataaggctttaatttattgactagtgctatggttcaaaaaattcattcaactctatcaataacaatccatgtacatctccattgaactttatgataaagatacacttgcttgccacatatcacgttttaaagccctaaatataggataatagccacatcttcattccatgttcgacaagtgttcacgttcactatatgaagcttaagataaaattaaattttacgaatctatataaataatttaataattataaaataataattatagtggtaaaatttttaaaatttttaaaagttttcatttaaaaataagaataactcttaaaagttactattgtccaaaggcatacatttgatatttttaaaaataataaattaagaggttgggaattgatctctttaccactatacttaaaaatattttaatatattttcttattatttattttttttgtgtatataccaataatattatatatttttttcataattttaggtgcaggtcttgctcacctcacctccagacaaaaactagttcagtatgatcatataatagctcgattaagattttataaaattttctttagcttaaagaaataaaaattataaaattttaaataatttacaatgttcatattatagtttataatctttcgtgttatacgtgtatttgtttgtttttttgtttctttatttttttttttatctacatgtgatgaaaatctcacgaaaatttacaagggcctattgtaattttaacttagaatttcgtcaataataagtgaagctttgataattaatgtctcgatttaactaaatatagatattataagtaataataacaagaacacaattctttacgtggtttagtatttaaaatctactaagtacacaagtctcttttatggaatgtgtttataatttgataaagttttagtaagtaaaaagtgttccttttttattgagtgaactcttatttatagaaatagaataacaattaatctaatcttaatagaaagtgggtaacaattaaatatgtattggataaatataaggagaactatactttatatataattttttttaaagtttttttttttaaaaaaaaaaaatttaacagtttaagttgctctagtaatttttatgtaaattgttatataaattttagttgtgaattagattacttcgttggttgctatgtaaatttttagaaaaaaaaaaaaattaaatttaaactataaaaataataaataaaaaacccctaataaataagtgcccatatgtaaaaatacaaaagtgtggattttgactcggtcaactttcattgtttaggaggagtatgacataataatactacaaaaatattataatgtatttcaagcacttatatccacacatatttttgagtatggaatgtgtttattataattcttagcattcttaaaatacttcaattcataaatattacattttttgttggataaaatcacacatcaagttcattcttggtgtttcttacctaattacttacattaatgaattattaaatatttattttatgtgttacgtaatttaacttatttatttattgctcgaaaaataaatataacaataatgatattgaatatcgtcatgaaaaatttagttgcttcaactataaatgtgttgcactatagtcagggccggccctgaaacaaagtgggctataggaaaaaaaaaaattgagcctttatgttagaaaaaatatggtatttttcaaaattgaaaaaaaatgtataattttaaaagaagaaaaaaaaaattggggccctgggctgggtgggccctaggcacaggcctagcccgcctatgccgccgggcctgactatagtataccacattaaagacacactgtataaatatacacataaatatatgcatacacaataataaataaaataaaattatataataggttcattatttttattcttattggtagaaatgtctccattttaatagcttataaaaattataactgaaattttcgcctatatatcgtaattatagtatatttcacttattttaaaaaatttaaaataatttataaaaaatttaaaataattttataaattttgaaaataaaattcaaaaattcagttgcatgcatacaatgagaaacgagcatgcacacaactaaatttataaactctatttttgacattataaattatttaaaaaaaattaaaaattaattaaaatacttattataattataatataaacgatcatataaataagatgattgaattaaatttttttaaaatgtaaaaaatattgatgtccctacttgaaagaacataaatagtgttaccccggttctgggcataggcgggctaggcctgtgcttagggcccacctattccaagggcctaaaaaaaaatattaaccttttaaaattattactattttttttactaattttgaaaaataccatatt

SEQ ID NO: 392545 - DNA, 1464 bp, Cannabis indica
tcaacaactcttgggctatgtgttcttgggcctcatatttttcatcatggagtttcattctcaggaatttgatttgtagccggcttattaccatcttcttttcagagagtatgattccatatgtttcagtgatctccgcaaactgggtcaggaggtttgcatgggctgttatttggtgagaaaaacagtatatcatcaacgtagattatgacttggttaaggattggactgtatattactcatttctttctggaacagggatggcgtcattttgagtccaaagggcatcactgtccattgaaaatgagaatttgagatgcaaaatgttatcttgggtctgtcttcctttttgatgcccagttgccaaatacccgcttttagatcaaatttaaaaatatcttcgctttttagatgctagagcaaagagaatttctgtttggcaagaaatttattgtccaccaaaaaatgatttagtggtttataattaattaccaatttttgttttcttttctagcatgctctgccctattgttgacataaaaggcgtaacatgcccatggtgattcgatgtctttgattataacctttgtgatttaaattgatgacattcttcgctcaccatttgttaatgttcaggatccatttcagggtggcttcctgttattggattgatatcctcattctgtttgaatggtagagagatgtagaactctttattttttttcataatggataatttcacttcgatgagaattcttagtgagaatttgcacatgacctttgtattagtttttctttgagtgataaaaatacatcttgcaccatgtgaaagtaattcgaattttcgctcccattgggtgaagaacttctttaggccaatccttgtgggagtattctaagcccttcattttttgtataaaggtcaaatcccactatgaggtcatttcctgtaagctttgatccaataactttgtagacaatggaacattcgaggaagaatttattctttatcaacctgctgatgattaatttggtgtggagtacttggttaatttcaacttgaaaatactatttcttagttagttgtataactagttttttgtgtttaattattagttttgttattttgcgtaactaggttccaagtttcactatttgaaatgattatttcaagtaactagttttcatgtattactttttaattttgttgttttattaactgatgtctttatgttagatttttcactagcttataatagtaactgatttctgtatgtctgattttttttgtattgattttaatttgttcacattattgttttttatgttttgctaaatggggtttttctattttttgtagtgttttgtctatttttcattttaactttgtcttattattttttatatgatcgaaactggttttataggttttgttatggtctcataggtttgttatgatttttc

SEQ ID NO: 392546 - DNA, 634 bp, Cannabis indica
tataattgacattattctcacttgtaattgtctatatttttaaagttgttgtcatcgctatattttatttgtaattgttactatccttcttaatacgtctctctctacacacgcatatactaggctaatattacgtacaatgcgagtatacttagctaaatttttagtttttattttggttgtatatttttagttatataattaatttttttagaagttattcaataaatataatattttttattaaaaaaatatttaatttaagtattatttataaaaagaaaagatagtaatattcaaaatttgtaattaattataattttagtttagttatcgtaatacttttagttttatataatactttccattgtttttgaaatattatatatttttattaaataataataataatagaaatatatttttttggtaaaaaaggataatagaaagatatatatttttttaaaatatgtacaatgagtttaatttgaattgtaatataaaaaaaactttatgctatataggtaaatttaatataagataaaagataagagagatatgtatagtttaaattttaattataatatttttttttaaaaaaaaaataaacttttgttatatagtcacatttaat

SEQ ID NO: 392547 - DNA, 2041 bp, Cannabis indica
gtcaagcttcctcagagcttgtatccattcatcaaccacaggttacaaaagtttgatcttttttcttttacaactttgatttctctcttatttttctctttttgaaactaacaaatctctttgttttatttttctttacatgaacacacaaatgagctatgcaaagctctctaagaggaactctctcaaaccgaagcactctctcaaaatggctctctagtgtatttttgtttttaaatgagagaaaaaaatatccttttatagactagatctatgactactaatctaggacagagccctagtgagtaactctatttttttgtaacggttttatctttagtctttattttgatcttgtttctgttgtaatgggtaaagttgaaatttttaggacccaatgaatagtactctgaagcttagggtatataaggggatttgtcccaatagtcagatatcaaatagttgagaagtttttctctgttcaatcatctcttgatcaagttacggatgtccttctccactgatcggtttaactatccaaacttcaaatggcctcaaccccttttcgtttaatgggggatgttagtattgataaatcaagattttgtattagttttaaaagtcatttaagagagttagttaatttagttggcaattatgaattagttagcttaacaacttcatcttcttgttttctttgtaatcaatggcttatcaataaatattagatcaagtgaacaataaatttttgctattctcttttttacaaacacaaaatgagctatgttctttctctctttctctctctcattctacagtaaagtggggcactaaagtcctaaattttagtacattgatttaatattttacaagaaaataaaatttttacataacttgagagcacaaggagactaatggaaattaaataataaaataaaattggcgatttccttttctatgatgacatatgtttgccttaatttattagttaattacattgttctcccccttttgcgtagcttagcaccgcaaaggggtccattgctgatctaatcctcccagttgaattttacgattttttttttaaaaaaaagacatcacaagagtttgcttgtcttttgaatatggaggtagacctagggttcaagggtttgttggatacagcgatggggcaaaacattctagttttaaggtggcgatgacaatttgggagcaatggtagcatcaggatggctatggctcttttgctctgtttcaagttatgctactgtttgttatgctccatgtgttattttattttcaataatggtattgcaataccactatattgttgatattgaaaccagaatactaaaaaaaaaaaatagtaaaagcagtaatgtctatgaccatccttatgaaagattgatccacaagacatgtggtcaataataatataataattctctatatctaaatatagaaagtatacccatatcacctacacaaaagcaccttgagtcattcgagatcgagcacacaagcaacccattgggagacaaagttaaaagaccttatcacaaataaaataaatcctactattgaatagacgggttgtatttattcaatttttataggaaaatctttctgataatcattgattagttttagtggaacttatatatttaggtataggaaatctagttctctctgaacttttattgatgtttcacagctgacgacttataggttaattaaaggtgctgttagaattttctttttcctaattaatgtaaatgacttggttgaccaattattgttgagtatgatatttgagcgatatcgtcttttaatagaccttgtctaatttacatattaataaatatttctattttgttctaaaaaaacaatcactacaaaaaataaatacttttagtgataacattttagtcacaacataatcttttgtgactaaattgttatattattttataatataataagtatagattaaaatgtgataaatatattattatgtgaataatatatattaagtgtatgg

SEQ ID NO: 392548 - DNA, 1060 bp, Cannabis indica
ctttcacacatccttgttttgataaaactgaagtcccttctcttgcttcggccaaataagaaaggattgcccaaatgacgatcattagattggatgttcccaactcccaaaatcctttgaatggccgctttcacattcggattgcagttctttgagacaagaaggctcgatttctgcttactccacactggccagaccatacttcatattttttaatgcaccgcacaagtgtttctacttcagaggtgtttgccctacagaatagtatagtatcgtcggcaaacataaggtgggacacctcaggcgcgttgcgggcaacccgaataccatgtatagaactcttatattgctcatgatagattaaacgagatagggcttcattgcacagcaaaaataagtaaggcgaaagcggatccccctgacgaagtcctcttgccggtgcaaatttacgtaaaggcttgccattaaggaggatggaataggtcacagaagtgacacagctcataagtaactttgtaatcgtggggctgaaaccgaatagatgaaggactttctcaaggaaaaaccattccatgcgatcgtaggccttgttcatgtccatctttagcgccaagagaccacctttcccttttttctttttaatgacctccacaatctcctgggttaggatcgatgattccgctatccaccttcctgggaggaaagccgattgggtaggagctatcaaggagtccatgaccactctgagtctttgcgccaagatacgagcaatgatcttgtaaacaaaattgcacagggctatgggccggaaccgatccacactgtcagggttgaaacacttaggaatgagacaaatgaaagtgtggttcaaacccgaactcatgatccccgtacgaaagaaactttggacgctgcttaccacatcgttgcccactagatcccaacactttcggaaaaaacacccagaaaatccatcgggtcctggagctttgaggggatgcataagaaagacatgggacttaatctcctcaaagtccgggatggccgaaagcatggtatt

SEQ ID NO: 392549 - DNA, 741 bp, Cannabis indica
actctacttatatactcgaaaaaaagatattaaagagtatcatattaattaaaatataataaataatactatataataaaatacaaaaactactactattaattattaagtaattttagaaatataacatcatgtaccctattacctcgttgaaacactttaaattatacacttggtttacttatatattgatttgtaattaagtttaattatacaattaaaaataattattgtaatatatgtgtacattttaatataatatatatgggtaatatatattatagaataattgttattttatctattaaatttttaaaactatcaaattgtgcctcttataatatatttcttgaaatataacttttactctaacatatactatttccatcatattctattcaatgacacggtagttgatagttgataaataaatataaattaaatattaatttacacattttatttaataattaaaaaactaaatatataaattaaattattataaaaaaaaaccttttattttatcgttcataaacataaaaacagtaaaaagtatttaatttatatttatttatgcaactatcattcactactcatttcataataaaattaaataaaatataatagaaatcgttaataattataataggcataatttaatgatttaaaaaaattatgtggaaaaaatgctaattatttactattataatataatataataccatattatagcaccatatt

SEQ ID NO: 392550 - DNA, 614 bp, Cannabis indica
gtaataggggtttctatacgatttttttgttgtaatttaggttgcaacactagttgcaataggagttttttatgtagaattcccgaaaaaaaaaaaaaaaaaaaaaaaaaaaacttgttttaaagtgtaaaaatgaaaaacccctaaattttatatattaataatattttaaataaataaaaacatcttcataaataaactcaagtttacatccatttttattttcttttcctatatacataatttatatattcgccatgtgtatgctgctattttataatatttttactgtagtttttcttgtattatattaaataataataaaaaagaaactaatatattaatatatgatacaagattttttttaatattattttttgaattagatatctaatatagttatgtatgatttaacataaattttgattgataaaatgcttaaatttatttattattaatttttaatcaatataagaatgcacaaatactcaaacttcagctcaagacatatggaacacaataataataagatagtcttaatagataaaaattatttttaatatttgttacaaaattattatgaaatttgagtttatttttgttaggctattttt

SEQ ID NO: 392551 - DNA, 3824 bp, Cannabis indica
aaaaaaactattccataatgtactactaccctgtattgggaaaatcaacatttttattttattaaagtaataaaataaaataatattttcaggaaacataaaataaaataatgaatgggcctcaccttaattcgaatcaatccatctgtttgaaactcccaatcaacaatatagtcatagtttgcaaccgatgctgccattcgcaccacaagtgtcaccttcggtcttacttccctaatctgccaaacaaacgacaattttttgagcaaataaatgaacaaaacgacaattttatttccaatttcgataactaccaaaacgacaaataatctcgatgacatataaatgcccttaaatatttttttaaagaatagtttatgttattatttacatgacccgatggatcgtatatacttacatccatacccgtaatgggactttctgcgtgtcgccatgcgatatcgccggcatagctctcaaacacgcaaaccatgttagacctcacatagggagtaccatcggccgccgcgaaaacaccatccatgtagtaagcatttcggggacagtcattaagcgggtcgagcggcatggcttctaacccgaacccatattcgcctgcatccatataagtcttgaaataccatgcatcagtcgggtccatgtaaggcacaaatagctccgaagctaaccctttgtacatcacgttccttaattcacccgaatccgggtctcggatcttggccctagaaattatcacacccgctctcgcatcgggtttgaggtgaaattcccaatttgcccatttcactaaatgatcatcttctatcacgaaactcggacctttgggttgctcgagagatatagggttcagtatatccatgacccggttctgctccatggttgaaaaccggtaatctgtattggaggcctttggtatgggtatggtcttgcccttatcggatattttaaccacttgtttggtgtcaaggtcaacggttacggtcaacccttcgattggtctcatataaaagttcaccgtatctttcatggagtagcactgtaccttaatcaacctccttccttcctcggccttgccaaaccaccccagcgaaatcggcaagcacgccaggtccgtcagatcaactccgcgatcgacgatcgtacggttgaactcggcgctcgctaatgggaccaccgtggccgtggtcatatcctccacggtcatcatcgggtaaccagaatgcttaccagtttgttgtacggtcacctcttccgtactgagatcgacggtcagcacgtgcgaggctcctctcgcacgtgcgatcacagtggccttcctcggcggaagtgggtcgcccttcttccaaccaatgacgagtgacttctccggctcttcgagctcgacggtgtggagcgagtagggagacgcgcggaagagcgcgtgggaagaaaggagcgtacggatttttctgatttcttggactgttagagggtctagcgggtggtggggagtgtcgagagtatggtcacggaggcgcgtggattttgggggctgatgttggatgcgattcttggaagtgcaccagggagagttggtggcacagtcgagaagctccactgtagagggtggcgcgtgagtgaaggtgagccaggtgaagaataagactagtattccaagtgtgagaggaaagaagagaaagcggaggaagtttcttggttccatggccggagaaatgagaggagggagtaccgaacgagtgaatgataaaataacagtatcaaattcagagtgaaatagagtagtactgtagtgatagagagtgagagagatagtgataaaagttacgtaaggaatctaaagtaatacgtacaaaagtgatatttaaagctgtggacgagtcgaggagtttcgctctaatacgaatctatactaatatggaagtacgtctctaatacgaatctatctatataccgaattgcaaactacgtacaagccacgtttattatttttttttagtaaactttgattgaataatataatttaggtgaattgcccatatatatatatttttttttttatttatggtttggtttgctactgtggtgtctcgatttaggttgctggcttagttactatataagactttttgtgtgtaatttcgtaaaaatataattaaaaaaaaatgtaacaaaaataaaaaacttctataatctaaaatagaaatattatttataatttttattatatacctagatgaagttagtataataatgtaggtatatttaatttatttttataatatatattatgtttttttatttgagttttaaatttgctcattccaggtaaatatattcaaactctccctttatataagggacactatttttgtaactaaagcagataaaaaatgtgtgatcataaatagaaaattaaaaaataaagaaagtgtagggttttttcaccaaaaatgacaatagaggagtttggagttatcatttgcaatatggaatacatgaactccttcgactccttaagtgatgtttatatcaaaacttacaaagtatataactaaattgtaatagaaaattatcattttagcaaaattatttggcaatttacttttcacttttttactattttcacttaatgacagtgaaaagtcattgacttaccctacatagacttatcctatttaatgatcataacttttatgataattacattttaatttgataaaggagcatgagcaagaaaaacttagaaatactaaaaatgtattgatcaacgtgtttcaacaaaacactagaaaagaaaaatgccagagctatataaggaatttagataaataataagtacatataaagttgtggaagacttattatgaagaaaaaaatttacaagttattgacttatataatataaatgcagattttcgtgaaccaaaattaaatagtctttcagtaacaaacattctacaaaaattgataaataataaaatacataataactccaaatatttttacgtaattttgtagttaaaatctacatactacacgactccttcttattaagaatatttttagagtacagaatacaatatttttttatataattacaaaatacaatatctatattgaataataatgattctttctcaaatttaccatcccatttcccatggaatatgtccatatttataggagtataggttgacaattattctttttcggatagatttaaatataaatgtaaatgaaacgtggacaatccccacagtttatttaaatcacatgtgagataatactaaataattacccaactgttctttagttttctcctttacatggttattgctgacgtggaaggttacatcttttctgattcgagttatcttccttatccatcttgacaagaaaaaacactaagtcttgggaaagtttccatatctcgctatgtcctctttgtggtttttgtaatgcaaggtgatcttctcgatcgctatatgtaatgcgaggcagtttatgttgatacttttattctgctcgggtagatacatatccccttcttgtttgtatattctgaggcatgtgcatgtgtctcgttaatctcatatcaatagttattattcttgtctcgtttttgactataaagccaacaagttttgaatattatctatttatccatataataataacgagttattcaatatgcatttaagatatcgttatatcatttagaattgattcatattccatatattggacacgtgtcaacttctgaatagtgtagccaaattttaggtataacaattgccccttaa

SEQ ID NO: 392552 - DNA, 919 bp, Cannabis indica
gcttacgacaattaatatatttgaggtcactcattttcgagttttaaaaataaaaagaggggctaataatatacgataagggagaacactttcaatgaagattcaaaccagcctatttccctggcgatttaaactttataatattaaataaatcaaataataatagtcaataccaaataataataaattttttataaatttatcaatttatcaagtatctttttttaaatatgtgaaatattttcaatttataatatcttttcaacctttgagggtatatgatttgaggatatatgatgatgattttttttcataataataatttattttaggctaattagcaatttttaatttattttaggctaattataactaattagcaattttttttcataatatatgtgaaatatttgtttttattgtttatgttacagaaccggttatattttaattataatcggattgagttatttattttcattcattatattatagaaccggatctatttttgtttatatttgagacatctacttctggtgactttttgtgtaacttttttcgatgacagtgacttttccggtaacttttctgacgacactaacttttcccattagcttttccgtcgtcgacgactttccgataaaacttattattatttacaaataaagaatttctatctttttttacaaaaaaaaataagtataaaaaaactacatataaatgtaagaaaaaaaaaaaacataacccttagcattatttatttatgcgttgcaaatggtagccgacatctctattttatagaaacagatcgaatcaaagtgaataattgaatagagggaactggtcccgccatttaaattatatatttcttttcactattcgtacgtactcgtttctttctattgttaattatgtgat

SEQ ID NO: 392553 - DNA, 896 bp, Cannabis indica
tagtgttccttcgaagttgttgtctattcttttgggcgatagctctcttaataagctaccagctatctatcaattatattcaaagagtgatttgaatattttctacttattttttttttttgtagtcgttgtagagatttataatccctagaagattgagatggtcattgcagaatataaacatggtttgtattgattattcttgataaattttaacatatagatatagaatattattatacttacaataagaagacaaaaaaattatcaacaatatgaattaattaatgtttcaaaaaatggaacatgataaaaggtacgtaaaagagggacaaacatataaaaccatgaaaattttcaaacaaatagaattattttatttacttaaaaggtttgaatgaagaaatttgatgggtgctatttatagtcgacccaaccaaccccatacacacatgctttggaaaataaagtctaaatcagaactaagattaattatgagtcaatgtcaattaatggaaattaacaatttagattgaaaaaataaaataataatggaaaagcttcgaatgagagtcggtggaaatcaaaagtattctttactctttcacatgaaaaatgctgcaaccacttgattctagtatcaccacttggtatattattgagttttacatcaaattaatttaataattattacatgaatattattaaaaaagtgtgcaagacatgatatctttaactcttttatgagtattattacaaggagtattattattggacactaatgatgtctagtactttttaaaagtgacactctaatattgattagtaatatttataaaaaattatattaaatttaagtggtgtttggtttgatgtaatgtaatggtaatggtaat

SEQ ID NO: 392554 - DNA, 894 bp, Cannabis indica
tttttttttctttttattttttccctgaaacctaatcctaacctatatcttccttaattttccttcttcttctttattattacaaccaccacattcactaccactaaagccaccaccagaaccatcaatatcaaattaacacaattacataagattgatattgatacagacccaattaagaaaaaccataaaatctcccaattcaacattatccaaaagaaccaatccaaaaaccctaaaaccccaaatatctacaaacaaacaaaataaaaatgttaattttctcatacaacctaactcggaaacacatttgaaacatgctaaagaaaaataactattccataattcattcactacaagctccaaagattattacattacaaaactaaatcaaaagattttaactaggtatacctcaatttttacagtagttgttattgatttgggttttgaatgaaaactctgccaactcaagctctcgaccttctttcaattaataaagtagtcattttttcgctttgaagaatcatcttttgattattcaacttttatttattcaaaaattctattgacaattctgtaagagtagaaattgatggatttgagtctttagagaacagagggagatttgacgagttgaggatgaagacgatgatgtcggttatggttttgcgtgagttggggaaatctggaggtgaccttcattttggccaattgccatcgatgtcaagttgagattagcaaaggtgagagagagaaggagagagagaagagggaggatcggggttggaattctctgagtcatggggttctgttctgtggctcgtgtgatgtcacgacccgagccctaggtcatggcagatatgtaatatccataacttgggtggtcaaagg

SEQ ID NO: 392555 - DNA, 652 bp, Cannabis indica
ttaccaaaaaaaaaaaaaaaaacctaacttttacgcaaattgtataaaagcacataaaactgacaatttccagatatatatagggtttagtaaccaatggtaacaaaggataaccaattgaaacagataaacataattacctctatctcacaatattctatattcgttgatcaggaaaaaaaagaacaatattttataattcttaccctgtaactttaaaaatacatgtataagaaatttaattaaaaattatttctacataatatttagtaataataaaaatggccgagggaaacaattatgaaatatatgctgttgttgcttgttggtataaccaaattagttgaagatgaatactaacctatgagtccagaactttaacttttgagggttcagtcttcaggcccattaatgtttatgggccatatatagatccaaacattatatgatagggtcatttatgggaaaatgacatgtttttatataggggttgttttacaaatacacacaaataacaaaaatattgcaaaaataaaatttcatgaaattttaaatattttttactattttttttattttatttacagaaaatacgattatattgtactcttgttaatttgttgttgattttttgttatctgtatgttttttt

SEQ ID NO: 392556 - DNA, 1418 bp, Cannabis indica
cattttgatgagttcaacaggatagtcttggacctcaccaatataggtgtcaagattgaagatggagatcagggaattttgctgctcaatacattgccaaagagttatgagcactttgtggacaccatattataggggaaagagtctttaaccatgacagaggtgaaattagcattgaactctaaagaaattcagaaaagaagtgaagaaaaattaaatggttatggtgaagggctgtttgttagaggtagatcagagacaggggaaaacagaggtggttttcacaaatcaaatcaacaaaggcaaacagtaaaaaggctcaaatcaatcacacaaaccaatgtccaattccgaggcagggaaacagtgctactacttcaagaaagaaagccattacagagatgaatgcagggcattgaaggctaaactacaaagagacaaaagtaaagaaagaggagatgctggtgttgtgacagatggttatgagtcagctgatgtattggttgtctctagccaagaatcagtagactcgttgatacttgattcaaggtgttcattccacatgataccaagaagagaactatttgatagtttcaagaaacttgatggtggatcagtgctgttaggtgacaacaaggcatggaaagttgcagagattggaactgtgaggatcaagtttcatgatgatcaagtcggaacaattcaagatgtcatgtatgtcccagatttgaaaagaaacttactttctattggtgaattgattgaaaaaaggcataccataaagatagatagctcttttaaggttatgaaaggttcactagtggtcatgaaatgagaacttaaaaatggcatctactatctaaaagggaaaactatcactgatgagaatggcatggttgttatggggcctgatatggaaagcactaggctttgacatctaagacttggacatgtgagtgaaaggggcatgagtgaacttcaaaaataagggattcttaagggcaaattgggagagaaactagatttctgtgatgactttgtctatggaaaatgctgcaagttaaaattcacagtagggaaacacactacacaaggaaaactagactacattcactctaatctttggggggcttctagaacaaaaacactgggaggttctagctacttcatgagtatagtagatgactatactaggaaggtctgggttctcttgctcaagacaaagaatgaggcatttaacacctttatcacttgaaagagactgattgaatatcagacagggagaaaaataaagaaactcagaactgataatggcttagagttctgtttagatgagttcactaggttttgtcaacttgagggaattgatagacacaagatagttatgaaaatccacaacaaaatggacttgctgaaag

SEQ ID NO: 392557 - DNA, 1376 bp, Cannabis indica
atggtaaaatattgtattaaatgattctaatgttaaaactattaacaataattttttagttaattttttcgcgttaaaaaacacattgtagaatatatttttttaatttttttcttcatatcctccctctaaatttttaaaaaattctaagtagtttaaagtaatgaaaacaaagttcttaatattctagtttaccataccatttcaaaaaactttaaatttattttcgacacttttaaaagactgtttggttattgtgtttttagtttttagtttttagaattgtgttttcaaaagtaagaacagaaaactattttttattattttaaaaatttaatggtgtttgactcaggctttttaaaactattttcagatattttcaaaaaatcaatattctacaccataccatgatatgaacccatccaaccccggacctagacccgaacccaaaccccgacttgaacccagacccgaactcgaaccctgtactctaggtcctgggccagggtttaggtccgatttcggggtccaagtagagggttgaggttcggcgtccgcaacctagtctcagtcgggccgagaggtccggtcggagtctgggtcgggtaataaaaattgactaaaaaattataataggaagttggcaataacaatctattttattttataattttttttgataattattataatttttaatatgtgtacctgtaatggatagtactgtgccacaaagagatagccaagcatcttttttatttctgatgaaataagttactatgtaagctggattaatggctctgatgactgtccaatcaaacttgatgaaattatagagtccaatgctactaataagtgcaaaccatagtaagagtaatggagaaaatgtgtaacccactttgtcagttccaaatctttgaaccataaatagcataattaagattgctactgagaaccaaacaattttatctgttaagaaaaaaaaaaatgattgaatcaattaatcctactatatatgattaattgagattataatgatattatatttacttaattaccttgtgtcatactaggtgcagcttccttaatacctccaacagctgataaaactgcaattaacaaaaggtgaatttaatcttgattagtgtgttgtattacaccaattaattaattttcatctatatttggataattattatttttgaatttttatgtacttaaaaaggaaaaaaaaatattgggagtaaggccctctctcaactaagtaactttgcctcggttaacatgggtaaaatacaaccaagtcaaacccgccttactttctaagagcattgctattgggcaccagtggtgcctagcaccttctaaatgtgtcg

SEQ ID NO: 392558 - DNA, 3673 bp, Cannabis indica
agaggcagcggggacaaaggaaagagaacagctatcaaagctacaatttgcaaagctaatccagatttggtaatcttacaagaagtgaaaagagcaacagtggatagaaggttcattggaagcatatggaggtccagattcaaagcgtggattcttattccagccatagggagatcgggggaacgttactgatttgggacactagaaccatctcggtactagactctttggttggtgaattctcaatctcagttttgattaatgcagaaggtaaagagccctggtggttttcgggagtgtatggtccgtgttcgtataaacttagacctgagttctgggatgaattagcaggtttaagttcaatatgtggaaagtcgtggtgtgtggcgggagactttaatgtgaccagaagagtaggggagaaattaaacagtagctcgtttacgaggagtatgaagttgtttgatggcctgatccgggaattacagttgatcgatcctaagcttgagaacggaagctttacttggtcgaatttcagagcatcccctgtttgcagcagactggacagatttctcttcactaacaattggaatatcatttttccgtttgtgagacaagaattgttggtgaggatagtgtcggaccatagccctgttgtgatcgattcaaatcctccaaagtgggggcccggacctttcaggtttgataatcattggctggatcacaagtccttctccaaatgtttcgaaagatggtggaaggaggaaattaatgacgggtggccaggcacaaagtttatgaagaaactgaaaatacttcaagggaaggtgaaggagtggagtaagtccacgttcggacaaaatagggccaagaagattgcgttggaaggaagattgggggtgttagacaaactagaaggaacctcgttctggaaccaatcgttacttgacgaaagaaggaaattaaaagaggagtggaagtggttgaattttgaagaagaaagaggtacttggctgaaatctaagtgcaaatgggcaagagaaggagatgcaaactcaagattcttccataatttattaaatgcaaggaaggccaggaataccatctcgagaattgaaagagaaaatggggacatcattgataatgagaaggaaattgctgaggagctaatcgcttttttttcaaaactctatacttcagaggcaagaatggggtccgggattgaaggtattgagtggcaacagatagcggaatcttcagccgggcaactagaatgcccttttgaagaagaagaagtcagaaacattgtcttcagttgtgaaggaaataaagccccggggccggacggctttagtctggcggtcctccaacataattgggagacgattaagcatgacctcatggaagtgtttacggcttttcatagagagggaagaattgagggcagtatcaatgacacgtttatatgtctgatccctaaaagattaaatagctgcaaagtcaaagattttagacctatcagcctcatcacaagcgtgtataaaatcattgccaagactcttgccactaggcttcgcggtgttttgggagagactatttccgaaacccaatcggctttcgtggaagggagacagatcctagactcggttctaatggcaaatgaagcagttgaggactataggagtcgtggtagaaaagggttcgtgctcaagatcgactttgaaaaagcatatgatcgtgttgattggggattcttagatatggttctgaggaaaaaaggttttggggagcggtggagaaaatggatacgaggatgtgtctcgtcaacttcattctccatattcattaatggtagggtaagaggcaagttcaatggctctaggggtttaagacaaggagaccccctctcaccgtttcttttcacaatgattgctgatgttcttggaagaatggtggacaaggcaatagagacagaatctttgacggggttccagataggtaaagacgatattcggcttagtcatctacaatttgcggatgacactcttttctttgtaaaagatgaggtttctctccagaagctggttaaggttgttaaagcattctgtggaatctcgggactaaaagtaaacttgaataaaagtcagctgctaggcatctgtatgaatgaggaagcagtggcccaaagtgcgattcttattgggtgtgaggtgggtaggtggcctatgacctatttggggatcatttggtggcttgggatgaagtgtgtaaacctagagcggagggtggcttagcaatcggaaaactagatatgcggaacaaaggattgcttatgaaatggctatggagattccctctagaaccgaactctctgtggcacaaagtcattaaaagtcgatatggcaaagcagacaatttctgggatacaaaacagggggttagaatatccccaagaggaccatggaaggatatctcagatctttacgatgaatatgggaagttggtaaagtttaaagtaggaaatggggaacgtattcgcttctgggaagacgagtgggttgggggttcttcactgagggatcaatttccaaatttagctgtgatatctagggcaaagaatgtaagtattcaggagatgatcaccgatgagggcgaggttggagattgtgtggcgagctgggatcttaatttcagaagaaacattatggatagagagattccgagcttgacacaattattacaaaagctggaacacgtcagagtacttaacattcttgaagatagccggacttggttaccagactcttgtgggattttctcttttaaatcagcgttcagctggtttacctcaaacgaaaaccctgaagagttgttctggactaagatcctatggaaaagtagaggtccttccaaagtcaaagtgtttggatggttggtggctctagataaattgaaccttcacgctagattgcaaaaaaagcgcccatttctgtgtatatcacctgggtggtgtgtttgttgtaagataagtggggaagacaatgctcatttgttcttaagatgccgccttgcaagttctttatggataatgttgataaacgaatttgagactcaatgggctatgccttgctcggttcattacatgttagtaagtaaggttggtggcagtaaacgaagcacaagcttatggagaacggcggtactgtctgttctttgggttgtttggttagaacgaaataatagaatctttgaaggctcggaaagctcacctgagaccctatgggataaaatcaaattctggacagctacatgggtatacaagactaagcacttcgaaaacatttcattcttagacctaatcagagattggagaactctgttgtaagctgctctggtgcagccccaaaggcacctattctgggacggtgtcagctttgcgtctgtaccctagggtgttagaagttttatttgtttagatagggcagagtggtttgtgtcaggttccctagctttggttaaagatgtggatcttgctctattttttgtaaccacggtattcctccgccacaagtgaggacttttatccatttaggggttggggctagtctgagacaatggcctccgtctctttttttttttctaagaaaatatataaaattttaaaaattaattt

SEQ ID NO: 392559 - DNA, 1106 bp, Cannabis indica
tagatggatcttcattttcttttaacatttttatggattttaattcttttttttttcgaaaatatgaacagttgatttttcattttcacattgctgctacataaaaatagcgtgaaaacaacattttcttttttaaagaaaaaattaaaaaaaaaaaaaaccttaaaaaaaaatcaaatacataaaagaaatgtgatttaaatactttatgttgaaaaacacagatttagtagcccaaaattttgggacctgagtttcggtagcccaaaatacaaatttagtctgtcttaacttagaacttgtcatgataagaatgaagtaatcacttgaaaaattgaaatcccttcaatgtaagagtaattatcaagcttactagcttagtcactttcacttttttctttttgagaaaaaaaaaatactaattgcatactcatcaatggtgagagcaacaactcttatatatcaactactaaacaaataatacaagatctaagccacatttacttaattatttgcaagtatatatagtagggtagctactagattaattacatggagattaatttaatcaattacaaatgtataaatacagcttctgtccaaactgatcaccaactattagtaaagaatatttattttaattacccaacctaaaaaaaaaaaagcattaacaccacctaactagttggctacctcccacttcccaaattcacaaagccatgagtttatggattttgagctttaaatgattttttttaatctatggaaaattttggtttgtgacatatttaatgttcaatttatttatttttataaatttcaaattctcatttaaattctatgtcttgtacccactataaattcctaacacatccactaaactattgtttgatttgttgttaccatttttttgtttttatgttgtttaggtgaactattctttgtttgtttgtgttctataatgagtgggcactattccaattcaaacctaaaagggaaacttacaaaaatactggaatttgagttaacttttacaaaaatactgtcacacggaaaagttttcaaaaatactgtatttttataaaacaccagtaaaacacaaaaca

SEQ ID NO: 392560 - DNA, 1617 bp, Cannabis indica
agtaaaaaactcagcaagctgcgacaatgaaaaaacaaaaagtaaagtaattgtgtctaatttcagatgatgatgagtaatctggcaatcaatctcaatatgcttggtgcgttcatgaaaaactgaattatgagcaatctaaatggcactttgattgtcacaatacataagagtaggacaagagtcacccatctcaaccaaacaatctctttagtagaaggtgtcatggcacaatactcaacttccgttaaaagattgagaaacaacatgctgcttcttgctcttccaagaaataacaaaatctcccaaaaagatacagaaaccagtgagatttttagtctgtgggatcacgaccatggtctgcatcacagcaagctcgtaactccagagaggaagtggaaggcagcagtaggctctgaaagatggtacgtcgaagatatcgtagaatgcgaagaacaacaacccagtaaacaatagtaggagaagcaataaactgactaacaatatgaacaacatatgcaatgtctagacaagtaataatgagattaaccggagtgccaacaatggtgcgatacaaagtaagatcttctaaaggagtgccattagaaggagaatactgaacattcagatggagtgtcaactagtataaataggcgagcacgctcaataatgtcaatattgtactttgactgagaaataagataacttttgaaagaaaaaaaaagacaacttcaatacccaaaaaataatgcagagaacccaaatccttcatctcaaactgagaagctagttctaacttaacattttaattccttgtgattacgcttaagaaattcactcttataaaccttgctctgataccataataattatttatgaagagaagaataacaaataaaatataaaatagatgaagagaaattaaggtttcattcaattgcaaagtcaaaaataaaaagatacaactaataagtaaaccttatacaggcaactaacataaaatattaaaattaattaacctaaataattaattaacactattgacaatatttggtgtatataaagaaattaggtaatatagccactgttcgcgcgattaatttaatttttttagtattataataaatagttacttaaaaatataattctaatatatagtaaaattataaatgtattatcttagttcatataatattattaataattttatttatttaaaataaaatgcacaattttattaattattatttggaattatttgttaagaagtttaaaatttactatatgtagtatttgaaattgctttgttaaaagaaattatttttatgaaaataaataaataggctagtgtagaaaagaattacggtgttccccataatgtattattttcatatctcgatcattcaaactattatttttattgtatctcacttatttttatcaccgtatctcatatgttgtcatcattgtatctcatcccttgtcgttaccgtatagttcacttgtagtcgtcgctattgtatttcccaaatctcgaattttaaatattttttaatattttttagacattataaaaaatttattagtttgttctgttattattaattaatatgtttt

SEQ ID NO: 392561 - DNA, 2505 bp, Cannabis indica
tcaaacataaaggttatttgaactttttgtaggtgatcatggatcttcacatgtggagcttaactggcatactcgtttgaaaattgtgttaggaatagccaaagggttaggctatcttcatacagaattgtcttcatttgatttacctcatggaaatttgaaatcaagcaatgtacttctgggacctgattacgagcctttgatagttgattatggatttattccactaatcaacccaacaagtgttagccaagcaatgtttgcgtacaagaccccagaagctacagaacacaaccatgtaaaccataaatcagacgtttactgtcttggcatcataatcttggaaatcctaactgggaaatttccttctcaatatctcaacacaggtaaaggaggggttgatgtagtccaatgtgtggcctcggctatatctgaagaaagagaaacagagttgttagaccccgaaatctcgaatattacttcgagaaattcgctgggacagatggtgaggctcctccatgttggtgcggcttgcaccatgagaagccccgaccaaaggccagacacagctgaggtcattcggagaatagaggagatacaaagtgagggaggccaagaaagtaatggcagtagtacaaatagagcaatgcaagtattgccatcactccgagatggttatgcagattccataccaaccccaccactatcatcatcactatcacttgctgaaaatcatgaactgagtttgagagatgattttggtgaggtttctgggagaaagagactaaaaaatggtgacagttttgccttcccaatctcataatttaactagtttgtgttgtattttcattagagggcaatgctgatttttggagttccttcttgttatataatattatagcaaatattctttgagatgagatggcttatggatcattatttttagatcgcttacaaaccaatttgaacctttgtacagtaaatttattctctgtgacaatgtatacttccttgcaaaagaaaacaaaaatttgttgacattaaattataatatagaatatcacattttctctacttccttgcaatatagatgactgaattgtatacatcatttcggtctttatattcgttgcattattgtcgttttaaaaggaaaaaatgtcgttttagtacaacatcattgtttcatttaaaatatcgtttacctgaaacgattgtcgtttcactaaacaatgtcgttttcagtcgtttaattaattcatttgatgacagctttaagtattttggcctatggtgttgtctttatattttcaaatattgaggggtctctctctctctctctttaaatgcttgcgtataagattaatgcctcgtctatgttcacactattcattctacaattcattttaggggtatttaaagattgtgtagtttcctcaaaacttgtccttttcaaaaagggaaattttgttagaagaaaacagagatagaaggcccattggttcagattggatcaggcctctccaaaatcccaagcgacatctctttgttttttttagaggaattttgtaagaggggaaatgttatttaatttgttatggaaaaaaggaagaatttaatctattttgatttgggattttcattaagtcaactctgttgtgttctgttgtagatcgtatgcgtcagacagctggaaaacgccctcaaatgaaaacaacagcagtatcttgtttctttagaacaatattaatctaattaaaaaacttgttcatacagctggactttacttataatcaattctttataactttttttaaattaaggctcactttcataggccgctaatctggcacggaacaaattttcaccaaagctctcaatcttaaactctcactaaaagacaagaatatttaaatttaataaaataagtaacgacttattatcattatactctaattatctttttaaccccttcaaaaacattgaaccaagacaatatttaaaccttattatattttaatattatgagcaatttcctttctactattaatataaacagaaaattaagaacatataaaataaaagaaaagaggaaaaaaaaaacactcaaaattttggacctagttatgaagcgtgagctttcatttcccaataatttatatgcatttataaagttatatattatatgagtttacaatgtcaatatgcttacagtgttttcaatatttataaggaaaaagttataaaatgtacactaagtttatgtatattgaattatatacaattgattaaacatttctttaaattgtattagctcaatggatttgttcgatattttagacagattgaagttagattatttaaaaaaacacaataggctagcttatgagccctaatctcaaaacataatgctgcattttgtgtcatatatatattgtacattaattaatatatatttatgaaaaacaaccgtgtttttggtcaaatgtcagttgtatataagaa

SEQ ID NO: 392562 - DNA, 1590 bp, Cannabis indica
attgaattcttagaaacacgactagctagttgaatgataattaccttttagattggattcaattaacaaaaatcaaattaattaaatagtttttatattcttatcagtaaataattgttagtctgataatttgtgtatgcgtaaatatatttaacaggagtatgaggtaatatttctagatatatatatataaggcatattattttaattacttatcataccgtaattagatgcattaacattataaaatataagagccataaacaaaatcatactcataagattttttctcaagtaaattaagtaatttttatttctcaacctatgtgctaataagagaccaactggtatccaaattttaaatacatatatagaagatgatgtttattttgtttttttttttttcttggataatgatattaattatcttgattacattatagaaatggtatatatgttgtctacaaattattattaattccatcccaatcctaaatattcttaaactaaggaaggaagttctcctagtttttcttttttgaaaacagatattatctgcatgttttgaacaaaggtctttcagtagaattaggaaaatgaatccaaaattttaattaatttttaaactttaattaagattctctatcatagatacatatcaaccgacaatttactaatattctataatgttgaaaaaacaatatataaatggcaatggtatcccaattctatgaatacaaaaacacctcccaattctccatgtgttataattttatttacattatattttatatattcataaattcatcatactaatttagcatttccctttattgcaagaaaaaaaaagttacaactaagaaaaaatccttaccaacatcttttttactttaaaagaaaagaaaaaggctgtaaaaatatgttatatacaattattattattattattaatggaggagatcactcacataagatactttaataaaaatagaaaatttttaaaatatttaaaaaattaaattaaaaacatgctacatcatatcatctaaactttttttatttattttaaaatttctttaaaattaataaatgctctaaacttagtattttcctaaaataataaagaaaagatacaaatttatcaaaaataataaaatatagtatacagtaaatgctctatttcacataaattctaaagaaattgctctaaacttattttattaagttcttatagttttaaattattttttaagtatggatatatgtaatattgtaaatacgggtcgggatttttgatactatacgaaatcggcatgagtccgaaagacacgagtacaactaggtaagaaaaaatacgggtttgagcacgacacaacacgatactacaaattagggttgagcatcagtcggtttagtcagttttttatataaaaatttagaattcagtttttagtctggattggtgcaatccgaaaactgacagaccaatccaaaacttatcttaaaaccgaccattttgaacctcgatttggtctgtttaaaccacccaaatcgaacttcttttttttttctttaaaatatgatccaatt

SEQ ID NO: 392563 - DNA, 1132 bp, Cannabis indica
aaacccccgaaccccccccccccccccccccaaaaaaaaaaaaaaaatgcatgaagacctaacttgaaccttagaatttaaagagggagatgcttagcttggcttcgctatcaataaaccttgaatttgtaagctgaaatcctctgaatgcacttcaaaagaatgaaaaaatactagtttagggggtaaggttacttggggcctaaccttgagggagagaagagatgactagtttatttatttatttttttttggtagcttatgataacaaaattaattaattaatttttttaataaattactcttttccaaacactctaatggaaatgctagattccactaaaaacaaatttccataatttagggtaaatgactattttgattatacttagccatgaagtaatctctatacctgggggtaatatggtctaaagcaataactccaacattccaaatttctaactatattacctcgctaattgtaagatactctaccatatctaagttactctaatggccaaatcattgcattctactgttactgaacttaaaaatataaaaaatataaaatttaatatatatatatacatacataatacatttagaattaaaatatatctccgttattcagaaaatattaatctaaagcctattttcactaataagccgtaattatttgctaattttcaaaataaagttaagcggtcattacaattattcccgttaaaaggattttttccttaaaatctaacttgaacaacttcagatactgagccctcgtatcagactctgattcccaagtggcttcgtccaccttactgtttctccagagtaccttaaccaatgctatggtcttgttccggagaactttgtctttcttatcaaggatctgtatgttgggctttgtaccctaaataaaactttatgtcaatgtaatctgttctattcaattatcaataaagaaacagaattaatttcattacttatttaatgtgttatttggttcatgtgatcatttattaatttatttgatttataaattcatccaaatccttatcacactgatattattgtttattgtgttgtcaacacaatggaaagtaatcaagattgtgtgattaaatatattcct

SEQ ID NO: 392564 - DNA, 732 bp, Cannabis indica
cctagagaaagatgggaagtggaccaattattagagtctacacaaagtgaggataatgccctaatataatataaactatcatcttcatcatcaccaccatccatctttgtatatttgataatataatataaactatatatataatgcttaatatgttatgtagttcccatgctaaagaaaagaagaaaattataataataaaaaaaataattgcccatctttatattttcatgatggcttggatgttaattgcaattgtatttaattagagaaaagattaaatttatctctttttctttattctctcttagctaacactccaatttactttgtcaaagcatatatgaatgagtcattggtggggtggaagaataataatggtaaagaatgattaatggatggttcatctttggagtatatatatataaatatatatatatatacacatatatatatatatatttatatataagaacattgttattaactatagtgacactacaataggttaacaatatttcgtaaatttttttatattaaattatatgcaatttgaaatttacttacaccaatagtaatattatactttgaaggtactaaacacgtgttaaaccaatataagtttaacatatcaactaatttaatttatattaaatgtattaactacttttgttaattcaatcaaaggtttaattttttaatatataaaaaattaattgacgtatcaaattt

SEQ ID NO: 392565 - DNA, 1169 bp, Cannabis indica
agagagagagagagtacctggatagaagaagatgagagcgcagaagacggcggaggttgcaaggagagggacatttgagagagaactcagttgaatttggtgagactaactctgtatgtatgtatgtatgtatgtactactactcgagctaaaattggatcaccaacttatttatatttattctcatgaaaaacaaaataataaagaaaaacttatttatatttatcactattatacatatataatccattcaaaaaaatattcatgttcatgtgtttttcgcttaagctattattcaatttataaacttttttctttcttcgttggtttgttgtgtcactatattttcaataatcaaattgtataatagtttatatttacaaataaataggtatgtcaaaaaaaaaaaacaaataatttaattattttttattttactaataagttattggattttgagccaaatttataattttattgccaattagaattttttataaaaatactattttttttataaaacaactctagaataacaaaacataacaattaaaaataacagtaaaacaactaaaaaaataatcataaaacaacagtaaaaaacttgtgaaaattacatgaaatatgagatttcataaaaaaagttagaaaaatatgacatttatagtttgtcactcttctatggcatttttttcacatttaagatttttttatggtatttgatatgccatattttttataaaacttattatccaatctcatattttttgtttttgttttttagctttaattagtttttaattatttttttaatttatttttacactttacattttagggttttttctattttagaaaattttacactaaatactacatttttttttctaaacatttacatttttaattttgactaagaacattttacttttattacttttattatttttttttttctttttttactgttttttttactttatttgtaagctttcaaaaaaaaaaattagtcttttttaattatatttttttagttctaattttggtttcgttctttttttcttttttctaactttttaaagttctagttgtctacttttttttttctttttcttttcttctttattctcttctcttctttttttttttacttttacttttacttcttt

SEQ ID NO: 392566 - DNA, 730 bp, Cannabis indica
gttcaagaagaaaggcaaagaggaattacttcagttacttaagaagaaaaacttccagcagcatcttcatccaattcagggctatttgttggtagtgttcaaccacataagcccaaaatagtgtgtcacattgtggagttactggtcacgtcatggaaaaatgctacaggttacatggataaactccatggcataaattgcatggaaaaattcctaatagaaatgctccaggacctacaaaatctcccactacaaatttttcttgtatgcaagaagatggaggaacaacaaaagagaaccagaatgtgaaacaagacattatggctacctttgctcagtgctaaaatctcatgaacatgttgtctcatagaagttctgagccatccaattctgtccaaaacagacaaccatctatgtcacaattatctggtaaaacactttcaaaattttcacattcttggggcttagatactggagctactcaccatgtttgtcacaacaatttagccttgtttaaaaatacctatgttgatatgtccatttcttctgtggagttacctaatggacattctgtgtaatatcccgaaaaataaattgatattttaattagacatattttattaaatatgtgattaagtgggtattagagtagttttataatcctacttaaactaattacgagttgattaggaaaatatgagtaaatgaataataaagcgtaatttattaa

SEQ ID NO: 392567 - DNA, 565 bp, Cannabis indica
catgtacttgttaacacctattgcctgatgtgttctgttgcaccagaaatagcgcttcacgtgctagctcgctgtaattttgctcaagattgctggagacaaccagggtggttgttgttgcacctgctgccatgatgtttacaagttggtttgaggaggggttgaaccgttggagtgaggttgcatgtgttgaagcagccatgatcctttggtctatttggaatacaagaaatggtgtggtctagaactctaatctcctcctagctggtgaggtaattcaaattgcaaaaattaattatgtggactggtttaatgcccaacaagctgatattgactctcacagtgggaatcaagaggtgtggttggatcgttggatgcctcccgacttcccaatcatcaaagtgaacgtagatggatcaattttttttatggagaggcattatatagtgggtttggttgcacgttctgcaactggtttggttgttcaagccaagactttgaacaagattacagcgcttcagtctcatgaagtcgaggcaatgataataaaataagttttgagttg

SEQ ID NO: 392568 - DNA, 777 bp, Cannabis indica
atctttgtcgttatgatttgacctttgcaggagtcttggtggtcaacctaatccagcctgattccctgcacctctcgcattgtgctgagaaatccttgatttatagattgtgttttcctggcattttcattcatgcgagatgattctggattctcaggctgtacattcccacagtttgtatatccacaggaagttcccgaatcaagtctcttgacttttagtgtttcccgaattctggggatcttttcatccattgggataccctcggtgttctcaggttgaccctcttgagtgtttgagggatttctagggttattccccctggggttatccctatgtctcctggttctgaagcctctaggtctttcccgaggtcatttagtagatgtatcaggttggtttgcaggggcttcatattgcatagcccttacaatcgttgcctcgtgctttagctctacatttctttaatttagccaatcactgttaaaattgcttattttcaagttccactaatggaacatatctggtgggatcgtaagcatcatcgctttgcctttctgggatttcatttccagtttgctctaaatctccaccatttcttcctaaacgtggagttttagtggtaattttcctgtgagaagtttgatgctcttttctaggacgttgagttgtctctcttggatgatattcttcatttcgagaaatatcgtctaccatgaatggacgatttgaatttgttttcaaggagggtgttattttgagttttattccaaggct

SEQ ID NO: 392569 - DNA, 1482 bp, Cannabis indica
aaaaaaaaaaaaaacaaaaaacggaaaaaaaaaaaagggcaacaagatcgtaaacattagatttaacaaaaacacttccattattagttctctattttatttttgaaaatataataataaaatccatgtatctttatattttacctcgaatttttatagtagagcttctttatgttttttttttctttttttatctttatactatttaaataatataattttatacaataagaattaaatattttacctattgaataagtatagcaattcataatttttgatttaatcgtatggttcaaattaatccataaaaactttaacataattaataatttttattttcataattaattttaaatattattacttagttaggtttaattgacaaaattccaaatcttatactgaacctatattttctattttatgtctttacaaaattttaattataatttttcttaattttgaatttacatagaataatattttaagtaaatttatttttaaaacaataattataccggcggcccttatggggtgtaagatgtgctgttgcacaggaccccaaaaaataaaaggccaaaaaaaaaataaatgacttaatatatatttttttagtccttcaattttcttttaatgaactgaacttttaaagtgctaataacttatcattgatcatttctatgtcaattcttaaaattcattttcaattctattattgcttttaagaaaaaaaaaataaaaattcattattgctattcattatttttttttcttatcatttttttattgtattgcaatcaataacaattattataaattaattggagttttttggtattttataaaatatataccctatataataatatttaaaaatattatttgtaaattgtatttattttttgtaggggcttaatttctaaaattagaacagggtctccaaaatatttaaaacggcctacactacaacatattgacttgttaataattttataataatcattataagtactctttaaaatattaaaatgtcatgattttaattctgtgaagcaatcttttcttttctttatttatttttaatttaagattttaatcaatttaataattttaaattaatactatattaattaattttattttttaaagttataatgttcaatatatttaaaatttttaaatatagaattaattatttattttaattacatcatttatcacatattaattagtaaataatatattttcataatatatattcctcaaattagttcaagataaatattcaatgtatttaaattttttagatatcgaattcaatttttatttttattacactactagtgggaggtacacgtgctccgcatgtgtattcaacatgattttttattttaaggggactcatttaattaagatgtcgtttggtaacacttttattttctaattttttaatcagaaaatgaaagtaaaatttttgtt

SEQ ID NO: 392570 - DNA, 735 bp, Cannabis indica
aagaatatatgcttcaaactatatagcaaacatacacaactgacaagtaagctctcttctaattagaatcccatatcacattcatcttaatctgaagagccccatttatcaagatcacattttgaaaagaactaaaaaaacagaaaaggtgttcgatgaaattaccgagtaaaagaccatccatatcaaagattacatgagtgatgagtcctctagcagaaacgggtccagctgaattcgccattttgaaatgaatcttagttcttggagtttctagggttttcggtagagagaaacagaatgattttaaatgattggaaatcggtgatgccaaagctacgggttgccagaagaacctctgaatcagaaaattcaagccttgaaaaataaaaaaattaaaaactgataagcaaattgttaaaataaattatgggttatctttatgtggtctgaaagaatcaaattacatatttaaaacaataaaaatggtatctttgtaatctgttgactgacagatctaaagttagaaaaatagaataaaagaataaagtgagatttaaagagatatattaagagaaaatagagacatgttagtgtaagaaagagtaaaggtataagaagaaactcacagtcacagccattgacgaaagaagaaaaggtttgaagatagagcagagctgaaacagtgtgtttattgactgagaaagaagaagaagaataataagagtttattct

SEQ ID NO: 392571 - DNA, 1199 bp, Cannabis indica
tggcttggagtttttgcttgttccatcctaagaaagtcagagctgtggtcaacctcagtgtgccttacattgccatgaaccctgaaaaaacatttgtgcaagggtttagggattactttggggacttgtactacatgtgtaggtttcaggtaccaaattattatcattaagaaatatttacgaatttgtgacatatacaatagagcatcattaaagcaaactatctcaaaaaatacctacacactatacatcatctaaaaatatgatattcactttattatttaatatatcatttaatttaattataaacatattatcaaactaacaaaaatattgatttgttaatatgtgtattatgacatgtataggcaataggagagatggaagacgagttcggttcaatggacactgcagatgtactaaaaattctttattcatcttttggattgaatcctttaatgatacctctagagaaagatggaggattcgagagtttaccaattcccaaaacattaccctcttggctaacagatgatgttctcgattgctatacaaagttgttcaacaagagtggcttcacaggaggattgggctattatcgagctatggacatgtaccaatataatatcccttcttatataattaattaattagtaattaaaatccaaaatatatattcactctgctaattactttttgattttacatgcagatcatggaagctcctgttaccttggaaagatgcaaaagtggaagttccagcaaagttcatagctggggaagaagatcatcccctccatttcgaaggcatgaaagattacatatttattaatggtggcttcaaaaaagatgtgccctcactcaaagaagtggttataattcaagatgtgcctcactttgccaaccaagcaaaaccagatgagattagtggacatatttatgaatttatcaagaaatactgatcgagaggttgatatatgtattatctgggttctttccttaattgttctctattgttgttgtagttcttgtttagtaattaatggcttaataattgttgttgttgtatgcatgcttttctttcggtaattttatttgtttcagtaacttcagccttggagcttttttatatataataaatgcgaaatgttgttctacactcattttcattggatttaattatgggctatttacaaaaa

SEQ ID NO: 392572 - DNA, 2014 bp, Cannabis indica
aaaaaataaatatgatattaatttcttttaacatttctttgtctagaactagaacagtaaaatgatgaagagcagagtggatgttggggtggcacgaggacctatatgagagaatggcagcaagttaatcattctgaggacgtaatcaattggaaccccaaattccgatggtgtctatggcgttaattacgctaccaacgtactttcactctctctttctctctaccactctagttcccatctcatccaatcacacaaaatctccattctcagtagtaaatactaattaatattcaaaaacacataaaattagtttcttgaaaatcacaccttatataattgccatcatcatccaacggctcaatcaactttgatcttttgccaaacaccaccttcctacccctctcctctgccaatctttatgagaccttataattacgagctacccaaagctacgactgcatgtacgtacgtagctacagttaatctaaactaatactaaaagcatctataatggtaatataatttttatattattttttatatttttacttttaaaaatacttcaataatataagccagcactctcttgacgtccaaagaaacttggttatcactaagcattcttattttaaaagaaatagatatgctggacaatcatcatggacacacttacaccacaatacttctaaacaaaaatcttgccagaaagcagaagtaaggaagataacagttgttgtccaatcctggaaaatataaagcacagacgtgtatcccaataccacttctaagaagtgttaccaagaaagaagctaaatagctattaacaggagtacataatggctctacgacaatcatatcggaggcaaagctaaccgagtgcagatgggattaaattgtagcatcgacctggcctctaaaaggctggccaaccatatggcctcaacaggctagctggccatggaatcaacaacctggccggccactacctccataggctggccgaccatagcctcatccaactgggcacgcaatgctcactcaacgtggctggccacctggtctgtaccctagctggcccgatctgccaatagtctgctctcatacttttggtctacaatgaccaagaagtaaaccgcatcttgctagcagaatcccttgatgaaagggaaagaagaagagaccaagtcaacttaaagcgacatgtcagtcaggaagaggaaattctttgtaagagacttaatgctctgaagtacattccttgacaacaaagattctgcagcaaacatgtttggaccaaactgaaaaggtcagcaccaagttacaagataacaagaaaaggtgcatatacgagcatggcgattacaacgagagcttggagttgactcttctaccaaaatattagaataaagaacatcttggtaagttatctctctaaccaacttgtatagtggttcctctaatgtttcaccatgtaggacttcacaaaatagctagtacccatcactcttcaccgatggcctcccatcagtcttcagtgatgacctttgcacgataaaccctatagaggttgccaaatataaaagagctagcacccatcgcttttcagcatagcctcccatcgctcttcagcgatgggctctgcctaacatctcaggtaagggtagccaaaacgtgattttaaaagcggacattaagttttaagcttttgttacacgcaagaccaattgtatggctaaaccacttgttaacaagattaacttcttaaagttattcttattcagttccacatgcgtacatgacctggtagcacccccaagaagatttctataattaaattttgaatctactactgtcccagatagtagtggaattcattggaaaccctaagcccatataaacatagggatgtggtgagttgaaaaataccactttttttaatcaattgatcaaatttacctttaattttatgtttaactgaaacatacctctttttatatgtattgtacccaaa

SEQ ID NO: 392573 - DNA, 1532 bp, Cannabis indica
aacataaacccattgttcaagtactgcgccacctgcagattcatccacacaacttcttccagtgcttatccatggccacccaccacgaccatgtagtcatccactacaatggccgctctcttctttgtcacacaaggtattatatttgagtttgaagatttgatttgattttttttttcaaggttttacatgttcttttctttaggtttccttctttaattacactttcttagataattatctaaatatgtttatgtttacatgatttgatcacacaatgtctaaagtgcatggttccctgatcataatcatataaatatgtccaaatgatgaatttttccttttgtgactgattcatattcatattttgagttatttactgaaacagatagaaactgtctctgttgtttatcaatatgtgtttttattcttttctttgttttttatgcacttttctcaccatgtaactcttgattttctaatggatgtaactactaacagatgttccaaaatcagtttttatgttcggattggtagtactatctaattatataagcaggagatcgtcttgtaaatgcaacattatagagtgtccaagtcggcactgcgttttacagattcatcattcgattgctgaattcgagagggtgatgaaattaaacttctgggaaagaaggtttcttgtgttacaatcatattgggttcatcactagtttttgcttctaagttctagacctatatttatactcaaaatggctttcttttttggtggctattgggtaggggatttttttgggccttctattgtatccatttgcctcgaagcttttttagtaattgaaattttataggtgctaaatataatttatttaacatgtttggctcactcttcatatgaagaccaataatttaaaaccaataatttattatcctttctagtgaatataatttataatattaagagtatacaaactacttttacaataatgtattaagttagattaatattatcaatttagttgattaatattattaaattattggttttaaattaaaaaataatatttcaaaaatataagtattcaaaattatatatttaaatatatataattgaatgttattattatagaatgaagaaagatgtataatttttttttttaaattaaaatttttattcaactagatcaactcagtctcagcaataacatcaacatgagaaaggtgattagactccaagaaaatataatcagcaatagcatgtaactgagatgctctagccacaaggtgagcgactcgattagtagatcgtttgacaaaatataaaaaaacattactaaaagaaagtagaagctgtttacaatcctcaacgacaccaccaaaagtggattttcacacattcattctcgaacaacttgtacccagggccgactctaagtataggcgggctaggctcgtgcctagagctcactcatttgaggagcccaaataaaaatatacattttaaaaattatacatatttttttaaaataatt

SEQ ID NO: 392574 - DNA, 1367 bp, Cannabis indica
tcttttaggttcttgtattcattagtcgtatgcccgatgtcttgtggtactcacatcttttgttggggtccctccaagagctatcttggtacaaaggaggtagtctctggtagtgaacatttttctttgtgggaaatacacacgctcttgtgtgtcaaccagttcagtatactgagtatactggaattatacccagtcctttttggtttttgttatcacttcaggagcttcctttggatgaccccttactctgtaaagctttgggagctgtagctgcacttgccgccagtgaagcagattgagcaggatactgtgtgcatgctccgggagtgggaccatttgctgacagcccatagtctgaatgggccagtgccacgacagagtgttgcgagtacctaggtgtttcttgaaattgcacacatggcttgccactcgcttggggagcagcaaggagtgctattcctgggaactgtactttggaaacatacccaggtcctctagttggataatgccctcgatagcagttatttgagcctcttccaggttgatatatttatgggctctctttttgaaaatcctgaaggctagatgcaccttcttgttgtaactcatttcagaagggagttcccatccaaattccagcttgtaataaaactaattgttgttcgtcatctactttcttgattttggaagcctcctctttgaatctcttaatgaagttgttccagatttccattagtagttgtttgacgttagtcaaggcactaacttcaaggtttatctttttggctataacaaattgccttctaacattagttcgcaatttattccaacaattaccaatcctggttctaacttttttaaccactcctttgtagatccaacgaatgttaatgggaaacacatgtatttagcgtcgttgttgaccctcatgaccatcatggctctattaaatctggactagtgatcacttggatccgtgtcaccagtatacacagtcatttcaggcatttcgaagttccttgggagctcaacctctagtacatttcttgcatagggctcctgatcctcacaatccgactcagagtcatctcccttctgtctctgggagacccttgttatatccttctggagaattgcaagttcggccaggattccttcattaaggatgccttcaaaaactggtgtagctttctttctttaatcaagtgatgcctttaggtccccgtgtttgtatcttagatcgccatggggatctttcctagcggggcctttttgttttcctggctcctgatgggcggatatgctccttcgatctccccaatcctgggggctagtttttgttgggaattattttaccaggatct

SEQ ID NO: 392575 - DNA, 1401 bp, Cannabis indica
ttctctgggcccttgcacccacaaaataatcaaaatcaaaatgccatatataaactcaatgaataatcagactaacctaccactactcaattaatcactattcaccaattcggttggattaattacactactaaaataattaaaaaaaaaaaaaaaaagaaacaaataatattaggggtgcttctacaatacactctctaaaagaatctaccaatgcacctcctatctgttgcaagattcaagaaaaaaaaaaaaaaaaattagtccattatttttttatagaatataaaacttattttcagtgtgttaaatttttataaattttacaggatataataactacaacgtaaatggctatgaaaaaaattagacttaaaaaatctctcgaatgttgaaacagattgtggtgcatcgatagaccgcttttaaagagtgcattgtagacttttcttaattattaataatagaggaataatcaatactaaaaaaaaaaaaaaaaaaaaacttgacattcactcagtcatgttcttccaggaaatgtatcacttcttttttctctatatgtggatgccatttttgatgcattcatacctacttttcatcagagtgttcactgtttactacagttgtgtagtttataaaatcttgtttttctgttgttgaaggaaaatgttagagagctataaatatatatatatatatatatattaatatatagattctcctgtttaataggttaacttatataactatttgtaattggaataaaattttatccaaccaagagagggaagatatagagcataaagccaccacatagttaatgaattggcttgtcaacgcatcaattcttgttccctaacttgttactaaaatcaattactagttgataccctttttttcatgtcaacccttttaaagctcttaattaaactaaattacttgtaattgtctaattaagctaattaggaattacaaactaattgctaattaccacacctgtacagtgccatacatatgaaacattgtgtattgttataaagcatctgtagtgcttaccactacacaataaatttcacaaaaataaattcttgtgtgcaattttacaccaatattagtgtcctttgacattagtgtactaatccacataaaaaataatctctattcaatttaacaaagtactcataaacgaaaaaaaaagagaaaaaacacttccctggattttcattcttataatcctattactgttcatatatattaaagataaaataaaactatacgtaacatcagaagatacacaaaacagaaagtaaactcaactagattcaccatgttgtatcttgtatggtaattctgatattgcactactataactgtatatgattgaatcaaaaggataat

SEQ ID NO: 392576 - DNA, 562 bp, Cannabis indica
gtgctaaatttagtataatttttacaatatatcaatcttaacataacttttaaaatactatattggagcaagttttttgccagattagctatatgcataacctatttgatgcatcaccattagatctatcatgtgagtgccacactaatgaccatatgataatttattttattttgaatatgttaagtgagatttattttactattaagtacattacatgacacatataatgctggattaaaactcaaccatagcaaaaagtggagctagagtcagattgcttggtagtagtacaagctattcaaaattcattacctatgctttcttctttttgggttattatagaagattgtcgtaaacttcatgcatctttaaacaatattttcttatttttgattaaatgatctgcttagatagttgatcataatcttgctagaccatcttgttcttttctggatcgagtgttcaataggggtgatgttcttgttgaggtacaatcttgtaacaccctactagcttaggcgtgttagcgtgatttttaacgtactgtgcagctcgttgc

SEQ ID NO: 392577 - DNA, 1384 bp, Cannabis indica
gttgagcctaagcatatcaggatttagattcttttaatcttaagatcaactactgatattgacttggaaagatatgacggtaagtttataatatcttaactaagttgcaatatcggtccagtccaatgtatactccatacattcgaaactagtatactttaccaatgtcctggaaagaacataacacttactccaagtgtaagtacacatcatcgctgattatcacatcagtgtaaatccaaaacactgatgaaacagggacttagtcttttgattcatataatcacaatcacattccactgtgttgacgatactgtaattgtgaataaacatatgatctggacttaacagattttgtgtgtaaatgtaataaacatattaaaccattagcatgtaaaattcatgcaaacataaatcacttcaaatttcttatattgataactaatcagattgtaaagggttttatttagggcacaaaacccaacaacactatctccatcttggttagatgcatgcacaaacttctctatcccgcattcactctggcattgccgcctcgtgccaccatcgagccaaacgaagcttctttgcataggtacgaacctctttcatctccctctctttcttacttgtcgttcatgaagcgatttgattcgatcgccgttgtctcaaatctggccccctctctctcccgttctctccgtctcagtcatgcaaatttgttttttttttttcaggatggtgtttcgagctacaataacaaaaaaaattgtagtttttgtatattgttgttatgcccatgtttcaatccataaatatgaagaagaaacatggatattattctcaaatattaaaagaggaccatgattacaacgactatcttgtctcgagagaagcaaccaacttcgtgctatgctacaatatcactaacacataagatgatgataaagtacagagtattgtgagataacaactttttggggtcatctcggagctaaccgggatcactagaagcatacacaaactaaaaataatgtcgctggaaatggtagataatcagttctttatgagcttacaacttattaacccacatattcatgagtatgttgaaagactaagagaagtacgcaaaatgtgacttatctcaggattcctaaaagctattcttaggagttgacataaaaggacacaacgaggacaaacatcctcactagtgtcgcagaataagaccagtcattcccaagcatctttgaagaatgcaagctttttggatatattatctcggcaacggaaactatatcttgataagaattgttatcctattttctgcaccttgatgtggcaatagaattgaatgacacgtgtgttggattttgtgccctaa

SEQ ID NO: 392578 - DNA, 1129 bp, Cannabis indica
atattttcaatgagcaatgattacttgtttctctaagctattatttgaaacttttgttgttattcaggcagaagttatagctttaatagttacgtaacttgcgttggattaatctattactcttggattacctcttagttctttggaatttgactgcttagcaatgatatttagtttttttcaaagacgagtctttttgaaatgagctaggttctttacttgatgatattattagtttttttgtctaattattctgagacatctctgttttatattcgtcgtacgactgataaagatgcacatgaattagtagtttgtgcattcaagatgaatagcaagctagtttaagtagataattttttattatttctgtattaaactctgatgttttttaatgaaaatatattagtcaaataaaataataataaaattcaaataacttttagttaaatcgtttgttcttttttttgcaaattttttcttgagagccactaatatatatagtacttatatatttatatatgacaaacttaagtctagatatctaaaagctctttatttgtattaaaaaaataggtttccaatatttttttaaaaataattatatttatctattataagattagtgtataaacatatagtttgtttaatgtgtatatataatatttaaatactatataattttttaaaatacattaactaggtgttcgtataagaagtaaataaaaaaaatagttgtgaaaagactttttttttttttttttttgaaattcaaaatcaaattacagcttacaaaggattaggcatgtctcgctcaatagcaagacttgcacaagggggagtaaccccaatccacatagcactagccttgttcaacaaagcataattggctaaactatgagcgaccccattcgcttccctaaacacaaaagaaatacccataacagagtcatgcaacaacaaagatttaatacaatctagcaacccatcctcctttttctggattaattggatagcatgtagacaatcggactatatactaaatcgcttatagctcctctgtatattagaatatttctaattaaggaaataaaataatattattgattctgataaatgaatattttat

SEQ ID NO: 392579 - DNA, 569 bp, Cannabis indica
gctccgcttttaccttggctagtcataggtgactttaacgattatctttctgttagtgataagaattctcctaaccctccccctgctcataacatgcatcactttctctcttttttgtttaaatgtaatcttctccccctttcttattcgggtaacaaattcacttggagacacggacgtactttggaacgccttgactggtgtaccaccactcaatcttggcagaatctttttcttcaggcttctctcttccacttggggttctatggatttgatcatagagttctcaaagttcagcttgaagacactgctatgtcatctcataggtcctctcatttccatatggaagatttttggctcaatgatccttctttcaatgatactgtccattcttcttagcgcactcctgttactcccatttcctctcctcttcaaaccttcctgagcaagcaatcaaattgtcccactgatataagacttggagtaattctcaatatccccttaaaattaaaatctccagaactcaagctaagttgcattggctcttacatgactctcaacctacttcc

SEQ ID NO: 392580 - DNA, 1706 bp, Cannabis indica
aatacaacttggcaaaatttctctcagtcaagaattcgttcgtcctttctccaacatgagttttcctatttataggattaggatagcaattatctcgttcttatctaaaatacagttatcaaacatggacatttcacacatttcttatatctaccaattgatgggaacaatttataattggcactttaaatagataactgttattttatgatctggatattcatcatgtttttaccgaataacttcattattcctcgagaaatacaccgagtgattgaaacatgttaaccatgatcctcctcgtaaatagcttggatgggttaacccttcttgttggtcactcacaagaatgagatttgactgaaggattcttctcctcaaaagtaagttttttcaagttgtaagcaggaaatattatatatattagaaagtataatattataattttcacaattttttttatacattgcaataactaagtgtaacaacttagaaatatttaggacatgattgtccagtctacgaggccttatgatcaaagagcagttcttaagtttgctcagtacattggtgctcatgctattgctggaaggcatatgattgtccaaagacagcattgcccatctacaggcaaagcgagatgctgttatccaaatcagcatcaaccgtatttaaggataagaataataagcagttatgtggttatccattgttatccacatgtgtttaaataaaacgtgatcaattcccacgttttatgatacggttatgtaattcaaatttaaatgtaaaataattgttaacctatattcctataaatagggacagattccacataaaaaaagatgaaaaatctgtgagaaaaatactatcagttatgtatattgtattaactgcaaaagactttattaatctttacattttctgtgtcaaatttattacgaaaaaaatttattattatgaaaatttgcgttgacaacatattatttattataattttttaattttaaaaaacaaaatagtgagactataatagatcaatcttttattttgtaaaaaataatttttgttttatatatttagctaaaaacaaaaaatataataattgtggaacaacctcataatgttaacttaaactattattaaaaaagaaagcactccattaattaattaatcaatctagtaataactggatctaataattaatgtttcatgagtttattaatttatattactaattaattcgaagtccattaatatatacaaatttggtaagcacatgaaaccacttcatgtgggtagggttttttttttttttaaaaaatatatatattctaaaaacttaataaaatacctatatttatttacttatgatcttgatctacttatacaataaattgtagtagctagatgcgcaaaaaatggaaattatttcaaataattaatatataaaattttggatgggagatcactatgtgaaattaatgggactcttttttaattacgtacaatatttaaaactgtattatttttcatttttactataataaaaattatataatatatatatgttttgttttactttatcgggccaacattaattgtttctataattatacaaacataatatttcttttagtcttttatttcttagcctatcatagtattatttggtgttattggtccccaattatatagggaaattt

SEQ ID NO: 392581 - DNA, 542 bp, Cannabis indica
aaaaaaaaaaaaaacaaattataaaagtatcaatatacaatactttcacggatttaatttttttatatagaaactagtaaacaattcacgctttcgcggccgatgtttaaaaaattttaaattatatatatgaaataaattatgtattttatttgatgataactaagtaataaaattatatcaattttaacttaagttaaagattaaatcagcccaatccaacctaacgatttagaatttgagtcttatatatgtcttgtttaagacaattacggagtttgtactgaaaaactaaagaaaaattataatttcacaaatatttgtatttataacacttacaaatttaatacattgaatacttatgttgatatttactcaaaaatcttactgtgattctctcttacgggtaaaataaagcatcccttgttatgttatctctatatttgaaacggatattgtcatcatacttttcttgatatataaataaattaaacaattaataatcaaccaaactaatcaaaaattgattattatttttaatt

SEQ ID NO: 392582 - DNA, 555 bp, Cannabis indica
tcatcttgtttttcttttttcttctcaaatttatattattcataatgattttaattcaattatagggttgtgacttttttttttctttcacaaatggtgttgtgactttttgttctttctaaacaaaaaaaaattattttttttcatttattggaaaaagattatgtaaaatacgttagttaatataattctaatgaacacacaattttacactaattttataccattttatcataaaaatctaatgatcaacaatagagtaaaatattaataattaattgaaaatgatataaaaatataaaaaatcttaatggacaaagatatatttagcaaaaaaaaaaaaatatagtatcaaaggggaaaaaaggcaaagcaaaaaatgtagggattttttcaattatatacttaaaatataaattatttacaaaaatgccttattaaatctcaattacaataataccttgccacgtcattaaaaaataccttaattttaaaatattatgcctgaaacgaaattaatctcaaattccattttttttattattttcccgtgtt

SEQ ID NO: 392583 - DNA, 597 bp, Cannabis indica
gttttgtaggtgtagttctctaagtccatttggtttggaggtagtaagcacattaggattggggacatcctaggtgaatcattatcggaagtttttggaaaatttggtgcttcactttaatgatttaccatatggagggaacagagtcgagttacttaattactttggctgtgttctctctgcaatttggcatcagcggaatgaatattacattgaaaatgttcctgtcaatcctgtgttggccttggcaagggctgaaaaggatttcttggagatgcagatggtgtctcggatcagtaagggagatcaggacttgggaattcaatccaagggaggtctggttagagaagaggctttccttcaaccaactcttcagcgagacatgtcctaattacggatgcttcatgggtaggaggggaaacaggtattgcagctattgcagtggatatggatgctgggaactggtttgttaagactcaaagattgcaggcacaatcagctcttgaaggagagttcagagctatcttcctagccatgtcctgggcgattgatcaaggttggagagaagtgattatcctttcggattcaaaggtggcg

SEQ ID NO: 392584 - DNA, 728 bp, Cannabis indica
gggggggggggctctcaggtcggtatttagatctcgccaagttattatccttcattagtctaagccaacaagtcaagaagactctaaattatgcttcaagaagttgaggatgttaacttgacatctcggaggccaacctacgcgtttggggtttcaccccgctcctaggttgaaaaatccgtgcccaaaatgcatcagtttcaatccccaaagctgttatatccatgcaaattactcagccttcacactcagacacatgaaagatttgctacaagtaggggtgcacattttcccatggaaatgggaccttgtggggacctgcccctaatggggcagagattccatgcctaaatggggacgaggcgggaacatggatcattttttgtcactaaatgttgaacaggacggggatgggaacgacactttccgccttgacggggacccgtttaatttattaattatctttttatcaatattttatattttataatatgtgtttgtatattttttttagtatattaatatcatttttataattttttaagttgtatttttgtataataatttgtatatcaaataataggtaatgtgtaatcttttaatttttatgtaatttaataattttatacatttaaatatttaaaatgaataattagcttttttagtccctgtacttatgacactatactatgatgccccttaatttataagtgtagttaaaaataccc

SEQ ID NO: 392585 - DNA, 1445 bp, Cannabis indica
cgcgctcatggagtacagggagacaagggagcctgctactcttgtttttgcttttggcacacaaatcacagcctgccacatggcgaggctgttccttagagaagaagaaaggggtggttgggccattctgtggtgcgctttttgcaatggtttttcttacttgcaaaaatgctctttcaacatattttggacttcatttttatcatctttttcatatttctttttcctattttgaccaaatgctattttctcaatcaaacataacaaaattaaatgcaataaaataatttcaacataaaatatatcactttaaattattgaaactatttatttgaaaatctaattaatttgtaatttaaaataatgcgatttcctaactttttattttttttctccattatgccataaatactaatttttatttataaacaaagctaaattaatctaaaataaaatattttcaatataaaaatatataatattaattttatgaaaatattatttaaaatttaattaacttcgtatttttacactattaaatatgtaatattttggcatttaacactccatctcttgaggagtcttcagacattgatccttgcataaagtaattccatgtctagatggtaagtgtcatttcttggaattctccatttagaatatttcaagcaccttatcgatataagttgcttgagaaagtgctaatgctccctgctttctatctctataaattttaatgtcgagagcatagcttacttctctcaaatctttcatttggaattgtttggctaactacttctttacatctgatagtatttttacattgtttccaataagtacaatgccattagcataaagaactaggaataccagcacattatctttaatgtatttgtatacacagactttgtcttcatttttttcgaagtcatgctctttaatagttttattaaatgtgatattccaagatctagatgcttgcttgaatccataaatggatttaagaaacttgtatacttttttatcttcctctgatagcacatacccttttagttttccatataaatgatttcgtcaagatttcaatttagaaaaatagtcttgaagtccatttcccataactcataattataagtggtagttatggaaagaagaatgcgaataaatttaagcaattccacaggagagaaggtttcatcataatcgactccttcttgatgtgtgtagtttttggttaggagcctagctttaaaggtctccaccttcccttcagcatttgtcttcttcttgaaatctcatttacacccaatggttgaaacatccttaggtgaagtttcatattcctagactttggttgtgcccatggaatccatttcttgatccatggcattgttccacttgtctgagtcagggtcatccattgcttctttgtaaatcaatggatc

SEQ ID NO: 392586 - DNA, 1107 bp, Cannabis indica
tatattgcatgacgaaagaaaattatgataagaagatttgagatgaatataattttaagaagttagaagaaaattttgagaattttagtgtcacaataaaatgattatgaatgtgatcttgcaactaacaaaagaatcattaatagattttttattgacattcaatgaaaaattcatcattaaattcaatttacatttatgtatatatggtcgtgagttgtggatacatatagaacttatatatatttatatttatatattttttttataaacgtgtaacacgattatatgtaattttttttaatcaataataataaccacaaataaaaacctattaattaataaaaaaaaagtgaaaacattcatttgcattttcataattatcaaacttggactattcaaaataaattaagtttttttttaataataaagtacattaaattatattttaccaataaaaatgaagttatttttagaaaaaaaaaaaaaagacgaagtaagaaaattaacacacatgttttattttttttttctttattattggggttgaaattttagcagctaaaattttttttaagaattaattccaaataaatgatatataaagggaaatttgacattatatacttaaaaaaagcataaattatttttatatgcttcttaaaaaaatgtaaaaataataccctccaaacatctttaatcccaacaataccctcctcatttcaaacccccactctctctctaactctctcgatttttctctctctttctctaactctccaaacccattcccaacaaaaccccaccggaccatccacgagaagcacccgacaacccacgaccaccgcaccacttccggcgaaacccattcgcttgttttctgcatttttttttctggtttttgacgatgtcgcgaaacatcgctaaatgtcgcgaaacatcgcgaaatcatgaaacatctctaaatgtctttaattcacaacagcgcttgttttctacatttttttttctgatttttgacgatgtcgcgaaacatcgctagatgtcgcgaacatgtcgcgaaacatcgcaaaatcgtaaaaatatctccaattcactatatcgcga

SEQ ID NO: 392587 - DNA, 1254 bp, Cannabis indica
ttctcctttctgggacaatgtcgcgaggtaatgggatctcgcagtgttggtggtaggggttgattgggtgacgacaagacctccttccttcgtgtcacgcctttacctttggtcgtgacagaggtggtaactttgttgcgctgctgtccactagggtcttttcacggtgacaatctccttgtcttgcttgaggttcctgcccgctcacgccctctcctcctacttgaggctggacaacgttctcattttcttctcttacttgaggcttgttgccatcagcgcctccttttctgatgtcgggtggagggagttcttgcttcgaaatgaccaactggttgttgtcaaggaggataaccatgtctttaaggcagtgagagcatctaggcattttgtatcgattctgtgtaaataaatctcttagcttaatcatttcgttcccacaaacggtgccaaactgttgacggtgagaactcgtcaactaagttagtggtcgaaaaattcaaggttacccagaaatgtgataaaagataagataaacatgaaggtgaaaagaagtcttaatattcctttccatattgaattcaatatctcagttacaccaaatgactttccatcccccctctcacatctgagatggggggtatttataggctctaatggccagctgtacaaagtggtcccatgaggaaaagacgttgctttcccactgtatgctggacgtgttggaggtggcctagcacccggtacccttatctagtgtcagatattctccaattgcaggttgtaggaggatggtctccgggtacatgcgcgtggtcccgagttgcaggctgtagaaggatggtctctgggtacatgtgtgtggtccccaattgcaagagatggaggtggcatggcatccggtacccttgtctagtgtcagatggtccctaaatgcaggttgcaggaggatggtctctgggtacatgcgcgtggtctccagcagcatgcacgcgaggtggtccccgagtatatggtgttagagattggttgtggcatacactcggtcgggtcttcaggccttgcaggtctgttgtcatcgttccttgtacctccttgctctcagtcttcaaaaggcatggtggtacgctcttcccttgcatgccttgtccttcgagctctcgtccaacgtcatccttgtctacatgcctttgcttatttccttatacgcacatcctgttggaattattttaccaggatcaagatttactaaca

SEQ ID NO: 392588 - DNA, 773 bp, Cannabis indica
ccaatactgttggctccaacttctgatcaccagcagtattcctagtaaagttgctgtaatcatttattgaaaataaaaaatctaacgagaactgaagttgctgcatactgagcaaatcttgctagtgagtatttattatacagacttctaccaaaaattaggaatggtattactgaatgaaatttttgagttgagttgcggattaagttgctctttttaagacgtttgcagtactgcctaaaaatatgcaagcagtcggaaattgtcagtcattctcaagataaaatagccaagtcgtacattgtattggatccccactgcaatgtcgaaacccgtcgaacacaccctcaaaaaattgatattgcagatggaatttttattatgaaaattgtatttttttttttttgtatgaaaaatatatgtttctctcgttaattcaatggcattatatagaccaatggaatataatgggaagaagaatcttttttgaattgtggaggtgttgttgaacgtgtcccgtaaaaaatacgactaagtatttagttttaattaaatatgttttttcaaataactaaaataataaaataaaaaataattattttattaaataatgtttttgtaaagttaaagtgtcacactgctagtaaagataaatagggcttcctcttagttgtaaaagttagttatgtcagctgttagttagtgattactattagttttgttgcaacagttttgttaattccatttttggcatatttaattgacaaaaatat

SEQ ID NO: 392589 - DNA, 765 bp, Cannabis indica
gttgatatcctatctttttctttttctaaggaaaagattattttcctcatttttttattttaataaatctctcttgaattaattaatagtctattatttaaaaagatatatatatatattaatatctaccaaactaaaccctaattaaacctttattaaccaaaaaaaaaaccctaattaaacaaacctccgtagtccgtagtctttttcttattatccctaattaaactaacttttatagtaatacttacacatgcatatttgaattaatgaaccaatattccaaattaattattttatttttaataataaaataaaaatatccattaattttcttccttgaaattcaatcacctttctaattttagaatacataataaaggtaataatattaattagttaaaacaatcaattttttttaacagtttaaaacaatcaattttatatctatacaaaatcaagaaaagataaacgtattaatagcatttcaatttatcgtttataattaaggagttttttcttaagtcgggttttcaagattaagtgttgatggattggtttgctttggattttttttttttttttttaatttaaactaatgatagtggtttttgaaaattcaaaactaatttagacaaaattaaatattcaaaacaaatcaaataaatctacttaagaaattgggattttttcatatataaccttattaggggtcaaattttacattttttattactataagaaaaaataaaccaaattagaaaa

SEQ ID NO: 392590 - DNA, 507 bp, Cannabis indica
ttaaaataaaatataaattatatcttttataaaataagagatttaataattatttattttattataattagtttattttattttttttatttttttaatatataataaataagtaaatatggttttagtacaaaaaaattattatagtcttttaatcaaaataaccttttctaaaagttgggttgaagcagctttagcttttagttgtaacttctccaaaaattctttaaaaaattattttttgactgcttaccaaacacattttcattacagtttttttttaaaaaaagcagcttttaacttttctaaaacctgtgccaaatgggcctataatttattattgacgggatttgagttgaatctctattggactcctatcttgttgggtctagagctatatactaattagtttagttcagattattgcttttttttaatcaaattagtattacgattttttagaaattcaaaaccaaactaatttaggcccttattataaaaataaat

SEQ ID NO: 392591 - DNA, 659 bp, Cannabis indica
agttttattttagatcttgctcagggttgtttgggctagatttgattttttttgggttgcaacgttacataacagacgcgaataagtaaatatcaaattttacactatcaatgtcagtgagatgaaaagatgcacaaaaccttatgtacatgtcttttcatataaaatactatttgcatctacgatcggttattatgttagttttgtcaactgctgtaaatctcttatattaaaaaagacaaaattataggtttctatagtaatgcatatttcaatgtacgtgttatattattattaatgcaattaaatattaggtgacgtataatttgatgtaataatttttatgaaatatcaggaactaatcgcaagtgaccacttctaggtaatgtttggcacctctagtaatgatgtttcactattggtaaccatttcgtccatcaaaatgaaggcttcattgtcttaattagtatatagagcaccccaacatcatcaactattgttcttaatattggaaaatttaactctttgatagaaaatctacctgtacgtgttgtgggcaataatgttgtaattaagtccttaaatggaagaaccttcaatgatagtgtggtgttttgggatgtgcatgattggactaaagaaaagggtgtagacgaacg

SEQ ID NO: 392592 - DNA, 562 bp, Cannabis indica
atcaataacttttcttaacaatatttttctatatttaagacctggttacaattaattagggcacattagccttcatgaattaatcccttcatggatgtattctcttataatatttattagagaccaacaactttcaattaaacataaatatttaattataattgaaatggattgaatctaatgtgataattaattttaagtacatataatcatttgactgaggcatatatgtaaacaatgggggttgtagctctccctcaaatttttattttttacatattttcatgtatatatataggtattaataatttgtcccgctaaactaattttcttacaatttgcctcctataacacaattttctccatccgttgtcgttgtatataatatagattaattaaatatttatatttctttaagtagggtacgtttgataatactttttaatcagatttttatttttaaaattagaaaagtgaaatattttctaaaatactgttctataaaactgtttttacttttcaattttttgattgagaatctaaattttaaaaattatgaaaa

SEQ ID NO: 392593 - DNA, 998 bp, Cannabis indica
aaagtttaattgtgtctattgggtttgtctcaaagacctcttagagttggtggataaatattttgttacaattgagttaaaggtaaaaaaattccatgaaaaatggggggaaaaccatgtaatgttttacaattattagatgcttttatttaaattgtgggtcttgattagctatggtaattgcaacattttagcaattaagctgggtagtagtaatagagtttggtgaagtgggtcaaaaagatagcaataaagcaaaacatgaaaacgagattgtgttccctcttctgtattacttcgtttactttttgtatctttttcgttttagtgaaaaaccaattaagtgaagaaaaaaagaaatacatataataaaagaaaattaaaaaaaaaaaaaataaaggactgagcaactgtggtcctgacaatgacttttcctatgaattggcacatctctcaacggccaagccaaccccttcaaagaatggtcagtatctttagcgttgtcttgtgatgaaataccagacaagaactttcatttctcataattatgattataaacccttttttttccacccattattaaattgcatgcaatttctcctactctacagttttctactactcattttttgctttttgtttttactttttttttttttaactttttctcaatttctagaattaattatttgaaacttggcatttacagttgtggttaacactaaatgacatcgattaattatatcatttggtgaacactttatgtaaattagttacaccaaattaaggaatcataacaacacttgcatttttggacaaataagccatcatttaattgtggagaaatatatacacactcatcaaacatctatatatttatataatccttttgttaggagtgatgacatggcatgttatacttcttagtttcaatattatcttttttctcctttttttaaatttttattctatattttttagtgttaactcacaaaaat

SEQ ID NO: 392594 - DNA, 1091 bp, Cannabis indica
aattggcccacataacccaacttgatcaaatagcatatattgaattcaaaataagattacatagatatattgtattactttttcattccttaatttccttccttgaaccaattgatctcaagttcattaatgttatgtactttaacatagccaattaattgaataggtttggatcagcccagcgtggataaatatatacagtccttttattaagtgtaaaaataaaaaactttgagaaaagtggctttccgtttttcttttttattaccaaagtgaaagttaaaaaaaggagaaggctagcccatgaacttgataagtggttggtgtgatgtactcaaaagtctttcaaatataaacgccaccatcaataataaagttaaattaataactaaaataatttcaaacacaagttgaattccatatggttaaggtatctataactataatgttggtaaatatatatacatatatagtagtacgtgtattttgataggtgatgattatgatcatgatcaaaagttcatctcgagattatagttttggatgagctataatattattaaaggaaaaatctaaatattattgatcttccaaacactttttgatcctttctttaaaatttgagcattgctttgggtcatcaagatatctagtattaatttaaggtgacgctctcgaattaattttagtattttttgatcatcgaatccttgttaaaataaaataaaacatacaattcaaattacaccattaataatattatatttcacaaaagtactagatactacgagtgtccattacattagtatttcatttaaaatatttatactagctagagagtataataattattctatatacatacatacaaattacaattaatacatttgtttacataaaaaaaatataactcatagaggatagggttcaattaattacaaagataaatattttgaattattttgtaaacgttgctgatgagattttttattttgtttaaatgataaatcaaatcctcgtattatttaaattggtacaaaatagtatcacaagcttaattttcgtcaatttttttaacatgacaatccgac

SEQ ID NO: 392595 - DNA, 2429 bp, Cannabis indica
tagatttactaacaattatgttaattatattttataatccaacacctaaacatgaattcctaaaataataaaaataaacacatataaagtttagaaaagcttacattagtgacagtggaataatatgtctcatttaactcagatctctaacccttgttcctttctatcacacagtattaacaagatctgagtctagttctcctttaggtgttggattcttcacagttttccacactatgattgagtatttgacttgatatgagtgggcatgtactctatcactatatgctcgaacattatgaagacgcatagaaggaatttcaaaaatagcaaggaaggagtctcttaaaaattctagttgtctggcaaagaatgaaagctaggttaatatgttggatgagaattagagaatcttattcattttatactattttaactaggattaggatttaaattatatggaataaagaagataaaataaaagcaaaataaaccactaagtggccagccattgaagtgggctccactagttataattttgtcattttattcaactatttagcttttttttcactaattccatatttttcaattttaatcctataaatgtcaaaactatttatttaataattataattaattaacaaataaaccttaaaaccttttttcttcataatattaagccattgctttatgaaaatttataaataagacatagtctaattttagaattataattgattaattaaaaccaattaactgaggctacaaacagcattatctcaactagtgtgaggaccatagacctatataatgaagcttccaataagtagaactagaatttaccaagtaaattctttaacgtattaattcctttttactcttaattatataaaacactctatatgttccaagatatagatacattattatttatccattgttataatctaaataatcaatgatcctctttagatgatctacattgagtagggacaaattcatcgttctacccttcaatgtattttatccttaaaatacttagctacctgtaaatgatacttcaataatgtaatataattactgaaatgagtactctactatttatctctattaaaccaagctcggaggaaattaatcatcatttcacttatatacatttatagaagctattgattccatatctatgattaccgatcccactcaattgaactaccatattcttaatctgtatatcccatcccatgtatactttatacatccaatctaagcttactttatcagtgtcgtgaaaaggacatagcacttatctaatgtgcaagtaaactacactgttgattattatacagtgaaatcacgtgtactaataaatcgttggaatttatttaatgacataatcttaattactttctattgtgttgacaacacagtgatcaagaatatcaatatgataaggatttagatgaatttataaatcaaacaatcaaacatgaaataaacatgtaaaccaaataatacattaaacaagtaatgaaatatatatgtttctttattgataaatgaatattcaagattacattgaaatagagttttagttagggcacaaaacctaacattacttattacatttaagtttgtttatgaaaatttcaattattcacatggttcagtaaatcttttgattagcaaaggagtacacagtaattagaaaatatgttaacgtgcctaatcaagtagggtgttacatatattgtgagttaaagttgcagtatgggaaatttttagagagtattgcaaaggatccttgataaatttaggtggctaggttgtaagacagaagataagacttttcatcctaccccaacctaagccttgcatttcaagctgattaaagttcttttgatcttgagtgtagtgttagactacattagtggagagggtttcactaagccaacttatggaagcaaatatataagctttaagatcgaggtatagttattttaagttattaaggtcttatggaagcgcttgcacattctagtgattggatcacttattgtatgcatttgtaatgtaatcaacattcgagatttgattgggagcattggtacggggacatcccttactgtcatcatcatactcgaaaatcattgtaataataatgatatcatttttttgctaagataaattctaaatgagcagattcttctcgattgttgggtaattcttaagtcaattgtgtgagtgttttttatttttctttctttcatcactcgaggatgagtaatgttctaactttgggtgtgataacttgctgtgatagttgcaacacgcaagtatacgtatcattttaacaagtattactcacaaagagtgagatcgatcccacaaggattgtagttaagtacgttaaaattaaacttttactt

SEQ ID NO: 392596 - DNA, 771 bp, Cannabis indica
gcgtggtttggtaaccttcttgaatttgggaatggcggaagcggagagaggcttggaattggatcgcacagcattttgcatttctctcattttggcgggaaaagaattttacagatacgcctttggggccttcggagtcgggatttatatacgccatcactttacgttgacatatatttgatatatttgtaagttttttgtcatttttttttggaaaattttagaaaaaaatcaaaaaaaaatatatggaaaaaacagtaattaattacttatcttattattcattatttttccatattttttaactttcctttttaatttttctataaaataatattttttgtaaaaaaatttatatttttgcacaaaaaatatgaaaactaaaattcataatttactctatttttcttggtgcaattttaaataggagtctcatatattttaagataataaataatatagaaaattactaattaattatgtgttacatcagtagataccttaaaatgcaaaataactatgctctttaagaaaataaataagaatattagcagtaaaattacctgaattatatgatttatgctacaatgtcacttcttttatgctatttaccccttcgtctaaaaaactttgttaattgcacagtaaacatgctatagtgtaccttgatgttcatgtagaaattttttagtaatccacataatattaattatttaaatattataaaaaatatttaaattttttttaaaaataaaataaattacaaaatta

SEQ ID NO: 392597 - DNA, 1533 bp, Cannabis indica
agacaaactatctcatttacatactataatgactgcatttgtaatattgattagtaaaagcaattagcattaattattagtattttttataattatttatggattcaataatttgtgggccccattgttagaaatgggcattagagttataatttctcaattccaaagatttcattaaactctaggagtattatttgaattatatgtaaattatgttatttttacaatttttgctcagcgacaacggaaaatgcgatggatgactagtttgatcacaagggtaagtccaaaaccttatttcttcatggaatgtatgttggatgaaatagaataccgagttttagtggggttatggtttttgaccattttacccgtacactttatttttgcctaagttaagcatcaagggatatttttgtaatttcaaaggtggagcttaggtggttgttgtaggaagagtcagctggccacttaaatgttattcaacattttgtttattcaaatgagaaaaaaatcaagaaaaatcaagaaaagtaaaaaaattgaagaactctctccctcttttccttctctttctttgaaccagccaaagacgaggagaattgttgctaattcttggtgtgttcagcaaggaatttagaaagaatcaagctaaggtaaccctagaaccatggttttgtacttttgaagctttaaagtttggtttgagtatgtgatttttagcattaggggttgttagggtttagttcttgagtaattcaaattttaaggttaatttgagttagatttagcttcttgaagctgattttagtgtatggtgttggatttgtgcaagtttgagttttgaaattcaaacttgggtctctaatggcatgttcgaattgtgagatattttctgggatttatttgtttgaatatcttgtatataccctgtttagatactctagaaagtttattggcaatttgacaagttttgagcaagatttggggttttggggggagactggtataaactggttaatcggttcaccagtacctaaaaccggttaactggtttttgtaggttccccgaacaacccattttctcaattccggtccatttcagtgccttagttgggtgtttccctatttcctaagagagtgcaatccctagtgaacataacagagccttgagtttaccaaattagggtttttggacatgtgatttacttggtcttaatatgtgattagggcatccatccagcatgagactttctgttcaagtcggccaactcacttgaatctgcaaaggacgtaagaactgtgtataaggtgcaatatgattatgcgagtgtatctatatgtcaagtgtatatgcatggttatatgtttgtaacactaccaacacttgtatggttatggtacacaatgcattggtatagtgtatattgttaaggagtacattacggtgataccagcacaagcacgggaaagtacaaggtgtgtgtgctatatcagtcagtggtactcagggtacgaaacaaaccctaccaa

SEQ ID NO: 392598 - DNA, 674 bp, Cannabis indica
ttattacagttggttaataactgctttctattatttttatgtctgatcatgcattcttgttcgacctatacatataaaggtcatttttgttatttctgttaagagtgagagggtgtaaacagagagagtttatggtcttgtaatagagcctgagatcttgaaactcatggctctcgagtgacacatttgggtgttgtaggagcgtgactccatgaagttctgtactgcaatgcttgttctctgagctgaatctaataatatcaaaggcaaagcctcaaggcggttcctcccaaggattagatccaagtgctcctcacttgtgattgaacattgtaaactcttgtgttgttattgttctttactgttattttgtttattcttgcttctggttttattgccaattgttttctggtttatgttgaattgttatgttagcttgtttgatctattttgttgttcttgaatggtgattgaatcaccacacttcgcaaatggaccaactgcatgttcttcttttgtgtatataccattacattctctacctctatctgatctcattatattagtttacttgttgcattgtttctctactttatttttaaatattttaaatacatctaatgcttcacttttgttatgaagtaagtatggatacatgtagcgtgagtaatcat

SEQ ID NO: 392599 - DNA, 865 bp, Cannabis indica
tgacatttggaccactctcacttgcttcaactttggtgacaaccaaaaagttcagtctttttgttgttttaaagaggattcatcaatcataattatatatatatatatgtcatgtaatgtttgataattaaatcaaaatgaaaagaaagacattattaatgtcccataaattctaaaatttatgttatagttttcatcaattcaatgagaatgataaatagggtttcgggtttcctctttagctagggttttggagttttaccgttaaaaataaatgaaaagttaattattataacagaacttgagtttagggagttttatcacaaaaaaaaaattaaatttagaagattaattactagcaaaataatttttttttattttattttatattaatttaatcagatattgtcatgatcaataattaatttgatattgaaagaaattgaaaatatcttcacgatctaataatttaattagatcaaatttgtaattgatttttatcatgcattatttgtacttgtgaaatttatatatatatattacatgtcatgcatgtttaaataatagcacatgtaatcctcgagatatatatagttttctcatatatagtatataaatattattttattaattaaaacaacttgttggaatatattgtacggcaggacatttaattaggttattaatattattaatttttgtattaggaaggacaaaagttgagtataatatattaaataacttttttgtctctgtcaatatcttacctattatataaaatgtgtatctaacagaatttgttgcgcacttaacagattttgttgtgttaaactgttagttttaacagaactaattaattaaatcg

SEQ ID NO: 392600 - DNA, 1434 bp, Cannabis indica
aaaaaaaaaaatctaatattaatggtcatcaacttggtagactactacacgtagaccaatggccaagattcttgcaccaatttttcaccaaactcttattcctacgcgtaacaatcaaattccaccatcctctacttccaaaaatacgtggaccccacttttaaaagccacccaataatactcttatcaaaatcatttattttttctttaaaaaaaaacaaacatttaaaatatatattgatgacgtcataaatcactaaatggcttttgttctttctgatattcactacaaaatacattataagtctttcattccactcatacccatagttagtcacctaatcttttatgaataatgattaaaattcatcaaatttatctttcttctttcggaaggacatcaaatttatctttgaaatctttgtgtgattttttttttctgtgtgacaaaaaaggtggaactgtatacgtatagttaattcactgagaattcagtatcaatcaattatatccgtaaaaaagaatcaacatttttcttcagtaataatgtcaacacaggtaaccaaaagaaaatgtgaacataaaatatgcactaaaatactacataaaaaatcttaatacatgcccctacaaaaatattataaagacgtaaatactcaaagttttatatttataagcgatataaagctaatatttatttttaactgcataagtaccaatatttataaaattgtaatttttttttatattttataagtgctcaaaatttgagatgaggcaattgtcccacctaatgaggaaattacactctatactcttttatattgtcatattttatttttatctttttttttaaatattgtactaattttgccctgtcacttcaaaatactctccatgtgactcttttatgtcagagtattttgagtacaatacatataaaaagaggtaagtttcatataaatataaaattagaggtaaatttgattaattaattaataaaaatggtatttttcaacttaccccatccttaactaactttataattataccaataacaatatatcatttcttgtaataattggtgtccctaagcatttcccaccacttctttttcaccttacaaaactgtaaaaacttgtgtggcatgtgtaactttttatgtaaaatacaagtattctcaaatatataaagagtaggggtgttcacaaagtatccgatccaatccaatccgcacgatccaatccaatccaatccgcaaaatgcggatatccgcacttgtgcggattggattggattgaaaaatctaaaatccgcacttgtgcggattggatgttgtttgacctcaaaaagtaaccgatccaatccaatccgcacataaatatatatatttttttaaaaaaaattatattatgtaatatatattattaaaaa

SEQ ID NO: 392601 - DNA, 1933 bp, Cannabis indica
tttttttttttttcgaattaaagccatgtatatagtgaaacaaattacaatatatttttaaccatagtcggtagtgtattaaagtaaatgaatatttaacatagaactattaagtacggcttactatacactatactctagtgcgtgtgattttgattcagattacatatgtggacgaacatgtagtaaatgtgttgtgtataatttgattatacatgactggaccgatatattataacatctttcactaacatgtcgtttaccatgaaagagttatacatatcacaatgatgatcattagtagatcagtctaaatcgtgagtatacatgaactcctatttgtattcattgagttctttaattcactcgttaaagtttctcagagaagatgattcttataacatctgttttgagagcttaataacatgagtggttggaaatatgttatacaataatataacccaagttttcctaacagatcgagcattagttcctttatagtgttaattttgggagtactaacagttggatccaaatctataataagttatagattaactgttcacattgaattaatggtacttaagaaatcaagagataattaaaaaagtaaaacaataattctaactaactctaattatgaactaataattagagggtgaactacttatattgattatatcaatagactacaagtaagaatttgtaaatataattctatattgtcaaatagtactattccatatttatactggagtaatgatagaattaataaactagatcattctattaataagaaatgtcttctcgcagcagtttgttagtcaatttggggggcccgaataatcttgtttggaacagtaaacctatgaggcttgagaacattattgcttctgtaaaagagtaccttgatcaatggaaaaatgctaaaaaatttaagatagattcttcatggcctggttttcaggcaggtgatggttgtgagcattggactcctccacaatttaatagtatcaaggtaaatgtagatgcatctctgtttgatggtggtcagagttttggtttggggttggtagctagaaattccaatagtttccttatcgaagggcgcacaatattttcttctagggtggttgacttgaatcttgctgaagcaatggctatctctgaggcccatagttggatcaagaatcggaagtggttgaatgtcacagtggagactgattgtttaggggttgtgcaagcattactgatctatatcagtatgatttctcatttggttatgtaattcaagattgtaaaaatatgcttgcaaattcgtgtaatgtttttgtttattttgtcaaatgatcagttaatatggtagctcatagctttgctagagctgctatcttatattctggctgtagttttagtttggagtctgttccaactaatttgttaccttgtttagtaacagaggttattggttaataaagatgatttttccattaaaaaaaaattataaaattataatattcagtattacatttaatattttaatttatttataattgataaatttatatcttattattattaaattataagattttttaatatgtcatgtcgtacttttcggacttgtcgcgtgttgtgtttttcggattagtctattcgtgcttatgtatcatactttttgtgcttctcgtgtcatgtcgtgtttaaggacatattttttttgcaatgtcgtgctaatttgtagtatcatgtcgtattgtgttcaagcccgtattttttcatgcttaattgtgctcatacctttcgaacttatataaattttgtatcgtgtcaaataacttacaacactacttgagagttgagataattctatctagtttagtgttaataattagaaaaaaattatttttaaagaaaatggaaaaaaaaaaaa

SEQ ID NO: 392602 - DNA, 720 bp, Cannabis indica
taagagtattacctccttttggaggcataaaacacccccaaacataggaaaggaggacaaactcagtaaaacaaggatattccttcatgaacctgccaattgccattatttaaatcactaacaaattcattatatagatgtatttagtttatgtttatagaacagggcaacatataagaacacttaggaaaggacctctgaaagtattcatttagtcaaaaattaggccgcgtacacctagctgttggaatacttaggtattggctgatatgaaacttatataattttttcttaatttgtttgagacacttggggataaagttcaaagtagggttttcctaatatctctacaatattgggacaaaatgtatgctcttacgacaatggtgtatttagcaaacctcagcctggtcctgcacttctgagagaaaaatttggatttctcttgttatttcagtgttgctatattatatggctgtcttcacttgtttctaactgacaaaattaattatctataagccctggggttcttttattattattatattagaaatagatgttaaaggggatagcttcagactaggaaatctctagagaaagttcgagttcatttatgactttacttggcagttcatgctttttttttttggccatactcatttctgattctgcttttaatgattggacttgtgttatttagtggtagatgttactattgtg

SEQ ID NO: 392603 - DNA, 432 bp, Cannabis indica
atttttgatatttttagcatcatcttgcacaaactggaccaattaaagctaaaaatggcaactcgatagaactcttgtcctgcagatcatttgatattgacactagtggtttggataatttactatataatactaatggttggtttttgactgagatcagacaagggattttagtttcagggaatggatcggaattagggctctcccatttcacatgaccaatatcatttgagacctagtctggatctagagttggccttttagtatcacattcgagatcatctatgtaaatttaaaggtaccttagtctgcgacaagaccgactctaaggtgagacaattgtaaggcatgcgctttgggcctccgaacactcaaagttccaaaattatataaaagaaattattaagtagcgtttggtaacacttttttaat

SEQ ID NO: 392604 - DNA, 1847 bp, Cannabis indica
ggttccctatctaccaacggtcaaatcacccagttgtaaacaccagctaataaaacgtgtcgagtaagaaatcctaggcgggtgaagggtatgtcctcacccacacatgtgcctataaatacccctatttttcatgtgtaaagggtgaacaatttttacttacaaaacatgtaccaaaattcctatgagttttcttcttcaagagaaacaaaacgaatacaaagttaatattcatactgtaaatatttataatacttaagtagtcgccgacaaggctaatacaacagactcgtggactagggattgttaacgcccgaatcacataaaaaactatttgtctattatttggtattttatctttttcttaagctctaaataattgatttttaaaaatctcggtaaatattttggtactttcattgagagctaaggaaagtttacttgttgctgcattacttcaaccatggtgaatacctgaaagaatataagcaagaaaactctattggacactgttatttatggagaaggcagactccctcgcctctggccccttgacatgtggtgttgagaggaaggcacatccaatgccgagaatagaggcgaggatgctaagaacatatttaacagccttgaagatggtttttactatgaccacgacccaaacttgctacgagtgaccaaagagttagaggttactcaaacggtgttagcagaacagaggaagctcactgcaaaaatgaaaagaatgatggaacgcctttaaaacaagtttgatgacttggaaaattttgataatgaaccttcggtggaggtaatggtcaaaaaatgtgctcataaacaaactgaagctgaaacctcgaatcctcgcaaggataaagttaaaggcaaggtaggtgagcccccacaaaaatctacccctaaacctcctcaaaaagaaacgaatctggtcagccagccctcaaggacatagaaggccaccgatgcttttgagcctggacgcccttctaatcctagaggcaaaaccgtgccaaggggacaaaatacatgggtacctaagcttaaagggagaaggaaccaccctagtgattctgtcaatcaggacgaaaggacaaccgtgggacattctgaggatagctggtccactgtagacctctaacgacaattagacgccaagtacaagaagtataaaagtgaaaatgcaaggccacgtgggatgaccttagaaaccacttaagtgataagatgaggggacgggatcttcctgagagtgacataaagagattggaggagcagatagctgctctgatcaagttggtcaagaaacaaaatagagccctctcagactcggaagatgaagacccaaaaccttgtgtaaggaggatcgcggtgaccccacttttagaaaactttaaaataccccacattgagttatatgagggaatgactgatccacgagcacatttggccaagtataataaaatgatgcaagttgcctgggtcagtgacgacgccaaatgcttatgcttttccttgacattgaccaagtttgcaaaagattgttgttaacgattagctttaggattgattgatagttggaaggacatacaatcggtttttcgcaaatagttcattgttgcgtgtgacaaggacatggaagttggttctcttaccaatgtcaaacaatagcataatgaaagcttgaaggcttttattcaaaggataatggaggcagctgccaagactaaggttagcgatgacataaaattaatggccttccaatttggattagttgttggctctctactgtggggagaaatgcagagaaagagagctaaaactttgagtga

SEQ ID NO: 392605 - DNA, 817 bp, Cannabis indica
tatgataagtgggatgagccctttcctgacctcataaatagatcatagatgatagagatacttcatccttgggttgggattgatgtgactccatttatgtttgatctattagactagagcgctaccaccaactgtaaacttagagctgacaagtttgcaatgataacgagtggggatcctgttaacatggtggatgttatgaggacccaagcaaatgttttaagttgacttttacttaacttatttaagggaaaagatatgcctatcttatttgtcaaatttatttacgatattccttcaataggctagtctgatggaggaaaggagttgttctatggttaccaagtaagcctatgaacttgagttattgaaggaggaacgctctaacacttaaaaaaggagagaagaggccaccaaagctttagaagataccaatgctaggatagaggtcatcattaggcaaaggataaatgattctttgatttaggcaattgctcgtgagaagaaggccacgaagactgagaggaagtgtcactactacaaaaagtacaattaccatcgatttctaagtgtcatttaaagaatttgtgctagtttagaaaactgacgtatatgccatagtcgtaaataatttttttattagcgtcattttttaaatgacgcaaaaaacaattatcttcatttaaaaaccgacacaaaatatacactcttcttttttatcttccacgtcagtttggaaatgacacaaaattatttgtggcatttcgaatccgtcactaaaaacttataccgtcggttataaaatgacacaaaaatt

SEQ ID NO: 392606 - DNA, 785 bp, Cannabis indica
ctctcgcatcgtgctaagagaatctttgactcataggtcgtgtttgtttggcatttgcattcatgcgagatgactctgagtttttaggttgtacattcccacaatttacatttccatgggacgttcttaaatcgttgggttgtttttctctatttccagtgttttgtgaattttgggggttctcttcatccattgggatatcccttgtgtttccaagttgatcatcctaagtatctatgggatttataggattattccctctaagggcatccccttgtcttctggtcttagagcttctgggtcttccctgaggttgtctagttgatgggtcgggttggtttggaagggcatcactgcgtgcagcccttgtggttgctgcctcgtgctccaattctgcatttcttccacttgacttagccaatcgctatcaaagttgcctattctccagttccactaatggaacatatctagtaagatcgtaggcatcctcactttgtctttctgggatttcatccccagtatgctcaaaatttccaccatttcttctcccagagcgaggagtctcaattgtattcatcctatgagaatgctaatgttctttccatggacgctgagttgtttttcctggttaactctctttgttttgaggaatatcatctgccatggatggaaagttcgaatatgttccaaggagggtattttctgagttttttcttacaaggctctcaatgaaagtaccaaactgttaacatagattttcgttaactaacaaataagtttttttt

SEQ ID NO: 392607 - DNA, 954 bp, Cannabis indica
ggtaggcccaaaagattggcaattcatagccatttcattcccttgtttttcttcttatcatgaaacaaataaaattagggttggattatccaattccacacacatccatccatcaattattactgatctaccaaacaaagggtaaataaattgtagtaatattacataagaaaaaaaaatgacaaaaattgttaaggaaaatagtgatacaattctttgtttattgtttgtggtacttacatgtatttgattgaattttgtgtttccttttatatagcatatctatgcccaagtatacagtaatttaatatagagaatatacacaaattctcaaactgatggatttagaggtgagtttaattcgccctctcaattctttctttggtaattaatcttgacatttgtcatggtttttcttattcttgttctcacaacgttgcctgaaataggcgtgtagagcgcaaaaatcaccactagtggtcttatatatgcatttgaatctgacatttatctcattataaatgcatatgctcactcctatgcttaattcctccactccttttgtcacactacactacaagaaatgtcatgtgctggcaaaaatttagtattgcgctggtaaaataaaatttacttctaatgtgttggcaaaaagggttagcagatcaacgttggtattagaacttttaccagcacaaaataaaaatcgctggcaaaaatgacttttcccagcgcgtaaatgcgctggtaaaagttagattttagccactgcaaatgtgcactaataaaattttgatctttttgccagcacagtttgtgaaatacgctgataaaagtgacatttcttgtagtgcatgctatataagaaaccaccatcttattgttgcgatatttttacacacgcaagtgtacgtatcgttataagtagtaaactcaccaggagtgaggtcgatc

SEQ ID NO: 392608 - DNA, 2050 bp, Cannabis indica
ggtggctcctcctttctctccggcttgtacacgtatactttgtaaacacatgagcacccaaacttcctgtacattaaatattgacaataatcaatttaattacacatctatatattataaaattatttaataattatattttgtatgttataagatttaagaatcatttaacacatcatctcaaaattatttttttttatttttttctcatctatataagaattagtatattttttacaaaaagtaatctaataattgattattccaaaagttactactatgctcccacatatcatattttaaatattaaattaatgaaattttttgataaaaataattgtttcctaaaaaaaaggaacaaaagataacatagccattgtctattttggacaacactcaatatctatattcttaaaatttgtcttaaaattaaagttgaaccacattgtatattgtatgtgcagcaaaactatttcaatagacaacttctattagaaatgctctaagaatagtttttttttaagtgtaataattagttaatgacttttatacatagaaaaaaaaaggaagaaagtaagagcttaatatttagagtgaccaattctagtaagagctaaataaaatgtgagctcactcaaaggaaggtactaaaatcaacgtgaaatcttcaaatcattatatttagaggagacgccaaattatatatgaaattgcacacgatattttttaatctaattattcttttaatttattctaaaaatatattacttaatttttgacaatatagataatattatcataaattagttaaaagtagttactaatgtaaataatgtaaattttttaaatattatgatacttggtatgaattattagagtttttgttaaaccagaaataataaatcattcaccaaattacggaaataatataccaaattagttggcattggtttattagacaaaatgattaaggccacctatcaagaatgtttctaaagatatatctataaatcacaacaaaaaaatttatcataacaaaacttgtgactaaaaggtaacaactcataatttattgtgacttaaaggtctatggctaaaagtattagttacttttataaattattattcatatgttgtgaataaaaggtctgtgactaaaaaaattagttacaaaaattataatttattgtgactaataacattttttgtgactaaaagtcatatttaataaaaaaatatgttatgagtaaaaaatcgttagtaaattaaggaagtagttttttttaagtaaaatatatatatggaatcttaatatgtattactcattaatggataaaaaacaaatataactataattattaattttaaaaatattaaatcattagattttagtccgatagcaaataataaaagagaaaatttaatttttatatttaatttaattataaaaaaaaatcaaaaaatacatatttgtacactatatcacaaatatatatatatgaaaaaatatttcagacaaattcaatttttttaatcatttttttgtcgaagaacaatttatttttatttttttagctgatggaataaccccatcccagataatgtaaaaatgagaaatttttctaattaaatagaaaaattaatcacaaaaactcaaattttataaaattactcatttatggataatacccattaaaagtatctctatatatatagatggaacacttcttaatgagtattacctattaatggatactaaacaaatttaattataattattaatatatatatatatacattaagaagaaaaaaatttttgttctcaatttttgttctcaacaagcatcagatgcgattagatcagagctaaaaactttgactccaatgaccttttaacgccacagaacgactaagggtattgggaaccaaggaactcgaagtttctaacaccgttgagggtcatggtgtcattgatttcaaggactgacagctttagatggctcgtcattgttgtgcgttggtaaaccgcgatggagagagagagagagag

SEQ ID NO: 392609 - DNA, 773 bp, Cannabis indica
tttttttttttttattaaagaagggtaaaaagaaaaatttatgtaatcaaaaaaattaaattgtacacataaattagtaggcatttttttaaaagagaatgttttattaagaattgatattgaaatttctcttttagagattgagctatttttaactcaattgatgtgagtactcaacaataaactttagcattttcttaatgtcaagcattaaacatgctcaatttatttgatataataatgattgcattcactgactgttagtaggaaactaacatgatttgagagaagacttttaggcaaaacaaagaaaaaattattacacttaatcaatcatttttcacagttggcttccctaaattattaatatgttaaaatacataagttttaaaggagtttattatccttcaatatttaacgtaaaattttattttatttaatatatgttataaataaacattttaatatttttctttgaattatttaaatattatacaattacatatttattaattaaaaaaatctacaaagagtattgaataaaatatcaattaaaagactactgaaagagcgaaaaaaattataaaatatgtttaattctccactattcattaaattatattttactaaagatatatctataatctagttcctcgtaacatttacatcacatcacttttttttttttattgaatttatcaaaattatactttctcaattttataaacttaaacttttacattatacattaatttttttttctacatataatt

SEQ ID NO: 392610 - DNA, 965 bp, Cannabis indica
tgagcacccctaaatcattcgtgcggaactgagtatgaatgaaagacttaaaggatgagatgcctccagtttatttctaataataacgatgtcatctacactatgatcaaactattttaaattatatgaatttgaatttaaatttaattatttagttatatataacaaaaaatagtttggttcaattaattaatttaaatttaaagtactaaatatgtacagttttaaaatataaagtatcattcttaaaaaaataaaaaaaataaaaaataaataaataaagtaccagatgatattttttaaaatacaagatactaatatattttgataaaaataggtgcgaaatgagtaaatattcttaattatattacaattaatttgagaaaaaaaatattaggccaaatgaccattaattaaaaaagagtttaattgtatataatatcatttctaaaaatatttaagttgtattttaaataataactaacatattaaataataaataatttacaatattttaattttgtgttgtaatatttttgtatacatttaaatttttaatataaactttatttttatattagtggattccctacttcgttcccgatggagagggggatggggggagcgctcactaatttctcgctctgtgtgcatccctatataggacacagagttcattcaatgtaactacaaactaagaaaaataactttttgcatcacttttattaatataaataacaaagataatttggctacataagctcctcgtcaaatattttaaatatatattttatttttggaaaaagaaatattgtatttttagcaatattttatgtatttgccaccacactatcactataaatgatgataaatatatttgattatgttcatttgtggtattatctgtaacgtccccgcttcaagcctccattgggcccttacacccacggaatgaatggctctta

SEQ ID NO: 392611 - DNA, 1842 bp, Cannabis indica
aaaaattatgactaattatacattatcattttatgttatgactaaaaggtccatggaaaaatatattaatcacaaaaatcacaatttgttgtgactaaatgtgtttttagtcacaatacttgtgactgaaactaaattagtgacaacttatatctaaatactatgttttaatcacaagtaactttttgttgtgactaaaagtctcatttagtcacaaaagaattatgttgtcactaaaatattgtcactaaaggtaactattttttatagtggatctaaccgccgatatagagtcattaccaaccttggcggttgggaagaactgagattgggtaacctatctcggcggctcaaggtaaaactgttgaaataggtgtgtcatcttctcatacttttgggcaatctcgacacctgaaatcaccaagataggtggcattctcaacactttagaattgccaagataagtaatttatggtgctatttttcacatcaatcaattgaattcttctttctatttggcaatcaaataaaaggattttcaaactaaataatctaagaaaaaattagataaaaaaaaaaaagaaaattaaaagagaattaaccgtagatgtgaaattagggatatgatatcaatttctttgattatccaattattaatactaataactatacttcttccttctaatgtgatgatagattataagttaacctaaactctttttaaatcataaaggtcctaaatttcatgtcaactaccgcatctttgagatagtataataaacaataattcccgtcaagtaataatttaaaagcgacataagctatgtgaatactttcatttcacatcaaaatctatgtttattcatttagagcattcctaacattcgcttttcatattttgcattaggatcatagatatgcataggatggacaatcaaatacatgtaataagcacaaatatttataaattacacaatcaaggaagagagaacaattaaataatactaatttataaaataatatcagacattatccatcaaatctctaaattgagagtttagcttataatcaaatccattatcaaattaaacatcaacataaacatagaaaataaaagagaatgggaaggaaactaatttaggattatcacggatcgccaacttctcgctccaatcttcttcttcttcttttctagggtttgttttttgcctcctttggctccccctttatttttgaaccccccttttccttttaaaatggaattttctgccaaaacacgcaaaaacacgaaaaaatcatgtcttccttcgacggtcgtgtcatggtgcctggaacaacttcgacacttcatttttcctctgtaaaacctcgtcgtggcaccttggaggcgcaattagcgttgcgatactagttttgggcgtcgtagtgcctaacatttttctacttcgacctctcacagtaaaatgcgcataacttttgcatataaactccaaatgagttgattcaatatgcattaaaagttgagaaagagctctaaaactttcatgtgttttcattttcacaaatctaaacaaaatgtggtcgaatttttgcttgaatttttagctttatttttcttccaatgttctctatgttataaatcactatatttccaatatttgactaatttatacattttaagtgtcgaaacctgaaaccaaagaaaataaacgtaattttattccaaaaagtgacaatgaagaaaaaaaattgactctaaaaattaaattatccaaataataggctaaaaatagcttaacataagcttaaatcattagtggcaagcaatatgtcatcgacata

SEQ ID NO: 392612 - DNA, 550 bp, Cannabis indica
attttaataaagtttctataaaaaaatatctatatatataaagaagagaaaatacaaggagaagatttgtttcaggttggtacgatgctcagtctaggtaaaccattcgagtaaggccacacgtcacctaaccgtgcaaagagagaagccaaaaagtcctcatgcgaccagaagtccccacgaaaacttggggttagcaaatattatcccaaaaatctctctaatgacgtgacatagaatgatgtgacacatggcaagtatagaagatcaaggttggacgaacaacaagagaactttgaggagactctccagaagatgttagtcggttgtataggccggataaagccgtctaacatcatatatgtgttggatgaagtatatcgactagcttttaggggggatcaaagggccatctaacagaaaacgttcgactagtaagtttgcgagaggaaatgtccagattcgtttcctcaacctatttcagcacacctataattgagagattgcgaaaataaaataaaaaattagagaatttgatgggattgactca

SEQ ID NO: 392613 - DNA, 1236 bp, Cannabis indica
ttttgccagatatatgacatattagttatagcgatagttggtgtacacaaacattcatctagatatcgtgattatatgtgtttggcaagttaggaagtatcaaccaatgctaccaagttagttaagttatgattatcgtgattatcttcagtcaaaactttaacaatcttcatagcttccttctccacaacttctctgatgaaatgaaactttatatctatgtgcttagtacattcatggtgcacataattcttggtcaattgaattgcactttgattatcacaatgcacagaactttctggttgagttttaactttttcatcaatccagttaaccaaagggcctccttgatcacttctgtcaagaccatatactctacttttgttgtcaacaataccaccaccttttgaaggtttgctttccaactgataaatgttccgaacatgttaaacacatagccaattaatgacttctgagtatcaatacaccctacataattagagtccatataactattgatcacctccaagtcttcactttatttgttcatgccaaataccaatcctttttcaatagatccctttgagtatctcagaatccatttcaggtcctcccaatgctcctttctagggtttccaatgaatctactcaccatgctcagtgcgtatgctatgcttggtctagtacagaccatgacatacatgagggagccaacaacactagcatatggaacctttaacatctcagacttcttagtttcatctttaggcatttgagtagcactcaatttgaagtgttgagcaagttgagtgctcactttcttcgagttactcatttcaaaggtatccggaacctttccgatgtagctcatttgattcaagtatagtagcctctttcgcctttcccttcttatgtccatgcctaagatcttacttgccagagtcaaatccttcatttcaaaatccatcttcaattggagttttaaatgcttgatctcctgcatactcttgctagcaatcaaaatatcatctacatacaacaacaaatatagtctctatttctttctcagaaatatatgcatggataaaacttacttctcttcagaccaatcttggtcatataatcatcaaatttcttattccattgtcttaaagattatttcgaaccatacaaagactttcttaagaggcacaccatgtgttcctttccaacctcctcaaatctttcaggttgttt

SEQ ID NO: 392614 - DNA, 623 bp, Cannabis indica
tttgaatccaggacccagacccgaatctatacccaaatgcggaccctaaatcagaatcggaccaggtattggactagaagctagacctgggacactaataggacccaaacctaaacccaaacacaaactagaatccataccgggccttggacacggaccgggacctggatccagatcaggacccagacccagacccagacccaaagacatgggacctgaaactcgaacccacattaggattgggacccgaacccaaatcgcgaccttgactcagactaggacccgagacccaaactttagccaaaacacaaacttagacccagactgagacctaggacatgaacatagatgggggaccctcacccttgaattaggcccccaaatcaggaataaaacttaggcttcaaaacgtggatcaggatccgggacccgacaccttacccaaacctagacctaggacccacctcgggacctgacatccaagacttgatgcttggacccgacccgtagtcggtgtctaaatataggacttagaccacaacccgaacccaaactcgaactcaaaccagattccagacacatacccaaacctagacccacactcgggaaccaaaactgaaact

SEQ ID NO: 392615 - DNA, 840 bp, Cannabis indica
  modified_base (837)..(837): a, c, t, g, unknown or other
aattggctcttcgattgggttggggtgaggtggatcttttcactaattgtaaaaggattgagaaggttatgttggataagatccctcattgtttatttccttttttcaactgttaattttttttttctatttataatgttgtttagattttgaaagaccttaatgattcgggtcatactttggctaaatgagagttggatcacacttgtaatggtccttttaattttgggagatcagtcactatgtgctcaccaaatttagcatatatttttagaatattattatttaatattaaaaattgattttaatatacatgttttaacgatattgtcaatatatatttaattgattaattatggtcaataacaaatttttatttatgtcaattatatctaattttcctactatcgttgtaactggaatttggaacacaattacaaaaattatactaatcattacacttagattttttttggtactaaattcagtaaattattttttgttttaaaaaaatgattattacactatggacccaaacacgcaacaatttaatattccaggtggtcttacctctaccacattaattcatagagtgacacgtggattatcatagtatcaggtgaacatagtgtaaatattatagcatatataaaatatatatttttttaattaaggcatttattattatttgtatgataaattacttgtggaattagttttggtgttacttacaaagtttactttagctagttttattactaattaatgattaataattatgctacttcatttcaaaaaattatgctacttatatatataaaaagaagtactaaattnaca

SEQ ID NO: 392616 - DNA, 996 bp, Cannabis indica
gtttgaggtgtagttatatttcattacggaatattgtctttatgttcattggtatatcatagaaggaaaaaaaaacttatctaatattaaattatgttttatgtatatataatttttttactgtattatatttattttttattatgataccaccgacagaaaaatttgagtgagactccggtcgttgtttgggagcactcattgtaatttggagatgtgagaaaaccagaagaagagaaaaatgagcaaagtttcgtcgcctttgattatgaggaattatgagaaaataattggatccagtgaatgaatcgaataaatagatgagagaagaatatttcattgccttttgagaggaatcagagtaatttttaagaaatttttgaaaaactccaaacaaactagaaaaaatgaaggagagggaggctttattatttggattttagaacagagcttctatttttatttagagaataaatataatatgaataatacctttatataattaagaaaattttcggtactaaaaaattataaaagtcatttactatattatttttaaaaaagaatattaaacttcagtaaggagatttataatcatttgctactattttccaaagattatattgattgatactaataccaagtatttaacttggactttatcgtgttaaattaatttggataaattacaaaaaaaatacttacatatatatgtatgaatatggttttaatgtttacattaaatatgtaaccataatggttatatttatttttaaacattaaatcattatatagttgaaattaatctaaaaatcaaataaaaataaataataaatgatttgtaacctgatagcagctttatttataaatttattgattgatatgccattccatgcttgattttgtagataacgactgttagaaaagcagtaactttgttgctttcatatgtgatatttacaaagccaatgactaaccaacatggggcagggcttc

SEQ ID NO: 392617 - DNA, 864 bp, Cannabis indica
aaaaaatttgagggatgtgttctaaactcccttagagctttactcattaatggtaacctatctttaacactactaaaaatttagtcttgagttcaatagttaataacaagtcaatagaatgaaagagtagtactcaacttgtcccatctatgaacgagtactaacaataaaattcggagggctaaaactgaaagattgtttatggaaagatgtgtctaaatagagttgtgagacactaaattctacctatatggattagtggtagtgctgcctcttatgagaattggaagttattctatagagagtctatgtagatattgcacatggccattaacggggtacaagcaagataaaatgaggtctccagtgaactctaacaaagatgtgtgtgttatcacctattttgtatgaaagaaataatggttcaaagctacgacaatcaaaatttcaacaaactttgtggtaattacactaaaataaaattcaactcgaaagacattttactttatgcatctaagcgaggtctctatgaagtgtttcatttactcaatcaaagtgggggatacatgagacatttgattgattaaagggatattgacggctaaaccacttgaactttacggtttgtaacacttaaccacaaaaaccgaatttttggcagctaaactacctaaaatctggttccgttttgttctgcacacctccgtccaaaaatcatagttaagtgccacggtggactgtccacgtgtacacacttgtacacgtggaaaatttttagtagtccgtgtaatattagttttaaaaaataattataaatatttaaaaaattaaaaaatcagaatttttttacttttttaatttaaa

SEQ ID NO: 392618 - DNA, 1314 bp, Cannabis indica
agagttttgaatttttatgtcatttattcataaatagaactctagaaacaaagaaggagactaaggaagcgaacgtggcgatctgtgtcaagttcaccatctagtttgtttcttttacctttttaatttcttatgtcaagtttgatcttcaggttaaacatggatttgagttttgaagttatgaactaatttcttaatttaggaatataatgaatgctgattgattttgttccaatttattaatgtgatttgttaatcttcctttttagatctttgtgatttgttcatatttgtgtgaatgcatattttagattggccactctaacatgattcatgatactaatataaaatctcaaaagtgaatgtaggaatgctctaattgaacaaatatagattttgatgtgatatgagagtattcacgtagattgtgtgaccattagatttttgcttaatgcaaactatatgttattctatttcagagatgcattaggtaatatatagtttaggaccttaatgatctgagaagagttttataatctgtcatcacttaaagaaataagattagtaaattgcattaataattaggtaataggaacaacaactcatccatatttgatcaacattattcgttttctattaaattttttgtcaagttttattatttcattccaagattatattaattaaccatatacaaatataagtctaatttagtagtattcaattttaattctttgtggttcaacttcacctgtgtgagtattgcttaatacgtacacttgcgtaagctttataattttcgtaacatatgcaccgttgtcacattattttggaagcaaataggacacaccttagcaacgtttatgccataacgagtgagattggcataacaaggcaaacaatttagagtcgctttcccatttttttttactttgggtggaacgaaaatagaacacataaacttctactaacggggctgacttgagaaaattgagacctgaccagtgacccccccaaccttgcgacggagctccaatacccacccttcatcatatgtgagccattattaataaaaaatatgtcaaatcaacatattctagttattaaactcagaaataggaatagaaagaatagctttgacctcaactacatcaaaaggatccttaaccaaaggaacgttccaaaactcaaactccaacttgagatcagaattcagaagcatgttgatcagggacggaggcagaagttaagaataagggggccaaaagataaaaaaaataattaaggggtgccaaatacataatttttcaaaaa

SEQ ID NO: 392619 - DNA, 1003 bp, Cannabis indica
taggcaaatattccacaccgaaactagatagaacattcgtgacaagaagagactcagggtaaggatcacctgccaaggccaaaacatctacccattacttttttttttgagataattaatcatattcatcgacccttttctttactgtttgaatttttgtcctgtattcatccattttagcctttgaatgagcatcaaatagtgcttctaaaccactccatcactctgtagaggatgagaatattgggatttatactctaaaagtaagtaattaatagataaggtataattttataaggttgtacaagagaattaaaattatataatattgggagatggaattcacaagacaattctggcttttggaaaagttttggtatttaaagcttcccctgaaagttaagaattttctttggagggctctttctaattgccttcctactcttgtttctcttcaaactaagcgagttaatgtgacaaatacttgccctctttgttgtggagatgttgagaccacctttcatattttggtttcttgccctttcactatggcctgtttcgagaggggactgggttttgttatctcggttggagatactgattttggttcttggtttgagagcttttgcaatactcacccaggagatgatattgataaactggctatgcttttatggggtgtttggggagctcgaaatgacttgctctggaataaaaagattgcttctgttgaaagagttgttgttgctgcaattacgtatcttgaactttggaaagctgctcagttgaaaaatagagatgtttcggcatctactagccaagcttcggctgtttctgagctatggactaaaccgattttgggagagttgaagattaattgtgacgcagccattttttcaagagacaagagtcatggcctggggtggattgctcgagactctaatggtgatcttctttctgctgctgccgtgaaaagaattggagatgtcgaccctgtagtggc

SEQ ID NO: 392620 - DNA, 626 bp, Cannabis indica
catacaacatttgtccaattgcaaagattaatgatgttgttgttggaccatgaatcaagagaagatggtttcaacaccaagctctccttccatcttataagagcctcagcttgtgatcttggtgagcaagtaatcttcattggaagccaaacaaaaatatgaacaagaacaagagcaagaacatagaaacgagttcttgaaactattttcatggtgttgtttacttcagtttctaaagcttgatatgaataatgatgattcaaattctagaaaattattattattatcattattgtgttcaacactgaaaatgacaaaagctaatgataggtcaatttttttgttttttcaatttaggaataaatgagatgtagtactatgttggagaaatgctaaacatgcccatgtggatatgaaattgcctcctcagctaattacagttaattttttggagaaaataagcttacagttaccatgcaaaatgtgatgaagaggaaagttaagtatatcctatagtaaacttatatggtatagacatcaattttgtccttattggtaaagttatctatgtgccaatgaatattttttagctttttaaaaatagttcccaaactatttgcaaattg

SEQ ID NO: 392621 - DNA, 925 bp, Cannabis indica
aatcttacttgaaaattatggttgtattgtatctttcaatcaacatggatgaatggttttcagttgaggtgtgtctatattcatacaaacatattattgtatttatatatgtaccttaataaggaaacttttgttaaagattccaactttttttttctaaattttccaaaatctaatttttatttccattattaattattgaaaaataaatgtaagaaatagaaataaacttcggatgttgaaatggtaatggaatcatgtatattgatttaatgttttaaataataaatatgacacagacaacattaaagtgttaaatatatttatgaaaatttaggtttataaatgagacaccccaattttaaataaaaatgagtaatacccacctagaaccaaaacaaaaacaaaccaaaattacattagaaccactaaaactataaactaaaatagatcattaatctatattaacgacaaaatttatagcacaaagaattttttaatctaatttcattcttataatcatatatgttataagataaaattttaaaaataaaattcaaacaattacttgctacaaatataataaggaaattactcctatactatttcttttaacttttttaggtttctatacaattttttgttacaattttggaacgctagttgcaataggagattctatgtaaaattccataaaaatgcaaaaacaaaaatattttaaaatataaaaatgaaaaaatcccaatataacatttaaattttagggtaaatactattttggaccctgtgttttgcaaaagttacagattggaccctgtgttttgttaaatgacaaaatggaccctgtattttctaaaatgtaaaaataggaccctgagcttaatttttgacaactttttttttggttctaggtgggtattactca

SEQ ID NO: 392622 - DNA, 832 bp, Cannabis indica
ttttttatggaaattaattataagtcttattttgtagtttgtatactatgactcttacacatatgatttttttaatgatagaagaatatatcgagtagttaattaataatatatattcaaaaaattattaccagacaaaaaattattgtaattatatgtgtagttactaaattttttatttaaaatattaatttactacttaattactaattatcttattaaaaaataatagaaattcatatttaatttttgtaacacttttaaaaattattattcaattttttttttatatatataacgatctacattatagttgtaataggtatctcaactgttttaaaaatattatgaataatttacaatgtaaaaaatagagttaaaaaatttagttagatgcgtgcttgtttcttttttgcatggaaacacgcgtgtaacttaatgtttgaaccttgttttagacactataaatcattttaaatttttcaaaaataggttaaatacctactataactacaatgtacacattcatataagaaaattttaattatactttatctaagcagtaaaaatagaaacaaccctactagtaggagcaaaagtgatgtctctacgtagaatttttcataaaaaaaatattgatgcacatttaatttcaaccataggaaaagtctgttgtagggacattatttttgtccctaccgatatggatgtctttatattagagcttaaagaaattataactttttatacgagcgtcactacaaaaatttttacttttagtcacaataaaatttgtgactaaagataagaaagttatggctaattataaatt

SEQ ID NO: 392623 - DNA, 961 bp, Cannabis indica
ttttatttgattgttgtcagattgctgacaaaagtccggttttctctctaagcgttaattgaccaggggtttgccattttggagctgggtggcatggatggcattctaaggaagcttagggagtctgagaactagatggagactctttgtaatgacgctctgagaaagctctcagggagcgagatcaggaggctctcaaggccaaagatgacaccattgcctcaaaccaaaaggaccttctaaatgctcgagaggagattcagggactcacagaaaaactaaagactcttaaagagctacataagactgacttggagactacagcgagtatgtcagttgagctcaaggagttacgtgagttttgggaacgaacccagaaggaggctgtaaaggctacgaaggaagctttattaactccaaagacatgtaagcattgtgcgaagcgcttcgaggacggagtttttatgtgttggaaatcaaacaagtttgaacctcgcctccacttcatgctcgatcctgaggctaccgtggtttgcttctgggaaaggaacaagaagttggagcaggccttggctgagcggatgggtcctcgacttccttcaagggcagattaattaagcccttctctcttattcccttttactactctcccccttaagacaatacttttaatttttagtttatattatctttacattttgttaggggagacatttttataacctttccccaagcctatcttttttgggcaacttatattttaagaaagtacttgtatttatctatttattgtctctttttgtttttgatttttgcctatctttgcgtatgtttatgccttagtacccccttaagtgacttaaaaaggaatttttaggtcacttagcttagattcacccaggatgatgtatatatctttgttcgctacaggttaacttacaaagtgcaaagatgaaattaa

SEQ ID NO: 392624 - DNA, 881 bp, Cannabis indica
gttttttttttttgataagttgatatttagattgtaatcgagtattttatttcttcattattacaactgtattgggtagatcctgacaaaaaaagaaaaggaaaagaaaaactgtattaggtatttcagatatatgtatacatattgttgtaaaaaagaatagatatatgtacatatatggttattttgttagagtgtaaaaacatggtatatttgaaaaacaatctcagtttctacagtgttcaataggctcgttctgtacaatattattagggctcacttaggcccaaaagaaaaaggttaatctggtcaaataatattacatataaaccctagctccatcactgtagagttatatttgcactgttacatttcttttttatttttttcttacattgtttttgtgttaattttaatgattttttttattttatatatatattttttaaaattatgtataactttttaataaaatttttatataattttttattttattttgttataatatttaaaatataatttatttttatttgataaatgtatttttaataatataaattaaaaaataaaaaatgattaaattgaggatgtatgtatttataagtttttgtctatttgtcgaagcagggagggaggtgtgtcatttcttagttactgcccaaaaaaacctaactctcagaaatgggacgagttattcgtgcgcagcgtaagggtgcagggtcggtctttaagtcccatacccaccaccgtaagggtccggccaggttcaggtctctcgacttcggcgagcgcaatggttacctgaaaggtgtggtcactgacatcatccacgacccaggaagaggtgcaccactggcccgtgtcaccttccgtcaccc

SEQ ID NO: 392625 - DNA, 1223 bp, Cannabis indica
gtctttttctaaaggtatatttacatagtgtcatatgatatgatcatatgatatggctattttggttactatttttctttttttctttgaaaagattttattactattttggacggtcattagtaatcatatgatatcaatttccactaatttttgtatgtacatatacagggtagatactaaggattgtttaggtataatgagttgtagattctttaaaagtaaaaaaactgtgatgttgtgtttttttcttttaaatctatatttttcattaaattatgaaattattataaatgaatgaatttaatgttgatgatgatccaacaaaatatttatcaattaatattatttattttgaattttattgtgtacagcaattgagttcagtgagagattgagttactttgggatagcaactagcttaatcatatacttaacaaaagtaatgcatgaagatctaaagacagcagcaaagagtgttaattattggtctggtgttactacattgatgcctttgtttggaggattcattgctgactcttatttgggtcgcttctatactgtctttgcttctaccatcgtataccttttggtaattatttcattaataattaacttaattcctattaaacctactaaagtcgacatgttatttcagtcttaattaagttataatatatatatatttttgttaaaagtttaaaaaacaacaaacacaacatttattaaagaaattaaaaaatatattaaaaatataatttgcaaaatataatatcaattatattagggaaacaaaatgcgaagattttgagaaaataaataaaaattattaaaattatggaattcgaattaaaagaattacaaacatatagagaagtataatctttaattcggaatttattctctgcaattttattttttttaccaatttgtaacaatactgttttttttttttgggaaatttgtaaagaaaagttagttcataactatatggtaaaattttatataaacaatatttatagactataaataaagtataaatgctattttggatctatgttatgcaaaaattattaattggatcttctattttgttaaatgaatatactttgtattttttaaaatggtacaaatatgaccttgaattgattttttgtcaaaaaaaaaataaataattcaatttaaaaaaagttacgacaaaactgtttatattttctgtatct

SEQ ID NO: 392626 - DNA, 812 bp, Cannabis indica
tttagtttattttttaaaaaaatccacatgtgttggatatacattaaagtttttgaaatatgtgcatttcataatttaatgattctctataaatttgaaataaatatatcccttttgttaaaatgaagtaatttaattggtagataattacatattaaaattttttcaaaaccataagtaaattttataataaaatttatgtggggtcccgtataataatacttgagtataataatatatttttgtaaatgttttatgtttacttttaataatttttttttttgattttaaatgaaaaataaataaaaaaaaattatgcattaaaattatttttttttactttttctgcttatttatttattatttgtaattttttaaaaatttaaggaaaacataattttatctttaaaataaaataaaggctaattagaattttttgtctcctgaattttgacacgtaccaaattatgccactaaattttttcggtggttaaaatttttaaacaaactattgagagtgttgaatttaaaaacttgtatgtgtcaagcttcgtgctcttctattttctatagtccctactctgtttatatttttctcaatgggaatattaaaattatatattagtaatttgtatgtcttcatatatgtattttgggatatgattttgtcccgttattgtactttcacggattgtaatccgtgatgtacgacagtcgtcagatatttgatctgacggctgagattgatctaagggtaattagggttaaaaagtagaaacataccctgacactcaattaatgtaccctgagac

SEQ ID NO: 392627 - DNA, 694 bp, Cannabis indica
ttaaattataattatatatttttttaacaatgaatattcattaaaaataattaagagttgaatacatcatcaaataaaaatgacaaattatctatccaaattagttggtcattcgactcattcaccatgtacatgacgactaattactaaaaaaaaaaaaatagatagcaaactagcaataataagaaaattaataaaaatcaatactaacaattagttcattagctaattagttagtaattacttcttttttctggcaaatctctctctctagcttttactttctctcttgttcatgctcattttaaattctacatattataacattacaaaaaagtgatctttcagaaaatacaaaaattaaagttatacaattagatttaaaataattaggctaattaggatttttgtctcccgaactaacatataccaaattacgtcctttaaacttttaaggtcgttaaaaatcacttctgaactattgagattattagatttaaggacatttgtctaattttagtaagaaaagtctaacatggatgaaagtttagggtatgatttgatatatatcaaaatttgaggggcatgatttgatagatatcaaaatctaaggagcatgatagtatataaataatcatcaaattagtaaaattgaataaaattggacaaaaattcttaaattcaacaatctcaa

SEQ ID NO: 392628 - DNA, 1181 bp, Cannabis indica
aaaaataaaaaaaaatagatagaaggaaatgaggatttcgttgaactgagagagaagggtttcgtttcgtttcgtactgttatgtttttaaacttataatatatgtgaacttatcaaaactgataagttttaaaaaatataataataataataataatattaataatataatattaagaataatattaataaaaaatttattattaataattattttattatttttagtcactaagaaacctttacttttagggtatatggtcaactctgagtaccctaaaatacttcggtatttttaaaattaatttatctcaataatcccaacaatatttctaactaataccgttgtgatatttttggcctccaatcgggtctctagggtcgcagaacctgaaaatatttgtatttcaaaaataacttacattatatccacatatttcaaataaattttcataattatcaaattatgcttatttatctacttataagaaaatttataatttatgctaattaagttagtaagatcataatcatatttattactacttaattaatctataatatataataaattataattattcataattaaatttttgggatattagacaaacacttaatttcatgcaacttaaaggatttactaatttgaggttgtttattagttaaaaattcagtattaaaaaaagagatgtattttatatattagattgtcaatttttattttggtttcaatttgtgtaattataattattatttttagacaaactacttgtgagtgagtttgattattgaaaaagtatatattaaaaaattggcaaaaaaaaatcctaaaaatatataagcctattttggttgtgtttttagtttttaaaattgtgttttcgaaattgataatagaaaacagttttttgtcattttaataatttaatggtgtttggcacaaatattttaaaattatttttagattttttcttacttaaaaataatcaatattttaacatcatactatgacatgaatccatccgagtccgcgttcaggtttagttctaagatctgagtatgtgagcaaaaatgtaaaatctaatatgttagacaaaaaaaatatttttaaaaattaaaaataacattttgatgttttcgattttctaatttttaaaactcaatacctcataatcttt

SEQ ID NO: 392629 - DNA, 1243 bp, Cannabis indica
tagtatgtgaatctctcataccttctccgggaggcatgctccttgctgatccttttcattaagaagacttactcgaattatctgaaagccttactccttcaatccacgtgtcacagtcgtgttggtccacgtattttagacaaaattaagggcaacactaaaaatattcattataataagataatgaattttgggaaattaaatcccaaaatgagtgtaatgttgcacgattttataattttttatatttatgatttagatagttataatatatatatatataaccgtgtattttatagttaattaagatatgctaggaaaaaatttagaaatttaaaataatgaaacgtaccgaaaaaaaaatttaacagtccgttgaatgtatgcctctttaattttatacatatgtaaaataggctatttaaactttaatttttttaattatatggtatttcaaatttttgtaaacattaaaagatgtatatcatatataactataatataaactctcatatacatatataaggtatgtcttttaagatattaaaaacacaaattaagtgtattggtactacttttttttttgttttttttcaaagggtgctttattcaactggttatacatgtacatatatacagaacacttttcaatgggggttattcattgatagttactaaaataattttgacaataaatattaattttaaaaatattaaagcatgaaattttgtctaatggtgaataataaaatagatgtttgagtctgtataattaatttagctattaatttatgatatatacaaattaaaatatcttttattacactataataaaaatatttattatataatagtatttaaatcaaattcaactatttttttcatcttacttttttgctaaataactttttttcttttcgccaatagaacaatctcagctaatacaatgtaaaaatgagatattttcttaattagatagaaaatcaagtatgaaaatttaaattttctttattatactcattcatgaataatactcattaaaaatatacttatatatatgaaataatgtcaatatatgtacaagaaaataaactatatatataagagaaatataacataactataaatttctaattactaatttttctaatgtatatatataaatatatggaggaggttccaatggttatatttttattgtaaccatcatggttacattttttttagccattggatcactatt

SEQ ID NO: 392630 - DNA, 723 bp, Cannabis indica
taaaaaagtgaagaaaaaaaaaagccaagttagaattaagggaaagaatatgctatagctatactataattatattagcctccaaaaaaattaattaaactattttcctaaaattccacaaattaattaaaaacatatttatcaaatatatattcataattatttaaaaatttataaaatcacactcatttaaatttgttttgatttattttattaaaaaaaactctcctaaacgttatttgactctaaaaagaaaggaaaacataaatttgtactcaaattagtataaaatatctataatattttaagtattttaaattcaaattaaattttcttatataaaatatttacataatttttatttttaaatatatatattaatattataaaattaataaagaatattgtgttaagtaatagtatattctgctgaagttaatgtaaaaaactaaaaaatactgttaaactaaaaaatttgttacatagctacactatatatagaatcaatataagtgttaaaatatagtattcgcaacaacacatgtaagtatccctcgttaataaaaaaagagagagataatcactttataaagctaaagagctaaaagctactcctcttattgccataaaattttgaggtgaattatccttgaatttgtgaagtgttttatttctgtaacacccttacttacgtaaaataagatgccataaataaactggcgt

SEQ ID NO: 392631 - DNA, 706 bp, Cannabis indica
tttttctttttctttttactcatgattttgaaagatacaaccacaataatatatggtctctcttcattcaatataagttggcatggtagttgagatgaattatatataaaaattatagataacactacaatagcagctgtcactgtgagtttaagctctccaatggagaaaagttgcacatgtgatggatttattttggtggttgagaaatttaagggaaaacagcaacatgatctgctgacttatgtttcaactaatattgaactatactgtagctttggaaataaatacctgtcacacagagagagagattattgtataacattcaatacatattaaattatgaaacattttggggttgagatattcatgaacatatattcaccaccatggcatgcaccatctatattttctttctcaccagacaacaacatttataaatcgatgtggagtaaaggaaagagatgatgtaatatatatgtgtgtgtccccatagatataaattaataatgtaattaagtaactatatgagttgatagatgagataatggattctacaggctatatatcttaaatttgaagaacatgcaacagcaattgctatcatacacgtacttactgatatagattgaaccacttagctgtgcccgggatagttctcaaataagctgatcttgtattcgaacactttttttatttccaaagc

SEQ ID NO: 392632 - DNA, 1387 bp, Cannabis indica
aaactgaaaagctaggggtatttttggaacccaattgaaaaatgagcatatttacacaatgtgtaatttttttgtttaaaataacaccatgtgttattttttagcatgaaagatcaaatttcccttttataattaaaaaactatttaaaaataaaattattaaaaataaattttataaaaaaattaaaaaaccttgtataaataaaaatgtaaaaaaaatactaaatttgacatttaatttaaaaattccttaatccagtccagaccaacgtggaactctgttcaccaaatacaaaggcagtgacttgtgacttgtgagcatttctgcaagagaaggcatctagtttagtaactagctcagtacaattaattatacagaagtagataacaaacaaaacatgggtgttctcaaggacgccatgggagacgcaattctgacctctatgtggatcgtcagcatacccctcacaaggattttgatctccatcttcatttcccatgtgggtattcaaccaaagtctctctcaggacttttcacatcaaccattgctacatctcttcgtctcctaacctttaacttgttctcaagagccttaggtggagcaaactttaacccttctacggcaaccgctttctacgctgctggccttaaatccgatgcctctctcatctccatggctacccgattcccagctcaggctaccggcggagtggtcggtgtcaaggcacttctgaaattcatgccaaaagagtacaaaggttttctcagaggcccttctctgaaagttgatttgcacacaggggccgcagccgaaggggtcttgacttttatgttttgcttttcagtccttatggtggtggtgagaggtcccaaaagtccatttttaaaagtatggttgctttcgtatgtgactactggattgtactttttggggtctgggtatactgggccttctatgaatccggctaatgcatttggctgggcttatgaaaatgacttgcataatagttgggaacagttctatgtttattgggcttgccccattattggagccattgttgcggcctgtctttttcgggccttgtctccgaaaccagtgattaagatcactaagaagaagaaagagtagaaagaggtagttgaatgtgacttcatgaatttataagtgtatagattatgtagggatcaaaatatgctgtaataaatgcttggtgaagtgtgattactcagatttaatattgtaatatatatttgtgtttcatctgctggtatatagtagagtgcgtatgatatttgctttgaattaaaaaaaatctaaaaagacttttcttcattatcagaaaaagaaaaaaaaaaactttgtatgttgtgggcggttggagcaca

SEQ ID NO: 392633 - DNA, 670 bp, Cannabis indica
ccataaatattaacattagtttcaaagatcatcaaatattaatgaaactttaatcactaatacttaaaagtatattactagtaatcaagatggatagtaacaaaaccgattctttaaatgcaatatagcatatataaaataaactaccgatcacaccaacaaaattatattgagtaaagatctcaaataattgataaacaataactataacagtaaattaacaaagaatttgatgggagaaaaattcttaaagacaaaattaaatgagcaattacttgagctcaattaaaaaaatgaaaaaaaaaattagacatataaatgattcaataacaaaactaaagattaattaccattgattttgataaaacgttattacgttaaaaacataaataaacaactttcaactcaaaagtaaatataaaaaataactaaagtaacataatattagcttctatatttcgtgtgacaccatacttaaagaattacaaaacattttccctttttattccttttttctttctcatatcttattctatcaacttaaatattattttatgattgaatgatagacttatttagaacgtcgtattaagttgtattgtattatattgtattatatcgaatgagattatatatcatattttttataatactatattaaactttaatt

SEQ ID NO: 392634 - DNA, 798 bp, Cannabis indica
aaaaaaaaaaaaaaactgtaacatatgcataattatgtcggcccttaaacttttcagtccgttacaaatggtccatgagctattcacaatattataaattggtctttttgtcaagttttatcactcgtggcaaacaaaataatgacatggttgcttaatcaattgccacattataagtgtcacgtgtatagcttaacattagacagaattagccttttttaaaaaaaccattaaagtcaaaataaattgatgattaagaagttacgtaaaattaaattaaaaaaatttaaattattttttttttcaaattaggtacacatgtagcgttgacatgggatgtgattgacgtgataattggctaagcagccatgcatgtcatcattttgtttgccacttgtgataaaacttgacatattgatcaccaatttgcaacactgtgaatagtttatggagcatatatttttaacagtttgaaaagttcagggggcacaacaatacataggtcatagttcaggagcaaaaatcctaaatagacgaactaaaattaatgtatttaattatttattatatgttataaaaattaaaaaaaataatatattttttaaactaaataatatttaaaattcttattttttatttttctttaaaaagtactattttttttttttgtatgaatcagaatttcattactccaacaaacagttaatacaatctaaagactattcaaagtctgtacaggatctatacattctcttctctcctctttttttttttcctttaaacttgtatgcactatct

SEQ ID NO: 392635 - DNA, 1009 bp, Cannabis indica
attaagataaacacaaaattctttctatctcttcatctctctctttctctcgacctcccttgtgaccaatagcaagtaggggtttttagcttagattgttggaagtttaggcagtaattctcttggaactttagggattcaactcaaggtaggcctctttattctcttttccttgaaattttgatgtctggagttgggttttgtgcataattatgagtttaaggttgctataggtattgtttggaattatttgggtatgcagaagttaaattagttttactgaggtggaaggtttagattcatttggggtcgatttggtttatttagaaagttttgggggtccttgcactgaaccggtccaccgtttcagtatggacttgtaggaactagaatttcggttcatccccaggcagaaccccaaaaccggttttctagttgggaactatcggttagggaattttagggtaccctagatttccccatttttttatgatatttaggacatttccatgttatccatcgatagaaaaacttttaaatttaattttaagtccacaaaaagtgatttatcgtgtcatcttttttacgaatattgtgacttagggacctgtaaatcgtcgagcagctgttccactcaggttgaccagcacacctgaattcgaaaatgaggtaagattagtataatgatatacatatgtgattacatgtttagcgtgcatgtttacaaagcctgttagattacattgatagcggtatcaatatacatagagttgtattggataccgataaatgtatgttggcttaagtactatttgtcactatcacatcgatacgactagagtatcgagtataggctgatattatgttcaataatactgtcgtatgaatgttcttgacttagtaccgtgtaggacgcggggatagtgttgggttttgtgccctaaataaaacccatttcaatataatcaaatttattagttaataaagatcagaaataacattttatgtt

SEQ ID NO: 392636 - DNA, 717 bp, Cannabis indica
agttagggtgttacaattacattctctttagtcacaaaattcatgattttatgaattccccatctatatgttgtacttctcttagggtttaggattctttactgtctggtaatttcatttgtgttgtcacggagtcacactagcagttattccatgtttgaaattatgccacagtctgtatcgaactttcccaagtctaaattaattgcctttaaggaaaccttattattcagccttactggtagagttagtgattttgaataggtttttacacttctctaaaaatcactaccccaccccagagtaatcactatttctcaagtaaactttctagcgttgacgcaagtctaaaaatcaaattttaggagtctgtttacaactgatgcaatatactaatttatatattaaaatatatgtgagattctttttctctaaaaaataactgatctagtgagacccagatacaactataacaaatccaattataaaacaacataaaacaaaattccaaaacaccaccaaatcagaatcgatttttaccgcacgtcgttggggcctacaaaaaaataaaataaaaataagaacaaaatagaaggaaaagagagaaatattaggagagagagagagatctagaaagagatagtggtgttggaatatttaccagaaactagattactaacaagtatagttgattagcatcctaaactatgaatatct

SEQ ID NO: 392637 - DNA, 1253 bp, Cannabis indica
ttttaaaaaatttaacacgctgattcccgaagatagggtttaaataatttgttgtacgcatgactctttaattttatacacgtgtaaatagattatttgaatattgttttctatattgtaactaattctgaattttttaaaatttgatttgatgtcttaaataattattaagtacataaccatgaaaaaaaatagattaaaaaaaatttctagatgccgaaacagtaaaggatgcttcagtgcacctttttttaggggtgcattgtagaaacaccctataatatttatttatttatttacttttctaaagatttatcatataatattagaagctttcgtggtacactcttaaaataagtttagtggtataaaactttttatatttaaaaaacaataataaataaataaataaataataatcaagtttaaatttttaagtaagtttttattaattttattttattttttaaattttattaaaatatattgttgatttttaaaagtttttattaattttattttattttttaaattttattaaaatatattgttgatttttataagtttttatttattttatttattaaaattttttaaaatatattgttttataaatataagttgggtctcataaaaatctgacacgacctgtataataatatggcttgttttgggcctggcccatattttaagaattaggctataacagtccatgagtttgaattgttcgtgtcaggccctgctttaataaattggcacatttttttttatatgtgccgatctattttttattaaatcagttgaccctaatttttttatatatatagatgttataatatggtttatgacaaaattgttactttttttttttcatattttttaagctaatttctaacggttttaattttaaatttttaaagcataataataatattattgtaatgttatatttttgagtaatttaaatttttgaaagagtagttttgtttttgggatttctttttatttgaaaaatttgtaaatagataaagtatttaaaattaatataaaaatgatatattgttacttaaaataatgataatacaaacttaatttaatatacattttatattttgttgaatataatatagttaaattgttaaaatatatatatatataattactgtaaatataaagtaataaaaaataagaactagataatttttagttaagttttttcatttttatacttcaaaatatggtttttttttttt

SEQ ID NO: 392638 - DNA, 631 bp, Cannabis indica
tttattcattactggtttagtttaactaaattaggtgaatttgcggtattagttgaagttagttaagtctagctagtattcagttataactagtaaattccttaaagcttcaatctctgcagttaagttatttgggaataattttatcttttcaacattcttggactatgactataataccaactttgtaataaatagaatatcttcttcctctccttcttctaattctctctgtacataaataaaagctatagaactcgatcatcttgtgagttcatagttatttgtgattcaccattgtaacaccaggtgtgaatcaataaaaattgaagccaaaggttgttctatctaaggagtagacagtacgttgccactgccaaacaactaatcgagccttgttaaattggtgtgatttgatttatgttttgcattttatattttttttcattctcttaatcaattagttcattttattgcactaattgtcatttcaattttttattgtttttcgaagttattaaaacaccacataccgaaatatgatggtgatgatattgttgtacatgttataaatatatatacatgggtgactattcaatgattatatttttattgtaactatatggttata

SEQ ID NO: 392639 - DNA, 1264 bp, Cannabis indica
tttattttatattatttttctttagaaaacaatacttaacctatacgagaagtaggagtccatctatgagacaaagacgaccagtttaatcatattcaattataattgatttatggacaagattataaaatgaacaacatgcactctatataattttatgttgtccatatctatatatttatattcggcttattatatagctatatataagatcaaataaataaataaatggctatgtatatacataatgtattgagaagctattaatgtaatctagctcagatttttatcggcttttgtaagttacatagaaataaaataagtgttggaagattaataaaaccaaatattaaaacttaattattccctcctaatgattagacaaaaagacaaggctggcaagctcttgttaaccctggtgtaatgagggctgatcaacttaatattaatatctttttttttttattttttgatgaaacttaatattaatatcttaacctgtcatgcatgacatatttatatatttattttttttttttttgagaaatatttatatattatttattttcgtttttgggacggaaatattaagtaaaatcagcattaatagacttgtcaaatagtttacaataaaatagtttaagtataaagcagtgacgtgacagtttaaaatctctctaaaattatttttttttttctttaattttctccatatttaaaaattttattagagcataaatttacaaaatattttattattattttaataaattttctataaacacataataataaattattttaaaaaaacacataataataaagtaaactaaattaataatattaaaattaaataattattcaattatttatatatatgtattcataacaattaatatatatatatatgtattattttttttttactttacagaatataaaaaaagtatgttttttatagaaaaaatttattatgaattaaacaaacaaaaagtaggtgtgagattatgtaaaaaaagaaacaggtgtgagattatgaatcaaattttttcataatgtattatttttatattccaatcatataaagtggatgtcgtcattgtagttcctattgatatcctcaaatttctaaacttaacactcaatttatcattgtgttagttgattaataaagtactacatgtaaatatagtattggccaaactaataattcttttaaaaaaaaataattttaaaaaacaaaataaattaaaataaattcata

SEQ ID NO: 392640 - DNA, 1176 bp, Cannabis indica
aacaattgacaagtatgtttggggtatctcaacaaaggatgacctttggatcgagtgggtaaatagtgtaaacatttagaagtaagaattggtaggattacattgctccttcttaatgtagttggcactggaaaaaggtgattgcagtgaacgaagaacttaagagtttggtaagtgagcttcaattttctactgcaacttaaaatattcaatagggttataagctcatttgaccagaggttgataaattacagtggagcaaagaggtttaggatagatttaacctacccaaacactgtttcatctttcagttggctatccaaaatcgcttaaagactaggaacaggttgaatcgccttaatttggtgcaagattgctcgtgccttctttgtggagtggagacgcaagttgtcactcacctctttttcgagtgtgttgttagcaagaaggtgatgatggaagttaaaaattggcttaactagaaggtttcaactatctctcttcaacagttggtgaggtggattgataaatcaaaagaaagtaagttcaacagcttgcatagctgtcttgatttatcacatttggcaagctaagaatgaggccaattggtccttgaaaattacccgaatcggtatacttgtaaagaggatagttgaaagtgttaaaaatagagttttgtttgtttggccaaagtctattgacaagcaagatagggaatggtttgatagattatagattaacatgtgatatatacttgcatagttcaatcaggccttctttataaaaaaatgtgttgttagcttgtaaatgatttggtattaatggatatatgcatccgagtttccaaaagaaattgttttataggatgttagggtcggccttgagtaactgccttagtaataaaaagaaaattattgggccctaattaaaaaaatatatgatatcttcaaaaattaccaaaaaaaatatgtttatttttaaaagaatttttttggggactcttaggctaagtgggttcttggtgaaggcctggcctgtcatagttcggggttagcactatggaatgtttacggtggtaaagcatcaaaacatggagccagagatggatctagacgtatgggtgttgggttttgtgccctaaataaaacccatttcaatatcatcagatttactaat

SEQ ID NO: 392641 - DNA, 1128 bp, Cannabis indica
gagagagagagagagagagagggacgggggggctttagaacttaagagcgtagagcctgaaacttagagagtttagatttagtttagtactctttatgtaggagagcttacaaaagatgataagttaatctcccttaaaataaggagacatcacctatttgttacacataaaattaattaataaataacatgttaattattctccaagaataggtaaataactgaagtttatcttttattttttgagttcttgaagcccagtttgtaactggaagtgtcattcaagctgaaagttgcagaggcacaaaaagtacctgccaggagagaggctggtcgaccctccctttgttgcaggctagccgggtatgctggtaatagggtcggccaggggtggttcggccaaacctccatagttggccaattcattgtctctttgtcccacttaagtatttggactcctcgtttaactagtgtgttatgcatgatgacttggctttcttgctgacaagtcgtactccacgtggcatcaatcttgcccatgtggatatgtcatgtcaagtgtaggataacatttacccccaagtctttgtgcgaacgtttgtacggataaggacttttcagcttcagttttgactgttggagtcttaacagggcatgttataataatgttagttataaaaaccttttttggttgctcatttccccaatagagaactgataatattctgtacggttattttatagactgcgtagttgtttgctgcatgttgaatgaaagtggctcaccaaaaaccatataaagtttaagagaagctcttcactttcccttggaggccaacacacctaagtcctctgaatcctaggattctcacttttttcgatgatccaagcttcccatgggcttccttgaggggtttcactagtgggtaagctaattttaaatcccgttctctacttgttttcttaaatttatcattgttgtgttcaagtttttccatgctttatacattcttgattatcacgttagattgtagttttttttgtattttgatccacatgatagttttatgatacataatgtgtgatttcttgatgaaaaagattcgattttgacatttgttgtgattc

SEQ ID NO: 392642 - DNA, 1181 bp, Cannabis indica
ctgagctcatagccttgcattttcttcgagctaactacctcgcgtatacgaggatttctagagatttcaacttgtgcattaggaggccttgttgttgttcaagtgctacctcctctatcgatgctatcagtggtccatgcctacctccccccgccgctatggcctccatgtcagcctccacgtcaatcatcatctcagcctccgccccttgtgggtattggagttgcatccacgtgattatttctattaccgttgattcgaactgatcttattggaggcatgatttcctaatgttccttatttttttctaagaatttaaaagaagataaatttaaataagatataattatcactatttttaagaaaataaaatatccatacttacataactagttcacaaataattttttattttattcctaaatagaataaataaataaccaagtacataactaagtcatgtaaaataaaataataagcaaaactttaataaaattatgtccatttattacatttaaaattttggaagaaaataccactatgactcctttatctattttgagttgtaatttttttttaataataataatataaagtagtaatattttcttctatatataattaaactcgaatattgctactaaggttgttgaagtaaaaatataaatttgaaaattactcaaatatacataaaatgcaagcatatagaaagagacttactaggtagctagcagagtccttttagtcaatgtgtgtaactcgtgagaatgtttgggactgataaaactggctttgataacaatggtatcagatccttgacccaactggaagtgtagtcgacgagaatgtcgaatcccgtaagggggtgattgtgtagagtcccgtgatctgtaaggaaaaagatcaaaaactgtgcaatcctacatcacttgaggaaggttaagtgtgatgatcctgagactgtgtaggtatgggactacgtagttgaagagggtccaaatagattgattggtactaccaatatcaataagctgaatcttattttctggtagcccatcatgaaggaacttcacaattgagtgtgcttgacctggggtaatttcaggatgggtgacctcttgaaagtttttctaagaagcgtgcgagtgaggacaaagcatgttgaaaatactcgtgttggt

SEQ ID NO: 392643 - DNA, 772 bp, Cannabis indica
ttggtgaaagaggatgtggaagagattattttgaaaccaactatagcactatatttagtattgacactaatagtatttaatatcaccttaaaatgacgccttgtccagaaattacttatttgaatattagtatgaaacaataggacaaggcaaatgaaactgtccgagtagcttccaatccgtacaaggtaaatgcgagtggggcaaatcattagagatactttcctttttcatttgtcaattgaatccctacttcagtggaatttccacatgatattattgtaaaatgggaaagtagtaaagtttccccttttatttcgtatttttttagaaaaccaaattgatataagttttcctataaataatggagtcattccaatgttcagggatccaaaaatcatattttcttgaagggctcttatactataaaagaattgttagtttttattgggaattcttaagaaactcgcctgaccagttctttgtgatcttattaattcttcaaagcactatgttgacctcgcttctagccaacgccagtgagtcaaaataaagtgattagataagataaataatagaaagcaaaaacaataagtaaagagaacaccaaaatttgtagaggtttggccccgtgagaatggtaatagcctactccccttttggttgtattgacttgatagagaaagaataaagtattctctctctttggctcttacaatggatctctgagtaatgctctcttaaatcgctctttctctcttgagtgttcttt

SEQ ID NO: 392644 - DNA, 532 bp, Cannabis indica
aaaaataaaaatttaatgacttataccaatcggagattgtcacgtgccaatttacttgacagtacttaatatcgaagtatttataaaaattctaagttataattatttctaccaaaaattaaacttatatttatttacaattgaaaattaaaattaagtagttatactacaaattacttaaatatttacaataattagaatgcacttcatcatatttatagtttttctatatataccaaaaataagaatacactaattaaagtaaaattgaagccctaccaatgaattttctttagagaaattataagtctttttatatataataggtaaaattagacaaatttaaatttttatgtttaatttttttacttaattagaaaaagctttcacttttatatgggctgagattattctatcgattgaaaaaaatgaagaaaaaagtttttagcaaaaaaaaaaaataataaaataagtaaaagttgagtttgacttaaatatttttatatgagcatatgtttgatatagtgtaaaa

SEQ ID NO: 392645 - DNA, 1497 bp, Cannabis indica
tgaagcggggacgttacatggacggtattggtgattctaaccttgaactgaaggatctcaatgtcagtggtagtcaaaattagtaatatcattcaacaaatgcattatatcatcatgactccttctaaacaaagcctctccagttacctttgcattataatccatccaaatttttgtttcatcatccaagctattataaaagaagaaaataatacaactacttgaggaactgtgatagcatctctctaccagttcattaaatctccccaagcagaatagaatggctcattgtgttattggagaaaactcactagcaaatttaggtgtaaatttttttttatgtacattgcaagttaaacacaataaaaacattagtcaaactaaaataaaaagaccaaattagaataaaaattaattttattgatattaataaaataatccccgacaacgttgctaaaaatttattaatgtaaattcaacacataagtatatgtatcgtttataagtaataactcacctgagtgaggtcgatcccataaagactgtagctagggttttagggttagtaacaagtgtcaggttgttggtattggtaccattgccatcaggagctatgatggcactatcaaaactctcagtaatgttaaacacattcctgaattaaagagaaattcgatatctcttggcactcttgatgatgaaggatttgagtacaaaactggtaagggaactatgaggatcactaagggttcattacttgtcatgataggcattaagaagcatggtttatattttctggatggaaaaacaatgacccatgcacaagctgcagcagtcaccaaatgcaaaatcgattctaagttttggcatgctagattgggtcacatcagtgagcaaggattagtggagccatctaaacaaggtttacttatgaactatactcatgcaaatttacctttctgtgagatctgtgtgcagagaaaacaacacaagatcaagttctcaaggagcaatcatagagcatagcaggtgctggaatacatacatgctgatctttggggttcaagcaaggtcaaaacacctagtggtaatcaatattttctatctgttatagatgattataccaataggcaagagacagaactagaagagaaataagaccccctgccaggtatggagaagcagacatcattgcctatgctcttgcagtaactaaggaatcaaaggaagcagtgcctaaagaattatcaggaaactatcaacaacaaacattccaagaagtggaatttagcaatgaatgaagaaattattagaatatttctaattaaggaaataaaataatattattgattctgataaatgaatattttatattcattgaatctggacagaatcaattacgtaatattctatatatggtcagatttctatattcattacctgatttgatttcctgaattaattgtcaaatatctgacattaatgtggcgcagatac

SEQ ID NO: 392646 - DNA, 1295 bp, Cannabis indica
gaattataaaagtgaaggttgaaaccgcgcgaagcgcggcttagttccctagtttttttattaaagaaatctctcaagcaactctacaaattatgcaccataatttcacatcacattaaattaatgatttttttttcgtaaaaagtaacttttctcaacaaaacaaaaaaaaatatatatatatatataaaaaaaaaaaatttatgtgggatggaccacattgcttacgtggcaagaccattccaatagacaatcccattagatatgctataaggcagattaaagaaagcaaaagcaatatctaaagctctaataaaacccaaaggtacaatttttctttattcttattctactatcccctttgcttgtttaactcatagttgttgtaattaaggttcgaacaacctttctgatcacaaagtacaataataacttgacaaatcttaatgctaacacggggtgcaacaggtgcagatggacaaaagtgaagacactcaaagtacaatattgtcttgtaattcattcatgtacaatgtcgaattgaaggttgtaataattgctattacgtatatgacatttgtaaaatagcattgcctcgcgtatcttcacaaatgcactgtcgcaacactcttgttggaggtttttgtgtcgagcttagatggttcatcttttataaataacatcttaaaagtaagaaccatcgtattaaatataaggcttgtgtttagcaacgttgattcgtcaacactggtcaaaaattgaacaaatttcaaaaccaaaataaccttcaaagttagcatgccctatttcctagtctactcaggggatataaaatgaatgagaaacaatactacataactactaatgtgattgttacatcgttgtctcgtaaatccatcaagatagaaattaaaagttcaacatggctacttcaaaatttataacttcgaggtacctttggttggaagagtaggatggatattttcaattacttttagtatatatatatatatatatataagttaaaaaaataaaaaaaaaaaaaatatcacttaacaatatgaataataatgtggtagtagtagtagtgggtttagcaaatctgttttgtttgtgatgtttaaagggtactaatgcttaacgtgagtcagtaatagagtctgtacatgtcttgctcttattgagagacacaagaggccaatgaaagcagctcaccactgttttgtggtacggattgatgcttttcttcttcttttttcttttttacctttactttttatgtcttatttttacca

SEQ ID NO: 392647 - DNA, 1382 bp, Cannabis indica
aaaaaaaagaaaaaaaacataagttagtaaccatcgttacactctccaaaaaaatcatcacccctcaacactatattaaattttatggctcgtttggtacgcatgactggattgaattgaacaagctaatttatccaattcaatgtttggacatgttagaagtctagataactaattcaactaatctcatttgtctgagattatttatccatgtgggataaataatttcatgcaagtgagattttttttatcgttcttttaattttaattttattaatatattttaaatttaataagaatttaaattaatgaaacaattatcacacatttatttatatatttttttataaaaaatttattcattaaaatgagtgaaaatgtataattttaaattattatgaataaaaatcaaaatttaaaatattatcaattaaacaatagttacttttatagttacttaaattgattctaagagaaataatatgacaataaaattatatattatttttaaattactagaaatttatataaatatttttaaattttaatatttatattaaattagtatttaacataaataattttatattattcaagtattttaattatttattaaatataaaatatgataaactattttattacatatttatgatatatacttgattatataggatacattattttattttatttatactttaattattttttattttatttatttattattatatattttaattttaatttaatattatatatttttattttaatttaaggtttttttctaaaaggaaataaataaaatagtccagtctattcttaaaccaaatacaagattactttcagtataattcaattttgttcagtccaatccaatccaattcaatctaatcttgcgtaccatatgcgcccttaattctttttttttttccttttattaccttatcatttttagtaacaatttttattcttctacttattttcgaatatgggtaaatgttagatactgtattaaataaagattcttatttgaagaaaatctattgttacataagcacttcaaaatttagaacaaatatttatttaaagatgaattcctaaaggattagtaacttaaccaatgcatgtgcctatgggtggtaaaatgggtttcgacacggcacacgaacacgacactaattttacgggttaaagtcgggaaaattagatgcggattgaaaatgggttgacacgactcaatatgaaataaaaacgggtcaaacacgacacaacccgcttaacacgaatttaccacgtttgatacaggtttcttaaatataataaaataaaaaagggtttttttattttacacttcaaaataatttttttgcattttt

SEQ ID NO: 392648 - DNA, 763 bp, Cannabis indica
atatatatatatatttgtttagtcctttgtgaaacatggatttgattgctggttgttctttatttttggaccatatatatataccctcattaattctaaccccataatagtattattattgtttcttttttgtcttctatgtagctatatcttatttatgttattattaatatatatatatatatataaatatatatatatagctcaaatgttttatttgagtagctactatatttatatatatatagcactccaagttagaagattttgtaggaataattaaaaatgtctctactaccaatcgtgtgctaaactttataagtgaaacattttatgtatgtcccatatgcttaatattgtcgtcattattttatattatatatatataaatataataaagagaatacaataacaacaattaattaataatatgtatattccatttccaaacacactctttttgtttcttcataggagataacctagctaagcgaaaaacattaatgtgttccgaaaattaacatgcttatgtgtgagttattaataagcactgataattacatttattattaaatatatattaattaattataaaacattaagttttaaaacctgatcacaacagctgataattatatgaagaaaataataattagatatatataaattaggttgatgttacgtgtaaatgcacatataattagtttttttttaaatttaaagtttcaattaattaagttgatgttaagtgtaatacatgtat

SEQ ID NO: 392649 - DNA, 780 bp, Cannabis indica
agtttatttagtttaatttttgtttttttttttttaattttgtttaaatttgtttttttttgtttttttttaatttgtttaaattgtttttttttttttttttaatagattgtttaaatgttaataattgattaattcttaaattttatgatcatgtgaaaaaagaaaaaggggaagacttttaaaaacaagggaaagttagaagaaattttggataagaagagaaatgattaaaaagatttaagagaaaatatttggtagataagagtaataattgtattggtataggagtggtagaaccgtagaagatctatccaagtactttttttgaaattagattaaagttgacccacaacgacaacttccaaagtcgtccttgaaaattagaacgttatcacactttttttttttgaatgagaaaactatcactcatagtttcaaactcatatttatatatttatataaaataaataaataaatacttttttgtttttttgaatggaaatactttcccatcatgttttaggaaaagttattattggaacgtttgttttaataagtgacaaattagtttttatattttttaaaatagtttaaactctgaattaaatttttattaaaataaaatttaataataattgttatgataaaactggttacattcactatattttttttggtatttggaattatctttaaattgattatattaaaaaaaaatatattaaaattgagctcataattttagatatattatttcgaaaaataaaggatctattt

SEQ ID NO: 392650 - DNA, 1084 bp, Cannabis indica
acattaatatatctcaagcttatattattacaaataattaaatcatatccattcaaaaaaggcgaaagaaaagtaaaatgtgtaacaaaatcttgggcctgattggatattataagatttcaaaatcagtgaaaacagtgcataatacttattggttaagctaaaaaaaataaaaattcaaaattttcaaatgattattccaatatattctccaaatactacattacggccaatttcttcttaaaaaagtattcagctaaaattaaaaaatctttttaaataataaattgtcaccttgtataaatgatgatgaaattttttctttattaaattttaccttttttttagattggagaattagcaggaatcgctgtgggaatgacaatacttttaaacgtctttgttgccgggtaggaaacccaaattgattctcattctcaatgtattatgtacttctgttttagaaatatatatacaaagaaaattgttaaaaaaattaatatggaaatgcagacctgtaaccggagcatcgatgaacccagcaaggagtattggaccagctattataatgaaaacatacactggattatggatttatatagtaggccccactattggaaccatacttggtgggtttgcctataatttgatccgattcactgacaaaccattacgagaggttacacgaagctcttcctttcttagaagcatgtccagatctatcgtctgaagtttcagacaaaaaaaacttggttaattattattttatttaatttcatagaaataatcccttctcttgtctataaataaaccacgatacccgccaattacccaagggatcacagtcattagtcttcgtcaatcttattaattatcttatgcttagacttcttttttttggaaatatataatgcttagttttcttttttatttattttaaatatttggggaggggtgatttagtttttaatttctgttactgaatgcatataaaaatgaaataaaaaataaaagattgcaatgctataaaaaataataagaaatttaaaaaattaaaggtaaaatgatttcaatgcaatgtgca

SEQ ID NO: 392651 - DNA, 1282 bp, Cannabis indica
ttagtcatcttatatatataatagttttttgttgctgcaaattatatattgccagtcaaaagatattatttctcagttactcaaagatagactctgtctgctgttaactttataaagatagatcaggaagaatatactataatgttgtatatatatatattgttgtgcacattgtcccacttaaaataaataatggtagagaattgagccatatatcgaacatgggctactccactcattaccaattaattttgagatcgaacctataattctcaataaattaatgtatatggcttaatggttccagccccttacacattgtttacaaaagtactataggtgtgcatttatataatattaatttatgtaatttagctaaatagtgagttataactgtaatatttaagcatgatagagtatatatatgttgtatataactggaaagccaatgtatatgaaattgtgctatatatacttatgtttattagcatatatattatttccacaggaaaatgtgccaaaataaactggatagctatgagttcatattacatgtatttgaaaagtaatatgatgatactttgtgtaatagatactgacttgtgttttggttttgttaattttgatgttgctatagttttggcaaagggaggtggcaatcttaaggcagcaactgcagaacctccaagaaacatataggtactaaatttatatatagccatctatatacataatatataacttttttaaccataaatatatattgggttggaattgttgttaatcattatctatagtggggttagaaggaatcaaaatattggtatacataaattataagttgcaacttcattaattatatattcttttatattaacaatatgtacataatatatagtataaatatatttataggaacttctaaatatagtatagattgaagaaaaaaaatggttctaacaatacttacaaatgtataaatattaaaacaaaacaaacacccaataagctatttgaatcatgatttcaatattttaaattatttaaaaaaatttgaaaaattataaaaaataccctacatgcaattataatagttaaaatttattaaaatatattaaaaatactatatattgatatatagtaattaaaagtaattataactatccaatcatttttcttatttatttatatatacataccaggttaactaatattacgtgcaatcaatgtatatatttagttatatttttaatttttgatcatttatgtatatttttagttg

SEQ ID NO: 392652 - DNA, 994 bp, Cannabis indica
tctcatatcattattttcttgctagaaatacttatcattatcattattactattattaatatatgagttcgacatgacaaaaaccttactataatgcttcacgtgaaacccacatggctactggaacccacatcttcctccacatcatgggtccttttcaaaatagctttcttttttccaagctcataatatgtacttttacactttttaaacaaagaccacaaccaaaataaataaatagatgaaagttgaacatttgtacactacacatgagcttagtggtgtcagatcgatcaattcaatcaaagttgatccatctaattataactgattgttaaatattaaatatttaattctgatcaaattaaattagatgttatttttaaatttctaattagatcagatcggatattgaatggagtatccaaaaatcttatacatttaacattcaatcgaactaattagtatttttatttaaattttaatgaggttttagattttatattgttataagtaaaatatatatatataaaaattaaaattaaaattaaaattttacttttttttttagattgaatagatcaaatctaatccaatacatactgaacttaaaatattaaatggatctgtttcaatctaaaaaatcctaagtctaaaatatttgacaaatattaggatatttttaacctattatttatgttatttttagagataaaatttcatataaaattattaaaaaacttaaagattaaaaaaatactttgaatttaaaattaataaaaacaaaatttttaaacagataaaacaacattaattaataaaataaagattaaaaactaaatcaaaatttgaaaagtaaatgaaactaacctaaatgactaaaccctattgctaacccagattcaccagcccatccctctttttcttcgtttttcttcttttctttttctacaccccagatcaaatcagaacaaataaactaaaccatttcatc

SEQ ID NO: 392653 - DNA, 843 bp, Cannabis indica
agagagagagaacattgggcggctgtttattaggattagaaaatttaattttaatatatatggtagggtttttgtggtgtaaatgggcttgtgttgattttgcgatttgagtttaaagcaaatatgatttttagtgtcggtttataaaagtcaaaagaagtattatgagtatttataaacgatgatatagtcatactcgacttttataacccgacgcaaaacatcattaaatttttaataatctttttctcgtcgtttatgtcattagcatctaatatatagtagacataaataacgttttttagtgtcagttctaaacactcacataaatacatgacctataggccaacaaaataaatagtaatattaacatacgtgaataatataatttgtagtagtgcataaaaaagtgaagctttaagtttttttttttcttcataatttgtgtaatttctactaaattcaaactctgtaggcccaaagttgtgtttggtaggctcgacctgcttgttataaacacgaagctacatctaccaaaccaaagcctaaaaggtcataataatcatagcccggaaaaaggagtactcagtaaggtcgaggctaaagttacacaaaagtgattccttttaacaacagagaaggccttgaattgagactttaaaaaagaaaacaaaggttcacaatcagtgttaaataaggagccgatgtccttattcaaaaataatgcaaagcaagacaaatgataatgatatgggcgcaatatggttgacatacataatgtatgggaaatttacacctattactgcctttataattttttttttcatttgtactgtcgcacgg

SEQ ID NO: 392654 - DNA, 1785 bp, Cannabis indica
tttttttttattttgaagggacttatttattacaaaaatatgaaaaattttatatgcaccccataaattaataagtgcaccttaatattttataaaaaataaatttaaaataattttttaaaaatcactcttaatatttttttgaattatttttctcacattatggttcttaaaggtccatactgaattgctcgaacgatttactacaagaaccccaaaaaactttgtaaacaaaccaaatcaaccctaaatgattgtaaaccttctagaccacctatttaaactacaaaaaacataattcaagaaatagaactaggtacaaaccctagaaactaaaatcaccatgggagagaaatgtttgagctcttaagcttaaacttttcccaaaaacaactacaagcattaaaacctacttaaatcagcccaaacaagctcaaaataaccttagaaaatgaaaccgaattcaattcgcgtacagcagcttaacttcaaaagtttcatgaatttctaaacttaaaaattataaaatttcaaagaaaaaagagagagcaagcataccatgaattagttcactaagattcttcaaaaattaggaagaacacgaagaatgaattgaaaaatcctaatttttttactggtcttcctaagggatcgatagagagaattttggagagagagcctattaatttcttattttgtaaaaagggtaattcaagattttatttaatatcaatcataataaaatttgattatttaacttaataataataataataatccattagctcataaaagacaaaaactcacttaagcaaaagatcattttgcccttgcttcactaacaagttaccttgccacctaagggtattttggtcaaatctaatacctcgaatacttttgatattcccaatgtctatctaagtttccccactattaataaattacaaaaccataagaaagtgtgactctatcagccaaacatcgcattccactgttgacggacataaaatatgaaaaacatgaattttcatgtatagcatatgtaacaccctaattagcaaaggcgtgttaacgtgattttgaacgtacagtacagctcgttactaaacaacaaggtttacaaaactcgtgattaattaaaattttacttatttaattaaatacgtataatatagcatacaaaatacttcgagatcccatttacaaaatactttacaaaaagtttgctattcaatacaaaatatttgtcgaccagcgactaactacaaaagccctgacgtcccgaggatcgtacgctccaggcctaaccgccccgacatgtacaatcttcatctgctcgtcctcacggttcctcaactttggccttgcccttgcctacacataaacatagcactgtgagtcaacagactcagtaagaaaagcataaatcatataaaataaataaatcccgggttatgatctgacgcccatacccctgaccacaaccctaatccccgtgtcccacacggtactgagtctcgaacgttcgtacgacggtacttttaacatagtaacagcctatactcagtacgctagtcatagtctagccgtaccaatgtgttactgtatcagcctatactcgatatgtcagtcatactctgaccataccgatgtgatactgtcgaatagtacgaagccaacatacatatctaatgtaatataacaagattcctaacatgcacgctaaacatataaacacatatgcatactattacgctagtcttacctcgattctgaattcaggtg

SEQ ID NO: 392655 - DNA, 767 bp, Cannabis indica
aaaaaaaaagtccaaaatataatttcttaaaatataaagtccaaactggtaatttattaaaacacagagttcaaaaaataatataaacctttttttttaataaaaaatttacataatagaccaaaaatataaagaaaattacaaaaatacatcaacacgaaaaagctttcagttttactctttgaactattttatttatataaatacattttcaataaaaataataaactttttttttgagttgttttataatttatttatagttgtattatatttgtcatgagtttgtttttctgattatctttagttatttaatagttgaattatagttgtcatgaagttaatttttcgttattttttagttgttatttttttttttttactttttacttgagcaaaatatatttttgtagttttataactttacaagtgtatttttataattaaaaattttaagctataaaattataaataaaacataaaagaatggtatttttgaaaattctcttttttatccaaaaaagaaatcaaactaacaagataacacaacaaccaaacaccggccctaaactccaaagcacattttacaaaatcaatcgtagcttaataaagagcttgatcacgttgtcaaaatgagaaacaataaaagcttttggatcaaaaatagaaagtgaaatacatgaaaagtttatcacctttaactccatcatggattctaatttttttctatatttaattaatttcaaaagtttatcacctttaactcc

SEQ ID NO: 392656 - DNA, 1678 bp, Cannabis indica
gaaactggaagttcttacttataaaatctttcatataacagttcatacaattaccaacagaaacttgctctactggcaacccaagagtaggagctatcggtactacggagcaggcaccacaagagcaccctgttgccttaagcgtccaatttcttcatcttgttcattaattttggcttacatttttgtaaacctctattcccaatcttgggaagctcgaggtgggttagcattaccctgactgtaagccctaccccttcgacctctacctcgaccacatgcattagggggattctaaccacgctaacaaccactggatttgactgaattgcctttgcttctcgtgtttcgctggcgtccattctattaaactagtctgcacaatcatgggttagcctggttagattgcaatcaagattaaatcgggttaccgcttacatgggaatttaaacatatgcctattcaactgtaacgctactagcatacttcccatcaagcttttcttaatcacatactaataaatcaaactactaaagcataaagaggcttactaaatcgtgagttgagcttatccctgatgataattgtacatatcatgatcatcttccgaacacaacctagcagctcaaatccaaattataacaccttactagattaggcgcgctattcgagttttcctaacttactattcacacctttactaatcaaaagagtttattaaaaaactgtgtctaattaaaaagttttcataaataacttaaacatatatatatatacaaatacatatttcgagatcctgcttaaaaagttacaatagctttcaaagtacatgtattacaaaagctttcacctagcgactatcgaaataaaggcctaactgtcacgaagatctgaacactccatgtctaaccgcctcaatatgtacaatcttcatctagcccagaagtctttgtcttgcctttaactacacatgtaaacaatatatgtgagtcaacacactcagtaagaaaagtataaacataaatatataaccagatcatgacaaggcgcccatacacctaatcacaaacctattctgtttctaactcgtactaagtctggaacgttagtacaatagtacgattgaccataatatcagtctatactcaatacactagtcgtaccgatgtgattgcgtcaatccgtactttgccatacatatattcgtcaatagttagtgtaactctatgtacactaagacctctcttacggatatgttatctactaggcaatcataaaacatgcacgctaaatatgtaagtatgcatataattacattaatcatgcctcatttcggaactcatgtgtgttggtcaacctgagtggaaactgctactcgacgaggccctaagtcacaatttacataaactagtaagtgacccgctaaatcacttttggggacttagggcccgtttagcacaacttttagaaataaaagttactttttgaaaaagctgtgataaaatgtgtttggtaagcagtcaaaaaatagctttttgaagaatttttagagaagctacagctaaaaggtaaagctgctccaatccaacttttaaaaaagatattttgattaaagactataatatttttttatactaaaattatatctacttatttattatatattaaaaaataaata

SEQ ID NO: 392657 - DNA, 732 bp, Cannabis indica
acactatctaactagagttaaagttttcaaatttaaatggattagttatggaacaacacttggcatcctaccattttcttgatactacttcggttgaggaaaagttcaaagtcttaaacttctcttattatgcatgtatctagactatattcttaagctatttctaactaattattttttttcaaacttaaatcatctccactcaaatctccttggaaaatgcacatacattcaagacttagtaatattgttgagagatttatgttctctcttgctctacgtgtagaccatttataaatttgaattcttcccatatgtccatgcataatttcaaaaatatattatttcctactagtgtaccacctttttctcaattaatgccacataaataacctcaattcatgcacacgttcactgcatgtttctacttctaataatactctttctatacatatatattcccttattagattatttatatatatgctataacttcttaaacttaaccataattatttaagcctctatttatatgctactgttactactacttttatttaaaataattaataattaaacttatatatagcttcagaataatactaaaatcctctacttactaagtccaaaactaaaatggactcaaacactaagccccataattcctaataactatagaatcttacataattcccataattaatcttgaaagaataacactttctaataatt

SEQ ID NO: 392658 - DNA, 1114 bp, Cannabis indica
tttttttttttacttattatctatgtttggtcgaactattatgactcatgtttcatttttggttgtctttggctccttgatacaaaaaaagtagtatttttttttatttttcggttacaactatggagccttgttttaggggaagttttgtgtttgtggtttttgaactttttcgttaaaaattttattatcttttatgtgctagtatactttcatgttgggagagtatttgctatactatattgttttgtttcttacacttcatgcaagttttcttcttataaaatattttgtcaatcaaagtatcaaagagggagattgttaattctatttttggtatctttagatttataaaaatattttataaattgtttttttttttaattttggttgagttgtatttttttccatatatttatatctaattgatggatttttattaggtatgaaaagttactagtttttctatatttggaaagtttatcataaagggtaagttttatgaataaatcaatttctatctctcgagccgtgttaatctgatcctatagagttttctaattggtttgatcagatctcttgtgaagaaaatcaaagtaagactttcctaaactataaaaggaaaattgtacttactgctcatgattatgtaggtatagaagtagaaattcctaggttgattgaagatcatttttaaggaagtatcttgtgaattgtggtcttgttccgaacgtgtataggctatctataatgtgtatattgattatagatacacgttaaagtagctaggtcgtgtatctcttttattcactttgaattgtattcatatctttacaaaagagaatctttgttttgtagagaagagtgtgttcgtctctttctctatgtttatgtattttgtatcgtcttgagtctataatcaagtctacaaaagaaaaagaacaagagtgctacctttgggagaaagtgttacaagcgtttggcgaacactcttcaaggaggctgaagggagttcgagcacttgaagttttaacaagattcaattagagggtagaatacgtcaagctggcggcatacaataagatgaagtctatttatgcataagtcaattact

SEQ ID NO: 392659 - DNA, 919 bp, Cannabis indica
acaaaatgagacttccaatttctcagctttagctaaatattgaatgactcgattacaagaactgaatgacagattcccattaccacttgaatcccttaccatttcatcaaacaacaactgaatctcttcaaacttattacttttgttcaaataatcgaatatcatagcaaaacactcatcgttcgaagtgtaccaagctttcctcttacaccattgaaacaagctcagagctgcatcactatctttaacaaccttcaaggcttgagtgacatgagtcatgtttggcacaaattgaagtttgtccaattgggtctccaattcagggccccatttccacctatttacaacctcaatgatcttggcaaccgctgaggcattcagaataggttttttcagcccacccaccatgacatgatcgtcgagtcctggctgcactgaacgtgtgcctttaccagaaaaaatgacctggcccgattcatctaaatactcaatatcctcagtccactcgttaggcttatccacagagcagtaattcctaaccaaataactagggttcctaacaaaacaaaacttcgagagggaagaagtaaatttcggagaaactagcttagagaaagctaagaacttaagcattcctccttgttcatttgtaaggacatggagtgtattatgatctctgtagttgtgcgaagagcaggaattaaaggggattttggtgagacttgtggttgtggaacagatttttcttctaagaatcattagggcacaaaataatcacggttttacctggtagtatgtcgatcctgataactgccccaaaatctgtgagacaaagttacggaaaagacgatcatttctcatttcaaaaataataaaaaaagaataaataatgaaactgaagatgcttattactaatttt

SEQ ID NO: 392660 - DNA, 727 bp, Cannabis indica
aaattaaatactaaccacaaaatttcaatgaaacaacatatttttattttgtagccaataaaattggttggtttcaactttcaatcaacatctcctcccatatggtcggttagaactatgtaattaaaatattttgtcttacccttttaaattacataatttcgttatcagtgatatgaatataaccttgaccaattgataatgttggtaccgaattgttgtagaattcgataagtatttgttcccataaaatgtgataaattgcaataattgattgaccttagaacaaagcaaaactgtcggcgtggccggtcgtgaaagctgcgccgaatggtcactcactataattacaaatatatgaaaagaaagaaagaaaaagttccttccaacccaaagtgaaaggtataataaataaggtatgttgtttgttttgttacgattatttgagtatataggccaataaatattcaaaccccaagaaagatagaacctgcagtgaatctctgagttgttcaatcacaagaaagaaagaatatatttttgtttgaatttttcagctttgccaaaaaaaaaaaaaatacaattattttatgatgaaaaatttgatttcttatgcaattttttatacctaaatttgttccttaaatagctattaaaaaaatggatatatttttctctaaatcctaaaataccactcccatttttctcaacctctctctctctctct

SEQ ID NO: 392661 - DNA, 1087 bp, Cannabis indica
attctcctactcaatttagttccatatagtgatttgagacttagccccactctagtcaatagtggtacttaaagtctttagtggaagatcgtaaaaaattgttgcttatcggttaatggaaagcaatctaggttcatcatttggaatacactgctacagaaagagaatcgagggttaaagtgattaagagaaaggagtcactaattttcgcttcaatcaatgtaagaaatttaaaactttatatgtgtttattaatcgtttcatcatttcatattttaggatgttagattatatatataatcaaacatacatggtaataaatagatcattgtaaaacaagttcaaacaaatggtctcagagttatgataatttttttttttcatgttaaatatgatttcatgttgagtttttggtgatttgataatttttatgtgaaacaatatgtatttctatggaatatatattatattaattgtgataaaaaaaaattagaaatattgttggttgaaaattatgcatgtacaaattttacggattgaaaatcgagtcaaaattgaccccaaaattaatttttgggttgctgcccacgaggctggccaagaaactcgacttgaagcctcactctacgtgcctcagctttgactcaaagggttttgtgcctcgttccttgcgcgtgtcatccaggagtgagatcgagaattctcgatctcttggggtgttgtatgcctgtgtttctcggccattcgcattccctgctagttctacgagtgatgttgttggtgagcatgatttcaaataaggtgactggtaagcaagcagtccttttggttgtcaccattttgaaaattaagggattttaattaaaataaatgcttaaaattttaaaaatttgtggaaaattatatatagtttttttaaatttgaactaaaatatcatatatgaattattaatttttagttttttaattaattattatgaaatttggatattaaagagactttaaattgagaattaatattcctaattgtatttgaatttgaaattgactaatttattaattctatttatcctttaatttataagat

SEQ ID NO: 392662 - DNA, 1349 bp, Cannabis indica
ggaaaatatttttctcttaacttttctcaattatttcccctagtaaactttttctatacagatccaattatagtctaaaagaataattatgaagcaaaaatattgatggcttgaaacttttgtttgtaaataagttacattcataaacttaatataactacatagttgattctacttataatattgtgatatattattagtgataaaaaagtgttgaacttgaacaatttatacacaaaaaaactcaagacctacacaaaccatagaagagcaataaaactaccatatgatcatttaactaattaagagatacgactgatgtaacattttaattcgttatttttttttatttcagttaaagttgttataagctcatgtctataaataatagtttagagaatttttgagaagatgtttaaaaacaaatttattagggcttaagcctaaggcgaataatacttttgtattaatataggagttaaaataagcttttttttattattattttttataagtgaataaaataagcttgctgtccaacaaaatgaaaaaacaaggtccaaaaaatatttaattggacacctaggaggaaggtgatggcttgaaactttcaattaattagtaagattttgtattaatttatacaaagttataagaaaattatgcttgtggaattatttttttacttagttttttttttgtaaagaatttttttacttagttttgattaaactataatagaaaacatagggtatttcttcattgataagtgtggtagtttgataagagtgttgactcttgaattgattatgtgaaaaattgaagagttaacttaaaacacaaacaaatatagtatttattaagtgtaaatcaacaaagcctaaagtgatttctcagggccgatccaaacattttgggggcctcgtgcaaaattttaaaatttggggcctcgtgcaaaattttaaaaatttggggcttttttttttttatttttttttaaaaaaaaattaaacgtaaatttctaaaaattatttaagtttatatcaatatcaatctatatatttatataatgctgttgtttggacagatgatgtggcaacatatatgagctctcctcatatttttttattttcttattttttctaatttttcaaatattatttcatctttaccaattttttcacatttaattatactaaaacaatataacagcccataaccgtattttggtatttactattctttttggaacaattattacaatataacagcccataactgtatttttgtatttactattcttttttggaacaattattactattcattttttcaacttctttctacac

SEQ ID NO: 392663 - DNA, 691 bp, Cannabis indica
caccactggtgcttaatagcaatcctcaaaaaatatatatatctccaaaataaattcgttcacaatttgacttcccattttataatttctacctccgtcactggctcattactcgaaagtggatcataaatagttcgaatagaggtttgcaaaggatcacacccgggctaagatggaccatacctacatctagggttcaccgagataatgagcttgaaagaaaaaaaatcttttataaatacaaacaattttttagtgattttttaaaaatattacctattcttttaaagacaaatagtgtcataagtacttaaagttttaatttttaagcgacttaaactcaataatattttagtggcataagtaccaaatgagagtaaaataataattttttttttttaattttattagtacagactccgctaatatcttaagcaagacacatataaggtccatattctaaattattagatcaggacagaaatatgtagtgtgacagccagtagtcccgtgatccgtaaaggaaaataccaggtaagctgtgcaatctcacatcgccttgggaatgtcaagtgggatgattctgagactgtgtaggtttggaactgcacagttggagaggacttaaataaattgattggtactacttatatcaacaaggtgcatcttgtttttcggtagcccatcacga

SEQ ID NO: 392664 - DNA, 1739 bp, Cannabis indica
gcaatgtataccaatcaattgcagagcaaaattgaataaacacttaaaaagggaaaaccaaaaaagcggtgtcacaaaccttgaaaactgcaaagttctcaccacaacgcgaatcaataacagtgacatcttcgactgacactaaactgtgctgagtaaatggccaccagaatacatccatggccttctttggcatctcatgtaatctctttattcgttctgattgtgcggataccatagttttcacaagtgaatcaaacaccccacgcgcagcatcaaaccattccataagatcatctgataaatcttgtggaatagatggaagcacaagaacaggcacactaaaacaaacaaatgcttatcaaaaacgaaaacatcagaattagttgtattgcaacagagcaaaacaaaggagcccctatcaaaactacctttgtcgaagatatgatcctaagggcacctcattttcaagaccatgatcttcaataacaacagcaacaacatcataaccacgaagttttaagctctcataagctgaaatagttccagaaataccacccaggcgaccatctccaactagaattgcaggtaaacgaaaaggtctgccagtaaaggaaactaattacgcaaaatgtacgatatttgaatcaaaataaagaacatttcccattaacaaaagtagaattaaaaaaaaaaaggcacctatacaagtcacactgaagagtcccagaaggccctggactggcaatcccaccagcagtctcaacaacacaaaaagcattcatcttttcctccgaaaacccacaattcaaacgcctcctcaaaatcccaaccaaatccgagtcttccaccatcccattctctctcccagcagccaaatgcggcgaaaccgcttctctccacgcaaacatcgtttcacacatcaattcagattgctcaccgtcttcctccccaggaattctgcattctctgtagctagattccaaatcaagcattccaccgccatccccaacttctccgccaggcaatgcagccacaacggaaggacaggaggccttaagaacacgatcagtagctagaatagagcgggagagggtttgtcgggcggagatagcagagatcttcgagaagacaaagcgagaatcggaatcagaagggaagccagtctgaactggcttgaggtaaaggaatcgctttctaagtagcggttggtgagaacagaggagaaatgaggctgcgattccggcggagacgagggttttgccgagggaggtgttggaggaccagatgaagtaggtgggagaggagagaggaataggtaggttaaggttgggttcgacattggaggaagaggagtaaggtttggattgacgacggaggaggaagacgtggcggtggcggtggcggtggcggaggaaggaggtgagaagagggagcatggtctgagtaagaaatttgaaatggagcggggaaagagaaagaaaggggttttaggtttggagggaaaggaaggacgagcgagtcattgtgagttagctaggtccgagttaggtaggtgacacctcactaactaacccggctccacatttccatgtcatattttattttggaataataatataatgcaccatttttttgttaaaatatttacatttttacatttaaagaatatttttttacatttttacagttttctaaaaaataacacgaatacaacataaaatcaacaagaaaacaac

SEQ ID NO: 392665 - DNA, 529 bp, Cannabis indica
ttacttcttacccttagtggcttgagggcgtcgcagccaccacctcgtcgtgggtcgatcggcagggaaggagagggtttaaggatttaagtttatcttctgaaaaatttctaatatgaatgaagtgtaaataagtaataaagtataaactttatttttagaggcataactacttaaaattaaaactctaattttctttctgttttgtcagactctgttttaaatttattaaaagaatatttagaagtgactgtactatatatttctatctatacccgatgattaaaaatttagctaggtactgacaaaattaagaaacaaaaatctttagatatttatgtcattatttactctatgaatgaacaacaaaacgaaatataatacctaattctcttcaatcttttgtcaagttctaatttttagataataatttactaatgcaatttttatttatttcgctattgggaaaaaaaatttagtctaaattttttcataggttaattaggatttttttttctcccatctttga

SEQ ID NO: 392666 - DNA, 1614 bp, Cannabis indica
ttttttttttcgtctgaactgcgtttcgtttctgctgtatcaattgttcttgtcggttgaattgtatgatgggtttgtttttatttcttctttagattttgacgcttttgtttgattctcgtctgaattttgttttggtttgtagtggccgttagttttcttccaatttttttggaattggattttggcaatcaatgggttgtaaaaattgaccaattcgatgacttttttctattgtacattggagcaatgaatagtataatattctgattaagatgttgagtttcggaaggtcctatctgaaactgtatatcttttcttgataattttgtgattattgtacattactagtgtggcaaaaaatgtggtcattgaaagtaatttgggggtatctattgcttggttttctttctttgtgtagctgtggtggcaaattaaagacagaaccagtggcatttacattcctaaggctgcaagaaggtaatgtgctttgtattgttttgatactactcttaatttataataagataaatgacaatagcaaagcagattacaatttgattatggcaataaaatcatttttaaagtatatagttacaacccgataggagcagaagtcaattgcacttgtaattctatctgttttggactgttaactatgtatacactatacatttgttacatgagttttaaatctttgtgctatttgatatttgaagttattaaggatagttgttgtagacttgtagtagtatctagatttggtggtggaaatttgatttaagtgattcggaggatgctttgttgtgagatatggttgctgcccaaaaattcttctaccctcacatgaatggtctaggatgccttgtgaaatatggtttagtggtgttaattgtctggtcttgactcttgactcttgagcatggcatttatatttcatttatgtctttcgaagggtacaaacatatgagaatccttgtaataaataaaaaacgaatcaaaaaaaccttgtagtaaggattatattgcttacaagttatgaaagtgtgtgtgtatatatagatatatcaataccctataaaattgacaccctcacacccttttgaatttggaatgggattgaaggatattgatgctaatgatgttggttcaagggtatggtagctggtggtgtccaattaggttcaactgttaaagatttatagttcatgtgtttcaaaattaggactgtagtttgtaataaataaataaagattttatgttatttgtagaaaatgataaataaaaataaaccaatcaaacatatattttgtttgaatattttaaatagcactaaacatatcaagaagaaaacacgccagccaaacttatttttgggaatatgtttttcttcccaatttccaaagcatcacaaactatttaggggctgtttgttatggttagtggggttggcttggaaaggaatgcagggagtatggattgaagggaaaatgaaactctagtaggaaaatgtgttgagtttaccatgaatatgttagtgggtcccacaaaatacttaaggattcccaccttaaaatgtagggaatgttctcatttagtaccttgtgttttcgt

SEQ ID NO: 392667 - DNA, 2280 bp, Cannabis indica
gacttgccatctcccacataaatatttctttcagcatcactgggctttcggttctcaggcaatcttgcattgaaatactgatgttagtagttgtactaaaatctaaccactaagtgtttcttagtattgaagccaaatttatctctattcataccaaagtaagaaatatacctttctttgctcaccatgcaatgtacttagcacattctttcttcacgtgtcctttcatattgcaaaagaaacaaccatcatcgttgttggcctgttaggtttttttttgtttttttttttttatgtgctagacccttattcttagcaacctcatttttccatttgttgcccttatccttagaggtgcttaccgaatgagtatttttagtcttctcttgcttcaatctttcttcttcttgaacacaaaatgaaatgagctcattgaaagtctacttcttccttttacagttgtatctgattttgaattgattgaattgtggaggaagagagataagcactaaatgcacaagcaagtcatctaaaagctcaagctttagtgccttcaactttgaagtaaggtgagacatttctataatgtacttctttatgtttttcttgcccttgaacctcatggaaataatttttttttataagagtacttgtttttgccttatcgttttatgcaaagcgtttctaaatttcaacaataaaagttgtggcatcggtgacctcctcgaacaccgcacccctaaaagtattaggtatgccatgtttgatgatcataagattaatgtggtttgaacgatcccacttctcataaatccccttttactcggaggtattgatatccgtaagagaaataggccaatcaatccttaatgcaagatcaagattatgcagtcaagaacaatgaaaatattctctttccaatctttaaaattattaccattaaagaccgatattaatttaaggttagcagatacaaaacaaaaaaaaaaacaaatggagaaagaacaatacaattagataaatgacatactcatacaagaatccaaataaaatgataaattcaaataatagttagtcccatctcaagataccaaatacatcattaatatgatatctttggacaatgatattacatgtaagcgatactcttgttgtagtgatcaaacattaataataagtttatatcaaacaacatgcaatattgaaactcacatattaattatacaaaatacttcatgattgtcacatatttatcacaatgaatgagtttgaaatttagcaaaatatttacttacttttgggccaatcaatatatttaccaattacaaacatacagttctcttgatattttaaaataaattagtcaacacaaaaaatgccactttagcgacatattgtttaaactaatttattcaaaatattagacataaactaatactaaaatttaaatttaattatttccaaaatatcttaaaactaaacgtctaaatcataatatatataacatacagatacatattatccaaaaattttaatggaaaaataataagatgggttggggttataatgatttatatacatttcaataaaatactcactcgctgacactaaaccaataatgtagctacaaaaataaataaaaaataagtcgtaaaataaaggcttaaacacattaacgacaagatgacaattataacgtatatagtatcaattgtatcatgcctattgtatcatatatacaatataacataaaagaaccaaaatcttaacatagtgaaaaaattaactttaaactaatatatacatctatcatatatgtaaacaatatatatacaagatgttatcactctaaataatatatatgtgattgagtagaacaaaaatattatatcctaaaagtactaatggaatacccgaaatacaaaaataatttcatggaagattaattctattatacttctagaggaatgctctgatactaaatgttaaggatactataatttgaatttagctttaattaattcatcagaattttaataataaaatcaaagattagtaaaagcataccagagtctatagaatctaatttaaaatagtatggtcttctaattttgcatcaaaatactttggagcctttgttttcttaataatagggatttaggactatgaaatggtacaatgcaaaaatagggaccaatacctatatattaataattgaaaaacagtaattactcatttttttactttttctaatttcgtccctcatcaaattagaaattg

SEQ ID NO: 392668 - DNA, 2173 bp, Cannabis indica
ggctgagcatacagagccaaccagtcgtgagtcaccaaggccttgtcgagtctttcttcaatccagtccccactagttcttcccttctcccatgtatacgggtagccaacaagaggcaagtcaagcaaattgcaatcgctcaaagccccattaaaacccgcaattagaccatccgggtatatcctaccacctttcttctcaagttgagaacccaagttgttcaagtcccccataatgcaccatggaagagtgctatcgtttttgagtgaccgaagaagagtccaagtcttgtatcacaactctcgttttggctcgccatagacccccgtgaaacaccaagtcgtagactgctgaagagtgacatttgcatcaatatgattaaacgagtacccctgaatcgcaacttcattcgcaactttccacatcagtgccaaccctccactatgaccccagttatccaccacaaaacaacaatcaaaccccaattgggctctaattctctccatactaaccttattacaaaaagtttcacaaagaaataacaaattgggcttcttttgggacacaaggtccgctaagaattgtctggcccgcgggttcccaagcccacggcaattccaacgtatacaactcatggctctgggcgggtctgtaatccaaagcccgccaaaaaattgttttttgggttacccgcattgtcatgctccatgacgtccactacaacattgtgtcctttctcctctgggcccacaataacccctggcccattgtctggcctctttctttttgagtcaaatacaataagatatgtagaatcaaagaaatccccacttttacggacacttaaagccacatcatcgctattaccttccaaattctccaatatactgtttcgattctcattatgaggcaaattatgagaaaaatcagggccatgattcgcaccattcaatcccccaatcatctccgcactcctagggaacaaagtgacattctgaactagattgttgccgtgatgagcttgatgtgtttccccccgtaccgtcgcttctgaatggagccattgtgccccgaatgtcgtctgccgcctttgagacgaggctctcagttctaaggtataaggtttttcttggagatgcagcggtttcaaaaagagtcttggacagaacctctccgtgtgtccaattattccgcaaatgaaacaaaaggtgggtaatctttcgtatttgaaattcacccagtaccacgatgaatcgtcgatgctaatcttcattcttcttttgatcggtttttcaacattaatccttacccgaatccgcaagcaatcccgccacactcctaagaagttattaggatccgattcaagaaaagtgccaatgaaattttcgagagccgtaactacactaagagtcatattcccggtttgtaagtcgtggagttgaacccacatatcgacatggttgattttcacgagccttggattatccccttctttcaatcttgtaaagataaaaggcttacgatcataagtccaaggactaccatctataaccctttgaatgtcgacctcgtggtagaattgaaataaaaacagattcgggttgagttccttgacgtacattcccatccccggttgccaaagaaacgccatcatgttctgaaaaacattaaaatcggagactcgacctgcaatagtttgcccaccaaacaccccctggtattgattatcacctcctctgatctattcactggggcccgtaatacctcttcctcttccttttccaatataacaggatcacctcttactgccatatcattccctgccatactgttagaggccataatcgcacaacaaacaacagccaacaaacaaacacactctcaaaaacagagagacaacaaacgtatcagctgatacgaccaagagaatttattaatttagtatttagattatacgtttggcattattttgaaaatatgaataagtgtgacacatattgtaaaaccctaactaccttaggggtattacgtgatttttttaacgtactgtgcagctcgttgctaatcaacgaggtttatagaaaaacgtgattaattaaaattttgctttttgattaaacttgtaaaacatattacaaaagactcgggatcccgattataaaaatatttacaa

SEQ ID NO: 392669 - DNA, 558 bp, Cannabis indica
ttttttttttttttgtataaatggtcagacaagtcttggcacatgatatattaacattttcctcgtacttatgtggaacaggtactacttggtaacttcctataggtgataccttattcatataaacaggtgatatctgaggcaaatgttatcattcaactattcaagcacattaaaatttaaaaatatgaaataaagaaaaataaaagaaacagataggttgtctctcatttctttcttctctagtttaatgataaataataaagattcgataagtgcccaaaaagaaagcaagtgtttctcctaattagactgcacttttaactgtcagcttcatgtctcatctcataacatatttgttaacaattaaatgagtaataataggtaaaagataaaaaatttaaagagtcatcaatgaaatactctttatcaagttagttcaaattgctaaaaaatttagctaaaaactattcactttctaaatataactatacactatttattatttattcttcttcttcttttttttttaagagaattatcttatatactattttt

SEQ ID NO: 392670 - DNA, 988 bp, Cannabis indica
gtgttattattattattatttattattattattattattagttggacgtaaccaaatgatacacacagtagtgtgacactccttaattttaaaagaaataagtatactaatttgttgtatagtatactagtttggtatattgttaaagtaaaaaaattaagaatcttaattttagaaaatctaattattagttaattttttaaaaaaaaaagaaaaataacttttgaattgttttgtttttctagaaagtatgatatatacattgaattcataagataaaaagttatgtattattaaagaataaatctaacttaaagtgattgaaaattttaaaatattttttctcatataatatagatcttcaaatttctgatgaaaaagtggtccttgaatataaaattaaattactttatatctgacatgttcatataatttactatcaataaataataaactgattcatatatctcttttatctagtcatcaattgagaattagtaatacaaaatttgttaatatatatttaaatggttgattattgattacaggaggatttggctgaaaatgcaaaaaatatgttagaaagaactgagccagataggaagtgcttggtgaagatttgcagaaaatttctcaaaggaagatagatatcaatttttataatttctgtcttttttttttttattatttctttaatattcaaatgcctatttgcttgctaagcattttgtaattaaaataaaataaaaactttcagacaaagctatgtaaggaccacccacttgttatgttaacacatgatctatgaatcatggatttactacaagtgactagaaaatataaagagtcttctgtaatattacatattttggatcttataattaatttaaaaattaaaataaataaataaataaataacttgtaacttaataataataaaattttaattatatttaaattaaattactaataattattaattaatttt

SEQ ID NO: 392671 - DNA, 1200 bp, Cannabis indica
ttgataagattccttcttttgttaggtgttgacgctaaaaagcgataaacttcgtaccgtctgataagcagtagcaaccaatgaatgtatgaatagaaagtaaaaagagaacactacaattatagtagttcactccccttatcacaaaggtaatggagctacgtctatttaaagattttattatcacaaaaagtcaattgccttacaagagaactcgacaaaaataactaagtctagctctgcttcgtaatttctagagagataaagtgtgaagaaagagaagctctcaccttgtagaaggaatgtaaagtgtgaaaaatgagctaggagagctctcttgtatagggaaggacttccaattaaataacaataaaataatagaaaaatattcacaacattcactggaaaatcatgcactagatcgtgagccaattttgaggtccaaacttcagaatgtagtggtggtgtgatacacacttaaatgctccttgaaaagagctttaatttgccacttgaatcgaatcatttgagaaaattatggccattttactgagtgatatgcactactgaaaagtgactacaagatcagcctaacttttgggcgcccaggttgacataaacgtcaacatgggggccaaagacttgtttcttgggctttaggtacatcttaaaatgcttcaatgatgtgatagctatccttagtttattatttgaccttggggaagttctcttgccaattttacttgatatcggggatctcggtaattcactagtgacgactaggtaacccacgggtgatcactactgcacatgggtgttggtggacttgtgcgtgacacatgtacatgagatactgacatgtggaagaatccaaatcttaacaaaataggactgattaaaatagaattgttgtttgaaggacataacactgaggcccatgccaatgtcaaccagggcaccccatgtgcttgcacactggttcctggtgatgttggggactaacttgctactctaccaatattttctcttgattctaaattccatatctatttttggagaaatataggaagaatgctcgtgatggaatcacaattggatccacaaaaccaccaatggggtggttatgttaacttaggcggctagtgactggtgtgatgtcaaattcagtgcccaactctccaactggggcctagatggctt

SEQ ID NO: 392672 - DNA, 1804 bp, Cannabis indica
tctttttgtcgattcttgctctgcttaggagaaaatacgtttttctaacttagctctccatctttgatagaatcttttgttgattctagctctttgttgagttgtgtattgcagatcgtaattcattggatcttcaagggttgaagaacgagtgtgaatctacaatgtttgaaggagtttagactgatctgctggagagaattcagcttggtggaagcaagtggatcttgtcttttcagatctaagtggactttagatctttgttcttaattagttaattgtattcaagtgtatcgtctggtaactctcgtgtaagaccttttcaaattatgttattgatttgtaaatcagaactagtgaatgtattctaaatgattttatagtggatgttactttaccctgttattggggacccaaacactactcgatgggaatgtatttctaatatagagaaaatttataaattctgtattcattgatttttctttcttgttttaattcatcaagaatcatacttatctttcagaataactaaaactttcaactcctaatgtaatggggcataataataaaaattggattaaatataatattaactttttttttcttagctaaatttataccatttattggaaatggtcttagtagctttctcgagatgagttgttagagaagctaaaaataaatttagaaatctatccacatagggtattaaaaatatctctaactaagaaaatgttcttgttattacaagaaagagttcaattctggctaaagctcctcatttaataaataaataaatataaaagtactacttgcataatttctttggggtgtctataactttttacaaaaaactttctatattttataaaatgttctacttatgatgcttattattatgagtttatatacataatggtcccatttgaggaaagcctattccaattgccaaacatgattttgagaatattaatttctcaaagcctctcaaagtgatattggcctctcttttatatatgtcattaccgaaagtgaaaaaaaggacaaaaatcataaaatgttttcaacaaaagaattcaatgctttgatttgattttggagccaaacagaccaaccaatgctctctgcctttattctattttaaacttttaattttccatcttttgctttaagccatcagaataaaaatttaaaattattatctcatttatttgagtttgtttacagcatctcactcccaccaaaattatataaatcattctgagtgtgaattttgtttatatatatttatattaaaataaattattttttgcatttatatattgaagttagatggtttgaatgatataataataacacatcttaaaacacacatttttatcttaaaacacacattttttttttttataatttttacagttttgttgaagaaaagaaaattgattatgcatttttttttaaattccttttttttttaaaaaaaaaattgatataataataatatattacttatgtttttttggactaatttaacataattttttctgttataattggacttggacttggactgggtatttttccacaacctataataggtaacaattcaaactcttgacttattattatttatgacattacaaaattttgattttgacaattgacatgttccctagaaattataggaaaaaaaaaattaaagtgaaaaaggggttttacttttatagcaatgctttattatactaggtgattgttacgtgccaagccacgtagtgttagttttatttaatattttagtttt

SEQ ID NO: 392673 - DNA, 515 bp, Cannabis indica
aataagtctcacttgttaaaacttaaagtaatttgttactagtgtcaaatttgtgtattatttatgtgtatacatttttttttttctaagaaaaatatctcaaccattaatacaagaataaaaatattccataaaaataggggcgagaatgcattagtagtgagtagcatatgctactaataagttctgaatacaatttagataattgggtactaaacatattattactcctaataaaaatgatatttttatgagctgttttgtagggctgcacatttatactcgaaactcgaaacccacctgtaaccaacctagcctgaaaccagaaaaactccaaaaaaataggtttcaattttagtagaccaggttcaggtatgacttggttatgtactgagccaagtttggatttaatatttttgaaaacccaaaactcggttagcattctttttatgtatatatatattatattatataattatattatatatatgtctttttttttaattgttgaattt

SEQ ID NO: 392674 - DNA, 859 bp, Cannabis indica
tatcaaccattagatatttgatccaatggtagagaataaaatacacatacatgggtaatacctattaagagcatactcatatatatatatgctaatttatcctaacattatgtttcgtagagaggagaggaataaagggatttatgaattcccttgtttgacaagagggagaagggaaggaaaatgattgatggacggaggcacttttcctccaatacacaatttctaatctctcaaaaaaatagagaaaattgaagaaaacgacaaaaaaagactatctaaaatgacctttctaccattcaaaatataatatataataacattaaaaatgttaaaataataattttaatatttatttcactctctattctttaattttacttctaataccaaacaatataaataaatatcctctctacttcacttactccctatcctttcaaaagtttccatccatcatactctccctcctttttaccaaacattgcataagaggtaaagtggacatagtttgctagtggtgatggactataatttaatgagtctatttatagtcattaaggtggtaccatatgcctcaaatgcaattaataaaatcaactatctcattataatcctaattgcataatcggaatatagttatccacataaaacactattatgtaaattcatataaactattctaatagtatggaggtagggaatttatatatatatctattctatataaagtgtgcctatataaccgaattcttggtttatgagaaatccatgggtgacttcttatttatattaaaaataaaatgttttattattaaaaataaaatagtttatcaaaaattcataatcactttttatt

SEQ ID NO: 392675 - DNA, 944 bp, Cannabis indica
gaaaacctctcatgtcttgacgagttggaaatatgggaatgtcacaaccttcagacattgcttgatgatcagcaacctaacatgcttcagaattttaatttctgggatgtactttaattatgaaaagaacttgaaacttcaatactattatgttttgtgataactaactatgaatgtacagcttcttcttcttctttcaatataattatttgagctacctttgtctatgtattcccatcccatgcaggcaatgctagttgctttcagaacttatttgatttattatgcaatgtattattggtttaatgttatttgaattcatgtttagtgctctgattgactttgaattctagctctttgatgtacagattgagcttatgttttctttttgtattttgacactcataatgtagcttcagcaaaatatattctggcataaagaagaatcattgaattttatcaagaaacaaaaatacattttgctagattgggaggtacttacaaatgccttttttgttattttctgtttatcatcacatataattaattataaaatttaccatatattaaaaaaaataaacatcatcctatattacttgcataatattcgtattatattattcaaaatttaaattaatattgaaagtaagtatttaatataattattcaattatatattaaattgatatttgtattactaagtaaagggtatatgaaaatacattcaaatctttagagaatgaggaacacaagaaaaggaaggttgaaaagaacaaaaccagaataaacatctctatgattacatagagtaaagggtatatgaaaatactttttaattcatttatttagaaggaacaaactaaaaagttaaaaaggaaaagtagatgtaaacatcttaattagttcagattattctgtcatagttatattagtaaactaatata

SEQ ID NO: 392676 - DNA, 1675 bp, Cannabis indica
gtccgagctacacaaaagagaataagataaagaaggaaatagttacccgtgtatcttcttccaagattcctcctaagaccagctccaaagacagctcattgtccgccctagacagttgatcactcacttcaggaagtgatcagttcaaataatactggagcatatccttacccctcttggcctctgtgctcagtgccacgaccgttgaaggggtcctagtctaatcagacctgttcgagctcccccctctggaaatttttgactttgagaccttctagactggaaggtccacaacaggccgctccttagaaaggtcaatgacctcttcgactggcgccttctctttggacggagtctcatcacctttagatcttttgggcagaggagactggcccaagttgtcccgaactctcttcttcaatgcctggagtaccttctgagacatttctgcacggataaaacacacagttagaaggaaatataaggtatgtaaaagcatagtgcaaaagaagtaagtgcaaagttaaaaataccctgcacgtgggcaggagcattttcccgaacaagcacagacgggacatcatcgtttgaaaagtcttcctcatgctccaccaggatggccttcccttttccctccacaggagcggatggtcgagcatgcatatatggttctctaatcctgatagcatgttccactggtgcttggtcggttgggggagccttctctttttcttggtcgacctctcttgctctgaatagtcttgagcatactacttggctctgttgtctcccttcaacttagcctcaagcttgagttgaatgagctctttctcctgctcagttccactagcccggtttggcttgtccttttacttcttctccttcatgggccccgacacaaagtcctttggtaagagcttatacttaacaaagttggcctcagttgccaaccgagtgatattcagagcagcttctggcagttgaagaatttttcgtgccctctccttgagtcccaatgtgaaaggagggcagcagtatgataaaatcttctggaactgagtgtggacggtatccatgtcctgaacggagtagtacttgttaacaaaatgtccttttttgttgacatcagagtccacaatgcccttcaaccatttctcatccaattgggagaagtagaaataccccgacctgctcttcttaatagttgacttcagttcaaaaagccagttgatgtcgtacagggacaactcaccccatccttgcgaggcgtaaaggatgaacagggcagataaatatttaatacccttcggggtaaactgggtcgggcagaggtggtagtaatatacagtcctcttgaagtatagaagcgaaggtagcattgcaccttgcctagtatgagcacccgaccaggcacaaaatccctgtcttggactagttgcccgatgatttggaaaagggaagaagcatttgacatttccccaatagtcgtgcttctccgaattctcactactacaaaaagggctattcccaacagtttagaagagggtcaattatatgaaccgttggaaaaagtaagtggaggtttttctcatcattttagcactgtagcaaaaaactgttgggatagttattgccaacagtgaataaccgttggcactaataaatagattttttt

SEQ ID NO: 392677 - DNA, 1157 bp, Cannabis indica
aatataaagaaaaagtagtaataaatatataatgtctgtattttttatatatagatgtaatatgttttctaattttaattatttataatattctgaaaatatatatgagatattatttatatataactacaatatacaatattatatatataattttagaaagtactaaaaatagaaaacaccactaaagtagaacaataatagggagattcaacacttaaattacacactaacttttttttatatttttaatttttattttttttttttttttttgagattatttaatttttatgttattacatataaattaacaaaattaatcaatgacaaaaatttaatttgatataaattatatactgatttcaacttatgtgctgacttaaacttaatcattgtgattagtaaattaatagaagactatggtatatatcatatatattattatacataaataaattaataaacttaacagtgttaagacaaaagttgacatgtcttcatataattaattaattaaataaataaatttaatagtgcgcatgcaatcccacgtaattttaaggtcaactgttaataaaattgcttattaatttgtacaaataattcataatatttacaaacatttgagctcaaattaatataataatatgtacattaattaattaattgattatatatttaaaattggtcgaaaatacgtatactatacaatttatagccaatgtgcttacttattacgatctaaataattgtaattaaaatattataattaaggtttttaaaattgcatgattagatcagtaggttcaaatgaaattataacaacattttaattgtcattaaacactaatcaagcatgatctaggtggaaataaaccaaattggtattttagtaattattatgtaaatgccattttattattgcaaatatatatatgtattattttttgggatatttaaaaaaacatatacaaaaacaataaaaaaaagggaattaccccatatactattttttttaacttttttttttttcaaatttacggtttgggtttctaaagtggttgcagcgcttgttgcaataggggtttctatatgattttttgttgcaatttaggttgcaccgctagttgcaataggaatttctatgtagaatt

SEQ ID NO: 392678 - DNA, 1738 bp, Cannabis indica
gatttatttttacaagtatataaaatgttatttttctgctattaatattgttttaacattgctctacatgaaattaaagtgaaattaatatttttctaaagtgaaaaacttataaaaaaaaattagtaaaaattgtaagtaaaaaaaatcttaaaaagtgtaaaaaaaaaaaaacttgctttgaggtataatacttaaattttaaaaaattcaaaactatccataactatatacaatgtttcttaattataaatttattattattatttaataattaacaaaaaaagaaaaagaaaagaacttagattgtttttttttttccttttttgcaaaatctaaaaatattaataagaaaaatatcttaattacatcatattccaactaagaaaacctataatatctataaataattatatctctttatccttgttataagcattttaacaatacacgggtcacgaaatctgttacaacacatcctgacctcattaattagctctttgtttcaccttaaatcacgaagttaggatgctgaagtcatttgtgacatcttcaatatctgagatattgctctgatcttgggtactcctctcagttcaaatgccacaaaagattctttgtctttgaagaaagaacgttttgggagcttctctaacaaaagtacttataatgttctcttgaattagaaaaatcagtatcatagtgccgataactctgggttttggcatcgtctttggcacctgaaaattcctccaaaggtaaagaactttctgtggcgctcagtcgctggttgtcttcctacttgtctccaactggttgtaaagcatattaatatttcttctacttgcctagtttgttcttctacacccaaatccatcaaccatgctctactttcatgctccattgcacaagcttgctggttacaacaaggtatggcttctatagtcgatcccggtagctccttctgtagctggcttgagcttatatttaaacgttttgatgaggaaaaagtgtgtcatgcagtcatgtgttgttgggctctttggaaagctagaaataacatagtttggaaacaaaacttcttctgttgatgaaatttttgcttcagcttctattactcttgatcattggagaaaagctcaagataaaatttccttatcatctttatgctttggcaacaaagatgatagatttgattgttgaataaaacctggtgaaaatacaatcaagatcaatgttgatgcggtaatctttgagtcagattcaaagtaaggtatcagtttagtggcaagaaacaacacaagctccttgggtgaggctcgggcacatgttcaagggggctgttatgcggctgagatagtggaagcaatgggtatcaaggaggcacttagcttggttaaaagtaatcaatggcaatcagttttgactgaatcaaatagcttactctctgtcaagctattcgcagtgattaagtgatgagtcccccttttggtttaattattcatgaatgtcgcattttaatttcttccatgagtaatgttagattatcttttgttaaatgatcagcaaatcgagctgtacattttgttgctaggaattctcgatactactctgatcgtagcatttttgagcacaatattcctgatgaacttgtaatgtttttgatttcgaaatgttaaatttattaaagttgtatatttcaaaagaataaaaaaaaaaaaaaaaaaaacgaagtaac

SEQ ID NO: 392679 - DNA, 647 bp, Cannabis indica
ttttctttttctttttatatataaacaccgaatagttaatttatagaccataactattataatgtttaactataaaaaatttcatggaaattttttcatatatgtgattcatgatctggatctatctggtcctcgatggttgatatattattttttaaaaattattaagaaataagattaaattagggaatatgatattcatatatgcacaaaatttcacaccctcatattgctcttattttccacctaactcctagagagaggtgggttcacacttgctactattatagatctttttctttaagagaaaggttggacatgctttttcttttaatccaatgcaatcaaattattaattagatttagaaaattaatattcgatccatgttggtaaatagatttcgaaaattatcatccgatcaaattcaattagtcgaaaattatcacccgatccaatccaattagtaattgaatttgaaaaactattatccaatctaatataattagacctcaaaatcaaatccaattattaattgaattttatctattttttaattggatatctaattacacacctaaattttaatattaacttaaaaagataaaaaaaaaatacctaaaaacctatatataaaccttcatttaag

SEQ ID NO: 392680 - DNA, 877 bp, Cannabis indica
tacgactttaaaagttagataaagatatttgttagatgagacaaatttcctactccattttttctatattgtaaaatgaaattaacagtttaattactctaaaaaatacaaaaaatagatctttgtagtaataaatagaaattaggtaagagataataaaaagttataaactatttgtgtaaagaatctttcttatgtgtcggttcatttttgtatttataaattataattatgtacaaccaattaagtacattttaaaacatatgggagtgagggagtgatcactagttgcacttaaatcataacactaagtaatagtgctagacattatgatttagcatttgtttaattaactattttttcaaagcaacgttataaataataattattatattaagatagatgcaacttgatatttaaatattgaacataatattcttatattttgctacctaaactttttacctagtcaaatattctccaaaatactattatgagagatactctaatattacttatgtgagtgatttgtgtttggtgagatttaattaaaaaacttaatgagcacgtgttttttaatattccttttccaacaacttgtgttaaactagaagagaaattttattatatatattcttaaagatagagaaatgctaaaaaaacattagtagtgtctagtaccttcttatatgtcaatatcgctattggttcaactaagtatcaggtcttataatttataatgtaataagttttatgaagtatcgctagccaattataaggtaacacgtctagaaggtgctaggcactactggtgtccaatagcaatgctcttaaaaatatacacattattaatttttagacttttaattaatttata

SEQ ID NO: 392681 - DNA, 629 bp, Cannabis indica
tcagttataaaattagtaaaaattgactaattgactgaattttacccttaaattgagaaaatagaaatttggttcaattgtgagatatgcactgtctcgaatagtgcatttggagatttgtcttgtctcaaagaagatttgtgacctaacatataggtacttttattgagagatttgtcatgtttcaatccattttatgtttgtgcatgtttttagtttttttttccaccttgaggacaaggtgtttaattttgaaaactaggatagtgttacactataaagatagtgtaagggtttactagtgatttgtaaatgatgtgaaagcctataaatgtataattgtgtaactattatgaatattgattgagaaaatagaacttatgttctattaaaagattcacattatctcgaactgtgcattttaggagatttaccttgtctcgaagaggacctattacctaactggattcatcatttatatggggtctgcacttattattaggattttttttttggggtggcattctattaataaagagtttatgggctcgtttggtagatcgtataagagtcatattatattaaataataaagaagtttttacaaaaaatactgaattttggacaaaa

SEQ ID NO: 392682 - DNA, 1511 bp, Cannabis indica
ctgtatataagttcttttctgttttcttgtaaagtaattcattcaataataaagaatatctttcttctctctcgttctctctttctctctaaactcaacagtactcttcatgatgtattttttctcttatgttctaagaagttgtaatgggatagctcatagttgggctaaacataatattttcattaaaaaaaatattgtttggtggtcagataatatgtattccgtctatgattgaggatgaatcttctaattaatgaaattctctttaagccctcatttgagggttttcgtttcataatatttgttaatgctgcaaaagatccttttcaaccacctattaccaaaaagtatactttcatcaactttacttacacttaaatgcatcctctttcagtatttggtgtaagagatatgacatatccatttaatcacattaattatcaatgaaaacaaatcatgctttctatgacttttttttatgtaactatgttttctttgacttaatgattgacataaatggaagaatattttggatattataattatcattaataaatgtattaattataattgatttttatttttaatcaaaatttgaatattctacttatggttagtatatcacacacattaattttattactcaattttttatattaattgttgaaatattctaataattaattataacagaaattaaatatcttacttatataaatacagggtaatggtcccaaacttactgctcatatttgattcttattttcattttcaattgtgctagtatatgacacattaattttagggttaagatgtaaagtgaccttaaatctaacaattaagttaataaatgtcttttttttataaaaaattaacaaaatgaccattcatttaaaaatttgatgataaaattataattataaccttagataataaaccctaactttctatcttattctcattttcttgtgtccagaccactcgtctctttcttctccctccgcaccaagtctagaccatctcgcctctacttgtccgaccgccaccccttgagtattaccaccgtagatcgtcatcgccccttgccagtttccatcgcagatcttctacctttgtatttgctacattttcttcagtttaatataacatttgtatttttacattcccattataggttattttttaaatatcagaaaaagagttcaatgttatactatattttctatttggtgtgactggattgtgaaggaattgttttcgttatattttctacattttctctgtgttaataatagtcttgtttgccaaaaaaaaaataatagccttattgccattattaagctttgtttctgtcagaatttttaaactattctgacttattttatatgggattatatatgaagaacgaaaaacagtatattacaatatattcatatttcagtatattactttaatagtgtggtatattatttttaggctaattagtaattttccccccgaactttgac

SEQ ID NO: 392683 - DNA, 746 bp, Cannabis indica
gttataaataaaaatgaatcaaaaatataatttaaaaaataatattttgcaccaattgtatagttcgacgagatttttcgaatatagagaaagtttaagattaaactttacaaaggtatataatttatttatcgtaatattaaccgttactttacagcattatattaattaattaaagtggattgttatttaaactgcattatagttagagactataggcttggaatattaattaagtatgtgtttcatctttaatgcagattaatataacaaataatagtattaagcatatatgcacataaaattcgtacgtaggtcagcggttagcaagaattaaatcaacttttggtgtactattcaaacgacctaaaccatattacctacccataaatgtattttttgtgtgcaagaaagtagaagttatgaccttaaatatatagcaaatatatttatatcttcatatattagatgtgttatccaacggttagtttaatttttatatatatggaatattttttaaggatattacttattattaataatgggtaataaataaatttaactataaatattaattttaaaaatattaaactattagattttggtcgaataataaaaaaagaaatttaaatttctatgtttaatttaactacttaattaaagaaatattaaaaatacatctttttacattatatcaaaaatatatatgttcatataaaaatatttaagtcaaattcaattttttt

SEQ ID NO: 392684 - DNA, 964 bp, Cannabis indica
gtgtgaagaaaatatttttgatgtgtaattgtttaaaattttataaaaagttttaattttgataaagttacaatttttaatttattgttcaatccaaacatgagaaagaattgtaacttttttttttccctcttaaaaattgaaggtccaaacatggccttaatcaaggctttgtttgttccaatatgttaatttgtttcttactcgtcaacttttcttgttgttttttcgttcgaaatgaaggttgggggcctttcgcttactttcaaatgctcgcagagtctcaaaatatcgatccaccgacatctaacacagagaacgctctcaccgtgcgccaaccacaactcgaaagtatatgcatccaaccgcaaccgcaacacaacatggatggtttcgaacataataatagaagaaattgattttttaggatagaatagaattaatgactagttgtgcattcttatgatctcaagagggatgttttgattttcatcaaactctctttctttctctaaacacgttgaactttagatttcgaacatgcttcatatgtttagtgtagttcgattcatttgatttgttcggtttgtttgtggttagggtttgtagtttgttcataggcttgttcttagttctacttattttttctatacattttgttgtttgaagtttccactcttgttttccataatattagtatttttttttgttctcattttctaccattgttaatttgtttctttagattcgtgtaaattgaatttgaatgaccactgaactttctaatttgattggttttggacatgtctattatagtacaacacccctctaaatcagcataatttggttggtttatttgtattttttcttgccgtgtttgtggtttaggtggtatttgcctttaaatctttttaattacaaaaataaaaataaaattttattttaaaaaataaaaatatgttat

SEQ ID NO: 392685 - DNA, 1389 bp, Cannabis indica
tatgcttgcatctctctccaaaatcgatcttcaaccctcctccattgaagacgacaacctccagaggccaaggtgagctccattgatggacgaagggcacttccaaacttcgagccccaagtcatctccaactgctcttccactgtaggtccacgattgacgtctccaccacccaaacgcccattaagttcactcaaactgctagcttaatcggtagattttttttttccatttgtagggcctttcagagcagaagggcgtccaagcctagagccatcaatggccttctgcacctgagtgggcctgctggctagatttgcatttttttcgaggaggtacgagagctatcaggttctgagggtcacccactttttcctttcccttttcttgtacaagagtagaggttccaacatcaatagactattccttattatttcaatcgacacattccattgaaggatcattgtcagagtcttcttcacctagatctccaaatttgtcttggaggtgagccatcattctttccatcctctggaaaacttctcttcacaggccaatttctcttgggtctcctgtagctctcaagacactcaaacaattgtaggttcttgctcatagtagtacccatccttataatatccatctttaacatactcttcattgtcgtcttccccctcctctttgacactttggctatcatcgacatgcttaaggtgtttgctaggatccccatttggttgtcagcgtttgatgtattcctttgaggggtctttttggtcactattttttgagtgaacacaattgttgcagtagcagtggtggtttagatctttcttcagctctgaataaaagcaccaaaatatttatcaagatttttaaaaactaatataataagagcttaaaaatggtaaagaacaataataaatatatggagatttttttacaggatttagcaagccttagtccatgagtcagtctattagcttttgaaggcgtgtttgattttcttacaatatgttgatgcaagaaaccctaactatgtaccctttgtttatcttgaggaagagaaaagtttagagaaattttagcagagctttgattatcttcatttttgacccccttcgtataaaagtagaagggtatttataggcgaaagggaggctatgtacatgcctatgacacgcctaggatttttgcaaaaagttcattaattggataaaatacatgcaaagagagctaactattgagccccttagaagaattttttctcgtgtattgaagtagctgaacaataggggaccacccttcgtacgagacacgtgttgccaaaaggttttaccttgaaagtaattgcctagaataaccatctggcaaaaaggtgtaaaggat

SEQ ID NO: 392686 - DNA, 1197 bp, Cannabis indica
aacatagaataacattgaaagccgaaaaattcagaccaaaacacttgtataaacagctaagaagaacaatacaaaaatcttacttccccaaaaatgctgagactcttcagagaattgacatatatacttgtcatcggcaccaagaatttgcgccccaactcctgtaaatctgggtccatactgagccatttccaatggcgatagtttcttcctaaacgcagggttctccacagagtacatgaagcaaaagctctgcctcttctccggaattgagaccttgaaataccatccctcgaagaatttccgcggacttccatcgaaatggtacctatataactcagccaaagtaagaaaaagaaaacatttcaatgaagaagagcacaaaatagaggttgtgtacccgctgtgaggagttctaagctcccgattcgaaggcgttggagtgtaaactgagctacttgaaggaggtaattcccctttgtctctgccgatactggatacgcgcttttgatcgggttcggaaacggaggagcgaatcaagccagggttggggcgaggccatagaggggcaagtgaagtagatttggaatggtgatggaagaggaagctggaattagggttttgggaggagaaaccaagactcctttggagatggtgaggtttgcatggtgcgaaaacgatgccttccattaccgaagcagacgatatttagaaatttgcagttttccgaaaagagggagtgagtgagtgaggtgccggttcctagtagactgtcaatgggacttggactctgatcttgcacgtggacgtcgacaataactgacacgtggaattatatataaatgctattaaatttactttttgttttttttggggacgtttgttaatatttttattttttaaattttttatcataaaaagtaaaagtaagatttatgtttttaaatataaaaatataatttataattattttattttttaattttaaacacttaaaataaaagtatattttataacttttgtttttatttattaattttattcaagtcagatctagattcgagagcgtgttccgagtgcaggattaggactgagaccggagttcatgtcccaaaatctaaattggggtcaaattccaaaatatagattaagaaaaaaaaaaagactatttaagaaaattttaaaagaaattttttt

SEQ ID NO: 392687 - DNA, 2028 bp, Cannabis indica
acataacagtccaggaattagtctatgacctcaaatattagcaactctagaaagtcaagacacggccaactcaggaaaatgatataacaagcgaaaaatataaagaaagtcaagtttggaatcctttgagtatgctctagattggagtaccttcatcaaaagccttgtttctgatcgtccaaagagaaagcatagtcgtgctgcaaaattgggtgaatttaagagcatgtttgacattattttttttatttttaaaatagtattttcagaaatgataataagaaccagtttttgaagttttcaaactagaagtcggttgtgtttggttaatgtttttttaaaaataacttttacttttattttttaaaaaacactttaatactatgagatcctaatatgaacaagactagacctgaccctaatcctggccttggactcggacctcgactctagacctggcctcggtcccgatcccagcctcgtaccctgaccttggacttagccccgttcttggtcttagacctcggctcggaccccggcctcagatcccgggcttcgacccagtctcggaccctaaactcggactctgtcacggacttggctagacttggacctgaacttgggccccgacctcagactcggactcgacccgaaaatgaggagagagaaagtgatgagagagaaaataatatgtgaaaataatgtgagaaaatgatgagagagaaagtgatgagagaaaataatgtgaaaatgatgaaagaaaataatgtgagaaaatagtgagagagaaagcaatgagagaaaataatgtgagaaaatgatgagtgagaaagtgatgagagaaaataatgtgagaaaacgaggagagagaaagtgacgagaaagaaaataatataagaaaatgataagtataatgatgtgagataaagtaagaaaaatattgaccaaaagtgaatttattttttaaaacagaaaataacattttgttgttttcaaaatttcttcttttttgtaactttgttttctgaaaactgttttcaaaaaacaaggccaaacatgctttactgttttcaaaaaataattttctatttttaaaagcaaaaaagtaattttttatttatgatgccaaacatgtattaaccctttcttttgttccaaccactcaggtggcttagatatccaccacaatatgaagtggggaaccaaaactaacactacaaatgtttaaactaacactatagaaccaaattttcctagccaaagggcattggaagaacaaatgaagcatggaatcttcaagactactacaaataatgcagtttacaccattgccaaaagacagcttggaggcattgacctagatatctcttcccaccttccataagaaaagtttagttcatttatgaagtaggacgccttccgaagggtcctttcaaatcccatccgtagggggctactttagaggagaccaaagattgataggctgatgggatttatgctcaaaaaagcaagcaattaattattaatatattatagaatatatgaaatgtaattataatataaatgatacattaattataagagtataattattaaatattttaaaatttcttattcatatagagaaggtataattttgtaagaaggtacaagagaattaagattatacgatatgaataaaataagtcggtagtgtattaaagtaatgagaatctttaatatagaactgctaagtatggtttactatacattatacttctagtgtgtgtgattttaattcatatcacatatgtggatagacatgtagtaaatgtattgtgtataatttgattatacatgactggatcgatatgtaataacatctttcatcaatatgtcgtttatcatgaaagagttattcatatcacaacggtgattattagtagatcattctgaatcccgacgtatacatgaactcctatttgtggttcatttgagttcttttgatttcattttgttaaagttttctctagagaagatgattcttac

SEQ ID NO: 392688 - DNA, 856 bp, Cannabis indica
atttttttcttatttttttttaaagaatttttattttactttttttttttttagtttttctttcttatttgtttattagtaaagatataattgtgtaaaaattatgtagcatatttatgatattaattttttttgtgttgttattctattttttttttataaatttttgttagttaaaattttattttttttcaaaactttgtttattggtagataataatagagacaatcagatgagcttgcatttagtcaaaatgattggtgatcttactttcaacaagagaacctatacttatattcttgtttaaatgtaattttttttaataattatttaaatataattaataaaaataaaaaatatgattataacaaatttttaagagtattaggtacatctggcaacgactaagtatatatttttatatatataatgatctattacttttgaatagtgctaaaatctttgagtctttgggacaaagaatagtgactagactattaaaaaaaaaaaccacgaattggctattggtgactgctatatatccattgttcgctcactcaatcatggagatataaccttattaatattattccctcttaccctggaatttgtatcaactcggctcccccggtttggccttcatctctggatcaaataataataattatatatatgtttgattcatagtactttttataaagtaattaataatgcaataacatagtttaactagccaaataaaataaacataatgggatctgtcatggtttgattggttaagtattttaaaatgaaattacacactcaacaatacttttttatatatatctgttttccaaactactgaaaaagtgc

SEQ ID NO: 392689 - DNA, 373 bp, Cannabis indica
ttttttttttaaaaaaaaagtgtagtaaaatttaaagaaattaatttaagatggtgtaaagtttaaacgaaataaaaattaaattagtttagatataataaaagtcaaaatgactttatatgaaattaaagctaaatcaatgacttaagttttttaaattaaaaaaataagtacaaaattagttcaaaatagattattttgataattaaaaaaaaatgattcctcaactaaacaaaacaaatcaacaaaacaagacaaaaagagataaagtggggcttctttttgatcataagaaatgcaacaaaaagtagaaggaaatttgaaagagaagactactaatgttaagaaagttttttaaattatatatatatat

SEQ ID NO: 392690 - DNA, 807 bp, Cannabis indica
attaaaaacctaatcaaacataggaagctttcagattcccattctcacttctcccattaccgcataccaaacaaccccttatttatcttaattataataaaacaattttattaaataaataagatagttactaacttaaatttgaatttcaaattagcaatctttatatttattttgaattcaaattaattaaaaaataaatatcccaacaaaataattaattatttacattaaataataatatgataacttatactgtatatacattgtatatgcactatatatattatatacaatatataatataatgtatacacattagatatagtatatatatactacaaaaatagatacatatatatatggggtttcaagtttaagggaatcgatcaccatggcccaccgtggccagctgccacagtagccaccatggccacggtggtcatggccagccacaaggaggagcatccacacacagtcgcgggtcaggaaggatctccaatggcccaatcgggtctatcgtgctcgaggggacgtctcatatccatgcattcaatgcatgctacgtcctgaacgactaactagggaccctgggtccactgtccgtcgactcgtaggcagaccacgataccatcgacaatcaatagcaaagagggtgcagaacccaaagcaagcggctgctggctgtcgtcgtgtgcatggctgggaaaaaaaatttccaagcttgcatgcatgtgatatttgttgggttttatgccctaaataaaattctatttcaatgtaatctttatcttttaaatatcaata

SEQ ID NO: 392691 - DNA, 1161 bp, Cannabis indica
tttagtttatgttatgatagtattataattagtactacgtacactactcgatttgaaactcgttcatcgtatcgttcgtgcttagttgacgatgaattagcttatattaacaattaacctagcatatgggaataaaatcaaaatacatggctcagtgcaacgtgtcgagaggagggtgagtggtcctactggcctgcttgggtttattggtgacgtgtgtgtataacgaatgaggattggtgagtagaaaaaggtcatattgatttattgtctaagtgtccatacaagactacaatttcattcattccatccacttaaccggcccacatcagcaccatctccatgacatcatggcatacctcacccacatgaagttcacgatctcgaccaactccaaatattccaaacaaattatataccttcctgcaatatatatattatatatatggatacattttgaaccatgttgttttatatctagaaacatattaaaataaaacatatatgatccaaggtaataatattaaaagttttatgtgatgaatgttttcatataatctacttgatatcccttgtgatcaaatgaagagtctagttattaataaaaaaaatattatgagtaggcttaaagaaaatggattttcaaatatatatcgtttgaatctggtatatatataattaatttccttttgtagcagaataatatttatatatttttggcaatcaatcatatctttatatctttacagtgagaatgggactggcatgttagtagatgctgcctagagactcatttttggattctatagctttgatatgtacttgcaactttatgcctatctgcaaatgcattaatggatttggttggtttggaaacttttggactacttaactggttaatacataatcattactcgtatgtattattatgtgtttcatgagtatacttgcaagattgatattgtgtgtatatttatgtaaaatatatattatcaagtactggtgcggtttaggcatggcaaaaagatccattcattcggatcggatcagtgatccgatccgacggatcattactgatccgaaatattcagatagttattggatcttggatcagatccgacccgccccgcttaattttttacggatcggatctgacccgat

SEQ ID NO: 392692 - DNA, 684 bp, Cannabis indica
aatttgttttctttttgtttttaggtcaagccaataaaggttgaaactgatgctacgtgtatttgtgtgttcacaaaattgattagtactttcacccaataacgaagaagaaaacaaaaatttcccccatgcaaatgttatgtcaataattttcagaaaaaaaaaaaaaaagaaaatgttatcaataatggttgaaatgttgaaatgctatacagctcatagcgcaacaataataatttggcgagtcacaaggttttgtgccatatgtcacattattataaaaaagaaatcttattgtttttcagtatttttcttgctaaagaaagagcattagcgcactataaatgtttaacagttgttttaattattattaaagtaagataaatgagatttaatgttaaattattcaaataaataataatatgagaattcctacaaatactaaacacatgtaatatttagcatttctataataaaaaaaacgatagaatgaatgtaaaaaaaagtaaatccaattcaattaaaactcaaaatctaatccaatctataattacatatctattttttaatattaatttcataatatgaaaaaaataaagcaaaaattaaatatcatcatttctttaagtttaattctataaagatattatcattacaaatttaatacaattaaaaatttaaaat

SEQ ID NO: 392693 - DNA, 2291 bp, Cannabis indica
tttaattatacggcatgattgcctacattttatgatgtgcttaagcttgttataggtgctttgagagatctgacttatctcttgtttgtttgatagctcattatgtagtcatcaattgatgtatgggacattgtgaaatcagagaattatgtgtttaaacccttgagcacatctttcaaagtaatgtgttggatgatcttccccatactgcattaaaagcatatacaatgactttaacctcgtgcaacgtgctacgctccgcctgtctttctacacattctctcggctgaactcacttacggagaagaagtgacaaaaaccactcatcctctaggtagatccttctgaactaccacgtattttgagagaaattctaggcaaaatatcccatgatgacccctatacccctaaaacacacacacgcccaatacgctttatatagccacttgagctaaccttcaagtaattaattgaatatgagttttaaatatattttttttaacttttttgttgtttttaaataaatttaatttttaatgaaattttaaaaattttttattaatgtgaactaattagtgattgccacatatgtattatatggccgttaatgtcaagatacctatggttgctaataaattattgtagcgaaatgtatatagccccaaaaaaaaagacttaggtatatttaagtgctataaatacaaaatttatagcatttttctcataaattactctaaataaattatatattatcatataaaaaattgaaaattaaaattaaaaaataataataaatcaccaatgaagttaaaaatagaaaaaaaaaaaaaaactttttaagagtagttaattattttctagctctgacatggatccaattccaaaaaattaaatttagagtgatattgtcaaccttttattataatttttttgttaaattctgtgtttagaaaatacatgccggaattattttgtttcaaattttttatggtcgatgtccgtaataattacaacattatccctgtaaacttttgaaaaattacaaataatttacagtgcagaaagtatatttaaaattttttgaacatgcatggtaagaataaaatattaaagactttattttcagtactatttattcgaaatttttttaaaaatttacaagaataatattgtaactatatagtaatatttttatataaataaattgaaaaaagaaattctagtgtgtaattttagacataagtgtaaaatgactaaaaaattataatggaatcatctaaaaaaaaaaatattataataagagattataattaatactcttcaaatataatgacttatattcttcctctcttccaaaatagctagctaatttgccgacactacactctttcaacgtatcaatccaaattattaagtaaccaaaccataactttatacatttattacaatattatatacaacatattatattagaaaatataaataaaataattagttcaacatggccaaatttttaatcacatcaagaaaaagttgtgctacatatcttgttactttattttaaaacttttttacacatgttttagcaatcttatcatatatacaccaaaaaaaaaaagttatataatattttcaatattgaatttggatttgattacaattattactaaagctttcacttgcgtgcacaactcaatggatctcactgcaataaaaattagagcaaaattcttgagaatattataattaaagaaaaaaagttattatgaacaatgtgatgtattcacaatatcataaactataattattagtgtacataaatctatccatcaatataattacaattgaccgatctaatcacaatcgaccactttatattggatatccgattatgattgaatcaaatgttagatgggttattaattcaaaaatctaatacatccaatatttgatcgaactaattaatatttttatttagtttagataaataattaaattttagattgttatacttaaaatatatacatatatatatatatgaaaattaaaattaaatttttacttttttttattcgattggatggatccaattcaatctaataaatattgaatctaaagtattggatgaattcgatctgatctaaaaaattccaatctaaaatatttgataaattcaaactaattcaattaatatacataaaatacatttaatggatagacccgatctaatctaatatccaataaatattaaattgattggatgactaatattaagtccacccgcgtgataa

SEQ ID NO: 392694 - DNA, 911 bp, Cannabis indica
catccatttgagccattcctaatatctgaaaaatatcaactcaaacacaaaattaaaggtaaaagcaacagagaaacaaatgttgaacaacccacttaatccttaccataccattacaatcccttaaaaacaaaatatataatccacccttctaaccttaaggggctattggactaacaaggtctaattaatagatgactatgacttaataggtcaattataattaagagtactctcatgtgtctctaatataattagtaactattattgagaaatacttacttatttttcccatctgttattgtatttctctggtttatttcctaagctaatctaattgtttcttttctgttagaaagttagttagccgacaattaaactttttttttctttttttggttgtaacagattgagttgagtctctcctatttgaggctctcttctccattgtattattcattcattttttaataaaatactttctctatttctcaatatggtatcagagcaggaaagataagctttcatgtttgatccttcccttccagccagctgtgttttcttctccgatggagctttgtctctctcgattaccttctctggctaaacttctctcttggttatgtcaatatttgagttcctgcaatggctacatatgatgatcaaaccagagtcccagccaccattgccgatcttggtaatccctctgctcaaaccaatcaaggcctttaaatcgcatcaataaagaacccactgtaagatcctgtgagttcgtactttcttcaccatggagataatccagggaatgcattggtgtctcagcctctcacatgataagacaattacgtctcttggagcagaacaatgcagctcgcgatctatgtaaaaaaaataagattggtttcctagac

SEQ ID NO: 392695 - DNA, 966 bp, Cannabis indica
gttagtctattagcctctaagggagatattgatgtgtttacaatacatttgtaggaaaccctaactttttaccctaaatttctcttcgaagaaggagaaaacttagagtaatatggacaaagttttagctatgtaagctgttatacccccttcgtatgagaattgaggggtatttataggctaaggggcaggcatggacaagcccataagatatctgctcaaaatcccactattggggtaaattacatgcaatgttagagctaaccaaatgatctcgtgggaaacattatgcctgtgcgtgcaacaattggataatggggaccattttgtaccacacagacatgtgtcacgcaaagattcaacctttaaaagtacgggccacatgttgctcaaagcttgttcctttacgagtaggagtttgtaatatttgcatggcaaaaaggtggtagtgctacacacactgccatgctcggatgtaggagacaagatgtgatcttcgttagaaaaggcataaccgtcactttggtgacctgacatgtatgaaaggtcgacatacgcgacacctcaggatggtaggtgtccgcattaagcctttcatgcacccatccaggtgtgtcctcagtgagcttcccttctcagatccctctggattcgagagaagtattttgctttttgcgttcaagaagttaaggcgagtatgagtagccttcgtgtatccttccgtcctagatatatcccaattctaggaagcctcttcgtgacagagtagtatcaaggactttaattaaggaatgattgaatcagtttttcccattaaatgccacatctcgtactttttaaaaacgcggataacaatgggaattaatcaattattatttgtggtaaaactgataaattaattttggaccttaaaatatgaccacacgtgtagggtgacatataaggacctatgagttttttttttga

SEQ ID NO: 392696 - DNA, 904 bp, Cannabis indica
atataatatgggcaaagctgagtagggtataggttggcgtttggccattaatgttgactgaaactaccccattttgatatgatattgatcaattattaattatattgattaatcacacgtctaaagctagcttattattatgcttattcattcaagaacatgcaagcaagcactaactgatgatcattttctttcatcatgttctgattatatagtagttaaataatgccaaagaatcaataatcgaatagataattaaattactttatatatcatatatatatgtactgacctgcttcttgacataccaagggtaccatggaattttggtagataatttgagtcgtgctagggagaatcttgtggctgtaactggcaccactgaatccacgtccccactgcccaattattaattaatcaacacaaacaatattgtttgtttttaattaaactcgatttgaagtacataaataatagtactgttcatataagtaattaatattgatttggtataattaatgtatgtaatttacctgaaaacccaaactctcaaaccagcagctatcatttctttgtaaataggaagaacagatacttcggtatcgttccaattcctattcaaaacctcactaacatatatacacaacaaacttaattaattagtattagcacaaactatgaaaaacgacattatgacaatataaaacgatcttgtattttctaaaaaaaaatacaatcatgttattaaattcaataaaaggtccctagtaaaaataagccaaaattgagactttgttacaagagacttctaaagaaaaagaaaaagaaaaatcactgttattttattttttatttttaaaaataaacagtaccgacactacaattagaattaatttatccttga

SEQ ID NO: 392697 - DNA, 940 bp, Cannabis indica
aaaaaaaaaaaacttaacgtacaaaagtagttaattggctagctagggcatgaaactgcccctgttataaataaataacagtcaacacaaaaagtcaaacatgcagtataggttaagctatacatacactttttaaggtataatataaaaaaaaaaatagtaacaaaatcaacgggagagatttaagcttaattaacgcaaaaagtagagaaatttttcatataatatatacatatacatatatagtttaattaattatttaaaggtgtcgattactctctaactctaaactacttctagatcaacaaactatatatatatattattataattaaaaattaataatgacaatattggcaatttgtctgttactgtttggagagtttatacttgttcaaatcaccatcacatgaaagttgtctatacaaaagttgtggacacttggaaacattgtatcattagggtttcactttttctaatatgttaattaatattgactcataatttcaaccaaaacacttatggtgtttttcttctttttatttgtagctaacattttttcttaaaactttgttttggagctaattaagtagtttaataatatttattatatcccactaatttgaacttgtgtatgtgcatgcatgtacataaatcattgaaataattaataaaacaaagcaaaggttaattaacttgcatcctaagagagaaatataatttatatatataaagggaatttcacttttcttttatggaaagttgtatattatagttataatagatatattttcagggtcggccttaggcaggttaggttcgtatctagggctctcacttttagagtttaattcacaacttgcttagttagggtgacactctttttcaatatttttttttatatatttctaaaagtgagatgttgagaatcatggggttc

SEQ ID NO: 392698 - DNA, 713 bp, Cannabis indica
aatattattttaataaaaaaatacttactttttaaaccttttttttctttaactattttaactaaaaattcctcttaaaaaaaaaaaaaaactccagtatagtgtctatatcatttttttttttgggagatagaatgctatttcatataattcaaagaggtgtctttatcaattttaaacaatacaaattaataaatggttgaaatagtctatttaaccaaattattcatagccctaaagacatgcttaacgtatctatatctatatctttagtattattactaatattgacaaagtaaagtactaattatatactagagaagaaccaacaattcaagcgattaataggagactagtcctggtaattagatattttgaaaattgtctagtatgagtatatatataattatataaatagttactttggcaactttatattatatatatatgccttaatttttacattatacataaaataggtcagttctagtggtagttaaagtaggtccgaacttaggacctccaccctacaagacctgtaaacaaaaattattttctttatatataataaatatatttttatcctattataaaataatggtaaatggtggcaaaacccttaatatttttgttttgatttcattaaaccctcacaactcaaatttctgcgggtaaacctccagaaccaggaaactgttagcaatttaacactt

SEQ ID NO: 392699 - DNA, 500 bp, Cannabis indica
tttttgagaaaaagataattatgaaattaaattttttattcagtttaatctaagcttaactacacatcaaatttactacaaatgtcactaacacacaaaggacaaaatatagtaaaattactaaattgccccttttcttcaccataaagtaaccttgtaacttaggggtattatggtcaaaccttataaccccgaataatcccgacatttttaatgtctaactatattttcctgttaaaacaaaaatcctatacctttccaagtgactctataggccaactgtcgcattctactgttaccagacataaaatatgagaaacataaaatttatattatatcataattgatacacctagaatttaaatatatctctataatcataaaaataataattaaaaatctacttttgaaaataaactctaattatatgctaatttctaaaataaaattaagcggtcattacaatagatttataaaataatttgtaaataaattgaata

SEQ ID NO: 392700 - DNA, 1281 bp, Cannabis indica
ggtcataagcgacacttcctgattatgtactaccttccaaatatcactatcatagactaaacagtcatacgaatctcttatctctgcactaaatgaagtcaggaagataaacctagcacgaatattattttggtgtcaggaagataagctctcttgaccgtgaaatcagaatgttcacgcatggtatgccaggcagtatgtatagtgacaagttcaaatagatttctttttcgtaaaagaagttcaatttcgattcttcattccaattgaaagtcaccatcaaattcagttatattataacaaaaataaattcacatcgttttgttgcactattttttaggtattagactaaaataaaaataaataaagcgagatataagtaataggatataaacacaatataagtactataaatgaaagataaacatcatgtttagaatataaatatgatgcatgaacacacatagaaaaaaacataaaataatttagaaattctataataagattatccaaaaattaaagtttttccttacggtcggtgaaatttatattgaataatctacaagacttgttcttgtctttattaattgtaattagaataactctttttttttttacaaaataaagtacaactggtttggtcaagttatgtcccctaatgtcaaagacagggacattactttgtgagtgtaacccattattttggattctaggacttaacttagttacgccaccttagtgtcgatatcgtactatgatacatcactttgtcctattcttaagaggaagcaaaccttgataatttatggttcaacacctttcttaggaggacgaaaataaagtcgtgtcgaggcgctccccataccctctgtgttggactaataatgcagaccataggtttcataatggatgacaaccatctcccactcactattttaaaatgtctctttcattattaaaattattttaaaaaaatacattttaatctttgaaatttatcatttttaatattaattaaattactatattataggccaaaaaataatttaatcaattctatattacactaatttttgaaaaaacatgaaatttcttattttaatattcctagttttattatttaattaaaattttaattaaatgcggaataatgaaactgttactgaaaatagtttttccgtagctacaaaaaataactctgtaactctagaagaaaccagaaaaataaacaatgcaaaaaagtaaaaaacacacagtttttgtacgtggtttcaacaatcc

SEQ ID NO: 392701 - DNA, 865 bp, Cannabis indica
aacaaatttataattagttatatttatttaaaatatctaaacttcttttattttttttattatttaataaaattaattagatatagttttgctaaaataaattttatatatttaaaaataataattgaattgtattagtatttaatttgattattattatttaaattaataattaggtaataataattctaatataactaacaaacatgcattacataatatataaagaatatttctcttagttttttttttattttggaaaaaaaaaaatcgtataaaaaaatatagttttatatatgatagacatatttttataataattcactaattagtattgaaaaaatttattgtacactcttaagaaagtgtttaggaaaacgttttagtccacacgtataaaaaacaattgcaacaaaatattataccttattttcagtgttataactgtttgaatttttcttataattcaaaagatactctaaataacacttgaacatatacaattattaaaacgaattgaactaaaaaaaaaaaagctctcttatataaagaacgtactatagacttttactttagaaattacaaattattatgtaagagggtatgcatatcttgtaaaagcttcataaatttcacccaaaatatgtatatattttctaatctaagatttaatatgtatcatgtatgtatatatttaatttagaggtgtctttagttcatgattttttataagagaaatattaaaaagtattaggtgttaattagtatttttttacgtgttaatttggctaattaggatattttttcttcgaactttgacatgtatcaaatcatgtcttctaaatttttttgaccgttaaaaatt

SEQ ID NO: 392702 - DNA, 874 bp, Cannabis indica
  modified_base (77)..(77): a, c, t, g, unknown or other
ccctacgaataccactctaaacccccaaccgaattctaaattacataataataagtacgaatcaaacgaaaccaacngttagcacacaaaaacaaaaaaaaaaaaaaaaaaccaaacaaatatttgaaaccatacgaaaccaaaccaagaaaacttaaatgattcaaatcgaaatcataatcgaacaaaatcaataccaaaacacataaaataaaacccctcatatcattatgcaaaagaaaacgtttcaccaccaaaaaaaaaaaaatctatccatatatatataatagtaatgattataaacacaaagaccggaataattttgagatttaagcaaaaaaattaaaaaataataataaaaaacagagaaggaagaatataattaccgtaaattggccgggtctgcgatcgatgatgtccaatctagattcccttctttttcttctccgtatctctctctgtatattacacatatatatagagagatatttatagaattattattatatatattagtctttttttttctggaaattatatatattagttaatttcgttatattagagtgacgcactcacgctcttcccttcaactctttttctttacagcaaataatgacaattattttatttattattttgaaagatatatatttcaaattagaaataatatcccgttttcattcaaaagggaaaaaaattccttttttaaaaaaaaaaaatgtaaacagaagataggataataataattgatattagttatgaaaataataattgatatcagttctattcgaaaaataataataataataattgatatcagtttgttaaaaaaaataaaataaattgatatctgttattttatttttttttt

SEQ ID NO: 392703 - DNA, 1317 bp, Cannabis indica
actagacacctttacaacactcagggacggagccagaattaaattcttgggggttattattaaaaataagtatcgacaaaaaataacatttgtttagcaataaaagttggtactttagataaaagatctattcataaatcagagagaattttgaaagcaggataatcaacacatgattaaaattttaagggacacttaattaattaaaaataataggataaatctataatacgtacacctcttaaaaggcgtgttttgacatacttcctacttgttttgatatttaggagtttttaatttttttttcatgattgtgtatgttataattatttaggaccacttataaatttttaaaagatttcaaataatttgaagttattctgcgctacaaaagaaaaaatagttacttgtgcaataaatatttgaatcttatttttagtatttttggtaatgtgaactattttaaaaatttacaagttattctaaataactataatatacatgatataaaaggtataaaaggtatacttaaacaaccttttgaataatatactataatttttttaaaaataacatgcatatttgtagtaaaatttaaaaataatacactaaattttatttttcactctaattattattttctatataataacaagttattattaatttataaatatattattatataaattattataaaaataaaaaataaaataatttaacaattaagtataccactttctactttttttttcttcgactttcctttgtaatgactcatgagaaactataaattaatgcatatgatttttggtcattaactataaattatttttagaaattttgagggagccaaggccaccccaacgtactatacacctacacccgcccctgataacactcttgtatataacttaatacttttaggacactctttagaatacttagattacacttacttgtgcactagaattatcactcaactcaccatgcaccaccaaagaaccaactcccctatttatactactcaaaggatggtgcattattatgctagaatgttctaccgaattgtcaatttattatagcctaaaatattcttgaaacttcttatgactattaattctctatgattctagaaaattctataatattactaaaatgatagaaaattctagacacttatagagtaggtgttgatcttttaacacttcccctcaacactgactcttcatattgagttggtctctcagcttctgaaatctcgttctgttgagtcctttagtgaataagtctgctacttgatcttcgctcttcact

SEQ ID NO: 392704 - DNA, 912 bp, Cannabis indica
tccaaaatacacaagaaaatgacaaaatcaaaccaatcaaatgaacaaataccatgccactttgcaaaattttgggtattcaaaaagcaagaaaatgacaaaataccagaaaaaaaaataaataaaaattaaatattgacacttttcagggttagatactacaaaaaggaaaaagcgaccaaaaaaagacgtgttcttggggaccaattatatgattattacaaaattctcgattcttcaagacacataaaatgaaagaaaacaaaaattaaaatggcgaaattaaagttcagaacagaagaacaagaaatgacgttactttggtggtgtcgagccaaaccaaatcgaggggattgaaatcgagaggagagaaagggcaatccaaaattgaccaggcacgaagttgggtggaagcgaagcctggaattatgatccccgagagcttggagtagtcgccgtcaaactctcctcctcctccggcaacggcgacggcggtgaccaaggcgatgaagaggaatagaatagtgggtcctcgcattgggtctgtgagttatggagaagaagaagaagaagaaggggttttggtggttgtgagtatgagcaatgagcatgaatgaatggagctttggtctcttacagttatggccgctcaacactgacgacaataaatatatcatttttattttattttattttatttttatgaaaaggatttttttcactttttaacaacttttagttatttttcacacacttaaaaaaaaagggaattttatttacaccctaaaaattttaaaggcaccccattttgatattttttattttatataaaatttatatttttaattgtactaatttcttttaactttttctttcaattcatattcttaaaaaatatacctatccaacaaa

SEQ ID NO: 392705 - DNA, 798 bp, Cannabis indica
ttctttaccagctttagagaaaactttgtgtttccaattgttaaggtagccccacactttatcatgaaggtagtgaaaaacttgtataatttcagtacagttgtttcaatacactattccgttataaaacttggactttaagatacgtaaaaatttattaaaaaataaatatatatattttcacatgtgttgaaccctactaaattttgggcttgaaaattgtactgtataaactaaattggggaaatttgatgaatatgggaattgaaggtattgtttactttttttttatggcataaataaataacattatagggtgatggatttttttttttttgtttgacatttatataggtttttcttatgccatagtaagaaaaaagtggaaatctcatatttttaaaacaacaataagttttgccgggaaaattgccgaaaaaatcaatgtcgccagaaaagtcaacgtcgccggcaaaatcactggaaaagtcaccagaataaaatgtttaagatataactaaaaatataacttgttctattatgttacagaaccaattataattaaatataaataacagaaaataactcaagccaattataattaaaatagaaccggttctatgatagtgttataatgaataaaaacaattacacaaaataactcaaaccgattattaactaaaatagaaccggttatataacataatgaatacaaacaagtaacacgcaataactcaaactgattacaattaaaaattaacaaagaagaaatcaattcctaaaacactgaaatataaa

SEQ ID NO: 392706 - DNA, 839 bp, Cannabis indica
ctggcctattctgatgacctataacaatagattttttttcttcctttttctcattcattgaatttaatttggtcaaatatattgaaaagagattccacctcttaaaatatttactaatacctaacttgttataattaagctgatattagagcatgaccactatttttcttcctcatgcttattaattgaaattatagtccccttataataaatattcaaatattatgagtaaactgtttgaattttattttttgaaattttaaattatttaaaaaaattaaaaaatttgtgaaaaatccttattaactatattattatacatcgccgtgttaaaaaaagaaaatcaacttatttatataccaaacatactatataaattaacacacacacaaatccttattatggtagtgagaaacatttttctcattattaattaataaaataatattttatatatttttaagttttagccaagctttttttaattaaatattactttgatcaataataacaaaaaaataattttattaaaatgtaatttgtagtaacatattatcacaatttattgaatatatataatttacaaaacaattttgtaaaataataaatcaattatagttttgtttgtactcaatagatataggtttataaatatttaatcataatcaattataattttatttgactaaaaataaaattttgcctaccaagttaataaatagaagggatacaaacttaataactatacattaattttaaaagatagtactaattataaatataaagtggtgtagttataaataaaaagtactattacataataacatctatgatgtagc

SEQ ID NO: 392707 - DNA, 957 bp, Cannabis indica
tggtggcctgtaaaaaattgatttgctatgattttcataagattatttattattatttttttttagtacacatgttagttccttattgttatttcaatatagtgttgataattttttaataatactgatcttgcaatcaaaggtattgaaagcattcacagtaggttttgtgcttcctcagtgtgctcttgcaagaggtgttcatgtatatggttggagtagaatgtaggtatgctcgtagtttaatttgttgtattgattagagtttagtttagtgtattatagtatgttttatggtaacatttaaagtagcttttttcttaattaatttcaattagacactcatgtggtacatatttagattctgttgtttgtacagtttagtgaattttagtgtttgaatattagtgatgattggtctgaatggttgaaatatagtagggatattaaattgtcaaaattagcttcccaataccttatctctctcctcctcaactcccatttatcagaaaatttctgaaaatgttaaaaaatttggtaagagattgtgagtctgctttgaaattttaatttcaataatgtttattgatataaagatgtttgactcatcttaagagttcattggtcatttataataattaattcttatactaataaaataaatatgagcttcacttcatttgtagcaagtcttgagatttcatggtattgttgggtttgggtagttgtttttgttttcagcttgtagttatggcagtgcagagccaaaatgctggttttaggtaaattgatgttgttaatcaataaaattgagacacaatcaaaagatgtgaaatggtcaaaccatagttatgcccaaatattattcagaacaaatcctatttatatgacacatttctattatactcatatcattaataacagtaaaaagaataaaaaaaagcaatagcaaaagat

SEQ ID NO: 392708 - DNA, 562 bp, Cannabis indica
atttccatgaaccaaaatacttttatttgctatgagattattttaaaccctttatcatttttcattattttcattattagaaataaaatctataattgtgggagttgattttatgttaagaaagtatgcaaaatgcaaataatatattgagaaaaaaaatgtcacatctaaaattgttcttcaaatatgaaactcatattgaggtgacaaatttatgaagagatctcctttaagcataatctttttttcattaattttattatattttgaattttttgaatatgattttgaattctcacaatgttcagcccagtatatttgaattttattatttttaatgaatatgtattttagtaaataaaaaagtttaaaacgtaaaaaataaaaacaaaccatgttgatatatttttttaattttgttttgtttttgaaacttttagttaaatatgtaaaaatttctataatttatatgaatatgcatagaaggtaagttgaaaaatacctcttttattaatcaattaactaaatttgcctctaattttatatttatttgaaacatacc

SEQ ID NO: 392709 - DNA, 902 bp, Cannabis indica
gaagtgacttctctcaagtgagctgtcacactatgagagctggccatgtccgaattcgttaacttaaccgaaaggagggggatgccgaaggcaggactagtgattggagtgaagtcgtaacaaagtagccgtaatggaaggtgcggttagatcacctccttttcagtaagagctaatgcttgttgagattgtaattgagttgtctgtgagtagcctgatcctaacttgtgtattatcttctattaatttttctactttgttcattaataaactcgatttttttgttcatttcttagccactgttattacattttatttcttgctgaaatctttattaacaaggttcttgacgaggtttaatttccaacactacttgctaactaaacgtcaccttagtgttagttgaccgagttaggtacttcaattagttcttagtttagaaacctacataaccttagatgatcccattttgtgtaactaataaagaaataaaggattatacatttctctcgatttaagttcttaactgatttttggatattgttcttagtacaattgtgagaaacataaatagaatcaattgttttcccaacacaaatcatatcgacatacatgcaaatatatatgaagttcaagtactctaactctaaagattatttcattggttgagtaatcaaaaccaatgacatatatatttatttatatatatatatatatgcatcattatacatgtgagatatgtttcaacgaaaagcatggtcatagtcatgaaaatggaaggtcttgtggatgaaatgagaaagccactttgaagctacaaagcaaagtaatgctgtagaaaccatggcaatcttcaatgtttggccttgtttattagtcacaccaacatatccaatcatagc

SEQ ID NO: 392710 - DNA, 763 bp, Cannabis indica
aaataaaaattctttcttgttgaaattaaaataggaaaaagaattgaaagtaaatttctcattcatttatttttaattacaacctacgaaacaggaaatacaatctgacttttttatacaagttaatttctcaattgagagattggtacatgatatgaaatttgataataatctaaacgaaatttagaacttggaaggcatgatgtcttggacttggaaacctaatctctggaaggactcttttcttttctagagatctgaaggaaaataataaacaacaaaatatcaccataagaagcgaaataaaaataacaaacagtaagaatataacattattcaaatctcaaacctagaagatcatcaaagaaaaggaaaagaagaactttgtgtcactcaacccagaaaaaaaatctttaaaaaaaagagagcatctcgccactgttattcatatatatatacatatctctatatatataacacatacatctctatctccactatcatatattatcttcatcttttatatagatttataattatttctcttattctttaatataacacatttataactatttctctcatacttttcctaatttatagggttgctttaattctcaattgataattcttactaaatatattaaaattactatcattaaatggaaatgttaaatagatttttgttgcccctgaattcgcccaaaatacgtggaccagtcgaatagggacacgtggatcagataacttgtaaatatttgat

SEQ ID NO: 392711 - DNA, 512 bp, Cannabis indica
aaaaaaattaacacttcaaaccgtctattgcacgcataactcatttattttatattatatgaaagaggactgtttggacactatattttttttaatagaatgatacaaatttaattctaaaattattttaaaaaaaatatcacgtaaattgttcagaattatagtagctaattaggtaaaaccaatatttaaccacgaaactctgatccaagaacaccatgattaacagatcgcttgacaaaaattaaaaaaaaagattattcaaactataaagaatttgtctgcaatcagagattcagaacccaaaaacagaaggcataattattgaaacttcgaatagcttggattgtgatcaaactgtcttactccaccaccacatcttcacatattcacgacttgtctctttcaaccagctcaaaacctctttaaccccaatagccttggtgttaggctatttttagcctatgttatggatccgatttatgtgcattcttagctgtgttgggacggaa

SEQ ID NO: 392712 - DNA, 1029 bp, Cannabis indica
acatttgatgattttaaaacactttgtttgagattaagaattgaaaaaggatataacattggtaaaattgtttgaattcggagtgatcatggtaaggagtttgagaactcagtatatgatgataaatataagtctacaggtataactcatgaatttttagctcctaaaactcctcaacaaaatagagttgttgagaggaagaatcgaactttgcaagagacaacaagagttatgttaaataggaagaagctaacaaaacgtttgtggggagaggctataaacacaactttctatacaataaaccaaaaaatcttatgaaatcttgaaatgtaagtgtccaaatgtaagtcattttcatatctttgggtgtgtttgttatgttttaagatatcgggagcatattggaaaatttaatgctaaaagtcatgttggtgtgtttatttgatattccacaaatagtagagcctattgtgtttacaacatgagaactcaaactgttatggaatcagctaatgtggttgttgatgattttaaagatatttcagaattttccacaaaagttgagatagatagttttctggatactccactagatgtagcaaatgtagattctgatgcagcagacttgaattctgaagaagcaaatgtcaaatctattgctgcaaccgaagcatgagaatcagaacagcatgtctcacttcatccaaacatcattactgattctattcagaaggaacccagcaccagagtaaaactgaataatcctaaagatctcatctttggaaatcttgaagaaagcatggtaacaagaaaaaggtatgttaatttaattagatttctttgttttatctcacaattcgaacaaaaaaatgtgaaggaacccatgacgtatgaagaatggcttaatgatatgcaagacgaacttagtcagtttatttgcaataaggtttgcattttagttcaaagaccaaaggtatcaatgtgattggaacaagtagatctttaaaataaaagtgatgaatttggtac

SEQ ID NO: 392713 - DNA, 882 bp, Cannabis indica
ggttggcctaaaaataagtgatatatagttgtctagtttaccttgagagactgcagccaaaacataggtactaaataccgaaagcaagcatcacctttctaacagcggttcttggcaacttaataggctagctatatttcgcactccaagtgtctccttaattttccatatattttgattcattttgcctttcttttttgcatataaattagtgatgttcttgtttaccactgagaatttgagaggtaggccatggtttgcttgcattttcatgatgtgtgccttgtaatatcaaacatgtttgagtttattattgttacaaagttagcaagttcagtcagactgtagtttctcactcgagtttccatttcgaaattcagaaatttccagaaaattaggtatagaaaaaagttcacttgtgttttagaagtattttgctacctttttattctaggtttctcatctaatcctattaatgtgaggaaccagaaacgatagcgaatgatatgtaggacatgaacctcaattttgtttcaaaatcattgtcaacgagtccataagaagtgatcctatctttttgatcgagttcgggtagagaccaaaggtcttgagcgaccgatccggcagaacaactcaaaagataaagaagtatcgttaatttcttcatgctcgttccaagttctaagtaccatttgtacaaataagaatccccttcgttacatgatttcttcttcatatagatagatataggatctagggagcaattacttagaagtacattttgtgcaacagcccttcctatctgatagaaaaggatcccatgatcctgaaccgatcttacctgggatcgcaaatcccaagtttgtctatgaagagcagatc

SEQ ID NO: 392714 - DNA, 761 bp, Cannabis indica
taaaaaagttttaaattatttaaataactatattaaaaatacgctataacaaatactttaaagtactttttttgcgttttaaaatttctttaaaatttgctattcacactctatatttatataatattctaaatatattttattaattattttagttttaataattatttgtgcacgagaatatgtatatatattaatattatatgtttaaaataaataaaatatattaaaatttaaaatatgtaatgttttagtgatgtacttcaaaaaatttaacatatgttgtaatgtaataaaagtgtattttaaaatagaaaaattagagtttttaaaatatattttaaaagatagagtaaagaagttattaaaagtgcttttagactacatgtaaattttttattataaggatatttttttttcatacatatattaatttttaataggataagttatgtaaaaaaatataacaattaagaaatggtgttaaataattattgaatattgaggatgaaaagaaaataaataataaatgtaggtagggaaacaggcgctgcacatttttgttgaactaaatactctgaataatccactcactctccagtctccacacaaataaagaatatagaatatatattatatccatataaataataactatatctatatgtatatatatataacagagcagagccagagagagagagtccatacatatatatatatataaatacagtgtgagtgtgagtactgtttgtgtgttg

SEQ ID NO: 392715 - DNA, 1579 bp, Cannabis indica
cctgcgttgtttgattggtaaactaatttatatgtttaaattttattaagctcatgttgtaaattcaacacgggcactattgtgggatacttgtaatttgcatacacaaatgaagcacatagagcactttggcaatatttactagttcataatgaaatgaataacattaatgggtaatgtcatgaatgagaactaataattaaaaagacacattcatcgttcttcaattatttatttctccaagtttcataaaagtagacacgtgaattgattagtgactaatgatggaatcactttcctagtcttcattttctttactatctgttactatgtcattcaacaagtctaaaagagtgcgcattggttagtaattgggatgagatcaagaaaattatagcttagttaagagtaaaaagtacccttttgaggttagtcattagtgattcaagttctccatttttcaccaccacttcacggtgagtctctatgcttatttttctggtattgatgtttcaagttacaatgaaaattgtcatcactttcttgcttgatagtgtttgtggaaactttgaacacccatccaattttgtcaattaaataatagataatattatatgttgtaaggacttaaaaaataaaaaacaaaggggttgattagtatgcatgaaatgagtttttataaattccccatttgaatagtaaatcaaatgattaaaaccatatctacaaagtctatgccattcggatcatgacctcttggagtatagcctttgtgtctttataagttgtttctgcctgaagtatgtttctctatttaacagcagcatcaagctgtaagcaaatttcaaacaaaatatttcttaggaagctgtaatgtaaagaaccatcacaaacaaaaataaaataaaatgaataatgtgttcattttaatttgatgattatcttgtccacattatcaaataatctgttagccaaatctaggagaggttgcttgtcatcaactggtgcagcagtgattactttatcgaaattataatacatgaatgttgccttgatcttaataaacttttggacatagttcaatgtgtcttctccaatcaaatcttccataccaagaagatcaaaggcatattttcttagcctatacattcttcctttgagccctatatctgcaatgaagattctcttcttcagaaaagagggagtgtcggtgttctcattatcaatttctgtcataattagcattcaaaaagaggaagaaaaaaccaattacatcaatgactaatgtatagcctaaagattttgtgtactatacttactattattgacagaaggaagaggaatacgaccatctatccaaaaatcgttgtcttcagcgaaagagactgcattgcaagttttcccaacaagtgcaatggaggcaaggcctagtgctagccttcttgttgttagcagggtgtgttcttgagaatcattcttcttcttgcctagaaaggcaactatttctactccttttttggccctttggaggcttagaatgttagacatttatatgtataaactgaaatatatatgttta

SEQ ID NO: 392716 - DNA, 950 bp, Cannabis indica
tggctagctgacatacccgctaatacctttagagccgccaactctgctttacggctaagggcatcagctgcctgattgaaacgtcctgccttgtgctcgaagtagaagtcaaattctgccaagaattcctaccatcaggcttgcttgggggttatttttggctacatgaagaagtgactaacagcagtattgtctgtcttcactacaaacttcaaccccaacaagtagtgcctccacgtccgcaaacaatgaataactgccaggagctctttctcctgcaccatatacttcctttctgcctcggaaagcttgtagctctcaaaggccacagggtggccctcctatatgagtacccctcccaaagcataatttgacgcatctgtctttacttcaaagggtttgcatacatctggcagggctaatacatgatcttcaatcatggcttctttcagatttcgaaatgcttcttcgcacttatcagaccacgcccatataacacccttcttcaacaactctgttaagggtgccgctcttctcgaatagccctctacaaatcgcctatagtaattggctagaccgaggaaagagcgtagttgtttcacattggctggcgtcgtccactcttggatcgcccgcaccttttccaaatccattcggatcttcccgtgttctaagacatgactcaggaacttaatactttcttaagcaaatgagcatttctctcgctttacatacaactgttctttcctcaacttctaaaataccgtaggcaagtgttcccaatgctcttctaaagtggcattatagactacgatatcatccaggtacaccatcacgaacttatctaagtcttcatggaagacttcattcatgagtgtatagaatgtggctggcgcatttgtcaacccaaatggcatgacgaaaaactcaaatgtgttgggttttatgcc

SEQ ID NO: 392717 - DNA, 1057 bp, Cannabis indica
atataattaactttcataaacatgtctatccaaaaacacacataattaaaggttttctccactaaaatcataacactgtaaatagtgggcattcaactttgagatgatttgctgccttttatgttttttatattctaattattttattttttgttttgttttttttgacattaaattggttctctaatagtcactatgtcactttctccaccaagcctcaaaaagttactggctttgtggagtgtatcatcccttgtggtagtgaaatcagtttttctttatttgtaaattaatttatttattttggtcatgtgtatcaaaatttgacacctcattataaatattgttacatctttattataaaaaatgagattgtgcaccaaaaaattacacaccaggacataataataataatttttaaggagctcatatttacctaaactaagtaccatgcatacatcactatatgtaatattttagtatatatttttggttcacatattgttgtctgcaaaattggatgcgcacatgttaccatcctggaaaagaaattattcaaaaattggttttgagatggaatctcatatttttatatatggcttaatatttttacatttaatccatgtgaaataatattctcaaatattccccctcaagatagtggttatttttgctcaccaatcttgaattaccttatcacaagtcatctcatttgctcgcttatttttgttcgaatctcaagcgtttttgcaccatctgaatctcgcgcagctagctaatcatctggataggtttgaatcgaaagcccgctaggaatatgaccccgataccatgacaagaatcgtgaggttccatctcaaaaccaattggtgatgagtggagtagccatgttcttatatatggctcaatactcttacatttaatccatatgagataatgttctccaatagtgctagatgagagggaaccaccactactacaaaaaacttgataactctatggcatagagttattttttatgcttttaaactaaaagtattgtgagaagagtagtgaa

SEQ ID NO: 392718 - DNA, 817 bp, Cannabis indica
tttttttcgtgctttcttgtatctgtagaagatagttaaatcataaaacattaatgaaccattttataaccaatctatcacatatgattaccaaaattaaaatacaccatttttatatctctaaaaccaatcgaaaattattttacagtatatgaatagttaaccttgccgttaaaaaccagatgaatacaaataaaacacactcaatgaaacacattactgccccttggagactcaatgccttgaagcttcaaatatgttctccgacaccgaaatcgaacttggcaaacgtgttcaggcctcatcagagtgagggacgccatttcggtgagagttgaggagcagagcgattcaatagttgtggataatctcgacatggagtgtatcgaccatggtaactccttctcctcaagcgacgacaagcctttggtttacatttacaagatgcccaaatttagctcaagaaccctaataattcctctgtgtgtttctatatttaccccaaaaacccaaaccgttacctaacaaaattgaaattaagggtttcaggaaaaataaccttggagggggaaaatggcgagcgaagatcagcgtgcaggagtgaagatcgtcagcgacccgaaggagttctattgtagatcgattgagcctcttaaataattaaggtttccgaagggggtttcaccgttgtaggatctagaagagtatggaagagtgaaaaagactaatttagtgtgcccagacaatacaaagaagatgaagagaataacatggttcttgaaaaaaacaaagaaaaaaaaagaaaaagatgaagaag

SEQ ID NO: 392719 - DNA, 941 bp, Cannabis indica
tattattattattataatagaaagttaataactcgcaaatttaaccacttcaactttaaaattattagatttttttcatcaaagaaaacgaccgtggactttgattgttagttagcattgtctgtcatagtagtattccccgtctattccaactttgcaaactgagaatggtataagtgctccacaacggccagcgttaatggcaatctagttcttaatggcgttatcgacgttaatggcaatctagttcttaatggcattaccaacgttattagctaagaatgaatgaaagagaaaagcttggctcataaagaaagaaaaaagaataaaaaagagaaagactagctaatttaaggaagagttaaaaaatacaaaaaaaaaagaaaaaaaaagaagaagaagaaaactaatcaatagttaagagactagctaacaatgagaatataagatataggtgttaagtatgagttgtaaattttaaggtgtcaaaatttgattagtgagactgagaataagacatattaatgggacaatctcttttccatcattataacaagggcattgaattaatggaaaaaaatgattcaataattggaaataaacattggtgggactgggagaaaacaaaacattgcagagcacgatattattatgaatatagtatgggtctcgtgtgatacatttaagagaaatagtaccctcattattctttctattctatcatttacgggtgtgtttggaattaactatataattattaggtaaggtaattactatggtggtaattatacagtttagtaattacaccatattttgaaatgcaaggtgtgtttggatatgaggtggtaattacatatgaattcataatatcttgtttggcaaaatagttagtaattatatgggaaaataatattttttagtagctaatgtttaatatggaa

SEQ ID NO: 392720 - DNA, 1229 bp, Cannabis indica
agtgtaactaattgggtgacatccatagttattaagaatttatttaactgtgggtcctagtattagaaatgggcattagagttataatttctcaattgtagagattttattaaactctacatgtattatttgtattatatatgaattaagctatttttatgattttacagacacaaaaaatgcgatggatgactattttaatcacatgggtaagcctagaacctttctcttagtgagatatatattggagaaaatagaataccgagtttgagcggggttgtggtttttgaccattttaaccctaggcttgaattagcttaagttaaagcaccatgggcattttgataatttggcaagtggggagaataggtggctgcttagggaattcacacctagcaaaggttaattcagcatgaattaattaaattagaaacctttattcacttaagaaaaataagaaattaaggaaaaagcaaaattaagagaaattccatctctcgttcactctctttgttcggccaacccaaaccagaaggaaacaagccctaatttttgtattttctgagtattgagcttagattcaagtgattttgaagcaaaggtaacccctagaactcttaattcttgtttctgaagctttggttttggtttgaatgtataattttgtagtataggggttgttagggtttgtttgtcttggaatttattttctaaggttaatttgagttagaatgttgttctagcagctggtttagggtcgtgggtgatggatgcaaaagtttgactttgaaaactcaagcttggttcatccataacatgttttaattatgtatgtctttctggttttctgttgattgggatatattagggaaggtcattataggagttctggaaaatttggtggaatttgtacatgttttaagtaggtttagaattgtttggggaaacctggtgcaaagcggtcaaccggtttgccaggatctgtaaaatcgattaacgagttttggcagattccccgaacaattgatttcctcgattcgtgtctatttcagagccttggttgggtgattccctgttttgtagggtattatacttaagttagtaatagcagaaccttaagttggaggttcagatttcccggaataggttttgggattttatttactcggttttattatgtgattagggcatccatccagcacgagacttttcgtttaggtcggccaact

SEQ ID NO: 392721 - DNA, 1058 bp, Cannabis indica
gaaaatatattaaagaaaacattactatatatttaagtataaaggtgtggagagactctgaaaacattaggtccatattattattgttattatggatatataaagtttaaattaagaggcaacgtggagtaccaacattatgcatgaatttggaagtcaatcaatgatggaaaattgttgatgtttctctttaattatgagtacccaagttgaccatccatctttcaaatcaaagaattaatccactcagtttgcattgctaatcatattatttcagtaccaatgaaataatcatcaatgaaccgggaaaaaacagttcaaaggttgattcataatcaaaacccaacaatctcttttagctatctatatataattatgataataaaattgaataatcatttggattgctgttttttctcaattatgacacaaacttttttttaataaataaataaataaataaccaaaagatagcactatcactcacaaagattaagttgtccgatcactttacgactcaaaatgttgttgatagaagtttaataataactaataaaagaaataagctcatcatatctagttttttttttttttttcaatgaaaggtaattattattagacctatacaaaaattagtaatttaggtcactaaactcttgctttctctaaaaagagaaatcatgagcaataatatttgcagagcgattacaaaataaaaacttaaaacattaagccttttactaagtaataaaatatcactcaagactgaatcataagttgtcaaacaagaatctatattatttaaaagtatcatgacagcttaacaatgtgactctaccgcaatgttacaatatcctagccgattacacaattaaagttcaaccaataaagccattgctttcgccacaagaggagacaacaatgccactgtcgggtacgctgctgaagctacacatctaccatctgttagacatttatatgtataaactgaaatatatatgtttaagtataaagtgcggaattaatcaaacatatatgcactataatttaaggatcga

SEQ ID NO: 392722 - DNA, 658 bp, Cannabis indica
ggttttttttttttttgttttccttattatcttggtgacactctattagtggcttctccttaataggtctaaatctacattgttaaacattatacccctttttggtactctgtaacaaattctcaaaaatcattactttgagtagtcttttaagtccatggatttatctgagttttcttatccaaccatttttattattattattattattatttatgattgttgttgtgatcattgccctcttttttatgttttcattttgttctggtgacacatggactcatgggacaaacaaaaggtgcctccctttgagtgaaatgataacacacttatatatttgtttttgtattcttctttgttgttgttttttcagtatgaaaagaacactggcaaggtataataaatgtgtagattatcctgaaggtgctattgtagacaaaacagaggtaattttgactcttttattatttgttattatcatttaaagtttgagaatatgggcaaaagttcttatacataattttgcttcttattacttggatataaatgaaaccaaattttatatttggaatgtacttaaaaagtcattgaataatggttaagagagaaaccacttgtattaatggttatttatcatatctattgatataattttttt

SEQ ID NO: 392723 - DNA, 1348 bp, Cannabis indica
tgaagatcgtgtacttgagtttctcattggattaatgaatcctacagtagtgcacgatcacagatcttgatgcaagatccttttcctagcatcaacaaggcctttgctttattttttcaagaggaaaggcagagagcaatcacatcaaataatgttgaaattgaaaatattgttgcttcatctttgaactgaaatcctagacaatttgcaggaagtgttcaaccacacaaacctaaaatattgtgtcatcacttcgagatgactggtcatataatgactaagtgttataggttacatggttatcctcctggacacaaattatatgggagatttctcaacaggaatgcaccagaaccaggcaagacacctattgctaatcttactaatgcagaagaaaatggagaggcaagtggcaatagaaatagaaatggcaatggaaatggtaaacttgtggagcaagatctcattgctacttttgcccaatgccaaaggctcatgagcattctgtctcaaaaagttggtgaacaacacacctcagtccaaaccggccagtcatctgtgtcacaaatatcttgtaaaattccctcccatctgcctttttcttgggtgattgacgctggtactactcaccatgtgtgttataatctatctttattcaataatacctatacagagaagcccatttcttttgtcaatcttcctaatgggaattcagttagatttgtctgtcttggaactgttataatctccaaaaatctcattctaagaaatgtcctatatgtactagatttaaatttcaatatgctttttattccttctttacttgaatctgctgaatgcattttcacttttcattgtgatcactgtgtgattcaggacatttcgaagacccatttgattgggatggctaaaagagaatggaaacacttttacttgaagccacctaataagaataacaaccttcttgtcttttctttagattctaattccaaaatcaataatgatacagtttggcattatagattggggcatccctcttgtattaaactacattcattgaataaagtgttaaaatttcagaaccaatcttgtcctaactttcatcgttctatttgtcactaggaaaaacaaagaaagttacttttgtttctaatcataacattgccaaagaatattttaatattgagcatattgatatatgggaaccatataatactcttaccattgggggacacaagtatttcattaccattgtggatgaccattctaggtatacttgggtgtatttttgttcggttttgtaccctaaataaaatccatttcaatataatcagatttagttattaat

SEQ ID NO: 392724 - DNA, 1400 bp, Cannabis indica
atttataaaaaaaatcagtttaaatgggttgataaattaactaaaattatacataattctttatataaatgaattaaacgggtctggtcaaatcgaccaattttatttataaaaaaaatcaatttaacttttagatatgaataataaataagtcgtttgaaatatatttataatcaacaaagaagctagcttaaaactgtatgagagcgaatgcataaaataaaaaattatttatttttatttttaattataatttacatgtaattttttaaaaataaaataatttagcttcatcattacttatatttaagtcttgacacaacacaaaaaactatccctaaacacaacttatcatcccttatacattgcaccttgaagaaattaggcagatgggacctacatgttgtttattccttttttgggtttaaatgtttttattttagtaacataatactaaatacacattaatacttcttgatcattaaatggccacactataatgtttactagttataaaaaatagaaaactcttttctctttgtccactattttttttctttttcttttaatggaaaatgcagctttattaaccattaaaattcactattctttttttttttaataaaaaaaaacccacaaatttcctatgagaatgatctgaatttgtggctgatatttttgtcctactcatgtaatttaatttaatgttccttcaagctttgaaactttggtattataataattattataaaagctccaagaaaatatgataatttaagaataaataaataaataaagattgttagatttaattgttttttttgttcaaatttcattcaattttattaatacgacgattatatattaaattgtgttctaaattttaatatttatcaaattatgtctcttgaattttaacatgtaataaattgtgctcctaaaatttttatcacgttagattttatttaataaaattaaataaaaatttttaaatttaataatctcaatagtttaataaaaacttttaacgacttaaaaaattccaaaaataatttaatatatgtcaaaatttaataaaaaaaaaaaccaaaattagccataaataactaaataattattttaaaaaatatatggattaaattataaacataaacaacatatttagaaccatacatttatagatacaaatacaacaatgaattgaaagtatgaagtatcagatcccataatgctttactacttaacactacactacactacagtctctaatggcttctgtgtatagtgctgcattcactcatgactgcccatttctcgtgaagcttattacctcacaaagaaaggaatttctttctcaccctcttaactatcagacccacaaatctctctctctctctctc

SEQ ID NO: 392725 - DNA, 1437 bp, Cannabis indica
atttcttacatctcccattataactaacaccactatgccctctcaatctgctgcaaatgctactatgccatccacaacaaatccacctactgctgtgagaaatgttgaaccagtggccacttctgctgcatcagcatctccgtctgtccctactactgatgttcagcacaccactacaatccctgctatacctgtgctagttctcacatgtgttgatcctatacctgaccacagaacccgtgtcaatgatcccatacagcagccttatactgaccctcacaccaccaacccaattcaccagacttccacgaccaacatacatcaaatgcagaccaggtctaaattgggcatacacaaaccaaaagcctatcactctactctacatcctttacccgaatccaccctctttaaagttctaacaacactaaaacaggccttaccaacatatggcttgcttcaatgcagaaagaggacactactctcaagaaaaatcacacctggacacttgttctttactcaccagacatgaatcttgtgagaaataagtgggtacatcgtattaaactcaatgcggatggctcaactgataaattcaaatcgaggttagtggtaaagggatattctcaaactccaagaattgactacacagagacatttagccctgttgtcaagcccacaacagtgagaacattactcaccttggttgtctctaacaattgggacatcactcaattagatgtctccaatgcttttctcaatggcacactaaaagaatcagtttttatgactcaacctcctggatttgtagatcccaactatcctactcatgtatgcaaattgcataaggccatctatggtcttaaacaagctcctcgagcttggaacgaaaactaaaattcactctctgcagcaaaggtttttcctgttccaggtctaacaactctctctatttctctggttcaggtgacaaacaaatacttctcctggtgtatgtcgacgatatcttaattacaggtaccaacaagtcattaatctcaaacatggttcaacatctcaacaaggaatttgatgttaaagacttaggacctctccatttctttctcgggattgaagtgcagagaacttcagctgggatgcatctatctcagtcaaaatatattgttgaaattctcagcaaggttaagatggacggagcaaagccaaatccaagccacaccagttcagctctcaagctatctttgtctattggtgaccctttttcaaatcctacactctatcgaagtaccttgagagcactacaataccttacccttactagacctgacataacattcattgtcaacaaactaagtcaatttatacacatgctcctaacactacacactgggatgcctttaagggcccgtttggtacgcatgactggattggattagacag

SEQ ID NO: 392726 - DNA, 628 bp, Cannabis indica
aaaaatttagatcataattacgtttgtaacgagtgaagagggttgttaaagagaatgtgtgtgtttgatcacatctctctcaagtgaattgatttgtaaggtgcaagacacaattgttgatgagctcagctcttgtattctcctctgtgttcctccattattcaagatcgaatgaagcttgaccaaaggacaattcttcttgggaaatagtcaccacaaaaagggtataataaacttcgttaaaccttgtctctattttatttactttattctgcatttattttttgtttatgtcattgtttgattcaaccattctagttcttcaattcttgttttattttgatcattgataggtattaattttccaaaaaaaaaaaaaaatcatatcatagcttcatggttagaccgaggattcaagaatcaagttatgaagtttcaagaatgactactaccatatatatgaagtagataagtttgagggtctaaatgtctttgggttatggagaattaagatgaaagcacttcttgtgcatcagagacttgcacatgaaatcacggtgactagttctaaggaaggagaagaagttaagaaggtttctaaagagatcgagtgttgggttttatgccc

SEQ ID NO: 392727 - DNA, 1528 bp, Cannabis indica
gaacatctaaaccgtagacaaccggacttgcacgagcacttgaactgcaatgatccaaatctccgagactggttgaatcaaaatgtaagtctctagcaacaagatgagcaacagcctatggatctgatttaattaagagtaatacagatagaagacaagtttaggcgataccgagatggaaaatataggaaattattaggatgtgattcagatgaagagacatatccatttcattgtgttatattaaattatcaattcccttaaggattcaagaactcacatgtcgcgcagtatgatgggacaaatgatcttgtggcacacctgaataattctaacacaataatgcgagcaagcaatgtttctaacaacttgcgttgcattttatttccaacttctctgacgggagtagcgagcaattggtttgataaattcaccaaccattccattacctcctgggaataactatctaaggatttcaagaaataatttcaggctgggagggacagaaggctaaaggcattctcactgactaacatcaagcaacaactgaagaatctctaaaggcttgcctgagtcgcttcagtacgacatcagcaaaagtgagaaatttgaatgatagtattcagatgacaaccctctagactggaataataactgatttatcaatcgtaggaagagaactatgggatgatctatagggtcactgtcaaaaatattaatgaaattaatgaaagagcattaatctttgtgcggaaggaagaggcacgaaacgagataaaaattctcaaatctggctcaagagacaaacccaacattagtactgcaacaacgaatgctgtaacaataaaagcaagaaattcaaaccacaatgggttgaatggaaagaggaaagacaagttaagaattcgtcaaaggacaagagaaagtagaagaaacacgagaagtatattttgatatacttagtatatatggacctaaacgaaactcgtgatatcatttatctcgatggtaattagctagttcacttggagtgttattgatctcaatcttgtggagagttctctagagttatgttctccaagacttcaatcttcaagtgaacttttatgatgagagagtgagagttcgggagaatcaaaatcgggggctattatgggtttaaaatctcttaacccaaggtacacctcatcctaaccataatcgagttaagtttaaaatacaaaacgataataaaataacatttcaaacaaaacgataataaaataattaacatttcaaacaaaatatctaaaaaatgataattgctaaagatattcactattcacacgtgctagcttgtttcgtcataaagagcacattaatattgatgaagagcacatgccgagatcatgatgttggtgagtcgtgaggagcacgtgttaaggtgaggaatatctttgagacaaggccgagatgatgcatgtaaagactgcatatgattaataccttgaattattaaataattagggtttatgtatgagattttatt

SEQ ID NO: 392728 - DNA, 588 bp, Cannabis indica
tatatatatatatcatataaattaaaaagagaaaaacatacaaatgtatctgaggtgatccttggttgtgaaattggcttcaaaatgtaatgaaaagcattacaaagaccagcaattaagaaaaatcccaaaagattaatagccactttggtgaatagctcagtgagtctccctctgcattggctatctccaaatgaaaagcttccaaagtcattaatggagcttgaattactataagccattatttaaatataaataaatataaatatatattatatttcttttcttattacacattcataataataatctcaaacatcatcatcaatcatcaaaaattctctgtcttttctctctttatgttttcttttgtttttcctatgatctttctcttttcttttctcttgagaaaattaattgaagaaataataattaattaattaattaattaagagtttgaccttttcttattaagtaattgaagttaattaattggttattgttcttcttttgttattagtggctgtgaatgattgaggtgtttgaggagaatagatggttattctatctcataataataataataat

SEQ ID NO: 392729 - DNA, 1579 bp, Cannabis indica
tatggttaggtgaccatacctagcatgattacatttaaattttgtattagagaaaacaaatcaatttcaaagctaaaaaatatttgtatttgacttgacagagaataaaagaacctcgttgatttttcttgactctccactttggtgcatcctcttgtataggcatgattttatatgtataaatgtatcttaagaatgactattgatactcataatttggtcttaagtaatttaggaggattagtatattatggtgatagtaattaggaaaaacttgagataaatatgtatttatatagagatcataatattattatttgtaaactaaatggtcaaaatttatgatattttgcatttaagaaaatacaatatcaaaagtcacttatataccaattataatatagtaataatagagattatataatagtgtaagttatacaaagtaatataataatagagagtagataatagtgtaagttatagaaatgaaaaaacacattaatcatttgataatatataagaaattataaataaataagaaaaattaaaaaattgagaaatcaaagaagagagtgaaaaactcatacaaattgccacctcaactccttaatatttttctttatatatatactaaggaaataagtcgcgctttgcacgggtttgacccaactttaataatatttggaaatttttatttatttttgtaccatgagctgtatattttgtaatatattaatattttgatgtgtatattataaataaagtatcaattttgaaattagaaatataatttgctattttcaaatatgtaaaaagaggtaaactatgttaagttacttggattataatatattagtaaacatagtgcattagtaattacataagttacttatattataatatttagtaattacttaagttacatattggtataataacggtttttacataataaatatgtaatatatataaaattaattagtgaattagtaattacataggtttaaaaaattgagagaaaagaataacataaaactctataaacttattcatgtttgttccatgaaaaactacttgcaacatataactcaataaataaaaatatattttcataattgaatatatatatatatataaacataaaaatagagattaaatgatatattaagaagaaaataaaaaaataaataaacattagattcaataaattcagggaaccataccttatggcatgattatattaaaaatttattgattttttacaatagagaaaataaattaatttcaaggctaaggatttctaatcaataaaataatatatgtgtaaatatatataaataaaattgattagtgatttagtatttacatagattacttagttataatatatctaataataattaaaatattaagaagaaaaaaaaataacatagaactcaaggtagaaaatcaatccatgtttgtttattgaaaaactacctacaatatagaactcaattaataaaaatacattttcataattaatatatatatttatatatatatatataagcaataaaatggagatttaaattatatc

SEQ ID NO: 392730 - DNA, 562 bp, Cannabis indica
tttcatttttattttgtgtttttgtttacttttgtatttacttatggttagggccaggctacctctaggttaaagcgggttaggtttatacttagggcctactgatcttaaggattcaaataaaaaaatatcttttaataaaaataaatatatttttaagaattttaaaagtatcatgtatgttcgaaaaatttatttttcctaaaattcaaaataactcagggccgatcttatttttaactttgtgagtgatatccaagacagtttggaataccatcacttatttgtaagatctcttaaaagagagtttttttcttcttctctagaagtgcttgttccaaagaaaggtgtggtcgagaacttgtcaacaaaaattaaagcaaaaactttacattatagcaatattattcatagtttaatttctttttcattattttgtttttatatttttctaatacacaacataggtatagaaaaatgattttctcttatttccaatataataaagaaataattatataaaaaactaatttttatattttttacgtttaaagtttttctt

SEQ ID NO: 392731 - DNA, 1806 bp, Cannabis indica
tatatatatatatatctcttcttcgtgctctgaagctcagatgagtcacattagaaaaccccgagtcgagaactccagtagcccatctctctcattctctcttgctcaaactctcttcctctctatctctgtctcgatgcaaccacgaccaaggccatggtggccgtccatggtcgtcgatggtccaagcataccatagaatcgagatcccaaatctcgaaccctgaagtagtggaggattaggcctattttggtataacttttagttcgatttttgttgattttgtttgataaatttttgtatttagcaactatatttttggattttgttgtatattgggtttactgtattctttattttgtatcggctgtgaaattgataaaatgttatgagaattgtatattttttatgtattttaataggtttttaaaaaagggaaacattcattttacagatatttcaaaatgactaaagcttatttttaacaattttttttcttttcaaaaataccctttttagtgtcggttaaaaacttatacttataccaattagtcttgattttgaacatacactaaaaggagaaatatatatgtacactttaagtgtcagttataaacaaaatcagtactcattcatctcgatttataaccgacacttaaactctaactttttgtgactgtagaacaagtgtcgattctatgaaccgacattaaaagtataagtgtcagtttagaactgacaccaaaagtatactttgtagcagtgtaattttgctatagatattatttttaaattcaaatattttttttaaaattaaatatcttatttaaattaactatctaaaaactgattcagaaaatctcttaaccatttgacagatcatgtcaaccacctagagagaattttctcaatcattttgaaagaatatctcaaccataatacatatctataattaacttttaaattcaaattttaataaatatttatttttttaattaattaatcaaaaaataaactcaatgggacccattacttgtagtagacacttactgtgtaagaatacagtgtaggtgccaccccttgtaataatgcaaggtggcgccaaatgtcatcttgatcttctcttgctctgacaattttttatcttcccaatttatctagataataaatttaaattattattaattttaaaaatacataattactattttgtaagaggaaaataaatttctttaagctttaatttgtattatttttacccatgactatgaactcataatactaagctctaataaattatattatttattgactatgaactcataatactaagctctaataaattatattgtttatggagtcttatctcaaataatcatatttattaattttattatttttccagtataaatatagaattacactttatgggctcgtttggtacgcagtataagggtcgtattgtattaaataataaataacattatgtttggataaagtaatgtattgtattaattattacaactaaaatttttaatacaatatttgttgtattatttaatacataacaaacagtttgtattagcttgtattataatatttacaaataagttaaggtcaacaccaatctccgacctggacccgaacccgaaattgggactgggacccgtagttggtgttggggtcgagtgtattgaaaatatattataactttacacaatctattaatacaagtcaaaaccatacatagtattgtattggaacgttgtattaagttgtattgtattttattgtattatattgaa

SEQ ID NO: 392732 - DNA, 1284 bp, Cannabis indica
atttaaaaataacatttaatttaattatcattatgagagtaacttgtaattaaatcggtcagttgattgaatacacaccctacttaatatataagtaaacaaggaccaaaaaacaaaatttatgatttcattgtagatttactcctctttttgaaaatatgtgattagtaatgatagaaacaatttaatcattgatattattatttttctttagtgcttgcttgctactgctagcatatatataaatatatatatatatttatatatataagtgtgatcatctcttatggagtttattgtttccttctttcttattagtttattcttttttgatttgacacatacaaggttatgttacatgttttactctttatataaatataaattaacaaatgaaatgtacagaaatgtctagatcatatatatataaatatatatatatattagtgggattcaatcgtgtgtttcataaaatccgtaaaatacgcgtagtcatgtcaaataagcatgcccccgcggccacgtacggtggtcggagcactttcacttatatatacattttatatatatattataatcaatcacacatatatatatattatatatataagcctctcctattggaaaaccaaataatattcatgataatgtacggctcttacctatatatatctacagctcatatcatcattaacatgttatatatatacttgatgttattgatattatatatatatctgttatatatatataagtattttcacgatcaacttgcaagaacaatcatgctgtatagtactattttgccaaagacaaggtcaatatatatatatataattcagtggccatgagtttctgttaaccctagctcgtctggttatattgtgatcatgagtttataaagttttttgtgttgtgaccaatgttagggcaaatataattcggaccctgtatgtttttaaatgatataaattaattattaaaaaattaaatttaataataatataatctgacttaattaaaggtatatatattatgattagattattgattatatttttttaaaaaaaattactttagctataactatttttggtctctaagactatcttggtagtaggactttgttcattatcttgtttatttttaggacgttgagagtattttaattggttcaatttatgttattaattatataactatcttgtccaaggtcaaattggaatctcatgtttttattgcttcatgatttactgtgcaattatttattacgattgttatcgc

SEQ ID NO: 392733 - DNA, 1785 bp, Cannabis indica
aacaccaagttcattatggagaaaaataaatggaaacacaagggaaatcccctccccttgataaagacttggctaaaaattctaacctttcttgctaaatcatccacatatgagttaaaactacgtttcacaaagaaaacattacaactactgaaacttttaattaaatctaaaaccaacagagagagacattcaaaaaggtccaatttgggatacatctatgattctgtaaagcttgaaccaccatttgcgaattggagagaattttaatctccatctcaaacttttaattaaatctaaaactaacagagagacattcaaaaaggtccaatttgggatacatctacgattctgtagagcttgaaccaccatttgcgaattggagagaattttaatctccatctcaaacttttaattaaatctaaaactaacagagagacattcaaaaaggtccaatttgggatacatctacgattctgtagagtcttgaaccaccatttgcgaattggagagaattttaatctccatctgttaattttatatttagcatctttaaattgataaaaatattttataatttaattatttattttcggttgagttgttttatttgtttctaaaattttatttttatattgatataattatataattaaggtagtgttatactcatatctcgagcaataatatagtgttgacacgtgtaaggaagttggaatatgaaccagcccaaattataaaataataaatgcattcaaacaactcgtcttggaaagtacaattagtagaaatatttgaacattcaaactcacattttttaaagataatggcgagccatgaataatatctattgactgatgagaccagcgagatgaacgatataagcaaaaaaaatgtccatctcgagatacacgaaatacataataaaatgacaatgtttgaaaaatgtataatgaattattcaaagagctcgtagcgcattgacccacatactcgtgagtatgttgaaaggctaaaaataacatttcgaatatggttcatctcataattggcatactctgataaacgtttcacgtttgcctcatttaatatttatggaagaatacaagaagtactacttaaaatatacttaggcaatgacaatccttttttagcgtcttgaagagattggtgcattgtgagaagaataaggtatagtctgcataaacgcttacagataaagttttaagagcgattatgagtagttatttttcattatctcatgtgatgtaaatgtgaaacatggagattgtccatgtttcacgaacgattacaaaggataagatcttaagggaataactgtcaccctaaattcttataaataggggaggaacccaagaaatacgggacgacaaatttgagaaaaagagagaactataccaatctttcattgtattctgaatatcatttattaattccaaaattagatagacttgtggactatgaagaattaacttttaaaccacgttaaaaattctcttgtcatttattattattattttttttctattacacttcatttaattcctgagtgcatatattacaaaaatgcttatttattagttaaaatatatattaacaagtaggaaatatgactagcttttctataaatggaaagtgaatcataagcggtaagtttgatgacttaataatttttatctatccagctgtgtatatctgatcttttgtgatatttctaaaatgtttaatcagatttcttgtgaagaaaactgaagcaagactttc

SEQ ID NO: 392734 - DNA, 873 bp, Cannabis indica
ccatctctatgttccacatataacttctaatacctaacaacataaagaaaacaaatattatctccatccctcctactccccatttcttctacactctccatccatcctactctctttccttcttaccaaacattgtaagaacagagagaatcgaaagagagaatcaacagagaaagagattgaatgcaatgatttctgtacattgatctgagccaaagctcttagtataaatacaatgttcataacagaaaataacagaacaaaactatacagctgtacaaactaactctctaacagtataacaaccatcctaactgtcactgatttcagtgctaacaccccccccccctcaaacttagcctagatagaaaatctaagctaagtttgtcacgaagatacaaaaatctggtgctagacaatgcttttgttaggatgtcagcaatttggtcacaagctggagtgtgtttgacaatcaattgcttgttgatcacacgttctcgaacaaaatagaggtccaattcaatgtgcttggtgcgagaatgcatgatcggattagcagccattaagacagcactttgattgtcacaccaaatcacaggaagctgtttgagatgaacaccaatctcagtgagtaaggcttgaatccaaatcaagtctgctgtagcatgagcaaggcttctatactctgcttcagaactagaccgagagactgttttctgcttcttagaggagcaggagacaatgttgggatccaaaaacatacaaaaaccagatgtggatcttcgatcatcgggatccgaagcccaatcagcatcacaaaaccctgtcaaggtaagagtagaagcagatttgaggtgcaaacctgttgggttt

SEQ ID NO: 392735 - DNA, 2241 bp, Cannabis indica
tccggttgcctggtgggtcgacccggattctccgctgtgggaaatgacgattctgtccattttccacgcggtgacctggccgtcggctccgccgtggttagcctcgtgtcctttttcttcgcctgataataacaactctgagcctctccttttatttatttatttctcttcatattaattttttagtttcttttaatatttattttgggtgaattaataattagttaaataataaatttgtgtttattgctgacaatttatttaaaaacgacaagtttaaggaacaacgataaccaatttttgacaaggaacggaaaacgacaatattgagaaaacagacaaacaaaagcaaagaatataaaacgataggtaatagaaaagtgtaggtgatgatattattgactgttatctgttaataataatattagatgtctcctcctatcctcaatcaagtaaaaagcaatttcattaaaaaaatcaattaaaatactaactcaattaaatgatactttatatatttaaaatataattaataatatctctaatagactaatacatatgcaacttatccaccttttgttatggcaaaaaacaaatgtgctctgagtatggctttttaccaaggcttctgcctctctatcggttattgtctctactttatgtagaaagaagggaaggaaaattgtcctcctaatggcaacccaatgagacaaccagatggttttcttgacaatgcagcggaggctgaagctcaaccctatgatcaatcatgaaaatttgtttagttttttttttttttttgagtataatgaaaattgttagttggaatgtgtgttacttggggaatccaagggcattttgtcatttctgtttgcttgttaaagagtaatctccacgtgtacttttttttttagtagaaactaagttaggtcttaatgtaatttctctcttttgtcaaattttaaatttcaataatggacttgaagtccttagaataagtttaggagggggttgatgttgctgtggaaaaatgtagatgtatgtcttttaaattttaatgcaaatattttttattattatattgcctttgcaaataacacaagatagcactttaatgtattttatggagccccttctatctagcaaagaattcatacttggactcttttgaaaagacttaaggatattgcacctctatctccttcactagttataggagacttcaataaaatcctatcaaatcaaaataaattgggagatgctttgcgcaacgaaatacaaatggagcattttagaaatactcttgataactgtcatttaaacgaacaattgtttgagggagaccccttcacttgggttaaaggaagacactcggtggacaccattaaagagagattagattggtactttattaatgaccattggagttcaaagtttgatcctatcaccactcaacatttagactactacaactccaaccatagagctttattggtcaatgtaaacccgaaagatgcagacattcatcaacaaagaagtcgaactaggttcaaatttgagcaaatttggttacaacatgaagaaactgccaacattatttagcaacaatggctgtttgctggttcggggtctgtgatggagagttttttgaaaaaattaaaggcttgtgcttcatctctataacgatggaatatctcaaaatttagtaatttcaaaaaagagatcttaaatatacagcaataagtcaaagggttgaaaaaggctactgctagaactactccaatcatggatgagttgaaaaaaatcagagagtattcttgatgtctcttgacataagaggagatgtattggtagcagagatctcgtgtgaattggcttcaaagtggtgatcaaaacatcaagttctttcacgctcatgcttcatcacgcaaggcagggaacaaaatttcttttgtcacggataacaatggtaccaaagttacttcgaagaatggtatgaccactattatttctgagtattttgttgatcttttctctacttctacagtggatttggaggctttggagttagtcacaacaataattccaagtaatattacaacagatattaatgagttcctcaccctacctttttctgtagccgaggttcttactgttgggttttgtgctgtaaataaaacccatttcaatataatcacatttacttattaataaagatcagaaataacattttatgttgca

SEQ ID NO: 392736 - DNA, 716 bp, Cannabis indica
atatatatatatatattgcaatatcccataatatttggttttgttttcaaatttagagtactgtctaaacattgtctattaaatgtcatgttagagcatcaatggagagttataaaattgcaattttataaaatattttagcaaaatttaactctaacggtaatgtaaaataagtgttaaatttggtctaaattaaaaatattgctaaatttaacataaaagataacatttgataaatttaatttacaataaatacaacatttttaattatctcacacttatttatattatttattagtgaaaaaagaaattatatttataaaatataaaattaattattttaagtagaaatacaaaatttgagtcaataataattttatggtatattttgagttaaatttaatttaaaatatatatcaccggagatggtgttagaggaaggtggtggtggtaatgggtatacagggtttgggattggaaggtattgtttaggtcttttgatgaaaatagtagaagaagaaagaagaaaaaaaaaatagtataaatatatatatatatatatatataattttcattttataataaaatgtttaaataatttttattatcttatttttaattttaaaagatttggaccaataaagatataattatatattatagaggaaattagattctataccttttttatattgtcctctttcatttttatcctc

SEQ ID NO: 392737 - DNA, 668 bp, Cannabis indica
agataagttaataaataaaaagaaattgcccatacgataagagcaaagcttgtagtactcttatcaaagaatttacacatatatacatattgtcatatctctatatatatatatactaattagttctaattaagtatatgtgttttattaggtgggacataaatgagattgataaactcaatccaggatgttttcaagtgttttataaagaacttttgatttgttatgaagaatttgagcaagggcttacaaaggaagaaacttacagagttcactacgcaaaagaagaggtatgtaataattaaatatctcaacttaattatatataaacattaccgaaaaaatatactatttattagtaacattttaagtcaaaaaaaaaaaaaattaactcgtagtaactaaaaaagagttttagagatacaaaatttcactaatttaatttttagttaaaacaagcattaattgtaccaaaaatacattaattaacaataatatacttttaaccacaagttttagcgataacatcataatattgttgtattaacttatataatatttttatttgttgtgattaaaagtaagattttattagtagtgaaatggatttatatatatatatatatggattatttcttaatgggtaatacccattaatgggtactaaa

SEQ ID NO: 392738 - DNA, 1187 bp, Cannabis indica
tcaaaagaaaaaccagagtggcgccaaaccgatgtagcgtgtttacaactgaataacgcatgtccaaccgattcccacgcacatgtacataaactacaagagctggaatcaatgattttcctttgaaataaattagcagctacgggaatagagtgatggaaaactctccaagcaaatatcttaaccttggatggtaactgtaaactccaaaaatatttccaccattttgcttgagagtcagaaccagtagtttgattttgtgtggctaaggaataggcaagttgataacctgactgcaccgtgtacacaccagttgtaataagaattttatgtaaaatttataaaatacaaaaaattattttaaagtataaaaataaaaaactacccgcaccacatcacactacataaaaagaatgtgatttgaaattcttcacaattagttacggtttgtgtttttaccaaaccgcactgtacagtttacgattttaaatttaataatcacagttcaaaccgcacaatatattacaatattattttttatattataatttctcttttcatatatataggcaactcttatacttataaagtctaaattatacaattaaatttaaaggatatctatattaagtttttaaaggatatctatattaagttattcttattttttatttcttctaactttttattgttaagatattattattgatatatataaagacaagattttgtttccatattgcatttttgggtatataatccgtaaatgtactgtagtagttagattgagaagttaattgatttcagggttgggataagtacggggataactagtataaaacaaatagataatcggttgttttttctattaaaatattattaaactttaaaaatgaagtgactaatcacaatctttctcacttccaacttcacttctatcttctacattttcatttgggataattgtggcaaaagtccctaaaaacttagggttgatacagattaatccctaagctcaaaaattggcggtaatagtccccaaggtgacattttccgttggtccccaaattaactggtccgttaaacccaaactaaatgccacctgtcaattttttattggtccaaaaataattttaattaaaattttaaaataaataaaaaaaattaaaaatatatttaaaaatcag

SEQ ID NO: 392739 - DNA, 1137 bp, Cannabis indica
aaaaaaaatggttcaacatctacaaagtcgatatatttaaaatattatattatcttttaaatttaaaataataaaatacttaaataaattttaaaactagttggtatagtaaattttgtttaagtcatttaatttctctatggatattaagttaagaaaaaattactctctggttaactaaatataagaaaaacactaaattgatactttatttccttttttttaataacaaaaacaaagcttcccacatattacaactaaatggtatctatttttaaccaaaatatctagagtgtggttgaaattatattttaaaaagagagagaaatgaattttttttaaaaacaaaaaaaaaatgaaaaatgaaaagtaaataaagtgaacacgtgttaaaattactaaaaaaaaaagtcgcactaagtgcaaggagtggacatatttctattcttagaattttgatttttaaagtactgataaataggggtgttaattccacatttaatatttttagacctatatatctagatctaatttaataatatattgtaagttaaattttactatcttatctaatccaattaatttcagtcatctaatcgattcgagattaaataaaagttgattagattaatccattaacgcgtttactaaactgtaattccaatcataataatcgatgagagacatgaatcggtttaaaataaataataattggaaataatattttattatcttgtttactaaattttccggattgaaaaccagaatcatattattttgtttacataactaggaaagataatctaaatgctttaatttgacaaaattgtcattattagaacatgtaattattttctatttatagatttttaaaaggtatatttgtctttttcatttttaattaataaaattaaaattaaaataaattaagttaggaaagggaaaggcattccctataaaaatggggaagaacatttccttttgctttctccctaatttgtgtgagtctcactattttctcgctttccaaaatttagtaaactagaaatcaatatcataacatttattctcattcccttcaagtaaacacgtcataaatgtatttcatgtatatttattggtttaatgtaggtttat

SEQ ID NO: 392740 - DNA, 1095 bp, Cannabis indica
tttaatggtgtttggctttaggtttttttaaaaatatttttttagattttttttttactaaataacatttaatatttctctacaccataccatgacatgaacccatccaactttagactggatcccggacctagacctgaacgcgaatgctgatccagactcggactcagacccaaatccgaacctaaacccgatttcggggtctgggatctggatttgggtttaagtctgggtccaggttcaggttcaggtccgggtccgagatcgaggtcggtcctggtccaaatccgggttcgggttcggggtcatggtctgggtccgagttagggtccaagtttgggtccgatcttggggtccgagtctaaggtctggggtttgggctccgagttccatggtctgcatccaaggtccgggtatatgaacaaaaatgtaaaatataatatgtaagacaaaacaaatattttcaaaaattaaaaactccattttgatgttttttattttttagccccttgatagttttctagctcaaggggctatttggcttcataacttaaaaaactgttttctatttttacattgttctgatttgtaaaatttatattacatttattaactatcaagccataactcatgtgtaatccttccacggtcacaggataaaattttaaagagtgtataattattgatttttttaaataaatgtaatatttatgaagtttttaattttatttttaaaatatatatttaacatgataataatatatttataacagataaataacaatataaaaatattttggtatgatgatcgaatttttgatttttttttttttttaaaaaaaaagtattagctcatttaatttggtttttatttttttttttttaaaaaaaaagaaagtttataaatttgagttccaattatatcttatcttttactaatctctacttttaaatataaatcaatagaataaattgaatatagccaaattaatttcaggaaacttggtcataaacataacttccttgtacattttaaaaatctccctctcccaatatatataaaaaaaaaaaaaaaaaaaaacttaagggaaactc

SEQ ID NO: 392741 - DNA, 745 bp, Cannabis indica
cattgtagaatcaccctataacatattatgttgcacacattttgctcgcaccccttataagtgatgtaccgatgtatccctatctgtttcgacatcttagagacttttttagtctaattttatggtcttgtacaatataattatttaagacatcctgtaaaatttttaagaaattcaacaaaatttaatacgctaaaaataaggttcaaactatctgtgtttaaatattactctctaaattataaattattctgaatttttcaaaattttacagaatatatttaacaattataacatacatgattatgaaaaaaattagagtaatttttttttctcgatgccaagaaaatatggatatatcggtgcacccattgagaaatttaccaaactaaccatttcaaatacaaaaatttataaaataattttacttaatttactttatgcgaccatgatagtcacacaatgtaaatctatggtcattttgcgaccataatggtcgtttatggtcgtacaatataattcatttaccgaccataaaaagttattatgttaatataattttttgtgttaaaattttttgtaaaattatcttgctaatgaaatttttcataaaaattatttttataaaatattcgcacccattttagggggagcacggtagaagcacccaatatgttattggaaaattctacaatgcacccccttaaaatggatatattgatgcacccctatgtgttttagcatc

SEQ ID NO: 392742 - DNA, 1323 bp, Cannabis indica
catttttttcgtctataagtttgataaatatggataattctttttatatttttattggatttttttttcatattaattacggcaatcaattttctttttttactttattattgatatgattataattagttaccaccacattaatttgtaaaataattaattcaattaaaagtattttagtggcctactttttatctatatttataagaactaataattcaaattttccatattttttgaaattttccaatattatatatttttttagaatataaaaattctaccccaaataaaatagaaagaagagaacatttctatgtctccaaacacacaaaaaaaacatcattgttttcagtgtagatattagataatgacatgtacaaaaaaagcatacatatatggaatagtatgtattactattattttatcttgtttcttctaaaccataaaaatggaattcctatataagaatattcaattccaaatattgcccatttggaactttgtaaatacaaaagactatgctatactatgtggaactaattgtgcttccaatttttgttattattttagatttgtattttgtaaaaattattgattgaattttttattttactaaatcataaattagactttatattttttaaaatattattaaatagtatcatgaattgtttttttgtcaaaataaaacttaataataacttaaatagaggtgctatgacaaaacttgttaggttttctgcatttatttgtgttaataattatttttaagttgactatattaaaaaaattatcgaaaattgagcctaggatcttatatatattattttagaaaatacatgatttattttgttatttaacaaaatagaaggtccaatcaatcatttttacgaaatacaaaatctaaaatagcattaactttaataaaaagtaaagagttaattaatactaatttaaactatttgttttgtaaaaattataatacttttgtttttacattttttaatcacaaaaataaagtaaattttttgtttttaaaatattgattttgaaaaataaaaacgcgatctataactacttttcttttttaattttaaaaacagaaaataaaaatgtgttatgtaattttcttttttatttttatttgttaattttttttaagttgggttcgggtccgaagttgggatcggggccaggcccgggtctggggtcgaagtccgattcgtccaggttccaaggtctaggttggagtcagagttcaaaatattaattaagaaaaaaaaatttgtttaaaaaaatttaggatgtaattttttttta

SEQ ID NO: 392743 - DNA, 3013 bp, Cannabis indica
tttaaattctgggtccgccactccccacccaatacccaaaaaccccaagacccaaaacccctaccccaattctctctctatttctcgacatgtctccctctctcttcctcgttgttctcgatacggcttcgatgagccaccatcgtcgacaaagggttcgaaccatctcttcatgtctctcatagaccctcttttttgtctcttctctcttttcgtggtggacctcgccggagtcgaagctccacagctccgattgagcaatcttcgagtcccaatgagctaatcgatgggtctgaatctgatcaatgggtagattgagaagatcagattttagaggagattgttcctcttgttggctttgttcgaaccatcattcactctggaaagtaatttttctattcttttgctcttcgtgtgtttttgttttttgttttaggtttgattgattacatttcgtattagagcatatataagattggtgataaactcagtgatgagcatgagaatgtaattcttgaaaagttgcttccttttcatccagcttatgaaatcaagattggttgtggagttcaatccattatggtaacatttttagaaaagatttttcacctgaaaccttttattattgtgtttttgtacatgggattttacttatttgttgattttgattttattttaattttgtagtttgggtttcattcgaagttttaagataataaagtgtttatttgttgtagttagtggatttctcatattggaaatgtataaagggtttgattagaaagaagtaccctttgtttgatcagaaagaaagaagaaaaaagagaaaaataaaaaaaattatatttttttctgctttttaaaagttttaaatgtttaaattattttttaagactactaaaaatatgacacgtgtacacgtgggcagtttactgtgacacttaactgaaatttttggacagaggtgcaatgagcaaaacaaaagtgaggttcagatggttttaccaccaaaaattagcattgtggagttaagtgtaaactaagtatatagtttgggtgtttcaaaaaaaaaagtatatagtttgggtaatattaccgctaatatccctttaattaaattaagataaaaaaatcattaattaaagtcctaaaactaaaactttaactaaaaattaaaacaaaaataaagatctggaatatcatttcatttcttcttcatcatcctcttcttcatcttgctaaaaaatacctaaagtttctaacataatccttctcaaccactattcgtcatgcctcaattggcagtatcagagagtcaatttagacaattcagttcataagtcatcgaccacaacagtgtatgatagacaaaatcaaaataacttaattataagtgcatttttattaagtaacttgatttaatttttaatattttatttaattattttttattctcataaaacggtgattgcgggcagggtcggccctgggcattagggctgagcatcgatcggtttggtcgatttttttctatataaaaatctgaaattcgattttcggtctggattggtgcaatctgaaaatcgaccgaccaatcaaaacctatcttaaaactgaccgttttgaaccttgatttggtcggtttaaactgcccaaactgaacttttttttaaaaaaaaataatctaatttattctataaatatattatttcatattttacaactacaaacatataaattaattgttcaaaaactaattattttattcttttaattttaatattaataaaaaaaataatatattatttttatatattattagtaactataatacatgacaaaaaaaaaacttgataaattaatatatatatatgtataacggtcggttttggctttttcggtcggtttattacaaaaaaaaactgaccattcaatggcggttttaaccgttagcgattttcttaattttcggtttcggtttcaacggtgtttggtatgtcggtttgaacagtttttttcaattttttggattttatgctcacccctactgggcataagcgggctaggcccgcgcctggggcccactcattttaggggcccaaatgaaaaaattgcattttaaaaaatatacatattttttaataatttttaaaaatactatttatctttatagtaaggggccaaattttaatttttgcctataacccatttcaactcaaggccggccctaattgcaggatgtatatagtagagcataatgagcataaaatgctacaacttccatttgataatatacatgatgacaatatgaagcaatttacggagcgatgatgtgtagatttattctacaaaaacttaagatgaacttctatgttttttttttgtatataagtatataatgggacaatgtaacttggtcttttctagttgtttaattatgtttttagcaatttaatttgatactttttttaagaagtatcgggccaccataaagatgattatcatcatatatcagacaaaacaaaacccataaaaataatggtccttaaccactaaactgacaaactatcgagccaccaccaggatgaccatcatcctatatcaaacaaaaaaccacccatagaattaatggtgcctaaccactaaaataacgaagtatcgggccaccatcaagaggaccattgtccttcgttggactaaaacacaaaaaaataataaatcacctctaaccactcaagtgaagcactatcaaaccctctatcgtacctacattgaacacaatcgggacatcttccctaaatctaagttgagttgaccatcgaacaacctatcgtccttatatcaaacaccatcggacattaagaaaaaaaaaaccaaaatccaaaatacaacataattttccaagaataacaatttccacacaaaaatctgttataagtaccaaatttcaataataatacataacaatacgatattttgaaattcaacaagaatttttaaccttggtagttgc

SEQ ID NO: 392744 - DNA, 888 bp, Cannabis indica
cctacactagttagggtgttacatgttctccatattaacccattgccatagcttataatgtggaggacattttggtgcgacaaaggtactccaaagtggatttttctggcctactctatttgaagatgctcatcaatttgtgaaagcatgtgatcgttgtcaaagaacaggaaatatctcaagaaggaatcagatgcctttgacatgtattttagagttaaagtctgctttgactatgtggaggatgaaccccgatactccagatcacttcttgcagccactgacatggtatccatagcagccaccaccaccaccactgtcatactgatgtggcactcaagtaagtttcccttcctttttctttaatgtcaaattggggacaatgtttctctttagtttggggtgaacttaaattttatttttagttttttgtttttaagttcttaatttagtttttagttgtttcgttgtttaatgtgagtcaatttgaacgtaggtaatagcacgatttgaaaagttcattttttttttttgaaaaatctgtgtgcttggtgatattacattattacttaattttaattttgtgatttaaaagaatatggaatcatattaggtaatttttcagtaattgaattagtttatgtatgctaattgtaaaatatgaaaagttgtttagaaaaagttctagaacttgattgcttgctaaatgaggcaaaataataagggttaatttcacaaatgcacaaaaacaacaaaaaaacaacaaaaatacggtttcacggaattttaaatatttttacgatttttttgattttatttacataaaatactgtctttttatgttgaaattttgttcatttgttgttaattttttgttatctgtatgtt

SEQ ID NO: 392745 - DNA, 964 bp, Cannabis indica
agcaacaaaccaccctttagacctaacctagggacttcaagtccaatactgaattttaaagaagaacaaaaacgatcaacagaattacaagtcaacttagtctccataagaaaaagcaagtcaggacgctgctctttaactagcagcttcaggaatctgaatgtcgaagggtttcccaatcccctggcattccagcttataattttcatggcttggggcggggctgcattgatgcaacttccactgaacaagatgagtttccttcaactgaatctgctggctgatcagaaacatgctgtaaggatgacccatcaacataagaactatccattttattaccacgacatctttttaaaatactacaaaagttctcaggatccatttgtcgtttaaaagtcttaaccgaatcaatattcccctcagaaacctcagaattcatcacagctttccctttgtttaaagtcgcactaatcggggcatcaaaagttctggaaggtggacattgagagaaggaataggatggcaaatgagatatattttcaggttgcaatggtggtggcttcgatgacactttaggaggaagaatagtagggacataagacgggaaagggagaggcaattcaaggcatttttctttagcagtagttgctggtttttctggtgtagaggactcggctaaggttaaggattttggctgaggctgtgttccaatggcgaagtttcgatgagtgtaaagagcgggaatggatgaagcaatgggtttctagcgagacgagtaagtaaagggtaagcattagctttggaaaagtcactgcggtatcgatcataacctgaaattggaagtttatctccaatcatttgtggaccatagagcagttcacataaaagacttacatggtttaaaaactattttaaatattattcatgtaggttatgattaatgtttttattatgttattttgat

SEQ ID NO: 392746 - DNA, 718 bp, Cannabis indica
aagtccccccccccccccccatccattcccttcttcttccctctcaacaccgacgagctccattgcagcaggaccgactgcagtgaccaccttagtaggcacccgctaataggttgtgtcttcttcttctcttcttgttttttttttccagtttttcatttttgtcttttgttctttttttaagctgttcttcttcttcttctcgacctatggaggccaacatgcatgtgcagaagctccgggacttggcagtagctcctccttctcctctttggcttgtcccgaaaatgtaataagtgatattttttgaagaaaaaatatggcctagcccaactcaaaacctgaccctaacccacccggatatatcccaactcgtacccagcctgaaactcgaaaacctagtctctcacatgggcaggttcggtacacaaaatccacacacccaaagcccataaacccaaacccgaaatcctaaaattcggtaaaatccacccgtgcactcctatctatgcaaaagtatgctttttttaaaaaaaataaatatttatttatgggaaaaatagatgagggtaactagttacctttagagaccaattactttatactattttcacatatgttttaatttgtttttaaattttaccctaaaataactttgttgataataagctatggtggcgtttgataacacttttttaattagttttttgtttttaaa

SEQ ID NO: 392747 - DNA, 942 bp, Cannabis indica
ataggaagaatcgaagtaaaaaaaaactacaaaaaacagacatagaaaaggaagaaaaatgattttatagtcttgatcttctacacccacgaacagaaccaccacagtaacacaagcacccgaaaagcaaccattaattctgacgagatatagcaagaacaatgaaactgacatcaaataaataaatcatgacaaaccgtaaaacaatactaaaacaaatagaaaaaagattaaaaaaactaactatcttctacacagtctcaacaccatatgcaataaagactatatttgcaagcccagatctaaaaaatcgtaataaaaaaatcacattcttatttttcccaaaaacgtgagtagaaatttacaaaaattaaagaaaaaaccgaaaagaagatgaagaagaagaattgaacaagaaaaattttaaaaaaaaaaaaaataaaaaaaaaaaaaaaaaaaaacaaatatactggagagaaaaaagagtgaaaaaaaaaataacttaaagattttgaaacaaaaattttttatttaaaaaatgtaacagatattaaagagggtcctattaaatatgagacaagtatcgaaattagatattacaagttttatactaatagccctttcaaaaaaaaaaagttttatactaacagtatataaaataacagtaaaaatgttgaaaaacgcatgtcatagtacaaaagtaaaatggtggtaaaattacttgaactcccacaaactgaatggtttaactctctaaacctttttttttattagttatttacccattccgtttaaaaagctctattaaatgtcaacatgtactgccgttgcatacacaaatgtacatgtggcaaaatttaaatggtccacattattttaaaatacttttaaaatataaaataatttaaaataaaaataaataataaaattacaaaaacttaa

SEQ ID NO: 392748 - DNA, 930 bp, Cannabis indica
agttaatatatgttcttatgcatcaatttagtgttactcctgcaaatatttccttgcaatgcttttttgtacaattgtctgtaacaatttatgctatcccgggttttgaaaaaggtagaaaaaaaaaaccaaaatgtcaagattagtgtaaacctttgaagtttcaaacatattcctttttgggctaatgatcaataattctttctttacaattgtctaatgcacatttcataccatcccagctatcatacacatccgaaaatgttgttgaaggcaaaagagctgccaagcatgcgttgcaacaaaagcttggtcttgaaacagctgatctccctatagtaggaatcattactcgattaacacatcagaaaggaatccatctcattaaacatgccattgggcgtaccttggagcgcaatggacaggttagttataaattttcaagaagacctcattttcagttttcacgagtcatggcaatagaaaaatatttataacaaggagttgtttgatggcaggttgttctccttggttcagctccagatcctagaatccagaatgattttgtaaatttggccaatcacttgcactctactcatgctcgtcgcgctcgtctttgtttgacttatgatgaacctctatcacatttggtatgctgtcttcaaacaccattcattgctttacactgtcttatcatttgtagtagcatattcacttcaatcctccaaaccaaactaactattttcagtattccttcagatatatgctggtgctgactttattttagttccctcaatatttgagccatgtggtttgacccaacttactgctatgagatatggttcaattgctgttgttcgaaaaactggaggtatgtacacaaagtatcttattaatttgctctatagtgatgttttgattgttctgttt

SEQ ID NO: 392749 - DNA, 967 bp, Cannabis indica
aattatgttgaaatgttataattaaaaaatggtcaatttccaaaagatcccccactaaatccatatttgatttctttttctttctgtaaagtatattttaacaaaactatcaccaatctcgtttcttcatttctagtttcatctttgaaagtcaatgaaaaagtagcaagtaaaacaagcaaaacctcaccttcaaagaaaaacgaaatattctcggcgctttcaaagaaatagtcatctgtcaacttttgctgtaaaggaaaccaaaagaggattacagatgattattttccctcacctaataaatagttaatttggagtgagaacgttaagtaaacctggtttttagtagagaaaatagaggcggtggttgagtagtcaaactggtttagcaactctaccattctcttcctcaagctctccacttcgtcagtgctcgcaaacgattccattacaatataacctttcaattcaattatgaaataaaacaattaattccaagagagaaagagaagaagaagaagaagagttagagttttagggtgaaaaatagaaaagaatggggagttgattgggaaataacggttaccatcggaatggaaggagtggagctgggccggagtgagattgccgacgatacccataacgttaatacttgcaattgcaaatgcaattgatcgaaaccttcaccctagaatttgactagcttcgtaaccagtaaccgtgtacgtacagaatagcagggtatgcttacctagtattacttgcaactaacaataaatagtaatggtagtgttaaccaaatattttacatttaaaatattaaataaaggaaaatttgaaattctatacataataaaccccaatacttgttttctaaacctaaatgttatagggaaatttaattttctatacttagaaaatcaaaaaatttgattcctaaaccaataatttaaaccctaaaaaa

SEQ ID NO: 392750 - DNA, 681 bp, Cannabis indica
ttttaccgaggacatttgaagttctaatgaggacaaatgtcctcgttagagacccaattttgtagtgaggttgtaaagtgaagaaactagaacagataatagtcttaaattatattttgaaaagttttaatcagttcgatctgtaccaaggatgtattagctagatacacaatagaatgacttagctaaaaggattaatagaactcttcttgaatgagttaaatgtatgtttataatgatggattaaaatatggtgtattgctatttgaagaagcttgacacaaaaaaagtgatcattttagtaattataagtcatgggtatcaaagctagtcttctatattatttattaaatgatattgatatcccttatcatttctcatatatatctctctctatatatacttttcaatgtcatcctttttacctatttgttttaaaataagaaatttaatgttgaaggaccacgtgtcccacttgagttgctttcctttatctacattgaaaaaaaaaagttaaccactacaaataatattagtagggaaacttacaaaaatactgaaatttgagttaacttttacaaaaatactgtcacacggaaatctttttaaaaatactgtgtttttataaaacaccagtaaaacacaaagcagaataactcaaaacaacagtagaacaccagt

SEQ ID NO: 392751 - DNA, 697 bp, Cannabis indica
aataagaattacaccttctaccgccatagtaccctgtacatttctcatactaattacatggtaccgacatcttatataagcctcgtttattttaggttctataatggtttttttttattattttagcttttatgattaaatttttttatcataagttgagaaaatgtcttttttaaccttttgggagaaaggactttttgcttctcccaacaccaacttttaagaagttaattttaataaaataatttatataatttttaatttatttataattttttttaatgatacacaaacatttttaaaagaacttttccactaataacatatattcataccatatttatcaaaataataaaaataagtttaaagttttacttattttatacttttagcaataaataaaagtaaaaatttaactaaattgaattttatgtagttgaatttaaaattaaatcacgttacatttaaaatattaaattattaaatttaaaatctcattagataggatctcaattgatatctttaatcatttatgttaaatttgtgatgcaatattatatacttatttgtgtgtgaaatttaaatgtgtcaatatactttgggaaatttgaaattatatgcatattagagactaaaattggtatcttaatctaaaactatacataatttgtaaaaatgggataacttttacttaaac

SEQ ID NO: 392752 - DNA, 656 bp, Cannabis indica
gcattttaggaataaaattcctataatactcttgaaagattaaagcaataagagtgggacgtgaatagggtgtaatattagctacaatattccaataaaaattctaagcataattgacaaacataatccataaccatattccatatctatatctatatccatatccataatcatatttcatattcatattctatatacatataccatatttatatccataatcatactccatatcatatctgtaatcatattccaaatcatatcaataatcatattccatatgcatataacatattcataacaatgtttaatcaacaaagtgacaacatatacggttcctaggcaatagatcataattattcctattgccaagagtgtaacgagatagacaaaccttatgaaacatgcacataggaggctccaggcctgattttagaggtatcgcatacatactcaatcatatcataaagagacttacatgtgtgttgaacccgtctcaacccaccatatccccttaacctgaataataatttatcatatatctcacgtgttgtcgtactgtgggtaccgcataagtgttagaattattataatggactaataggtttaattccataatacgaaatcattaactatgtgcctaatattactaataa

SEQ ID NO: 392753 - DNA, 710 bp, Cannabis indica
ttttaatctgtcgtaaaagagagaattagaatcattcatcagaaagcaatattaaaataattcagcattgtataattctaagagataacaagacacacccaattattaagtttcttcaagtgtataattacactagcttctttttttttttaagtaaaaatcaatttctgcagtacattcatgattatggaaatacatttaacacatcactaaataaagaaggtataatcataaaatgtatcatcacatcacttcaactattagtttgaataagtctatgatttttgctaatgtacataccataatatatatatatacatacatatatatattcacaatataggtagcatatgacacatcaagatgaccttttgcatttattctaatgcccaaaaaccaccaaatattttccaattattgattatactatcagcctctagagtgtagagaccaaagtttcaagccaactaccatgagaaattaattacttacaaagcaacaataactctttttatccaagtacaacacattgagaaataacccaattaaacccaccttctttttatgaacagctaactcttcaagagaatgaggtttatatttatctacccataactctttctggttgctttctccagaacctgagtcaaatttccattttcgtccaagaaaaataaaagatgaacaagacagaagctaaaacagtaaaa

SEQ ID NO: 392754 - DNA, 691 bp, Cannabis indica
caagaaactggggatggggttttggttactaattctaatccaagtaattcatggatgtctggaatttggtaggctcaaatgtgaggagaatgaataaaagagaaaagcaaaatgctattctagagatttgtaaggagaataaagatgggctaggagctccttttgagataaaggtgaaacatgagaagttttatgatatgattgagaataatttcccaaattgggatcatcactctagttctatcacatctgatagaattttattgatttggcaagctatgtatgttaaggtgaatattttaattaagggtcctcaatttgtttattgtaatataaaagtttgtggccaacatgattctttctttgtcacagttgtttatggaagtaattcaatgggggagaggaaaaacttatgggatggtcttgctaacattggtcattggaatagcccatggatcatttttagggatttcaatactatgtttagctttgaagatagaattggtgggaagcaaattcttgataaggatatagtggatgttcaagattggcttgctttaggccaagtggaagagttcaagttcgcattttacttagtcaaattgttgaccgagattttcggcaactgttaaaatatgattatactaaagagctgtaagaaagtgagatgaggattttttacgtggttggg

SEQ ID NO: 392755 - DNA, 521 bp, Cannabis indica
ttagtacatgtcaaagttcgatgagcaaaaatcttaactagtcttcttttcatatgtgtgataaatacttatttgaattttattttctattttgtaaattattaatatttttaaaaaaaattataagtaattgtaactaattataatatatataatcattaaaaaaaaaaatagactctttagtctgaaaaccaatatttttttctgtcaaaagttactacaagctaatgtatatttgcgtatagttagtaatttttatacacaacaaataacagtgtaaaaggtaaataattttttaccttgatataccatatttaattatttataacccaaaaatatgtcggtgatatgttgttgtttctcttcactcaattaaatttaggatttttttaaaaaaaaaaattaaatgtatatatatatatttagggtaaatctatagtaggtacatgtgttcttaccctatgctatagggaagtaaattgaaccaataaaaatttaaaaaaataggttgcattgatgtt

SEQ ID NO: 392756 - DNA, 992 bp, Cannabis indica
taactgatttgaatctataatataaacgttttttctcaaaaaaaatatatatatatatttaaataaataattatttattatattattttttttaagaaaacaccatgttatcaagaagaaaggtaaaactatgtcacatgcaaggatgcattcacctttattgttatcacataacatttaaatattaaataatttaatattcaaaataatgaatctaatcctactattatatattgaattgaattaaatttaaatgtttgtattataaattgaatccaaaatataaattctacacactataaagaaaataatgtaaaatgaattagataaacatgattaaggataaatacccctaattattcaaggtatttaataaataattatttattatattattttcttttgtttttttttttaacaaaactatgtcacaatgtcacatcacatgcatgaatgcatttaccatcacctcatcacataacgcctaaacattagataatattaaaaaaaagtaaccaatctaattccacaaattccattagattaaatttaaattattgtataattaagttgaatctaaaatataaattctacactcattatattctttatggtgtgaattgagttaaataaacacccataaattcaacatatttgaataaataattatttactatactattatttttttaacattgttatcattgtgtaccaccatataaagaaatattaattacagcattttagtcaatttctatacttaaaattatatatcaaaatatttcttttaattttttctatagcaatatttattacagttacaatattatttttgtaatttttttgaatagattatcgtactgaaaatagagtttttgatattccaatctatcatccgtgtccaaaaacttcaaatttatttttgctactgtaaactattcgaaattttttaaaaatttaactaggaaggatgttataactataacgaacac

SEQ ID NO: 392757 - DNA, 1783 bp, Cannabis indica
gatgaatttcactttctgtgtattaaagtttattttaaatttatatatttaatattatatcagcttatatcatactacactaatccaaggatattctaaaatcctctaactccaaaagtaaaacatataagagcaaaagataatttttccctttacttctctaagaagtaacttaaccttataggggtaaaatgctttaacaccataacccaaacaaaactcgaaattttaaatgtctaactatcttgtgtcgtcaattccaagagacctaatcttataaatgtaacactaatagccaaaacgtcgcattccatcattactgggcataaaatatgaaaattataaaatttcatatacaacatatataatgcatctagaatttaaatatatcttcgtaattgaaaaaatattttcttaaggtttatttctggcaataagtcctaatttttactaagagacatataatcatataataacaattaaatccttaattatctgctaattcttttgatttaactatgtggttattacatattttgtattattttgaaaaatacatggccaaatttattatttaagaaaacaaaagatataatatataacttttgcaaaacataaggtccgaaataatatttacccttgttattttttattacttttttcatacattatatgtcatatacttgtactattgtcatttttctaaatttattttttaattaattattcaatattttttatgtttcttaactattttttattgagttatgtcctattttttcaatatattatgtaattttatcaatatcaattagctaatatactactctacaatctaattgggacatctccacgttagagacacaaccaagcttagaattagaaaaataagccaaataattagtcgcctaattccctaatcatttaaaaaaaacgactaaaataaaatcagataaaaaatgtgatagcatcacagtcctttagaacacatatattcatttcatctactacttagaagacacaatagtagaaatcattacagcaggttcattcaatctggtagcatgagcacttaactattgtgcaaggtacataactgtactactcacaaccccttcagttgtagagaacttattattcctaactactaacagggatttaatggcgagctatcgaacaacaacataacaaaataaaataaaacaaaatcatatcataaggacaagtctaaaacactcaaaactatatcacaaagacaagactaaaacactaatcaaaaccatgtcacagagaacaaactaatcgcaatagaaaagcacctatgcccaaggaaggccaatgggcctagccagagaaaaaaaatatttgtagctatagattcaaaaacgtgaaatcctaattttttcataaccatactttatcttaagaatacttggatgccctattaattgcagaattagatgtatctagctagttattgagttatgtcttataaataatattatttagagtttttgcacttcttatttttttttttttgttttttttatatagggagttttatacttcttagatacattttatgtagttctttgttattatgtaatgtcataattaaaaatcatatcaatttataattactttttatttcatgtttatacttataacgttttatttatgtaataatatagagatattattctattactacaaaatatatagggtaaataccattttaagccctctgttttacaaaagttaccaattggaccctgtgttttgt

SEQ ID NO: 392758 - DNA, 1199 bp, Cannabis indica
aagatcattggctaataatcattgatagatgtatttttttagatgttcatttgatttggaagcctaatatattcttcacacttttttgatgcttaaccgttgatgacttattggatccgtagttgaggttgcagttagaattttctgacatatcatctgaatgtaatggactttgtcagatttacctatcagggaataaatcttttttctctaaaaaaaaattgaaatccttaatattaaatgttttgaatccaacttaattttattatcatgattgagctatatgtaatattaataaacatttccacaagtcactttttttttctttttcttttttaaattggatttctcatgactgattcctctttctcatcacaaaagtttgaaaagataaaagtagaagagacagaaaaagtgaagggtattttctattatacttgtttggtacaaaatacaatgagaggaaagaaaataattttctttcatttgtttggtattttaagttaaaattaagaggaaacaactttattttgacatttttaattagccttaaattagtattcttatttattttatatattaatatttttgcatgcattactctttttttttttaacaaaaaaaaaaataataattaaaatataaaatttagaaataatatttaatatctttggtgataagtatattttggtaaaataattttttctttaatttattgtggtcttgtctatttttacttccttcttttcatctttattttctcttctaccaacacaaattctttttcactctaagaaaaattatttacataatttttgggtgagatcctaaagaatatggtacaagactatagtagctaggttaccaatttatttatgtttttagtatttgaagatattataatttaatattttttcatatgatgatctagttattgtaagtttcctatttatttatttttttttaaaaatttattaatagtttatactctcgaaaatagagttcaaacattcaatttcacacatgtttatttcttttttgtcacacgtgcaagtacaattgaatgtttaaactttatttcgatactataaattattctattttttttaataagtagaatatcttctataaccttaatatacacattcatataaaaatattttaattataatttatttaaacgctagaaacgtcctacc

SEQ ID NO: 392759 - DNA, 1005 bp, Cannabis indica
tccccccccccccccccccccgcacacgacgcctatccacacatatatagcctctccctctttcacccgcaggtcgaacagatgctccaccacttgcatgaaggttccacgagtcacaaaatgcccccgattccctaatggcccatgggctcgcacaaccccccatggggttgcaaaatagatagggagtagctcaacagcctgccagcttgcatgggagtcatcagcttgcataccaagttgtcacaattcgacagtcttagtattttggccataactttctcgataaacaacaaaattagacgattaaagacgtgttggaaagataagaaagagatctttaaatattttgtttgtggcaagatccaattctgaacaaaacatatcactacaaaaatccttcaacaattgtaacctagtaagttgatcttactaactctactcatgagttgttgcggggttgacctccaagttgcacaaatataccccaagacttgtaagcatgggtttccaagattaatgatttttaggccatctgcattgactcaatcattctttgaccgactcttgttgttgatgtctctcgactactgggggtgattgttgactaatctcaaaattaactctgtcgatttttggggttaaaacttggccccagtctataagaattctttcaagtgttcttgtagactgaataagttgggggatctgccttgccaaggcgtgggaccctcttagttttctctgagacggtgctccctttgtatggggggcttcccttggttgaactttacttcgcgccaatatgtgaagcaacaattttacttggccttggctgtacgactttgaggatgtctttttggcccaataactttcgtaagtggtgttggctgagtgactctagggaccattctatggccaaaccctttctaatcgacgttggccaagcgactctagggtccctctctggccaagccatctttgtaactggcgttggccgagcga

SEQ ID NO: 392760 - DNA, 649 bp, Cannabis indica
ttaatgatggtaccttatggtgactttggtatgatcgaaactcattattatttgataatatgcagtcaagctgggacggtgcaattcaaaccaaagtttgacaacgacctacctcggtggatgtcaccaccttctgagttctttgctcttgcgactgatgcttcagcagttcttgggaggggctttgtcgagctgggtggagtgatacaggatgttgcgagtgtggtttggctggtttggtcatctagtgttttaggtgatttttctgttaatgtgacagaactgcttgcaattaaactggggttctcttacacaataattcagtttcaatatttttattattaatagtgattctacatggttattggttattggttgaattaataattctaacttaaattttattttttagtgtattttattaaatattaattttaattattagttattgttggtggcagttcttgcagtattattctgtagtcgaggaatggtgttgcttatataccacctactaacataagagagtgtatatagatggatgttatccataatttttaaatgagcaatttgcggcgaaacccccttatgttttgatttttatacacttaacccccttatctttatttttggtggcaaaaccccttta

SEQ ID NO: 392761 - DNA, 2619 bp, Cannabis indica
agtaaaacagatagcccaactggtgtcccacaggtgcaactatatactcagctattttggctccaattgaaataacaaattccatggtaagcagacacaattgccttctttctttcttcctttctgttattactcaactaattccacataacaacgacacacaacacaacaactaagtattaatattattcaaataatataatatgatattaaaaagaaaatgatcataaaaacagggcaaaaggcacttacctgataatgatagagaaacaagttatgccttatatatatatatatatgtgtgtgtgagtgagacagactgagagagaagtaaaagctgaaatgcaaatgattgaaagggaaacaatttaggagataatccaggattaataaaaataacactaacaaattaattcaataaataagagcatatatgtaaacagatctagagtagaaataaatgaacaagagataattaaagtaggtacctttggctttggtaattatagattagagattgctgaaacaaacactactacctgctccaattccaaatccaaaactaggaattcctttttttttttttttttgttaaaatgatgaaaaaatgattgaactgcaagcaagaattgagaaaatttgcaaattattaaaagtatactacttctaaaaaaaaataaaaagacatatatgtaaatagatctagagtagaattagagagagaagagaacataaataaatgaataagagacaattaaagtacgtaccttttataattatagagattagagattgttgaaacaaacactactactgcattaaactagactagtaattttttttttcttttttaattttatgaaagaaagtagaacaagtacttttttttttgagattttcttttttgttttaatagaaagaagaatgggtgaaactgaactcaagtgcagaacagagtgaatgtttgagaatttcttctttgttttaagagaaagaaaatggaattgaaaaagaaagaagaatgggtgaaacagaagagaatgaatgtttgatgaatgtaagcagagaggtttttcatgattttgtttaatagaaactctactcactactcttctctaattgttcattaattaattaattaattaattaattaaaaagtacatttaaactaatctgtctgcaacaaacaattcaaattaaatatacattgtttaattctatccaagacacaaaacaaaacaatgtataaaatacagaatagtgtgaaaataaaaaactaacctatgatgggtcaacaaattaaagtgactcttgtttcttaattataaaaataaaaaatacgcgtgatgaataagtgaataaattaataccaaagttctattatggtgattaattaaagtgagtctgccactaataatgttgatgatgaacagaatagacaatgttttagtagcaagacaataaatttcattttgaattagacagacagacagatagacaaccctttgaaaaattctacttgccaatattattcattttccaatttattcacaatgaccacaactgaaccattacaaaagaagcataaatatttacttaggaaaatgagaatgtattgttagactatttttagcatagattctgggtcaattttacagttttttttctctattgatgttattttttggaatagttttacgtttgatttcctttgtttcagattcccaaggcattagagttcaaattctatcaattgttgaaaagacggagcaaactgaagaaaaatctgctgaagctgacaaaatgcttcagtagtcgcgaccaccacgatctatggtcgcgactataaggcataggcggaaagcagcatttttagtttttgcctatagtcgcgactagactttatgtagtcgcgactatgggctaaacacgagaattttggacagttttaaaatttttccattcagaagtagcaactctaatttctttttaagggctcatgttttagaaaaaaatagtcagaaattgtacccaaaagtggaaggagacagaggaatcacttgtggcgacccaagcataatcaccaactagttctttcttaaactcttgatttctatgttaatttctattttaaatttgattatggatattattatggattttatgaactaaactcctatttggggagatgatgaatgttgattgacattatttcctaaattaatgacaattactatttctcattttttgattgtgaatttatccatatttgtgtttaattatatgtttgagattgatcaccttttgcatgctctatgatcacaattcaaaatctgaaaagtgaattttgggaatgctaaaattggataaaataggtttaaatgtgaaacgaaagtatttgcataaccttagtgacattgaacctctcaatccgaacctctctccctccccgaagtccaattcaagccgcaaagtcaagagatgcgcattcaacaacacagtacagactctctacacaatgttcaagcaaatttggccaatgcaaatctcaacagcacaagaggttctattaggttatttttagtattaactttagattaagtttagtatatttttaat

SEQ ID NO: 392762 - DNA, 797 bp, Cannabis indica
aagtatgaaaaactcaaattttcgaaataatatctattcataaataatatatgctatatttttgtcttttttgattttctctccattttttatgaatgatagacttttttttttacacggtgattaatatcacacatgattaacaacgcggtactccataattagtggcggtatttcctcgaaccaggatagctcatcgtctaaccgaaaggcatgctttttgtcgaaccatgagctgcaaaaattcatatcgcaagccacatgagacaaaactgctcccgaaaatttagacaataagttataacattctcaaacagcaccccagctcattaaaacactcctcctttgttcatagctgaaaaaacaaacaacaccaagcaacaataggtattagaagagacaatctttcatgctatgcatatgtataaacctacaattgagcaaactattctatatcttgttttttcattttcttagggaaaattacattaattctattcctcacttctggttgtattctatacattattgttaggattgtgctaattccaactaagccaaactttaatgactttaatacatcttctgtctgatcacaaattaaacaagtcgaatcattacaaatcttgaacttttataagcgattctctatttgcaatctattcaacacagttaatcaaggccaatcctgagcataaacaagctaagcctatgcctaagatcataggcggacccacattgtagcgagggggggcagtcgccccccctgaaaaaaaaaatcgagaaaaaaatgtata

SEQ ID NO: 392763 - DNA, 983 bp, Cannabis indica
tgctgctgaatctgcaattgctgggtgccaacctaagattcctttggctgaatcagaatctgatgatagtattattagtagtagtgatgatgaagatgaacatgaggagaatgagattggcaaaactgatcatggtgaagaagatgacagtgagaatgaggatcttgtgatgacaatttcttcttctacaaagcataaaagatctaaatcttccaaagccaaaccaagaaagaaaaagattgaaaaaaagccaaagattgttgaactttgatatggtatatttttgctagtaagttgttgcaaattatgctctatctaactatttgtaggattgttttgtgtataatgtgagttcaaactttgcaattttttgtttcaaaaactctttgtattccacaattatattttaacactttgttttttttaaaagaaaacattaatattctagtaaaagacacaaaacttgataaggtttcaaagtaaaaaaaaaaccttaaaaaattaaataaataaatttgtagggagaattttttaatttttttatttttttatttttttttatttttttgaaaataagcatgcataaatagaaaagattagacttctcggttattacaaaataaatttgtagaaatagaaaatacataagcaactatattgttggtgtgtgaacgcccactgtaccacattatgagttacgaaattacaagttctattaatattagataaaaagtaactctcaaaaaaagaaaaggttctattacaaaacgaagcgtagttcaaaagcatccaatatgaattctttccggtaagagtattgataaccattttagagttgctttccacaataataaacttgtggcctttttttttagctacttccaacgccaaacagcaagcagtcacttctccagacagagaatcagttaatccaagaatttcgtttgaacccaaaccacctcaccaagatggttccttgctac

SEQ ID NO: 392764 - DNA, 500 bp, Cannabis indica
ttaaatctatacaatatcagatatcagatgtgtatatacatatgtagtggcattatatgaaaattggctgtgtatatatttatgtgcatcagatgcttgtttttagtgttgaagaaaaaaaaaacaaatttatatgcttaatgtttgacaagttttaaaaaaacaaatttaaatcggaaagatcgttttcttctgtttgtaggtaaggggatttagaagttagcaaagatttaaaattttctcaacccaacagttgaacttgaaataattggtatgtactgtgaaataattctgacttgttttctattttctgtttgatcttttgaagcctgctgaacttgtggcaccaccagtttcaaacggatgctctgcttctataccacagcggaagccaatcataaggtatggaatatttatggatacttaggtttaccatgaaatggaaatgaattaatttttattttatttatttatttatttgattgtattttaaattattg

SEQ ID NO: 392765 - DNA, 644 bp, Cannabis indica
gagagagagagagagaagggagagagacttagagctaattggagtctaagtgagttagaggaaactttgagaactttggtttccaggcttgggttaaggccttaatataggaagccttaaaccctaggtttacaacttaaatcccttgaacataggatagttagctagatatttacataagaccaaattgcccttagattcaagatacttctcaacctgtctgttgggattttggggccaaatttgcagcgcatgccttggttcatgtgtagagttatgcatggagtcttgctaggtcaatcttagccgtccacatgcctacaaggatgtctagctggccatggtcttgccaggtcaatcttggccgaccatggtccttccaagacttggcaggacaaggcctgcagggtctggcaggacactatagctccaccaagaggaggccaaccttgaagtatgggattttgtcccatgcgcgcgcgcgagtgtgcattcaaaccctgatattttcgttcaacttaaaaaaatcataactaattcataaaaaaatccaaattaggtctgtaaaagcctaaatttattatttttttgtctactttccagaaaaaataattctagatcgaaataagaaatatttcagtaac

SEQ ID NO: 392766 - DNA, 875 bp, Cannabis indica
tctctctctctctctctttatcaccagagaagacaaaatattaatggtttaaaccagagaagatcaccaacaattctcctccatttcttcttctctaatttagttttggtgggctcacaagtggtattttgatgttgttaatggttcgcaatgggagttgcagcctcgtactaactttgtttcattgcatttttacaggtctggtcgtcttctttgtcgcacacgtggaggagctccagtcatcttcattgtcgtgcatgtggaggagctccaatcattttcttcatcccacacgagatcttcgaccatctttctatgctgtctatgtatttataatataaatatttatgtatttataaaaaatatatatttttcacattgaaccgaaatgtggtgagataatctaattctcggagagaatgcctacacgaagagagcaacagagattggtttttgaccaagagcagtagagataaattattgttattgttgttgttgttgttgttgatcgaggaccgaggctctatatttataagtgagatactctatcaatatctacgccacattaattatcagaatattttgacaaataatttaggaaatcaaatcgggttatgaatatcaaaatctaaccatatatagaatattacataattaattttatcttgaatcaatgaatataaatatttatttattacaaaatcaattctttattttattccttaattataaatattctaatattctcccacttagtcattatttagactaaaacattcaaatccagcgttcctcattatataataaacatatgaatcatagcgatatgtcctcattatgagtcgagtattatcttccatgtattataatatatt

SEQ ID NO: 392767 - DNA, 1463 bp, Cannabis indica
atgtcacaaaattattatttgtatcaaatatagattaactttaggtaatccagttagagatgacatttctctcttttgtgtgtgtgtgtgtttttttttctagaagacgtgtacgttttattggttgggtcaaagagttgactttttccctttgtcattaatatgtaaagttggtatttttttttttttccaaatgcaagttgcatgaggatgaaaatgcatattaatggtggtggtattttgtagttcaattatgtgaaagagataagtcaaagtgggcgctggctagctatactatatgtacatgataattaagaagacattttttaattgttaagatgttaatttgaaaagtctttggtataatagtggtcatacattcacactatatatcctcattctaatcctctaaattggtccacaatttcgacttttttcattttttataaaaattaattttaccttcaacatttccatgataaactaattataaatgctaagagactttaaagtattgaagactaaaaaaaaaatgatatattataattattagtattaatattaatttaatttaatttaatatttgaattctacatattttaattaaataaataatataaaaaactatttaattatttacaatgcactgtatcaatatattgtagtaataactatttaccacttttaaaatacattattttagtcatgtacgtggtggtaataaaaataattttatttcttacaatgatacagtggtaattgataattatcattatcagaataaattattatgttacttaacccaattaaccgatctcacaaaacggtaactagttatttagttagataaaaaaaatgactaaatgtgaaaaagaaaattagcttaattacaaccaacaagtagaagaacatggaagaaggtaggtaactggttacttagtcaactctaaaaaactagatttgaaagaagaaaaaaaaatctcaaaaacaaaatcagatttgaaaacaaaccaaaaagagaagtaaagaggatattacaaccacaaaaacagagctaaatagactttttaaaattaatgtctcatacatctttaaaaaataattaattaatgtctcatatattgtgaatatctattatacatacatatatacatagctaatagagtaaattatagtaatgtgtgttttgttaaaatacaaacttgatactttatgttttgaataatgattaattggtctcttttatgtgtaaaaactactcatttagtacccttattgtatttagaataattaacttttttagtccctgtacttatgacactatactatgatgccccttaatttataagtgtagttaaaaataccccctaaaatatatcagttggaatagtataatccttctatctaattctgttaaaattgactaaagttgactgttaaattaataatgtggcattatacat

SEQ ID NO: 392768 - DNA, 1414 bp, Cannabis indica
gtcgctagcagaaagggattttttagaggtcatctcgccgcggtgagctacactgcaaccgcagccataaagtctgggcagaagcactattttttacctctacctcgccgcggcgagcccattcgtggccgcggcgagaatggcctgacgagaatataagggggaaaaatcaacacattcaaaattacatccttttctcaatcctaaacccactaccaccgaaaaccactctccataacccaatttcttcatctcatctcattccaaaccctttttcttctaatcttttcataatctttcatcccaaatcattctaaaacacttttcttctcatcaaacactcttttcctttaaaaaaccatatccaaatccctaaacctcactcaaattcaaattttcactattcatcatcttctacctcaagaatttcaaggttttgttcaatggaggtagagtgaagggggattttcattgaggtaacaatattcttagactctctatgcaattattagtggataattttagattgttggagaatcttgaaattttagtgtgatttttgggattttgttcattgcattattgtgaagagttgtttgtgaattagaatggtgctatttgtgatatgggtttttacccgaaaagtgaaaatttaaggggaatgctgtcaaaattttcttaaattttgagtcttagaattttggagagatgagtcctaaaagagcaagagtaagtgaaagagggggagcttcatctaacccacctagggaccgctctaatgttgatagagctagatttgtgaatgttgaggcacaagagcgttttctgcaacttaaagatagaccattcatcgaagataggggtatagacattggtgaccctagacaaccttaagctgcaccttttctatttgagcctattagagaataaatagtcaataggcgttggactaagtttgtggatatcactgaccacaacaaccaaaccttagctttagaattctttgccaattggccagcaagagaggatgaaaaagtcaaaagttagggggattaaagtgtcggtttccaaaaccgctatccatactgtctattacttaccaaccttcaccatagaagaactaccactgacacagcaaatccgagcaaagaatttgaattataaggacatatctgaaactttgggctacctaggcctcaggtttcatgaatacgatggagaaccttatcagctgtttaggtgtgaactaaacccggtggccaaggcatggctatatttcgttagtgcgaggttggtaccaaacaaacactattttgatgctcagatagacaggcttaaatttgtttatgccatcatgaagggttacaacctgaatgtgggggacataattagagtaagttttgatatgatgatt

SEQ ID NO: 392769 - DNA, 1270 bp, Cannabis indica
attttcatttcatcttcatttctactcaattttcccacttcatcatttcacacaatgctataatgagaaaagttaacgtctctcatgaagggcaatttgcagacgttactcaagaaattgcttctactaatgaagaccactacaaccagatgtagcaaaatagcaagaatgagcaccatcggtggtgagcgttgatttcaccgaatacccagattcgaagagagaatggtggaggagaagaggtcgcgagagaaggtttatatataaattacgttgcacaacctgtgattcgatcccaagaacccccacacaaaagcaccctcccatatcccctatggccacttgacatagcctcaaggggtatagtaatgctagattgaagctgcaacaacataacatttaatattcaagaattcttactggtacataggcttccatcgaagtcactccaattttaagatcattattaacttagaatcaattagtattttttaattatggtaaaatttaattattatcttttaaaataaaagataagatcaaatatttcaaaggtattatgcggctaaaccctctcaactattattttacttgcatttaaacctccaagtttaaattttagtgataaaacctaccaatctccacttctgtttacaagtcaaaggtatcgtctataagagtggttatgtgccagcatggattgcgccacatgtaaataaatatacaggtgttacattcatattagtccacataattatacatatttaaatattataaaaaaataaaattaaaaaaataaaagaaaatccaaaaattaaaataattaactaaaaaaatacttctctctttcccgtaaacagtatctctcccctaaatgctaaaattttattttgttttgtttttttcaacaatcttaaaccattttaaagtttattcttcttcttacaggcagcggttagatctgggcaagggccggtcagagctgggatgaaatcggtcgaatttggttcgagatcgatcaaatataggctgggctccttcaatctctctcgatcttggctccgatggtgcaaacgccatggttcctagtgtgtgggtagcactactacaaaaataggtttttccgacgtttttaaatagtcatttaaagtattctcgtcggtttctataaccgtcgcctatacgaccgtcgtaaaacgggtgtaataggcgacggttcaaaaccgtcgcaaatgtgggtttcccgacggttttaaaccgtcgggaatgt

SEQ ID NO: 392770 - DNA, 1241 bp, Cannabis indica
tttcttaatcttaaggtattacatcgcatataccagttggtacctaaaattaagattctcaaacacagcaattagataatgttaagagagaacaactaaattagaataaaaattaattattttgatattaataaaactcagttcctggcaacagacgcccaaaacttgttgcacaatttatgctatgcaagtacacacagtcgcaatttgtaataatcttagaagatcaaatatcgtcccacaaggactgattatcaattagcaaataattaatctctgtttttctatttgattatataaatatttaggatttttaagcaagaaaaatgataacaggaagacaataaaaaatttagagaaataacaatgagaagaaaaaaaataagaattattatgattcccaactatcatttctttacttcttaaagcgattacccaatttctcttcttcctatttaattgacaagttgaattaagtagttaataatctggttaagacttacaaatctaatctatgtaaaaattctctgtatatttacggtaaagtttaatcacagagaaaatattaaacaaagcaactcaaataatctagatattttcagtctaaatcaatttgcattcaaaacaatcaaaatatattcaaatctcactttttagaattttgattcgaattcatagataacaattaaagatgatcaatcaataattgcacaattaaatcagattacatgtaattgaataatagaagaatataacattaaatatctattttaatccataaaagaaattaaagtggctcacataataatcccatttactattttttggtgagctctactaattgagtccaataatatatgttttatttgatttataggtaaaaaggacaaaactgaactatatcatggccgagatcgtaaccagtgttattctagacagattgcttcgtgcactaagtagtgaattaaccgatggatttaaacatgttacagaaatccataatgcagttgagcatttaaaaggaaatctgaaaacaattatggtggtgttgggtgatgctgagggaaagcaatctaatactaatgtgaaagattggttagagaagctgaaagatgtgtcatatgacatagatgatgtgttagatgaatggaacacaagaattgtgatgatggagataagagataataacaacaatcaaactactaatgttcctaactcaaacaagttattattttacatgt

SEQ ID NO: 392771 - DNA, 1246 bp, Cannabis indica
tttttaacggccaaaaaaggtcagggagcatgattggtacatgtcaaagttcggaggagaaaatcctaattagcctattattttatttatttgtatggtactacttccaagtgtcttaccccaaagtcataaaagtgatagtacttcaacataacttgagttagacaactaaaattttgctaatgatttttttaatcggtgcatttttcataattttataattaaatgtgcttatatattatatcgcgattattttcatggtagcaaaaaaaaaaaaatctagtcgtgcaattaccagtgccaagtgtacctataaatatacatgcgcaaaatatacatgaagaaaatgtatttgtacatactatagatgcatttccaaaaagtttatatctatatttatatactattgatattttgtaggttttgaatccttttaatagtaatgataaagctcggcatgcattacgggcctaattaagtctatgaccacgacctaattagacctaattaaccttagatgtgagtctaaaatgcacttaaaagtaatgcacctgtggaattagctacgcaaaatgcagcaaaaaaaatatacatagatgcattcattacaggcattacacaaataacagttgcattataagcctaattaggcctacgtccatggcctaattagacctaattaactttaagtgtgagtctgatatgcccctaaagataatgcacctatgtatttacttgtgcaaaatgcacctgatcaaagaaaatgtacttagacgaacatcccaaagataatttcgtgtggagaaaatataatattcgaaggaaacgaatgtccaatatgcctagaagaatacaaaaaggggtaagaaaatttctttgcagtcatatgtttaacccagaatgtatgcataatatattaaccagtaaacgtaataagtgttctaattgtagatttatatttgcttattttatataaattttaaaataaatgtaataaaatgtaatttggttcaaattaagtatagtatttttttttctttttaatagtataattatttgttatcatatatattcttcaattcataatgtattcaccttaattttattcaaatattaattatgtatagctttaaattgttttaagcagtaattacacttatttattactccattatctatatggtactactttcaattgtcttaccccaaagtcagaaaggtgatagtacccaacataacttgagtt

SEQ ID NO: 392772 - DNA, 1754 bp, Cannabis indica
ctctctcacacacacacatacacgcccactgctattttcatgcttgagaattgccaactctgattcctacattgtacctttagagagctactttagatcccatcactatagtgatctgaatagtattatctctcggtattaatacaactaaaagaggagtaggtcattacctgctaactaagggtgccaaatctctataaaatcctacgttcatttactttattattctaattgtgtaacacgtggaaagcatcagtattacacttgactctgttgtcggttggccaaatttaagatcaacatctacgacgaatatttgggatgttaccaagcacccacctcttgaatgtgcatattaatttacggtctagtggtctttctgggtctacattctctggaagaagacacttcttctttttctcctctatgtagtctagaaaatagcaaggcttcttcctttttctcacaaatggcaccccttttgggggtctggttagaagcaggacatcgtcctgtgattttatgtcaccaatgaccatgataatggcatcagttggagtatattgtgcctcatcatcatcttgttcctaatcttttgggaacacatcttcgtactcactctcatgaggatggtcatctgtaggttgggatggttgtggttccctgtccttctctttcaataactctatcacgtaggccaactgagccattaaaaactccttcatctctttctgactatccacaaaggagcacctcatatcggtttagcttttcactaactcagtctgggagactatcaaggaatcttattgagcctcaagtctatccatcctctctgctagtgctttaatgtctgatgcattagttacaacagttggagcaaccgaagtagacggctcgtctagttctagagctggtggcggtggaactaacttggcctttgtcataacctcattaatggcattggcttgagtttgaaacattaaatcttgtgtaccatctccctacttcttctgatcgaggtctatctcaaaacaaagaggggcttcactctcatcaatggacttgatggcatttgtgaaaagaaagatgagttaaataaaatggtaaaattgagatcttataagcccattaagggttcgaccaaggatgttcaattgacctaatttttttaatcctttttaattctatttaaattctaaacctaaccttccctataaaaagacataagatggctcttattttctcaatttgataattgattatcagactcatttgtcagacaaaatagaaaacaaaaaagagagcttctatttttgaattccctcttcttcttcctcaaagattttgaagcctatggtgaattgagagtatgcccactcatgtcaaagcaatatctagcatagtgaggaagaatgtctctaaccaaattgaaggagagaagatccaagttcaaatcttgataatgctctgctacaaacagaaatcaaggactacagatctaaatggaaggagtcattatattttgttgccatcaatgtaagaatttcttaatctcttatgtgtttatttcattgtcttaagaaattcatatttaggatgttagattataaaatttttatcaaacatacatgttagtaaatctagatcctagtaaaataagttccaacaatttgcttcagagccatggtaatgatgtattttcatgaaataaagatttaaaacgatgtttggttgatttggatgtgttcatg

SEQ ID NO: 392773 - DNA, 1169 bp, Cannabis indica
tctatctcaaacaaccagattccagggtagtcttactttttctaatcagtagtggaatcaccactatccctaccatttctagatataggaagagcaggggtgtcccccaacatttagagtcccacggggctccagaggaaattcactatactctcggctcgtaaggcctttcaactaactcaacatgagtctttgtgtaatttgtagtgactactagattatatttaatcttggtatctaaatctgccaagtgtttttcttccttactgaaattcatagctacttcacccataaccaagttgacttaacgatcaaactttgttgtgtagccaattaataacatattctcttcctatcttgttataatacctagcattgagcagatcccgaatcactttctaggtcataatagtaacatctcagatgatggataataactcccactacacatgagcttcctcttggaaatgaaaatgtaatgcaggttaccaaatcattcccagtgatacccacaaagttcaggtttcccctcaaacactatgaaccacagttccacctccacatcgtctggaatttttgcaaaattggaagcgccatcttgtgaaacctcagataaaggttttattcagtcactaacaacaaatttttctgttggcaccaataaatttgagcagccaatacctgtggtgatggtactgtaggaggaccttgctgtcacatcctttaaatctcctctttcttgataattaactcaagcttgcattcctgcgaatctttgttccaagttctgaggagctggtgatggattctcgtaactggcttttaaaactttccacgacctctgccgcgttcacaggggtttagataattttaacttccctgcccgcctccagtctcgatcgcatcatcctaactattgcattttgttggacgtccctacactaggacttagcccgcaaacccttacgtcaggcaggtcggatagcgatatgatatattctatgcaccgcactttatgaattttaaggcaatgcacttaaataattaattataaattgttacattttctaacatgcttttctaatcacataaattactaaaaaaaataaaggcttaataaactgtgagttgagtttctctctgacgatgattctgttgggttttgtgcc

SEQ ID NO: 392774 - DNA, 1246 bp, Cannabis indica
attcgagattatgcaggattatatacgaaagacattccgaattctttaattaatactttctttgtgcatattgagtcttctagctcatcatcgttttatctttcttctatggtaactcaagatacaactacatacaattggtcatcagtaaatatttttagaaatgtataaatgaatgtgttgaagtggctatctttgtttttcatagaaataactacttaattttagttatattattagtgaaacgttataggaaatagaatataaaagctaaggatgtatctatcttttttgtaatatgggagatatactaattataattaattactattatttttttattaataagataaaatgtgaagaaaggggttacttattttattgctactcaatatttttaattgtttgtttatgattctaatagaagtatctcttttattagtaattaaatgattaaaataatttaataattttaaaattctaacaaaataatatttataaagatatatttctttttaacaaaggcaaaatacttattttatttattttttttgggctaattaggatttttgcctttcgaactttgacatatactaaattatgctccctgaacttttaaggttgttaaaaatacatcctgaactattgagattgttgactttaaagacttttgtccaattttagtaaaaaaaaaaaatctaacattgatgaaaatttaagggtcatgattttgtacatgtcaaagttcatggggcataatttgtagatatcaaagtctagagagcataatttatcatataaacaatcactgaaatagtaaaattaaatgaaattagacaaaagtccttaaatctaacaatctcatagttcaagaaaaatttttaacagtcagaaacattcaggaggtatgatttagtacatgttaaaatttaggagtaaaaatcctaattagtcttttgtttagaacgacaaaatacttatttattctttaaaaaaaaagtacttttaataacaaaaagaaaataaatataccataagaaaatacatatttttcttatataaagtacataataatatatttttaataatatttatatttaataaaattacaatgtaaacagagattaagacccggcttattagggctacattattatatcacaatataatttctttattcaaataaagacttaaatgtaaatttatatatattatatgataaaatttagggaaaaaaaacagaaaa

SEQ ID NO: 392775 - DNA, 1306 bp, Cannabis indica
ttaattaatttttttttttctttattaatactttaaattattttttacactttcttatatatatatgaatatatatttattagtgaacactggatgctagtgggcattagactaggaaagattttacatgtagaccctataaatggcctgaaattctcgtaaaaatttatgcgatattaaagaagtaataatttaattactctttatataacaaatattttaattagctaagttatgtatgttgattacttgaaatgttaatataatttttaaaatagagcatccaagatgttagagcatcaaatgcattcattggagtatatccaagaatattggtaccagaatgcccaaaacaacctaaaagcaaaaaatgtagtttttatgtattgaaaaataacagtgacatcattgcacatacgaatcctagcaaatacttaaccgatataaaaatttaagttttaacaattaatttatcttatttatatattaacaaaaattctgatatatatactaataaaaatatttatttctttttacagtttgaggataagaagatatacgatgcaaaattgagttttcaccgttacagcgatagtggatagaataattgtttacgatgattcacgaagacttacaataattcacaaaggcttgcaatgatgcttgattctataagaatttcgttatccctatatctctctgtttaataagatacttatagacttttttcctttatttttttatgttcacttagataataatttgtgagtacttagactaattttaagatatttgtataatagatttatttagaataatgtatatatatacattgttatacccgaaattcagttaaattttagaaagtaacacgtgtcaatctcaaagaatatgaatcaaaaaaatataatggtaattatatcattaaatataaaatagaataactcattaaatacagaataaatagagtatatttataactcgctgactgcacggtcttaagcgagatcagaatgtacaaactatcaattaacatattgacgagaagccatattgcatcaaaagacataatctcgagggagacatagagagcgcataacgaggcatctacctcgctatatgtaaagaggcattgacaaggtaaagtaattcttagaacacttagcatataatatacattataataactaactgtaataacttgaaggacatattgtccagtctgcaaggctgtaatatccagtttatatacatatattggtatttggtatattaagtgtgatacaattatattgttattattatt

SEQ ID NO: 392776 - DNA, 883 bp, Cannabis indica
actcttactaaaaggtctgattaggttcacttgttggttcaaattaagactatttcctcggtggatgcaatcagtattgattcggcaagttgcagaacttctactacccatgaactgtttgaaatgagctagaaaatgatgtttaaccttgtcaaagtcatcttcaattgtatttccttgagaaaaggttgtgattctattctcgagctttcttttcctcatagccgcatggaagtaacccgagttttcatcacaatacttgacccaattgatcttgctttgctgagtgataaagctagagtagttcttttgcaactgttggagatgctgcaagtgttgggatgcagattgttgaaggtttttatcagttggattcttggcggcttcctcctgagttctactataaacatcctttgcttccctatactttagagtaatatcacccacttcacttttactgaattgaattagcatctgtctaacccagttaatcttctgcatgactccctccaatccacttctagtcgagtgagaattccaaacttctaacaccctttgcttgtagtttggataatctacccagaagttacaaaatctaaagggtttgaagcctacattactcctcttctggttccggattctgcaaaaaatatgatccgaaacattatcccatttaaagatagcttccgtttcagtaaacacacccagccacattttattaacaaacacacgaccaagtttagagaaaataagatcaccaacctcatgcttattagaccaagtgaaataggatcccgtgcacttgaattcctccacttggcaacagaaatgtaacttaaggtatttaatccgtcgaaaaaaaaacatgtggtatttaagtgta

SEQ ID NO: 392777 - DNA, 1305 bp, Cannabis indica
ggaagaaagatggttgagattgggttgttggggttggatcgctgggtcacgaagaagctgcggctgggtcacgaagaagatggtgttccgttttgcttggccggcatttttgtaattaacaactttatagtttctatttttgtttatttccttttttagggtcataaatgtaaatttattacattttaagtttataatagaaaaaatctcaaaaaattatctctatactatacttacaaaacaatagttcttaccataaaatttttctatatttataatcctcttgctaagcaagatgacattcttagtttcaatattatcttttctttatttttttcattttttttttactttttattctacattttttagtgttaacccactaaagtggagagttacacaaaaacatttattaatattttttttttcaattttaatgtattatgataatgaccattgttaaataatctttggttgcaatccttaaattacaattaatcctaatataacatgtagttattactatggaaatgaactcatattaaaatatgaaattacaagaaatgatatagctacactatattctcgtattctcacttaaaataattatatatagtatgcatgggaaggatgataaaactattgagcaggctacaagaagctggtataatacttgattaattattattttgtttgaaaaatttacatggtatattaatttttgccatttttttataaaaatactgccaggcggtattttttacttttttactgtgtttttttataagtttcatactgcagtatacggtgttaagtatctactggtgttctactagtgttttactggtgttctactgttgttttgagttgttctgatttgtattttactggtgttttataaaaacacagtatttttgaaaagatttccgtgtgatattatttttgtaaaagttaatccaaattccaatatttttgtaagtttcccttttgttttgctttagcttttatttattttcatgtcaaatactaaaataactatcttaaaaaaataaaatatagattaaattaaacaacgacgcacatgtttaaaaattaaatatttaatttaaatgatgttttttaattttcaaaaataaaaaataaaaaatattagaaaagataattttatcgttaaattatgtatatttaaaattaataacaaaaaatttaaaaaaatattagaaaagatatttaaattatgtatgggtaaataccattttggaccttctgttttacaaaagttactaattggaccctgtgttttgt

SEQ ID NO: 392778 - DNA, 1035 bp, Cannabis indica
tcccaatcatatcagaatgactttaagctagcaagtcttgattcctcttgaccgtgtctataacattttccttgttgggtaagggtagatttattcccactctaatggtcctcgcggggacttcctcactaatacttacttcctttacctcctacagcagctccaaatttctttcaatcctaaatcatgggtctaactcatctagaaactcttcccaaaccgtttctgtgcacattaagtcttctgacctgggagcaacaagggtctcctcacggatcatgaacacggtctatgatgaaatattgtaccagtttcttgcacttctctgatcaccatttattatctcaatgcatctattgtcacaagacaatttcatgcataaatgccagatagttttaaccgcctcaaaatccaccaaggttgttcgtcctaatatggcattatatgcggtcgtgtagtctacaagcatgaaggttgagtgcttaaaaatagtataatataaatatacaccactatgctcacacatgaatggcttccacacagagtctcttaccttgtatgataaaaatcttgatttatcctctcttctattgaaaatgaataatcttttgattattagagataaattaaataaatgttacatcacatgcactatatatattatatatatttttatatatatatataagaatgattgaaaaaatagattacactatataatgtaacacacatgtatatataatatgaagaagaagaatagaattactcgctcataaacttgagtgtgaattattatggatcaccgtgacttcaacaaggtatactacctttgtccaaaagtttatttctcttatctctacacactatatatattatatatatgtttatatatatatataagaatgattgaaaaaatagattacaccatataatgtaacacacatatatatataatatgaagaagaagaatagaattactacgctcaaaaacttgagtgtgaattattatggatcaccatgacttcaacaaggtat

SEQ ID NO: 392779 - DNA, 943 bp, Cannabis indica
atatatttttttttcattttttttttttcagtgattacattctatgggtccgataagaatagtaagatttctcttctgaatactactatgtacttattttacaaaaagtgtagatattgtttagagaatgagtaggcgaccaattgatgtcaagtgtttggcccgttgattaagcaagcgtgttctaaaccaaagcacccattattctcacttcttctcactccccccatgtgctatagctccccataaaattagcattgtccccaccaccatccccatctgtcatcatttcattggccatttactataatatcactccctcttaattcaattttatttatattgtttaattactacatacatacatacataataataatacacatatacacccctgtgcggcttgtcctatcccaattgcatgctctcaactcccttatataaactacccaacatttccttctcccttagaaatttcaacaaacagaaaaagattatcaaaagagagaaaagaaaagtaaaggcaaagatgatcaagttgaggtcaacaaagaagtactttggaagaagcagctctaagcttagcagtaaggcacttaaaggaggaggaggaggaggagctgatagtaataacaatagtcaaaaggacttggttgcaaataataataatactaatattggtgaaatcaaatgggagctcaggccaggtggtatgcttgttcaaaggagagaaagtggtcaaagtgatggagaaggactaatcaccattagagtctctactgtctcacaatggcatcacatatctattgaatcaacttctacttttggtaagctcatcatcatcatctcatctcataaatcaattttttttgagtccaaaaaaaaaaatgaaaacccaatttgataaattattttgctaatttttgtgttgattttttttttt

SEQ ID NO: 392780 - DNA, 716 bp, Cannabis indica
tcagattactacacaaagaaaaaaaaaaggctagcaacttatgaatgaatagtgtagccaataggatatcaaagcaagtgggatgtaccatgaaatgtgaacgacataatagtcttgtcttcagttgaaaaggtaaaatttagaggaccaaaaaaaaggaggacggaagctgactgggagaagaagaaacatatcaagtgcagctaatgtggggatctggagcacaataagcgaacatgcagtagaagacatcaaaaatattgagaacaagaataactaaagaacaacagtagaacaacggcaaaaaaactgaaaatacaattgagcatataatactaaagaaaagaatttgcatacaactttcattatatttctataactattaaatgggatgataatgatttgcttacattctttataagatttttaaactaattgggtactacataaaattgagatatgaatgatttgattaattgtgattggttttttattaaatgttactataaaagtttaaaaattgaggagaactaggatgtggaagaaagaaatatattaatatgggtaaacaacagtaaaaaaaaataaccttaaaacaattataaaatcatgacaaaaaaaaaaataagaaaacataaatataggaatcttacaaaatgtctatgacaatgatgttcttaataatatctgaataatttttgttttttattattttt

SEQ ID NO: 392781 - DNA, 1068 bp, Cannabis indica
aggactgctcgtggaggagatgctgtcgcgtcatcaatgcctccctctgtgccaaggcttgcactagcaggggaacctctgatacggcctaccagccaaggtactcagagggccggcaggaacggggtcagttgttgggcagagggctacgaaggcagccaacatgcgcatagaaagagcttttcctttcatggatgaggaattcaaagagattagtgacggcgggctagacaggctttactctacaagtctgcgggatctttctctggtatgttatgctttcagctctattcatcattttggcactgtaaaggctagctgtccatgaggcatgttgcatgtggctggctggccttggatgctgctgtgaggggttcgccagccatagcattcccaagggggggactagccagccagtgttgtggccttgacactgatgttgttttgttttgctttcaggccttgatgaagttgagctcagctcgtgatggctcttaagggtccttatatgctctttaggagcgagtgaagaccttggatgcttcccttgtggcaaaggacaaagacatatctgagctagaggctctcctaggggagagagagagaatggtttctagattagagactatggttagcgctagaaatacatagaacaccgcacaagttgccttcatctccgggttgcagtctgacctttatgatcacaagcagaagctaaaggagactcttgatggcaagcagaccattagggaagagtatgctgaattatcctcttaactcacgtatgagttacaactttgcaaccctcgagctaaaatgtcgtacatggacagtgaggattttatagagagaacgttggcccatggaaaggcacttttcaagagttggatggaggtagaccaggtcgctacctattgaaagggataatcatcaaagactcatgaaaaggagttggccgaccaacacctatggaggaggtggctgaccaagacattaaccactaggttagccagcatgctgatgatggggtcgacctagactatacggctctgttgggttttatgccct

SEQ ID NO: 392782 - DNA, 1104 bp, Cannabis indica
atttcattttgttttgttttcttttctaagtgttgatgtcaacgagagtgatattattttggatctaataattttcttttcaataaatagaaatgatattgttatagattttaatattattgtttctattgtatttatttatggatttattgtattttaagaatttgagtttgttatttctgggtccttattttagaattgacttagaaaggtttgtggctacatttgttttttagggttacgccggtgcaaaatcgacgctaataaaaaaattacattaaattttattttgttattagcgttgatgtatagccgacaaaagtactctattagcgtcaatcgagaattgatgcaaatgttatcttttagcatcagttatagcaactaaaataataaatttatttgtcggttcaaaaaattgatgctaatggagctttttgtagtagtgattgataatttctattatttttatttttcaaaagaaatataggagagaatttgatcaatttaatttttcctacaattattttggggtaatagtaaaatattttagtttaacaaaaaaatgttttaatgatatatatgcacccatatcatagaaagacaatagggggtaatcgtttttgtcaattttgttaaatgatgaataaaatatatttaaaaattttattaacagtaaaataaatataccatacagttcttctttatacttttgtaattttttcaaattcagtctttttaatttatatctgtatattttctttacaaaattcgaagcactttttaaaattccacaagaaaaaaaaaaagatggacacttacttgtagggattaattatttatattgaaaataaaaaatgaagtgattggagtgttcaatcgagcaagaaaaggcaattatatcttcatatatttatgttgaaaaatgagaaaaaaaaggatatttcttcagattttgttgtgcttttctatctaatcatatatacaataataagaaccagagagacaatgctcactatattagtaggttgatgttacgtgtattatcgtacagttagtttcctttttaattaaatttaattaagtgatgttaagtgcaataca

SEQ ID NO: 392783 - DNA, 930 bp, Cannabis indica
aataatatttttactataaataagtgaaataatattataattcttgatgaattcactattttttaattatttgtaaattaaaatgaataaacttttaattcttattttatcacattttttcttattgtttcatttaattattattaaatattattatttttttgaataaatattattaaatattattattaattactataaataagttgattacctattattaatttaaatacgtttagattctaaatacatttaagttgtatatagtttttctttttgggtataaatatatcaacatcacttaaaagataaatgaataaaaatttttaaaatataaaataaaaaaataaaattttagaataatagaattttgtctcatattttttgtcttataaatatatggatatattagataaatatataaatttgatttgatgactcaaactaaataaatgaaaattagaactatttgggcaacatcaagttatcaaccactcatatattttgacaaatcaaaatgagtgttagaatatcgttgaaaatatactaatcatgtagtttttaatccatgtgagatctttaaaaaaaaaaattactaataatatttctcaatatcaacaaatatataaaatatactaattttattaaaattctaataaaatcgataaaatggatgaaaaatatcaaaaaatgtaatctcatattttttttttagttgctgaattaaaaataatgcaacctaattactaatattatgataatatttttttggttaaaaaataaccactatgaaaaatatatttcattttaaaataataaataatttagactaataaattattatgaataattatttttttttttatcattttatataataatagtcttatatctatattaaactgatactaataatataaaataaaaaaa

SEQ ID NO: 392784 - DNA, 2120 bp, Cannabis indica
atacatgcagtaacagctaatactgattgttaaatataagttacaatactgttaaactaggtccatatatatatatgtatattattcaagtaaaaagtgaacttagagaagcggcgtaattaaggagggtcggcgggagttgtgtttgatcattgaatgactctttaaatggctttctctagctaccactagactaaaaaagtagtaactaactactcaaacaaattgtatatgatattgtgttaattttttcgtgccttttcgggtgaccattctctctctctttttctttttttttttttcctcattcatttattactattttgcctaacgataagagttcataaataattcacaatgaataaagattccgacacacccaaattacatacttaatacacacaatctcaacagcataattaagtgatagagttcttatctaaaaatataaatagttaatatttaatagacattattgtttgaaataagtgtgtgcaaatgtgcaatttgaatatgcattatttagcattacacattgacaattaggccacaattacccagtaattatatatattaaatctcaaacacacactaattaattacaatgtgcaattatatctaattctcataaagtatttagaattgaaaagtgaaattaaagcatattaataatttttaattatcccatattaagttaactttttaaacatacctaagggcggcctggagttgaaataagtcataagcaattttttttttgcctcttactataaagataaatagtatttttaaaaattattaaaaaaattatatattttttaagttattaaaaggtatttttttttttatttgagcccaaaaataagtggaccctaagcgcgagcctagcctgtctatgcccagggctgatcctgaacatacctaaattaaggtaaattgtgagataaatacttaaaatttgagtgtaagccatataaatttaatatttttttagcagtatacttattcaatgttaatatttaaaacatgacacatttaaagtccatattttaaagtaagctaattaaggtttttaccccctgaactttgacatttattaaatcatgcccccctaaacttttaaagtcgttaaaaatgtcctttgaactattgagattgttagatttaagaacttaagttcaattttagtaaaaaagtctaatatggatgaaagtttagtagacatgatttaatatatgtcaaagttcgaggagcatgatttggtatatatcaaagtttggggagcatgatttagtatataaataatcactgaaatagtaaaattgaatgaaattagacaaaagtccttaaatccaacaatcttaatagtttatgggcatttttaactgaccttaaaagtttagggatatgatttggtacatgtcaaagttcaggtaacaaaaatcataattagcctttaaaatattaggtctgcactaaaacatataatatgagttacatttatattttcttttaataaattcaaaataaaatttgtattgataaaactaaataaaaattacaattttacaaagtattagatactattaaaaaatgattaaatttatgtcgactacaaatacaaattttttttgaaattatatgtcgcaattatttttattaataataataggttttgatttaatctccaactggaaaatctttcttcacgtacatgaaaaatgtttatatgcatgcaacaaatatatatatattttttgtttaatgcagcaaatattgtaagtttaaccattttaatcatttgcgtttaagttaataaagaaactaacaaaatgttcaactcaacaaatcttaatgaagtagtggagctttgacttaataatcctccagtttttagataatttttgatttttgtttctctattttcaagtagaataactataaggatgattattaattttgaaatacaagaatgatgtgcaactagagatatacagtactaagtaaatttaatttttacttgtatgtcaacggtgtatctcattatttatttattttgaaaagaagattcaatatttgataaaaaaaaaaaaacaatgttacaagacataattgacgtt

SEQ ID NO: 392785 - DNA, 1244 bp, Cannabis indica
ctatgtctgtagccaatttatacccagattttacagaataaatcccagttgattcatggtgccaaatgatcttatcatcatgaggaaaaaaagacaaaggaatatcaagaatcttctcaatatcaatgtccagaaacatagacttgagagccggaatatgccattgtcgatcatcattgataagctcactgaccgttaaagtgtaatctatccctttgaaaagaattggctgaaaggctgtatggctaggcagccagggatcagtagcacacttgatctgcagaccattaccaactttccatctaagacctcgttgaagaagctctttaccccaaactattcccctccatatcatagaaggataagaccccattcacgcattcagaaaagatccatctttgaagtatcgttgcttcaataatcggctaaggagagaggaaggattatctaagatgtgccacgcttgtttcgcaagcagagcttgattatagtggacaaagcttttaaaacccatgcctccttcacccttggatttgcagagcgcattccatgttttcaaatgaattctcgatccagaagcattcgaaccccaccaaaatttattcatcatcttctttatttggtcaattaattttttggagagccgaaaacaactcatggcatatgtaggaatggactgagcaactgctttgagtagaacttcttttcctcctattgagaataatttttcttgccaagtataaagaagtttccacaatttatctttaatgtcaccaaaaagaatgcttttgtcttgtcccgaataagagggtaagcctaagtacctttcatggcatggctgaatgtgcatattcagttgttgctggaaaaaaactttggctgattcccttgtgttaggagaaaaagagaggactgatttgtctatgtttaatcgctgtcccgaagcttggcaatatgtgttaatggaattttgaattgatcttgctgaagtgctattagaccgacagagaatgaggctatcatctgcaagaaaataagtgtgagactgatggaccattacgtgaaagcatgtaaagaaccattgcgctcttcattttgtaataatcttgagaatcctttagcacaaataatgaagagatatggggataatggatctcctagtcttaatcctcgttgtggtacaatattccttgaacagatccattgtgtaacaccctaactaccttaggcgtattacgtgattt

SEQ ID NO: 392786 - DNA, 1217 bp, Cannabis indica
cattaaaagatttaaaaacaaaaaaaaaaatagcaaaatgaaattcagcaaaactatatctatatatgcaaggactaattttaaagaagccaacaaaaacttgttattaaatttcattaccacattcaaacaattaaattcaaaaagcacattctgaaaacctaacaaacgacatttgatggcaatattttttaaagttaaagtttttgcaatttaaaaaaaaacaaagtacctaaaatctgttaaacagtagaaactataacctcacttgtggagtcacgaattaccataccaaaactacatctatcattaaaaatatcaagaacatttttattgttctcctaccaagcggtacccaattaagattggaagaaccagttaaaaagaaagataagtttctaagctatttgatatttattctttatttaatgtaaataaaaattcattttttttagaaaataaaataaaataattaataataatttggtcatatcattataaaaaggaaaaatctaagcaattctctcattttattgtgtatgaaaaccattggcattaagaatccttaactagtctcatctatttgaatgaagaacaaatatgggtcagaaaattggcaggaagtgcttttttttatccctatccagtattcatgttaagaattttaacttctatctttgtctcattaaaaataggacggaagatcccgacaagatagaaaattctcataattcgaagaatcacaacagagtgtatccaacattcacccaataaaaaaaattatatgtgcatatctaatagagtattttttttttcttttttatgtatttattcacttaaagattaaagatgaacccatctatttgaatgaagaacaaacatggtatggtattgaacacgggttaaaaaattggcgggtagtactttccttgtccctatccatattaagaattttaattcttatctttgtctcatcatcacaaatttcttattaaaattgcatcgtaatttgtggcataaatatttaaatttaattccggttgtaaataaatacttaagtttgatttttggaataatacttaagttgtatttctggaacttggtaggtacttgactgttaaatgtcaatctattatttacgtgtcattttcttataagtatatttaaattaattttttggctaaatagtaattttaccccctgaactttgacatata

SEQ ID NO: 392787 - DNA, 733 bp, Cannabis indica
ctattgtacagtagataattaaataaaatagaattaatgaataatatatatatatatataataaaaaaaaaaggaaaagaaagaaagtgatagtattcaatattcatgtgggtgaacccaattgacctttggaattttctaagtgacagataatatatttgtattattttaaatttgtaattattcgtactttttttttttttaaaaaaaatatgtttgtttttacgtaaaatgatatgtaattttgaatcacaggtcaactaaagtagttaagcattttttgaagttatttcaacttcatcttcaagatcgatataaacacatttaatacttagcttattaagggctaattctaatttatgggacaaaatcttgcttttcaaattgttgttataattcggagtcgagttctaatttatgtagctttctgtttgagtaggttattttggttttctaaggaaaagaagtaattaattaatgaaggttagctgggagcatttaaagtgatatataggtatgtatatatataaatatatatatttatatggttttcttaaaggtggagagaaagtaacaaaaacccaaaaaaagaagagaaagaaaaaaagagtacagcagagaaaatatgtacgcacacatgtatatatatgtgggctatttggcatgtaggattgaggcataagttgaataatatatatctcattaatcaaaatattcttatattatattttat

SEQ ID NO: 392788 - DNA, 793 bp, Cannabis indica
gttattaagcttttaatacacccctttaaaatgataaatattaaatatataaatattgtgaaaaacaaattgtctccttttgcaatatcaaaaaataaagtttctcctttacttattattattatttataaaaaatattagtattattattcatatgcaaaatagttcttcaattattttttaatgggtccttaaattatttctaaacaattaaaattaaattcatgaatatgtttattttgtagcaatataatttttgtattaagaaaatagtaatttggtcacgtgtttaacgtaaatatgcaagtattatattttgttaaatgataatttaaattcttgtattttgtaaaatataaaaatttgaattctattttagtcaaatatttttttttaatacaagattatcttctgatatagattaaaaaaaaattcaaactatcaatttatttaaaattattaataaaaattatatagtaccaatttgatttcaattatcgtgttaaattgtgtacttgaattatttttttctttttttaaattttaaatatttctttagttgattctcctaaaggatcattgcagtagatcttttggtatttaaaagaattttttaatttaatttttttatgatcgtgttgtaattatttaagatcacttataaattgtcaaaaaaacttatataatttatagtgtcaaaaacaaaatttaaaaaattacttaacacgtatataagaaaaatagtcgtacatgtaataaaatatgtaaattttattttcaacattataaatta

SEQ ID NO: 392789 - DNA, 789 bp, Cannabis indica
gggccctcaccgcggccatgactaggctcaccgaggcgtaggcaacctggtagttgccgtcgcagccatagccttgctcgccgcatgagaccttgtttccccgagaaataagagtttttatttttgccataaatttttactcgggactctgtttagacgttcttgatatcgttggaaagctcgtttcaggctctatatgcttatttgtaattgaaatgcaaattatgtgattatgtgaaagtgatatttaggattaatcctatgtaaagaccgcttagctttaatttggaaattaccagataaatagggtttaattatgaaactttcatattagttatgaattatcattttacggagatttatttgaattcagaatgcattttatatgtcatatatggaatttcatatttttgcatgttttgtgcccagtaacattggaacgcggcatttgcctattagaatcacatcttactatttttagtattgcggggcaatatagttagacattgagaatgtcgggattagtcgaaattttatatttgacaaaaatacccctaggtggttttatgactttttggctaagtgaagggcaaattgttccttttgccaaaggtttatttttgtcttttagtgagagatttatggttttgtgatcttatttttaaatatctgttattaatttaataaaaatatttttatccttttattttacaaaaaatcaaaatttgagaaaaagaaagaacactctctctctctctccctagccaactctctctctctctctctctc

SEQ ID NO: 392790 - DNA, 1252 bp, Cannabis indica
gtatccttataaattaattaaaaatatttagctaaaacatagaacataaaatatattatatatatatttttttttattgaaatacatattttatttattttattaatttgtattcaaattaatatttttattattgatctatctcatatatcactataataataataatataaaaaaaatccctcgataattactaattagatacgaaaaaccactacttgaatttttttttccaataactttgaagaagaagtcatgaaaaatcaattgcgtaataaatactgaaatagggctttgcacgtctctccttataggacatggaaagttagtcagtactttctttgtgagcaatatctcctcaagaattacacaaaaatattggtattgaaattaatattttattatttatttacttacacagttgtatgatcaaataagatctctcgacaataatacaaatcgagaaatacctttgggaattatcaatccatacagtatcgggtttgcaaacaataccggatattacagatataatggctctcttacaactcctccatgttatgagaatgtactttggactttgctcacacaggttttcatttttctttatcattttagaaacttattgaactattatatgaaaatatatatattttataattaatttctctatttttatgttgtttgatttaacttgttaacattaatattagtaaaaaaaatataaaaaaattaaattagtttacacaattaatgtgtcttcatatttttacacagattcaaactgtttctctcaagcaagttcaagcattaaaagaagctgtaaatgatgtaagtcttccatctttgtgatgatattcacatatattttctaagtaaattttgtttggcacaaaaaaaaaaaacaatttgtaaattattataattatgtaagaacaattaaaaatactctataaaagaataacctctaatgtaatataaaaaattatatcttaatttgtataaattataaatgagaataacttcctaaattgtaatttgttatatattttctaaatccatcattaaaaaagtatattctctatataagaataataattacgtacatcttaatagaaattatataaagtgtataaatttattaatttatatatgtagaattcattatatgttttattctaaattgtaatacatgtataaatattatatttaggctaattaggatttttgtcccctgaactttgacatgtac

SEQ ID NO: 392791 - DNA, 548 bp, Cannabis indica
cctaatacggcgttccaaacgagcccttatgtcattactcattacgtcacgtcaaaatttgtttttgaacgggtctttattcacaaacattggatacatttcaagatctagcctttaaaaaacaacaaataagtttatataaaagaccagacgaagactaagtctttacgggcaaacaaaggcagtaaggaaagggtaagggttcttttttgagagagagagagagagagaatgaaagggtttactttagactttgatataagaaagtccagtaatatattatattattaaacaaaacgaaagtaaataaatatatatatggtttgtattgtattgtataaatataattattaactataggtggacttcaattcaagaaatggtttctttttcatacccgcgttgaggttattgcaaagtcgtaagttaataatggcacacaccttatctttctcattacttaattagaatacttagtagtggtagttattatgagggaatatattcatttagtaccttgtgtttttatgaaaaatatatttggtatc

SEQ ID NO: 392792 - DNA, 671 bp, Cannabis indica
tttgaaaagtcaaaataaatacgagccgaacaaacacgacacgcacgaacttacaacactgcctactactgtccacatttaataaaaattatttttttaacatttattagtaagatagattttgtgggtattcttgaagatcaatttcttcctgtcattgattttcgatattttcgacttgcttcttaaatgtattaatttgaatctttctttacggaaattaattagctctggtactactgttggaattttaaaccaaaatctgcagcttttacttttgtctaacacacttcaaagaaacaaaattaataccatatgcaaaaatgatatttttcaattttatactttattatgcgtccataataaaagtgatagtattgtaactcactatttgtgatatattatttcaggcccaatgtcaaagccaagaatgagtctgactcatcttgtcacacgcccaaacaatcaaccagcccaagagaaatcagcttatcttcttaccttaacaatcaacagcagccacttaccttttcaaaaaaaaaaaatgttcttcttcttttctaaaaggcagttagggaatctatatcaacacacaaatacaaacattcagaattatacagagattgagatgaaaaatatagggaaaattacatgttgacacgtttttttcc

SEQ ID NO: 392793 - DNA, 957 bp, Cannabis indica
aacagaaaaaattaacattttagctcttttcagtttgtgcatattggtatgtttatataccaagaagttggggagattagcactaacttcttaaaagtttgtctaaattcatatgttcaattcttctttttattttcttcttgagaaacattgagtttctcaaattattgtgtgcaaacttataatttctatctcatcaccatgtggcgacaaaaagctagaaattttaaagcaaatagatggaaccatctttcgtgtctgggtagctgttaaattaactggaacatggatgctcatctcatcttattaagtctttataacattgacagtccctttttaactattttaggtatgcacgagaattctctttgtttattaatgattatctgaaaattatatttaaaatctgtgaagagtttgttatatttcatcagttaaacttcttgattggagaaaagtctgtcagagggccattatgttctatttttcttttacaaaaagtaaatttatttaatatgtgtagatatgtttagcttacttgattggggtaagactattgactattaagaaatacttatattttgtgctttaagatcatgtgtggaggattcctctacaatcattttacaatgcttcatcttgttttgtttcttttttgtgtgttcagaattttcggacaactctgatgagacgctggagattatggtcaaaatagagtagtattaattttaacatatgcttgagattttctattattctagattttagaatatagttaccattatatatcttttattctcatcagagagtatagttctttaaacatttctaggttgcaagttcaaaacacagtcattatttttttgggtattactcaaagatttaaatttataaatgacataaaaatatttaatgtttttttttttgaaaataaagcgtatatatattagaaggaaa

SEQ ID NO: 392794 - DNA, 979 bp, Cannabis indica
tgttgaatcttcatatttgttaatgccaagttgcattttgctcacgtggttcttaacttattttagagtatttttttaggccctattaagtattttttagattttaatgagcagggtattcatgaggccctgtctcatcactgcatgtgtacacttctttttctccacttccttaattgatactaaatagatatgtactagtatttcttttgacaaacaaaatataattaaaagaggatataccaatatatattcgatcttattatataattaatctgataaaatatccctagtaaaaatatcaattttttttattaatatatataaaaaaaaaaatctgataaaatatctactaaatctatacaataataggttcgagcagcttaattcaattaatagataaccacgcatgccaggactttagtttttattaaaactaatttttaaagtgtattttatgaatgaaatactattttattatttgttatgtagcacaaattaaaaaaagaatcaagacactacgtactgtctctcgttgtccataattaagtttgtttttttagattctccataattaattaagttgatatatattaatattctaattaaaattagaaatgattaataattgatatttttgtttactgaattgagacctttcattttcctaaaaataataagagatttgcattcaaagtgcctaaaatagttttttttaactctatacatattcttaatttttttttttacaactatcatcaattatgtttatttttacggaattcacataaagacaacaaaaaagaacgtactaactgttaaaattagacctcactgtaacctttattattacagttttacagatgaagtgaaaattacaaataaaagcaaacagaatacaacagaaatcagatcctaggtggcttcgcctctagtggatcaagaactagttgttagttacaaccgaagttgtaactaa

SEQ ID NO: 392795 - DNA, 622 bp, Cannabis indica
gtcaacaaattaagtcaattcatccacgctcctactacggttcactgggaggcttgcaagcgccactttcgatacttgaagggcacaattcatgaagggttacatatcaaaccgagtctgcacatgagtctccaagcttactcggacgcggactgggcaagctgtcccgatgacagaaaatccacaggcggctatgctgtgttttttggtggtaatctagtttcatggtcagctaagaaacaggccgtggttgctcgaagtagcacagagagtgaattcagatccttggccaacacagctgctgagattcgttggttatgttctttgctctctgaattgcacatgtctcaaccaactccaccaatcatttgggtcgacaatcagggagctgcttctcttgcagcaaaccccgttttccatgcgcggtccaagcatattgaaatagatcttcactttgttcgggatcagatacttgcaaaagaagttgaagtcagatatgtgccatccttagaccaaactgctgatatcttaactaaagcactcagcaaagacaggttcctatatctcaagaacaaactcaatgtgtgtaccaccccttttcgtttgaggggggatgataaag

SEQ ID NO: 392796 - DNA, 624 bp, Cannabis indica
atatataaatggtagttgtggtggagaaaaaaagtgcagcaaattaattaataaaattattaaacattaaatacaaagccaattaatctgaatgaagaagtggttgaaccaattgttgttgttgttgttgttgttataattcaattaattcaagtgcatgtagtgttatattcctacattttataaatactcatctatgaaattccaaccaactatttgagctaatatcattaataattaataattgtcaaattattaataatgtgagctgattttgtttggtaattaaggggagatgtatttagttcattggctgtgttgatccaacgattattaatcattatatgttattaatcaaaataagtatgaaatacataacaaaatgtacttactttaattttttattatgtttgcttttgtttttaatattagtgttgggaggatcggccttaaaaatatattaactaaggccattgaaattttaggaaaaatattaaaaaagagtgtcgcgagattcaaacccatatcattgtgtaaaatgtcatatatcccaaccaattaagttgtaaatatttattgtttataatacacttaattttacttaaatagaagtttaatggggtc

SEQ ID NO: 392797 - DNA, 634 bp, Cannabis indica
tatatatatatacattattatgtatatatatgtctcaaaactcaggcatgcatgcaacaaaaggataaatatatacaagtgatgatttgaagcttgaccatacgtactgtcttctaaacttgcctctattcactactgttctatgttatacgcccatgtcttctttaattaattaatatttatacgtatatgtaacaatgatacaatctataaacggtttttcctaaatatcaagatctgcatattatcaccaacgacatgtaatgtcgccattgagagttattaatgacgaaatttaagtccttattaaagagggtgattcttgtagtgatatatggtataactttgtatattttgattaattatagaattattagcttacaattatatatggtataacttgtatactatagtggagggcataactatgatttgtagttccattttttgagatagttttaaacttaatttgttaatatttaaggtccagatttccttaatttcaaaccctcccaactaaaacctacaaattgaggtagtgttgttaaaaaaaataaaaatataagaataagaatgaactgaaattaaatttaaaaatgtataaaaaaaacttgataaaaaattattaatttta

SEQ ID NO: 392798 - DNA, 751 bp, Cannabis indica
tttagaaaagagctatatgaccaccactctttaatggcagcctttacatggcaagccgtgtaagggtatccaaaacgtagttttaaaggtagacttattaagaccaatgtatgttgcacatccaacatggttttatttgtaagcctttattacacaaacaatgtacgttacacggcaacactacaattgtaagactaactaaatgaataaaagacatttcttcagttcaaattgtgtcaacccacttgctaatgaattagctattggttttatggtactacatcaggtatgcaacggaagagtttcatattatctgattatcattgtaccatagcccctaggatctctagatgtgtgtacattaaatcaaaataataaatttagagtatatctcttgaagcctatcaagatattctcaaaacttcttgtaacttatatcccttaatctaggtgatgaaaaaatttcaattggactcacaacagtgtcttccaaatcgatctgcacacataaggagtagtttgagctattagaataaagtgtacaacccttgttcttgttaagttctcaacacatgagcaagaataattgagtgaaaaacaatttgctttttctctctatgtatttcaaaaataatagttcagaagaagtgagaagtgtcggttggatttctcaattcaggctcctatttatagtagttaaatccttttaattaaatcgttatttattttttaaaataaataaatatctata

SEQ ID NO: 392799 - DNA, 719 bp, Cannabis indica
tctctctctctctccattttttcattctttagtagttttgatatgagcttaccagagatgctaggcttcttataaacagaaaagtgttttgtgcgagggggttatatctcttatggaggcataagtgtaataatttatgggtgttttggtgagaccttttctgttagtatctattgttatagttattgcagatgtttcctcgataaactgggttcttttttaatagacaacaaaaaaatcacaaaaacaaatgttattattgttttgttttttaaattttttatctacagatagttatttagtaggtattcctttaaatcactttttacactacatactaaaataattatagaaagtttctgaaagaaataatattttaacattttcatggttataatataatttagaaaatttatgtagtagacccttaaacgcttgttttgactttttatctgttttgatatcgagtagaatttcttagttttttttttaatgattgtatacgttgtagttgtttaaaattatttgtaaattttttaaatttttttgaataatttacatgccgaaaataaagttatatgtatacaaaaaaatagtcacgcatgcaataaaatatgtaaatcttatttttcagtattgtaaattattcggaatgttccaaaattttacaagtgatcttaaacgactataacatatataattatgaaaaaaaaaattaa

SEQ ID NO: 392800 - DNA, 2171 bp, Cannabis indica
tttcttttgttgggtttgttgataattttatatgggaaaagaattgttgataaaataaaataatttatattatgtgaaaagtgctcctaatttttccccacaattttctaaacttcctaacacacacacaaaaaaagaagagaacaataaagagtgattgttgtcggtgggaggattacacagaagccgcaactctgatggtccgcactcgtcttcgcacaattttctttttcttcttcctcttttgttttgtaagtattcagggaaattcttaaaatgtaagtgtagaaatgtaatattatatgattattatcacttaaaagaaatatataagtgttataaatgaatgggtaatgtaccttatataccactacactttttatttgatttaggatctaaacgaattttttttctctattttttattttatatgtgtacgttatacttatttaatatatattacaaaattttgagaaatttaaaataatttacaatatgaaaattactgttcaaacagtttatttcacataatcatgtatgcaacacaatatttgaactatatttttagcgtgttaaaattttttgaattttttaaaattttgcagtatgtcttaaataaccataacgtacatgactgtgagaaaaaattaacgaaaaaattatatcaaataccaaaacaggtagagatgcatccgtgcatcccttctaaggggtgcattataaaattttcctaaatgatatactattgatgtaattaaatatcgagtctcgatcaattaaattaaaaattaaagtttttcgttcctaaatttatacttacaaaagattttcttttttctctggccaggcctgccgaccttccctaggcataggtgtggcttggtcaggattatgctttgctattgaaattcgatttttgttattgtgaatagtcttgtttctgtaacatagttttgagtattttagttttgtctatgtgacatgattttgttttgttttgttgtcgattcttctttgtacttcgatgacttgccatgaaatcgttgttagtggttgggaataataaattctctacaattgaaggggttgttaattgtgcagttacatgtaccttgcacaatagttgagtgctcaatctacaaggttgaatgaatctaatgtaatagtttctactgctgtatcttccgagtggtggatgaaattgaatataggtgttcttaaggttaattgtgatgctgcaacttttttcatctgattttttttttttttgtcaaataatctagtttagggagctgattatttagcttatttttctaattttaatcctgatcatgtctctaagagagaaatattcctattgaattgtaagttattattttaattaattactattaataaaattacataatttatacaaaaaaaaaaaatatattaaatctcacatatattaatttaataattaaatataagaacaacaaaaataaaaatttatttttgtttaaataacttagaagttggtaaaaatttagatgtgtttggcttcattactataaaaattattttcactttctcaaaacagaaaagtattttaaaaacccaatatgtgtgtttgaccaaattttgtaaaatcaattttaaaatgaaaaattttaaaagaaatggtaatgttgttttttattttatttttgtcatattcttttacatttattttgacatactcgagtatggggtttgagtttcagaggttcgagttcagattcgggtccaagttcagatttaacttctagggtcgggacccgagtatgagtctgaggtccgtaatccaggcctaagtttaggattcgggtccaaagtctaaggttggggtccaaatctagattgaggtgtggaatgttgaagttttgtttaacaaaaaaaataataatctaaaagcagcttttaagaaacattaaccaaatttatattgtattttgaaaattacaaaaatattttctattctcattttttaaaatacaattttaaaaagaaaaaatagaaaacaatgttaaacacttccatattttcctagaaataatttgtaggctaattaggattttttttttccccgaactttgacatgtaccaaatcatacccctaaacttttaaggtcgttaaaaatgccatctgaact

SEQ ID NO: 392801 - DNA, 794 bp, Cannabis indica
aaaaaaaaaaaaaaaaagatactatcaattatatctaaaattctatttaattttctgtaccaaacttttaagattttttattttgtaatttcatttcatcttagctgtgcaagagggtattcaacttacaggtctagccatggtaaatttgagaaaacagtctggaccccaggtacgttaataaatatagtataataattttctatatgtttctcactatattgctattttcatagtgaaatatctatcttaaattatttgtaatacatttgtttgggggatcaggagctctcacaattgatggaaaaaaattcagagtctcaatggggaaataaatttgggttccttatgatacccatcaagtaccataaaactactggtactgatcctttactatatgttagaagggccaaggtgatgctagatcggaagaaacaatctctcgaggctcatttttcttataaagttgctgattttgtgatgggatacttaggatcaaatgtaagtaccaatcttttcattccattttctactgcaaaaagcattaaaaagctaattaagatttttatcttttgaactttgacaagtatcaaatcatgtccctgaacttttaaggtcgttaaaaatgttccctgaactattgagattattggatttaaagacttttgtctaattttagtaaaaaaagtctaatatagatgaaagttcaagggacataatttagtatatgtaaaagttcgagaggcatgatttgttagatattaaagtctgaggagtatggtttagtacataaa

SEQ ID NO: 392802 - DNA, 830 bp, Cannabis indica
attcaatgtttgtaaaacagtaactttcctttaatttcgttagtacagactccgttttaaatttaataaaagaaaatttagaagtaaatgatattgtatgtttctatttagactcaataatttattagaatcttagctttatatatattctgtttaatataataaaagagtttgtactgataaaattagaaaaaaaaatcagagttttataaatattaagtacgtacttaaagtgctaaaaataaatattaaatttatgtcacttatacactttagtacttatacggttgtttaaagtctttgaattattttattaaaaaaaaaagttttggacttttagtcgaaaagaaaaacatattgattgaaagatgtgtgattgccaaagtaaaaatgctagattagcaaacagccaaacaaaatcgtacggataaataaaataaagttctaaattaatattctatcattttcatttcaatcatttagtaatatgcttggatttagaacattcataaattaatttgttttaaatatgaaagttggatattcatattgaatttaatttggactatattattcaataacatattgtagggagagaaggtgatcgcatatttgtccccgattaactccaaacaatcaaattaataagtaaaagttcatgattcctatttcctattctcaccaaaatatgtatagtcaaacatggaaaaaatttggtataatttaatgtttcgtttggtcaaatataacgataatagtaatgtaataaaataaaaatagtataatgagaattaattagggaaaaaaacaaaaaaatacaaaaaaggaaa

SEQ ID NO: 392803 - DNA, 873 bp, Cannabis indica
tatattaaattatatgggaaccggtgatcaatagcgataacactcttatacccctgatcccttttagcatttctatatatatagtgtggtggtatgatgcatggatatgaatgagtaatatataatataatataattagttacctgggctgcatattttccatgagtctgattcgctcctgggacttccaaacgacggcgattgtccaacggaagaagaagacgtggaggcccgactctggggcgtggaaacaggactactcagagaccggttaacagcaaagtaaagatcaagtgctggtaaagtcccacaaagcttctgaccttcttcttctttgaatccaaacccaagctctatacaccctttcagctcattaagatcctcgtccgtcaaatcatcgcccccgctcgacgactcaacgctcatattcttccttcgctcttgctccaaaatctgccgccgccgcctctcccaagccacgtcgcgcggagtctcgcacatcgagagctgtttcgaaagacgcttacggctcttctgcttcggcggcgtcagcgccatgtgccgcagctcctcctccgagtcgctgctgctgcacatgagtgtcgtcttcgggtttgtggcttcagtactcatttttatatatatatatatatatatatatttaaaactgtgtcgtttcaaggcaattcaaagcacgggaataattgttgtttaaaccgccccacacacaagcccagcgggagagtccgaggggagagtgtgggacggagcaggaggcgcctggataaacagggagagtatttcttttttttttttttttgttttaggttatttagtgtatataataaaatattatgtatatttatatatata

SEQ ID NO: 392804 - DNA, 1993 bp, Cannabis indica
agtctacgatgagagttctaacatgaaaaacactgagagatggtggaatgatttgtggaacaagtggaacaagagaatacccccaaaagttaaataatttttatggaaattgagctatttgtggctcccaactaatagttttcttttttacaagagaatgaatgtcaataagaaactgttggagatgcaagagagcgaagagagaagaaccaattattcatgcactttaggaattggtcaaataaatttggaaaaaaattgtggcctttacaaggagattagaacctaagaaaacccaaacctgcctagcttcttatggaatttaaaagaaaacatctctcgatccaattttgatctctttgtgatggtgtccttgtagctttggtacaatagaaatttgtcgctacacaataatttatctcccaaaagtaaggatattattcaggtaggtacaaaaattctactggagtatcaaagcctgaacaagaaggctgatctagagactaggaagcaatccccccaagcaaccagtgctggtcccctcctgagatacagaggtagacaagatggtgatcaatgtcgatgtggctatagacgtcaaccaagagagcactagtattggaggaattatctgtgaccatacaagtaggagtgtggaatctttccacaagttttggccaattcccatgactctgctagtggctaagctacatgtcgttaaagaaatcgttgctattactgagaatttgaatatttgtgagtttcatattcattctgactctcaatgcaattaatctaatgaatgattctactataagtagaggtgaccataaatttctaattttgaatattaaaaagggactgacctctagtaattgtttgggaatgtcctatatttctagaaattgtaataggttagctcattatttagcaaaatgggccttagatgtaaggctacaatgttgtgggaaggaggtctccctctagtttcatatcctgcctttcaataggatttggtcttcccctagttatgacacataatgggaaaaaatttaacaagtttagagtaaaaaactaaatacttaaaattaaaggcaatatagtccttatggttctcgttcatattcaaattagtgaaagattcgactgtggacaccaacgctaaaacccctactgttagaacgaagttgctgcatccaagcttagaaggatttctttatgaaggaacttgtttctcctataccataagaggatcatgaattgttccatctcctcccaagagacacaaaactagatgaagcaaaaaatcataaaggttaccatggctgtccaaaggcacctgaaaacgttgaccaatctccttgcaaacattaacaagcgcattacaacccccataatgcatgaaacaaagtttcctccccatcgttacacatccaacaagtagtatcaggctccaagtcatgcttcttcacatttaatagagttagggaaccaaagaagccttccaaatgaaatatttaactttttgaggaacacgcattttcctaaggcttttccagaaaagagcaagaccatgagaatagggctgagcataaaatcccaagaactgaaaaaaccgttcaaatcgacctaccgaacattgttggaaccgaaactgacgaaatcaaaaattgaaagaaccgataatggttaaaacttgaacagtcgatttttttggtaataaaccgaccgaaaaaccgaaacctaccgttatacatatatattaatttattaatttttttttcctttatgtattgtagttactaataatatataataataataatatattattattattttattaatattaaagttaaaataataaaataattagtttttgaataattaattgtatgttagtagttgtaaaatgtagaataatgtgtttatagaataaatttgatcatatttttttaaaaaaaaaaaaaagttcggtttgggcggtttaaac

SEQ ID NO: 392805 - DNA, 1281 bp, Cannabis indica
ccctatattttccaaaatagtaaacataggaccttgagcttcaattttactaaaaatttttattttttaatataaccaactttaagacaatttctaacacgaacacatactataaatataaccagttttgtcataacatctctagatcgattattattaagttttattttgaaaaaaaaaacagttcagagttctatttgtacaattttagaaaatacagggtctattttgtcatttaacaaaatagaaggtccaattgataattttgcaaaacacaggatccaatatggtatttatcctaattaaagtgtaattatgtgtcagttttttcttttaggttgactgatgaaattaattttaggtaactttattatttattatttgtgctttgttgtgatttttcatatggtcgaaattaattttataggattcacaggtttgaaattggtctcactgattttaaagcatatataataggattactctattttattttatgatgttattatatatttttttatttaaatttatttttaagtttgaaaatagttttcacactaatattatttttagatttttgatgttatttctgtgatcaatatatattataatagaaccctctagtttgggccttcataatcttattcagcagtggcctagtgcgtttgggccgaagccatttttatgggatgaagcctaaaattttgttttgaccgaataaaggaagaagagaataattatcaagcttttccaggatttttgaaaaattatgtccttagttaaactacatacataattgtcaaatgcaaacaaattaagaaagtaaaaacaaaaataaaaggggaaaacattcagtagacaggaagtcctcctaactagctgttctctaatgactaatattaaaagtaaaagacttctttttttaaatgaaattctcacttctattcaagcaaaaagaaaatggttttttttttttcacttctataagacaccattattattagtgattttttctatgatatattttttcggaataatttcaggttaaagtttaatttaattaaaatatgtaaagcaatacaaaataaataaataaatcaacattccacatgttgtttggataacataaagccccaagttttattctaaattgcatctcaatagtatttttctttttaaaacgaatatcaatagactataattatctaatgtgttatcctcacatgttatttttactaaattaggtgaagctagcaattacttaactcttcttgttatatt

SEQ ID NO: 392806 - DNA, 620 bp, Cannabis indica
tacgatatatgatgtatattatcaaaattatttgtctgtgaaattgaactctctaaatcttgaaatgccaaagttagttatagacttaagaagttatatataataagaaacatttaatatatatttggttaatactaatttgtatcactactacaaattaaaaaactactaaaaaaaaaaggttttgaggcatttttttgttagcatataaggtatcggatttgacaaaatttgcgaccgacgttgttctatgggtgactaaagggggtgtgggataattgtagccataagatccctatagcgtcggttattatgaaataaccgtagccctatagtccttataacgtcgattattatcaaataactgatgccatgagatcccctatggtgttattacataaccgttgttataggggtctcatatgactttaatttagtttcaccatttcatgtaatatctgattttattaaaaaaaacattatttaaaatctaattttttttttcatatatatgttttcgtatctaaattttatatatgtgtgctcttaatgggtattacccataaatggatagtattaaaaaatataagtttttatacttaatttttttatttaattaa

SEQ ID NO: 392807 - DNA, 2055 bp, Cannabis indica
cttttttttttttgacaatatatcaaaacatatctttattttcccatattttgtaaatagccctactttctttcacctctataaatataattagggacagtaaaaaattaggggtgtaaaaaaaaaaaagagaagaaaatgtttctgtaagttttccttttagatttggacacaacacaatggcgtggaaaaggcattttgcttaattgcgggcttaacttgagaaagagaaccccggcttgggcttaagactttgggctacgcccatgttccccttatactatttcagttgagaaagaaaggaaaactgaaaaaaaaatatgggtttaaccagattaacaaaaaaatattggtaattcaacatattattaatttctaatgaattgctatgcttaattttttttttttttacacttttaaaacagtttttttttgtaatttttacgaaattctacacagaaatatttataacaactaacggagcaacctaagtcgtaactaaaattcgtatagcaacccacaaagcaaccaaaaccgtaaattaaaaaaaaaaatgttaaaactaatatatgaaataataatctcaaaaaaaaaaaaaaattaataataaatttaccttaccctaactaatatatgatatcatacacgggttattgataactaaaccgagaggaatttaaatgctccccacaaaagtatacatctatacatctaactttcaagaattaatgttgtaatatataaatgcttaaatcaaaaaaaaaaaaaaaaactttaaaagaatcaatcctattatatatattttttttactaaaaaaaaatcacgtattaatttttaatattttttctattaatattaaaagtaaagctttttttccttcctgaaattttttttaataatttttattttattgtataaagtatttttttgaagaaaaaaacctaaagatatatcttaattataaattaaaataaataaaatgagagtacattccccaaaaaccaatcatttccagtttgattcaagcactttttgaaatgtttttttttgttctagttcgtaaatgttcaataaatagttgtatttacacttcttcttttttttttttcctttaaggtggaataggatagtgtttccataaatttcaactatctattactttataactttatttattttttaaataactctaagctctattgaatttgcgtatatatgggatgggtcaatactttgttggtacaaatccattttttgagatgtgaggtggtgagtggtgggttcagtacaatggattaggatgtgtaggctgcactcaatattgttccatatatatcatatatatatgcatgattatctaagttggagtagttaagacgtcaaacacatgagaatcaacagccatatttgaattttaatttattcttaatatcaatttcaaacccctcttttaaaactcatgattctatcttctttttcgacaaaagtcattgtattttattttaattctatttctctacttaattatataatatacatacgtatcattaatataaaattcataaatacagaataaaaataatatataatacatcatttgaacgtaactatcattatttttgttcttatatattattagttaagtataagatcacatgatgatatgcattacacgtacattcgtatatgtatctgtatctttagatttaaatatatctttgatttagttgttaataattaaatatattacgattggactgtttttttatacacagttaattttttttttcttaaattattttaaaatttaaaaatttaaaaattattttaaataactacgatatatgtaattataaaaaaatagattaattttttttaatatcaaaatagataaaaatctactaactacactataataataagtgtctgtactattgctacaaaaaaaaaaaaaaaaatagtgtctatactatatactgtagaactctatttaagaatactctattcaagaataacctctaatttattataaaaaatcaagtcccaatttgggc

SEQ ID NO: 392808 - DNA, 939 bp, Cannabis indica
ttttttgttaatttgctttcctatctaacctactcacattatcctttctagaaaaaataaaaataaaacatcctactcttttgacgtctttggcaccataaaagtacgtgttaggcagcttcacccgctcgttgacaaaataagtggccatttctcattattattattattattagtattgtttgttgatttttttaatagaaaattaaaattttattaaccatgaaacccattatcataattgataataaatcaaaatctcccaaactaaagttaagatcaagataaagaatgaaaaactctaacaaaactataaacaactgaattttgaaaaacaaattttcacaaaaagtaaattgacaagcaatattttgcaatctttaataatatcagtaaaaaaaatcataaaaattgaactcctcaaagcttgcaatgccacgagacagtcagacggtaaaaaaattggtgcacccacaaactctgcttaatccagctgagatcttcccgaatgctcacaaagtaatatttatttaattacacaaaatagtatttatttaattgccaaaattttatcataaatttatatagttgggtagctactatgtgtagtataaatctcgcaaatccccattttaatatgcttaatattgtagggaaaattatggtgacaattgatgatacaactacgctctattataactaattgaagataatttatatttattctacgcactttcgatgtcgaaaaatacgtatcatcacctaataagtctttgaaaatatgagacttttacaaaaatatttatacttcttttgttacttttacatgttcacagaccttacttttttctatttacattttactaaaattaattttttaaaaatactattttaaagtttcaaaattacaaaaatattgtattataataaaaataaaaa

SEQ ID NO: 392809 - DNA, 1685 bp, Cannabis indica
gcatttaaatggtaagaccacagataaattagattattaaagtcaacaaaaatttaatattaacatgtgattatataatcgtggtgaagtcttcttagatcttttcaattaaacgtaactattgttcacccttctttctccattgaattccaagttcatcaagttcagaagtcaaaatacttcaaaacggagcatatgtttactgactcatgaggatgtacaacatacctatgttcttggagcatcatctcaacctccttctttgatgctttaatctaccaccaaaatcaaaataacattagaattcaaggtattaattttatgaaaaagaaactaatcaatacaaacaacttgaattcttggtcaagttttttcttcacgttcaaatccaatagaacatctatattgcaataacctgacacttaaaaattaagtagaaatgttttgaatcgaacaagagtactgtggccatgtgtttatttatagggattatagttaatatatatctatagggattatactaaatatgtctatatagcataaaatgtttttttaatattaccaatttaaaatttaaacacactgcacatatctaaagagtatctttctacattatttatttttgttatccaatccgcatctagaaaaaaaaatattttcttttattattattttcatttttaacaataaaattgaaaaagtgttgatgtttcttaaaattaatattttgaattacaaaaaaattatctttctattactatttttaaaaaaattaaaaacaacatttataaaaaatgaaaagtattataaaattaaaagtattacggttaaattaaaattataatgaacaacatataaacaacacttaaattaaatattttttaataaaaaataatgtttattgaataacataaaaaaactaattgtacaactaaaaatatacataactaaaataaaaacttaaagtataattaaatataagtgttcatgttagaatttggagataagatgaatgggatccatctcaaaatcaattggcaattggaggagtaactcattcttcttatatatgataatttatttccacacattagcaacgtgggacactctaatagttcaatatatatatatatatatatacacacttttatataacacaatttcatgccaatggacaacaacgaccatgatgcaaaaggaagtttggtttgatcatatttcttactagtttccccaataaatttgattgacaaagctatgagaagttatccttattttttctttttctttttctttttttctcttctataaatggaagcaccaactccacacagatttcattttctctagcaagctcacatgataatggtgcccgaaagattccattgatttcttcctactgttagacttttatttgggcttacattaaattttattggttttattaaaacttgggttgattggatagttctttgctgtgttagcccatgttgttggtgatcaattgttaatgggcttagcatctgtgtgtaaagtctaggtgaagcagaagtgtgggcttttctagttgactgaagcctttgatgagcaggcccagcccaactagggttttgtagctaagtcccctccctaactctataaatacatattgtctcatcacaattgtataccttttgataatcaga

SEQ ID NO: 392810 - DNA, 633 bp, Cannabis indica
ttttttttttttttgcttttgtcctatatatatgtaaaatttctctttgtaccgttaacacgattagatacaactttatttttagatcagtcattttttctagtgagcttttcaaatgtatttttaaaagaaccaaaataaaaaataaccacaaaatcaccatatagagaaggaagaagaaatgtattttatagcctccatcatccacacccacagataaaccaccacagcacacacccagaaaacaatcattcattctagcaagatggaactgttaggaatactgtaaaacttaatatagccctaattaattcatgagaattaaacaataagattaaagaatagcggaagcgtaccggagtccatagaatcgacctttaaatgatctttattggtatgatcttccaatttgcatcaaaatctttctctctaaactttttgctcttggtgatggggatacaagagtgaaaagatacgatgcaaatggggaccattacctgttatattaccaacagacaaacctgttggcaatatttttgactatttctatttggcccctcatcaatatagaaattgtctttatggtatccacatattaaaatcataacaatcatgcccttaagtcataaactt

SEQ ID NO: 392811 - DNA, 1126 bp, Cannabis indica
ttatccaaattttgataaaagtgacgtgttgagtatgatagcacgtggtatgagattacccaagactaaaataaaatagaaaatgaaatcacttagtacaaggacaattctaaaaaaaagaagcacggatccttggtttgagtaattattcccacaatggtaaattttatgtatggggtgagattgagtaactacacccaggggtatgtttatgtatggagatgagattgagtaactactcccaggagtatgttctatgtataggaatgagatagaattaactaccctctaggggtatgttaagtgaccgccccccaagataggtaaagtaactaccatctgggggtgagatatgtaactacccctaaagtagttaaagtaactacccatcgggagtgagatacgtaactatcctaatgtgggttcgacagtcacccctcaaaggtgggtcatccacccaagggtggtgggttagtccaagtaattaacttttcaccccttacactcttatggtcccttagtatcacacccaacctacatatatataaatatggataatgtaatatttgttctaagtatcaaagatatatactgttatgtttttattagtattatttttaggtcacttttagagtatttttaaatagttttattcgtatttagtgctattttacgtttttggtagttaatatattacaggtttaatcttaaagaaaaatagagaaatcttggaaaaatatgagaaaaaaggtcaaataaattaactctcgcgatgctagagcaccagggaattcatccaagaaaaatccaaaagttctgatgcgtttggagctcctaaggcaaagaaattggaaataatagagtagcgcctcaacattaaaattccatgtcagggcgctaaaaggccaaaatttggcaaaaatggttacttttgctaaattcatgggcgcgccttaacactggggtttaataaggcagagaagcaaggagagctcactgccaaaacttgtcatttgtgggccgtgacactcaaggatagtgtcgaggcatgtgtgaaaaaaaaaatcaaggatatatcatgtatgccgcggcccgtgttggaagtgatttttctgttgcgacgact

SEQ ID NO: 392812 - DNA, 1729 bp, Cannabis indica
tcgtgactctgcctctagagttactctaatcaccatgccctgaagtgtggtttcctcttctattaaggttggtcggtagctttagactttctatgctgcttggtggaatgagtcttgtttggttcttagacagctattcctttccctttatctttatgggcacttgaagttccaggatcttttggatccgctttctcagggacattagttgttggagaagcatgtatgtcaggagctatcttagtcagggcagtcattacaacctccattctagtcagctttgtgagtaataactcattgagttgatcttgtcgagttaacctgctttctaccagttgaatttttttattcatgatgaccacggggtgtgactcatcaggttggcttttctctccaatgtcatcatcagcagtcttgtcctgggggccatcttcgtgcatatccttcggtatgtcctcgatgttgtctttagtgtccttagagttattttctctgaatttttcatattcgatgatgggattatctcgatttcgatatccgttttggcaacctttgtgatgactagtcacctcgtgagggtgacgagagtctcctactttggtgttagggccagtaaaatgaagaccagactttgttcgagtgagggtcatgattacttgaatttaatctataagctgtctcactacttccttcaactcttaatgaaagcatcaaaatgtttactgagatttttagaaacagagtataaacaataagatctaaagaaacaactaattaaaagagaaagagtaaaaagagacaaacggttttttacgtggttggggcgttaattagccatagtccacgagttagtcttattcagtagttctttaccttgaaaaaagcctttaggaatacaaggaatatatattctcaagtttgcctgagcaaagtttgtaagagaattcaacccttgatccataagattcggtgggtgtatttatagtagtgtgagaattacatttagttttcctttttcctttattggggagtttatagtaaataatatatttgggtcgtctcatgaagttcaacccacaaataagatgatatgctgactaggcagatcagatttggcttgcttttgtcaacatcgtgtgctttacttatgggcaattaatctacgaattaattatttgatgttcgttataggaagtttccccatttcacctgatacgatgccctattgcgatctgaaagttgtagtttctttatttatgtgcataaatgaaaagggaaactggaagaatcttttgtgaacatgctatctcgtccctccaatctcatggtaccggacatgcttccgtgaacagttcattgaaggtagaaggttttatggtcacggagctgggataagttcccggaaggacttatccaaatgggcttaacccacttcatctttgttgaaggatccactgatgggccttggagactgacctaaattccacgtgtccactactagaaacacagataacaaataataatactaataataataataacttaatcatatcaaatgagctaaattaattaaaatttaattgaaaacaaaagggataaaatataagctaaatactattttggactctgtgtttcataaaagttactaattggaccttttgttttgttaaatgacagaatagaccctgtattttttaaaatgatacaaatagaccctaaactatttttt

SEQ ID NO: 392813 - DNA, 1338 bp, Cannabis indica
ttttttttttttttcacttttcatatgaatttaatttgttgggaataataaattattaaagatggtacctaatacagcttttttttatttaagggaattaaaggaaaaatggtgagttttcttgcaccaaagaacttagctataaattctcataatttgtagttttattgaaataataactttaattaatttaaccatgatttcgtataataccataaagtattaaacctatatcattattttatattaatagtctcttgaataaatatcccttcaatttgaaaattaaaaaaaaaaataaaaaagtttcaatatgtattaattacttaaatttagttataataccctacccatgaccccttaatgtacccacttgttatgtataatagaaattgtatttattaatattaattactaattataataagcaccacccttttttaattacttatttatttattatgtgacactaacataatcatgatttttaaatttggttagttattttcaaatgtaaatattttcactctaaaacttattgtttttttaatctaattttttactctaaaaaccttgttaaatcaaataagactatgaaacaaaagaagaaaaaaaaattggcaacctaaaccacaattttggtactttaagtaatttaacttgtaaaattttaaattattattcaatatttagattaatgattttaaatctaaataattttattctcaactttctttgcccatataaaggctatcaaacaaaagaaaaaatacatttccatcactatactacaattttgattaaatatattttttttataagtatcaaatattaatttgaatcacaatattttactttatagttcgattaataattatgagtttcaatttcaacataacaaagaatatttctactcttaactttgttttgttatatgaacactatggaataaaatttaaaaaagtattttgatcacgtacattttcaattattaattaatttgaataaagatcttgtgtgaaaaagggactcttaaagtgtttagtcagtctttaaaaataaattttacgaaagtttactttatagttggattaatgattacgagtttcgaaaacaataaattgattaagaatatttttactctcaactttgttctgtcatacaaatactattgaataagagaaacaacatttcgatcactataccataatttcagttgattaaaaagttgaaagagaaatcttgtcttcgaacataaaaatcaacaaaatttttattagatatactgattctgaaattttcaaaataaccaaaattgagtgatacatttttgctctc

SEQ ID NO: 392814 - DNA, 1119 bp, Cannabis indica
aattttttcttatagcaatatttattaccgttacaataccattcatgtaaatttttaaaaaattctcattagtttacgatgctaaaaatagagttactaatattttagtttaccacgttcaaaaaacttcaaatattttcgataatgtaatttattcgaaatttttcaaaaatttacaaaaataatgttgtaaatataatgaacaccactataaaaaaaatttcagcatgtatttttaaacacaaaaattataataagcgattaactatatcactcctctttttgttttttctgataaaaaatactataaaaaaaaaaaatcttcacaaatggtattgttgaaatatattcatatgtaataaaataaaataaaagttggtgagtaaaaggaagatgtgtttagtgtggttgtaaaattatgagatgagagcaaaacaaaaccaaccatgaaagccctatccaaacgcactatttcttaaccacaaacaaagtgtgtgagaagatgtataatgtaataatgtcatttgtgagatagatttggccaccaaaccacacgtccatttcaatttgaattattcccctatattttattatttatattgaaaaaagggtcttctctccagtctttgatttatggttcaagagattgtgacaagagatcatttactaatctgaaataaaagaagaaaaaagaaagaccaattttgaagtcccggcccaaatatcagggaatcagtgtaagactaaaaaatcgctagaaggagggttcgaacctccgaccttgtggttaacagccacacgctctaaccagctgagctattccagcttgttggtcattgctagtgtaaaatattatttatacgttaaagtgaagttaaagaccttttaaaaatagctaacaatctaccccaacatccctaaaacataatattttattttctgtcgttggcattattttcttttaccaatctcattcacatcattttaagtcattatttttgaaattactccaatgctaagcaattctaaaatatgtcaacaaggacccatacaccattattttttttattattattattattttttttttttgacaaagtgattaaaatcactcatgaa

SEQ ID NO: 392815 - DNA, 996 bp, Cannabis indica
aaaaaatatagaagaagaaaaaatcaatttcttaaatttagtataaaaattgatatgttcatattattttttgaaataaccttcaatattttaataccacctaatttgatttgtactgttcaaatattcggtacttataatatgttataatcacaatcctcaatcattcttcctttaatatgctcggtgttggcttggtaaattaatttgtaatctcatgattacaattctcaatctcttccttattaatttgctttcattgtttgtttgtttgttttttttaaatgaaaggtaaaaaaaatattttcacttctctttcttagttttagccaatattcttctctttatttatttgccgtatgttttaagcttcttttttttttttttttttgttcataacaggcttgtcgaaatttctctttattttttttttcaaatagttttaaaaatcttttctagctacaacagtaatcatttagtcttttgcactattgtgacttactattcaataagatcatcttaatagtaggaagtatatgtttctttaccgtcatgagaaaaataattggaatcaaagataactctttagtttttttatttaattcaagctgctctggacgactggagtcggcctgcgtctcgattgcctagggcggtcccgacttacttcctcagacaccgcaattggaaccaagccatcagcacttgtagcttgagcagggtgagaaggtacatgagaacctgatgcccctaagcgggctgggcaagtagattacctagcaggggtgagggacgcagccggggtaggactgataggtgcagccccacagccagttgaggcactcagcttcgacaggggaggaggagcaccaaagggcatggcgcgccaaggatcagagctagcgcccttttcccatcgagaagggatcttcaaagaaggatcgactgaagattgcccccgatgttcttcttgaaaaaactggcagttttagctag

SEQ ID NO: 392816 - DNA, 2412 bp, Cannabis indica
ttaatttattggttgtggttcatttgagttaaaggctttactgggtgtaggtgttgtgtacactttgctccatatggtgttcctattagatttgttctaatttcttggctattttttcaataaatgtcaatttactctaatgagaaatgttggtaaggatgttggagaatatttgattccatgattgagattgaatcaaaagcccaccgtaacaaagatataatagatatgtggttttggaaaggtttttttttttttaattgtaaattttatttaactagaccaactagcctcaacaatattagcaacatcaaaagggagattaaactcttaaaatatacaattagcatataaataagatgctctaaccataagatgagcagcctgattagcagatcgtttgataaagcgtaaagaatccataaaagaagataaaagatgtttacaaacctcaacgacaccaccaaaagttgatgacaaaatattcaaacttataacagcttgtaccagtaccagattatcagaatcgataatactatacagaaaatcgtgcttcaaccatgataacacttcctcgagagctatggcttcaacaatctttagaagaacttgcctaattagacatgcatttttggaagattttattatcaaaatagatagtatgaataaataatcttatacttgcaagtaccatttatttattgcttatatactctttagcatttttttttaaattgtataagaatactaacaagtattttaggtatacaagtattttttttttatatactactcagtatttattgatcttaaaaatgatacaacaagtacaaattatattagtatttttaaattcacagataattaactatgtatcctctttctttacccaaaacattaaaaaataaaaataatattttattaatctttgtaataatttatttaaaataaatgtagcactataagaacaccaattattgaattctatatacttaatatttggttactagagtttgaaagtaagaaaattaggtatctatacataagtacaccataatatataagcaaaaaagaaacagtaaaactaattaattgcatctcaatataaacataaatatggtagttcatccaaaaacaccaacaattaaaaaatatcacaaatctatcaaaaaaaaaaaaaacattattccaagcctattaaaaaaggaaaaaagaaaaaaagaactgattttatgtcttctgaaaaaaatgaacttaatccgattctaaatttgaaaagtagccttccacttgctttttccttgcatggagatacaactccacagacaacttattcctgtaaaactcttcgtctaatggattaggtatcatgcccatcattttgtgcaagaagaattcagcaaattgaattgtaaagattccacaatcactgtaataaatatttaatgaattcaataataatttcaaatttgtaaaacaaaatcaacaaaattaaaatgataatgctaacctatttgtttgttgtggaagattttgttccacataaacttgtagtggatcagtatctaattttccaagaaacggttcgtcatttctattgatgtctactcgtttattgtagaagtcaattctttccaataattttggaatcataacagagaatggcctgacagaactccctataatttctaaagtctccttggtagggaaaagtgcgttatatattgtcaagcagcgcatacgaatatcaaagatgcataaaatccaatgatacaacttttccactaatattggcatcaacacataattcacttcaaaccaatcaacactaaaatgcaacaccagtctagatatataatcccaaatcttatgtttggtggatggtatttttgaacgatcatttccagcctttaagatttgattgtataaacgaattatacattgactaaaatgggaatctgttgttgttactttcatttctatgctactatcatatttgatttttttgcgcaaatagtagaacgcaacattgatatgctgaaatgagtcattatttaccaattagtatgtatatttgtgttgagtttaaggtatgtatatatgtataaagaaaatatatagcaattggtattaatataataatttacctcaacagacaaatttttttgaggagtttccaaatcgtaaaactaatgtttacgattaattgtattaatctcgaaatcaaatgatggttctaatttggcttgatcatcactgaaaatctttcttctaaaataaaaacaaaaaagaaaaaaaatgatataatatatgcgttatatcattacgaatgcaaaatagtgaaaatgttacctattttttcttgtagaccaatcttaaaccattcattaaaggcaatttgatgcaccgtat

SEQ ID NO: 392817 - DNA, 1267 bp, Cannabis indica
ttttttttttttttgtgaattccctataaggtacaattgggtatgatggttggtacgatagtagtgtaatcaggaggttaggaataaatatttgatagggtaggatagtggtaggataaaatctgatagtggtacaataattgcttaaaatctatgtcatgatgaaatttatggcatgataaagtttgttcatttttctatgattgctcgatagggtaccattgtatgtatgatagtagtgtaatctgaaagttagggacgaaggttaaatagggtatgatagttgatatatgtactatagtacgataattaaaacttatggcatgataaagtttgttatttttttatgaatgcttgatagggtattatttacacaaaaagtagctttaatgacgtgaacataaatatttagcacgtggaaagaagaaaaatattctcagagtgaaggaacccgagttatagtagtagacctaagaggggtcccctagccctgtgcccagcttgactttaggaactttggaataggtgtttggatcttgccaagttgtttctaactcactttcttttattattttgtaccatgaagacataaagaatccatgtcaaaggcctggaatctaaaaatacacgaaataacaccctaaaagtcaactctagcgccaagggtttcacctaatgcccacattgacattccaactagggtttcagttttcaggactgtcttagtgcaaatgggtcaaacattgtattgggacatgaatttgacatgtcaaaaacatatttgaggtaatagaattagattcagagcactttcatctttgaccacctggagcaccaggtgctctaggcacctagcatccaggttaacatgggatgttttcaatcatcaaactgaagaactaccctgagcattttctttgtcttcattcaaaactaggaaacaagtgctttcggggagaaatagatcagcctagaggccagaatagggacccagtgcccaggttgacctaggtgttgggcccagcacccaggttaacactttgttaacctgggtaattttcaaggagtttttgtagaagtcttccaggaatcttctctgtttttgtcaaagattaagatacaagtatttttaggaatcaaatagagtcatttggtggcaaaacactaaacctggcgcctaagttgacacactacaagaaaagccacttttgccggcgcagttgaccaattgcgccgacaaaagttgtcagcataaatgagatgctga

SEQ ID NO: 392818 - DNA, 541 bp, Cannabis indica
atatgtgcataataacttatttttctataattacacattttatttattatgaagaaaattattttcaatttattaaacaatgtataaatagtaagtatttgattgtgggaatttattcccattcattattataattaatgaataatgttatattaataatatttttatataattttaaaaaccaactattattataaatattgaaagtttatatttagattaaattactatttaattctatgctataaaattattattcaaatacatactatatctaaatacaatatatttaaattttaaacatttatatttataaaaattataacgttgaagaagaagagtaattttcgagatgaatgtacaatgttgaagaataaattgatataaaaatttcacactaatttagtggtctgaccctaaatatgctaaaaaaacactttttttttttgaaacaaaaagatttattgagtaaccaataccatacatttttaaaataacactgttaaaaaaaaaaaattaacaaaacagaaaatgcatataa

SEQ ID NO: 392819 - DNA, 691 bp, Cannabis indica
aagaacaagattattagacaaaacaacagttccaacacatgagattttgacatgcaaaccagttggtaacaaaacagttttaagattagaatccctgtaagttttggagaataaattgatatcaggacacacatggtgtgtagcacctgtatcaataatccacttagaactatgaacacaaaaattcttaccaaggaaatgtgacacaactggttgctcatcaagaactgaagtggttgtcttatctgaaactttctgagcaaggagggccatgagtttttgatactgaacattagacaagctggacaccagatcttttttctcctgaagcattttctgttttctcatcatctactccagtgaagttagcagatgctgaaccaggcttatttggagttcctttggcatttcggtttggaaatttcccatgaagtttatgcccaggtgaatatccattcaatcttaaacaacgatctattgtgtgtccattcatcccacaatgtgtgtaattaaattttgatcgaaaaggatgaacagcagtaccagcaaattgtccagcagagttgtttgaggaatttttagcatcactggaagtagtagatccaacaggtccagatgttagatttctttgcctttcttcttgaacaaccaaagcataagctttattcacagtgggaagaggatctctcat

SEQ ID NO: 392820 - DNA, 1485 bp, Cannabis indica
ttcatttaaattacttatatatataaatgataccaattttttaattatataatgcataattgataataaaataatgaaataatccacaaagtattcctcttttgcatcatgcatgtgttgtcttattccccgcgttttatttttttgtttttatataattatagggttcatacttacttcttaggtctttccaaaaaatatatgggaaaaattatttcaaaacccataataataattattattattaactatatatctagacccattatattattttttaattttttttttcaaatttacgatttggatttctaaagctgcagcgctagttgcagtagggtttttatacgattttttattgcaatttagattgcagcgctagttgcaataggaatttttatgtagaattctataaaaatgcaaaaaaaaattatgagaaacctctaacaataattctctaacactataaatgagtggattctttcttgtaaattcatacaattgattttgtaatatattattatattttatccatatatgggaagtctctaaattttataattacttgcatttatagaagtaagtacattatacaatttggaagccaattaatctatcactttttatacatttttctttatgaccactctccttaatattatatgatagatttttttttttattaaaaggcatttatatcatcacttatatacatcaatattactacgttaaaacatatatattttgaaaacaaataaataagaataaaaatgattgttaacaatatatgattaagaagaataataagagtgtatttttatattattataattgtataacaattttttttgcctgaaaataatatctgtcaaaaatcatataattgtcacgcggaggaatttttgtacccaatccatccgcgttatcataattattattattattattttgattatatttgaatgatgattatgttatatataatatatgaattaaaaaaaaataggcaaaaataaaaaataaaaagaaaagaaataataaaataaagggaagggatttggtgagagaaaaggagtggtttggttccgtaatgggtcgtacagtcgtataatgcatggaaagtagtacccaccaccgaccccattccatacccaattggcccaatttccatctgggcccccactcctcccatgtgcctctcttctcttctttcttggattacacgtaagcaatcaaactatactttattgtttgtttgaaaaatgttaaaaaataatgatgctattgtctactattttattggataattacaccaccaactgaaattttaaattttttttattatttatattatagggcagaatttttttaaaaaaatactgtataagtttttatactgtgtactgtgttaatacggtttttttaagttgttccactgttgtttttagttgttctgttcagcgacggacctagtagtgttgatat

SEQ ID NO: 392821 - DNA, 641 bp, Cannabis indica
attttaatttataaatgttatatataagttaaagataaacaatgtttaatacataatgatcagagaataaaataaaagcatcaaagtaatttaaataaaatattgtataaaattttaaagtataaaaattaaactcaacttattaataaaatataattaaaaataatattagtaacatcatgaaattgaaaacaaaataataagaaatttttttaaaaaaaaaaaatcataaagttttgatattaaaagaagatatcgcataaaattttataaattaaaaaaaaaatattatatgaagttttaacacttagaggactaaaaaagaaaaaataaaagataattaaatatttttctaattttcaactcgaatggcaacaaaaagaaagttagaaaatttgtgtgttgtatataattgttgcaatatatactcaaaagaaaattgtagtgattaatacgatggggtacgatagtgggtacgatagtaatataatctggaggtaagagatgaaggtctgatggtggttcgatgcaagtctgacgccttttgttgttgaaatgagcacagactgaagatgtaggttcaatagtggtatgggtgagcaacagtcgattttttacaacaaaaaaaaattcaaaattca

SEQ ID NO: 392822 - DNA, 473 bp, Cannabis indica
tatatgtatatatatataatatttggacactttttaataaatatactaattaatacatgtaatatatattatatggttacgtgccttttttcggctagtggttctttttcatcatgctcattattaatctccaattttagtaaggaattagtgttggtaattggcatggagctgccaatttacacagaattaattagaataaaatcaaatataaataaatattaacattaaccattaaatgaataatataatataattataattttaactaatatatttatatatatattaagtacctctcaatatgattattggacgagtgttcgatattaattggtatagtctcctctaatattctgacaaattctttcaagtccatatcaagttcatcattataatcattagaatgattatttgagatatttggtatctgatttactacttgattggagattagtacttcttcttcttct

SEQ ID NO: 392823 - DNA, 476 bp, Cannabis indica
ttaatattttttatatttaaatacattatttagttaaaaaaaatcaaatcgcttaattagttttaattttttaatcattcaaaataatttattttttaaaatataaattaatttcttaagatttactaatgaaaaatattagaatctttcttattttaatcttaagggtgtgtatgatttgatacatatagttgtcaaagtttaggggacacagttgttaatttataaagacatctcggcatttaaacagaataatgagacggaatctagctaacatataaactaaatttttgtaaatgtaaaagttcaagaggaacctttaacaaactgtatattttagggaacagaattagtattgtcgaaaattcatgggtaaaattaataattattctataatttattatcgggtttcactaatttaatttaatttattatttgtcattggatcaaaacttaatgatttaatatgtttaaaa

SEQ ID NO: 392824 - DNA, 814 bp, Cannabis indica
gtatctcatggacttcacattttgaaaccctaatatataggctaattaataatgcatggtagcttatctttggtagtgcagtctttgacaacacaattttgttgttgttttttaatcaaaatctcataactcaagaaaataatgaggtttttatgttttgttatttttgttttgttgtggttttcaattctaaaaatgatgaaaattacgagtatggtgcatgatctttgcgtaccctttccttgtatcattttacatttcgcttgaatggtgatattaatggcaatgcatcattaattcttcgttttggcttataaatttattaatcttatacgtagtaaccatatttgatttaaatttcttcatatagttaacttgcttgcttgatataaatatataaatatagagttttttgactattaatctctctcaattttaattgttattttccttgtatttaattttaattttatagtttaaactttggtaataaaatttttccaaactactcaatcattagcaaatttaaagaaccatctattttttttaccaacaataattgcttatgtagatatttttatacatgtaatacattttatagggatatgattttgtcccgttattgtactttcacgattgtaatccgtgatgtacgacagtcgtcagatgagggagttatttgatctgacggctgagattgatctaggggtaattaaggttaaaaagtagaaacgtaccatgacactcatttaatgtaccctgagacccatctaatgtaccacagaatacattccgtgaaagtacatcacgggac

SEQ ID NO: 392825 - DNA, 1593 bp, Cannabis indica
aaatataattataaacaatatgttaaattcgatcttattctggatcacaaatacacattatacgtaatagaaagtagttttcaacgaatatataattgacatgtacatagttatatgtgcacgtatgaagattttcgtcaaatttattttgctagctatatgcatgtatatctctctataataaacacgtaacttttaaaatgagaaaattcaattattcaagaagttcacacattttgactttttatatataatccgatttatttggtaattagaggcttatattttcgatcgtttgcatgtatcataagctgtatcattcatataaatatacataagaaaccaattatcactactacaatatatgtcacttttgccagcacaaaaaagttagtattgcgctagtaaaataaaatttacttgtgctgtgttggtaaaaggggttggcaaatcaatgttgttattagaacttttgtcagcataaaatgaaaagcgctggcaaagatgacttttcccagtacgtaaatgcgctagtaaaagttagattttagccactgcaaatgtacgctagtaaaattttgacctctttgccagcgcaacttgcgaaatgcgctggtaaaagttacttttaccagcacagttcattacatgcgcagtagcgaactgtgctggtagaagtgacatttattgtagtgtatactagctagtataataaatacatacatattgatcatgcatgatatgtatattaagatataacgtataaaccatcttttttgttaaagtcaatatgttagaaaaagtagatttacaattgcgctttgcttaatattatcattattatcattcactacactacgtgttagctaaggacactaaactcaagaacaattaagctggattcgtaaccctacagaaacgtcaccaattaattataatttcttacctaaaccaaccaacttcctatgatattatttctttctcaataataaataaatgagtaatccaaaaacaaaaagtaagaggacacgtgaatgaaatatttagatgcatcaatattgaatattctcatgtgaaaaatgaattaagttgatatataggtcaataatatcacccaatgttttctgatcccaactcctataataaaggtccaccgtctaaattactttaaactacttttattccaagtcaccttaattacgcactgttctcagcatagaaatcaacatttttattttcttattttatactctattatatatacttttgacctaattaatttttataaaaaaatatatgtaatataatttttttattaatttattttcatatttcctattagctagaacaagtaaacaaatttttattgaattaataaaaaatgttagaattctcatgacagtactgttaagaaatccatgtattatgcctataaattgttaagagatttgaccaactgactcttcattttcatttatactagtaattatgtcgttatatatatatttacgttaatatagtaatactgtaatgtaactaactattctttcaataaaataagaaaataaaataaccatatgcatatccagtttt

SEQ ID NO: 392826 - DNA, 722 bp, Cannabis indica
cttcaagagagctaacttatgatttttcattgcttgttaaataacattaaccattttagttttcaatttcccctgaagctcaaatctctcatgttttatagatttgctaatactgctgtccatttactggcaaagtttgctctttcggtggatgctaaatgtacatagttagaggaaatccctctgtctctaatgccctttgtattatgactcttagttttaatataaaggcattcttatctaaaaaaaaaaaagttctaaaattgaaacaatcaaaacttaacaaaatatatatgtaatcaagagtatttaaatagtcatatatgacatggacaatcactttttacaaataaaataagaaataaaattctaacttttgaatcaataaaaatgaagagaatatttttacttgaacaaataataatataagaatactaaatagtacaaataaaaattttaaaataaaattattttcataaatatataaaaacaattattataaaaataattattaaaaataaaatattaataaaatacttattgggtaagacattagtcaattaaccatgaaatatatataaaaaaaatcttagactaaggaaaaagttatttataatttacatagataatacctaaaaactatatgtgagactttagtttgcatgtagattatttttacaaacaaaataagaaaaatatattataaaattaaaaaaatatat

SEQ ID NO: 392827 - DNA, 1270 bp, Cannabis indica
aattaaaactaaaaaactaaaaataagtaaaagttaaaaatttaaaatttaaaagttttacgttttttttttttttttttttttttttttttaaattttagctaactaaaatttaacaattcaaatactttgtcaatttattttaaaaaataataaaaatacttttcaatttatgtttgaattttaaattgttttttcttttcttttgaataaaagatatttattattaggccaacactaaaataactttaaagatttacatgaattcaagtaatcttgaccactaaactcttgcctcattaagagaaagagcaagtttgataagattatgagttatagagttcacagagcgattataaaagaaaaacttaaaaatattaagcttatcacaaactaaataagtatcttgtaaaaccgaactataatctcctagacaagcctatcttttgttcacgattttataacaattaaacaatttgtgtccacctcaatactacaatatccaaaacgagagcacaattgcaacttaatcagcatagccatagcttcgacaaaagacagaactaaaaggctcaccgcctgggtagttgcagacattacacaatgtcctgtaaagtcttaaaaaccacttcaaaatccatacaacaatcataagacttagtattttaatcttaaattgttaaaaatttatattgaaaagatttagatatttaagtttttaaatttcaaataacttgaatattttttttaaagagtgatttgaatcacactatgatagtcgtcgacgcggaagaacttccagtcaacaagctaattctctagccaaagatatacaaagtcagaatatgagtcacaacaagcagaacaacttatataagaccaagttatctcggaaatttagacaaaacaacttgagatcacctttatgaggcatccgatataaatagtaacaactttgatttttttttttatcttattttgagttctttaaggaggaaattataaattttatggatttttataatttttgtgcaaaaatatagttttttttcaaaaaaaaattattttatgagaaaattaaaaaaaagttgatacaaaaaaattataaattttatgggtttatatttttgtatgaaatgtgcttttttacaaaagattattttaagaaaatttaaaaaaaaataaataaaaataatgggaaaaatcaatataaaagtaaccaacaaggtataaccagaaggatataagggggtaaataggtatcttatac

SEQ ID NO: 392828 - DNA, 855 bp, Cannabis indica
tttaatgggtttctcagtaagcatagaatttagaaaaaggagatggaatcaacccactacaagtacaactcaaaaaacccagacacatattgtcataagcaaattgcttagctacccaattattgtttatataaattaattaaaaatatataaagttaaactaaaaacaaatacctgtgactgtgagactttcttactttcttcttcttcttcttcttcgaatggaggaaagtgaatttgtttccttggaagttgttgctttggagtgttcaaaagcaaacactatgcacttttccacattcatatcggcctggcccaggcccatttcaatttaatttgggcctaagcccaataaaagcacccaaaacggagatgaacttgttccgcctgaattgttctcctcctccgcccaaagctcaaggtttttgctcaatcatttgtactgagtagctttgaacttatcattatacaaggggttcattcaagtgtggtaacatattcaagccatggatttgagttggctgagcgctattctagttggggcgggttgccttgctatgggctacttcgtggggacttctaatcctggtacgaattttctctcaaccagatcaattaaagacactactacacttgtcagtactagaacgaacaagaagaaggataatcccaaagacccttttgagattgaaaacctagttgacaattttgaagatttcaagatggtatttttattttttctcaccaacagttgaaaccaaaagaacccatttattttgtttttagatttttcattttgttctctttcatatttcagattttggtggtgagaaatgatctaaagatgggtaaagg

SEQ ID NO: 392829 - DNA, 1971 bp, Cannabis indica
gattttcatgatgattggcgaggttgtgaagcaaccatcgccggacagtcaaaagaatcaatagaatcctcatttgaagaaactacaggttcgggaacaggttcagaggtgaagtgggaggttggttgtcctccaacaccacgacatcgcttaaggattttcctcatggaaacaacatcacattgtctcttagaggtggcatatggtagtgtgttttctttgtcagtggttgtaggtgttctatggggtatattggggtctgtagtagcaatagttgttgatgttgaaggggtctaaatgatggtattagatgacaatatcagtgttttaagaaaagggattggaagagtggatgggatagaaggtggataggtggcaaaaatattatgagacaaaccagaagaactcaaatcaggtatataaacatgggaaaaatcagcaacataactagtagaaatagggagattgaggtttgtactaatagttggtttggcatggtttggagaagtgggtggtacaactttcggatggaagggagccccaggaatatttttgccgttatgagttggtatgcttgagatgggggtggagtgtaagacaatattctggtgtgaagaagagttggctagggttgataaggaggaggatgatgggtctgttgcgtgtttaaggagtggctgtgatgagatggaatgcgtagccaaaaatgcagaacttgtcatagagttggtagtgggtttggcatgagaaaggggatcctcatttccaaataagaccctccgttgaggcatgctacgcatgcttaaacgtagaacaccagaggacaatgattgtcgagccaaccttgttagaagtggccatgcattgcctttagagaaatcagtacaataacgatcataaccatctgtggggagtttggcacctttaagccaatgcctgtatgggaggtcatcatcatttccattgtcgattctttccataaacatagtacaatgttcaaaagggtgtccaagaatgccacactcgaagcaaaattcaggtaaatgctcataccggtaatcaatccaaaactcatccttaattgatggtaatcatatcatttggtctctgagaagtggttttgtcacacaaagtttgacccgaacacgaaggaaggggccccaaccctcattagtggagtcctcaaacactttaataaactgtccaatagtatttccaagagctccagccaaagaagaagtcttactaaggaaaggaaatttatagatctgaaccaaaaatggtgtgaagatcaaatcttccttagagacatgcgtgagtaaaacaattagatgattctgaaagtgctaaggttctttattgagcactcttctattgtcaccttcacaaccaaagtagatatggaacatgtccgctttgaatttagttattaccactggaaatcagcctcccaaatgtcctgacatttgttcaaagaaacctggtttgtagataggcttagatgaaagaacacgggcaataagagagaaaggcaatttgtgtaggggcttagggccgtatcaggcaaagaaatgatgttcctctcatcatcagtaagagagagggtggagtgtagggtgtctaaaaatgggtccatgggtagatgcgggcactagaaaccagaaaaaacaggggagagaaaagtaaaggaaaaccagaaaggtagtgaacaggggaggagaagggcgtaatggaggatggaaaagaggcgggaacaattacatgaggctggagaattcaaaaaaagtgatgaaaaggagaagaaaatcgttaaaaagaaaaaaagacagttaaaaatgaaaaacttacacagacccaaacatggcacctacaataaacatatcaattggtaaaacttaatatgtaatttcgttgaattataacttgccatttttttttttctgaaagatataatttgccgtactgcttcct

SEQ ID NO: 392830 - DNA, 1131 bp, Cannabis indica
tactattagtataattaagtatattagttactaaattttatataatttaatttaataattactatagcgccacctatatatatagataatattaaacacatactccataataaatcaaccatatagttgatcataatctcagatcgagaaaccataaaaacaaacaagaatcaataaaaatcaaaattgtccccaaatcatgtgcatgcaaattcaaaaagaaaaagaaaaagaaaaagaaaatatatgtaaaatattctttaattaaaaacattacttattttattttattttgtttttattttataaaaaggttctccatccacttgataattggaacacaacatctacctagctcaaaacaatataccatctttattattttaatcatttttatttttataattattataaaaaatagtattgttataatagtagtactagtattattattatctggaggacagtagtaacctcaattttgatccggtgcaactgggcagagtcttctaagacaatataataatcataatttaattattaagtaaaactataatatatataattaattcttatgatcttaattaatatattgttattccctaagttttgtcaatttctttgttgtgtgcttatgtttttgttttttggggggaatttatttcttttgtttgtcgaccgtagtattgttttaaattttttaaaaataaagtgagataagtgatcaaatttaaaaaataaaaaaataaaaatgataagcgatgagtattacttattaatagggactgacccagtagctaacatgaaaatcattaagaaagatatagaaatttttacaccaaaatacaatttacataatttattacaaaaaaatctacacacggttattacatcatcatttttaccttttctctttcttttattacacatatacaacttgcacatcaactccatgtagagacacaggacggagggacttaagccattgtgtaggcttaaaccctcactgacatttataatatataaaaaaacttttatgttacgtatatgtatttaaatttttgtttattataaatgtgtattaagccctcactcaatttgttcatgtccaattttaaaggtaataccact

SEQ ID NO: 392831 - DNA, 801 bp, Cannabis indica
ttgaagaacccagaaaatcgcagaaagataccccaccagcccaggaactcgcaacccaatccaaagaaaactagagaaatcgaagcaagatcaagaaaatcgtcgccggagatcgtcgactggacccttcccatgaaaggacggaacttcccagttagtttcgtagctccgaaactcgtggaagacttaattttaattatattttttagaggtacaattttaactcaatatatatataaaaaatatatacatatataagtacaaaagtgtatggaatataatataagaatgttattataaattagcaggctttatataaaggaccacggtggttgatatgatcatcaagctgagatgtaattaataataactattgatcacttgcttaattaatatctcaatgatcatccaagctagtcatacatctttgatttggatttaatatctatagaattaattaattaaggacacatatatatatacagtcattagctatcgaatcttatataacttaaaaatagtttttacgaaatatcactaaccaatcgtggagcaccacctataaaaagtgatggccaccactaatacctaataacaatgctctctatatataatacacgtactttatattctgatagattaattaatctcaaatgctcgacgataaaaccctagacatcgctcttgagatttgtgatctcgagtattaattgttccatattcttatatggggcattattcgacgtagtaacatctttgttagttaggatgttagttattctgtttcccattctgttatgt

SEQ ID NO: 392832 - DNA, 548 bp, Cannabis indica
tttttttaaaaaaaataatgagaaaaaatgatatataaaaatgagaaagggaaacgaaatgaacggaaaaagtgtaaggtgcggggcggcaaatggatttggctactgcgtcgcttttatagaggccttttgtttatttcgattagaagctactctgcttttcacattacaagattgcatgatttgtaccgttgattgcttcagcttatctaaacgaacggtggatatataggaacgcgccttacccgttactctggaaacgaagaaatgtgtattagtaaaattccgggttagttaagttcaattagacggtatagaatatagataattagaagaccctcccttattattgtgggtacgtggtaagcactagctgcttgatttgttaataattttctaaattgtcttccagatattttcagtttgtataaaaatctcaaatttcaaaaactttaaataaaataaatcgcgttcgtattttgtgtactgataattaatcgtaaaattatcaaattttaaattttgatatttatgattttttttttttt

SEQ ID NO: 392833 - DNA, 700 bp, Cannabis indica
ataaatatttaagtttaatttgtgattgcgaataaatacctaaatttaatttttagcaataataatgcttaagttatatttctggaactcggtaggtacctaatcattaaatattaagtcattatccgcatgtcatttttttattgatatatttaaattaattttaaaaaaaaattaatgacttagatcaatcaaagattatcacgtgacaatttacttaacacttaacagtcatgtacttacagaagttctaaaattataacttagatattattattgttaaaaattaaacttaaatatctatgttgtaaattactcttatatcaatatcaatctaacagtggtactagacactgaattctattttggtttaatttatttttgttattattaattttgatttatgacaatgaagtccattctagaagattttgacaccaaaaccccaaaaatggtttaggacttttatcatcattattattatcattatatatttcaacatcaatcctagctttttgtctggtattgtctttttcaccaagttgcacaaacacaaatcatctagccgactccattttggtattttttgactcattaatatcacaaaatagtaatgataatgaggcacaaatatatggatcagggccggcctgacttttagtgggccatagaaaaaaaaattattttaggcccttattta

SEQ ID NO: 392834 - DNA, 2418 bp, Cannabis indica
ggagtaggtcgttacccattaactaatggggccgaaactttataaaatcttgtgtctatttacttttttgttcttattgtgtaacatgtggcaaattaaatttgactccgctatcggttggccgaatctgaggtcaacagtttagtgctttcattgagatcgagttattaatttatctgatcaagtgtcatggttaacagaaggagaactccggcaatgacatctgcctcctcgggtcttcctcaagatcctatggcggctgatcttgatgttcgtgttctagtcacaattggaatctccacgaactcgacagatgtggccactcctgccacctctgcaggcaccacaaacatggccaccacagctggccaggtcgacacaaccattcatgtgggtctgaataatcaacccatgcctcatagggaggaccctccactagcgcctcccagtgaaggaagaacccacgtggagcaacccctaggcaccacaagcaaatctggtcctcggtattatgctggagagatagggcgaagaattggcaaacagccattggcgagccctatgtagacttgggagaagatctcaagttggctagagttagagaagccatctgccaagtcagccaactaacgaaccacatgttgttggctgcgatatatttgcactacaaagacgcaaatttctgagacggatggatgaccaagagtacatcctctgatctcatcaggtggagctggactgccgtaatagagaagctaacaacatgataaggcagttcaatgagagaactactagaagaagtcaggatctcatcaaggaacctctccaagggagactagtcgatagatcgaggagggtctaccaacaaactctccaaccaggttcctcaagaaccaggacagactttcccttacccaaaggagcacaagagttaccacgaagatctggttgcaagaatagtcagatatcaacgaccaccagtctgagagccagtcaaagatcttaggcttgacaacacccccgattgtcagcctctggccagccagcccctcagtgttacaacattggccggccaacagggtgaactcctgtcccgaggtctccgagagcgagtaacctagaggtcaatctttaactggctaggtccgagaatggctggaaacacctgagataacagcttgagaagtgactctagtcacttcaaatatctagaccacctaactctagtaactggtgtgatctaccccctgtcaacgctcaggctacactagccgatcaggggagaatgagcgactagaccctacccaacatagggttggtcggccatgaacaactacccataatgggtctggccagccaaggctagtccagctttccaagagtggctggcaagaccttcgcccattcagggttgtagcccattcgagaagggccaatcagccaagtcactatagcaacggatccttcggtgcaagcacacttggatcaaataaaggacatgatcaagggcctagctatcgaaaacctttagaccttgaattggataggtcaaggggatcaccattctcagcatatatcaatgcctttcccttgttcaagttcaagatgctgatatggaagatgtataccgaataaagaagacccactagcacacatcaagtattttgagatgcaacttgatctttaaaaaattactagtgacatgcggtgtcgaatattcccaacaaccttgttggaaaaagctcagaaatggtactttaagctggctctcggaagattcaattcttagaatgagttttcttaagaattatacacacaattctcatcctcaaggttgataccattgcagttggaagaccttgtcgaggtcagacaatgacaaggagaacctttaaatgattacatccaaaggttcaaggctgaggccacaaaagtcaaaggcctaacaaaagaaggtcggtatacaaccatactagggggcatccttccattgagtgacttctaaaaagatatctgaaggatctcaaccaacaacatgaaggagttccttaatagagctgacaactttatcaagctgaaggaagctgttcgacaagcccagacagggcaagtcgacaataggcaatcttagggtgccctacagccccacgatttgcctgatgcacatgtaggtactagcatttctatgcaaacctcaagtggcaagaatactgggggcaagcgcaacaatgacagctcttgaagaaacaatggcaaaaaggggaagtacaatacttctcccacgccacgaaactgcaaagataaggaggacaagttcacttacttcaggctcttgacggagaaacctaagaccatctacatggccactcagggaactatcccatacaagaagccccctcccatcaaaagggagatgag

SEQ ID NO: 392835 - DNA, 601 bp, Cannabis indica
cccacttttttagttaacaaaagaaaatatgggataaaagatatagtgagacattttatcccatttttagatttggcgcctcaaatatgcaacaaaatttttcttttagacaagggtcctgtttgattgaaacgtcaaaaaaaaatatacaaagggaaaaaaaataagttcaaaatttgatttttatgggttagccaaacagggattaatgtttttaggaaaacattttattctggttattagttaaaaaccaggataaaagggtttcaggataaaagggtttaatgtgaaacccttttatcctagtttttaacttaataacagggatgaaaagtgttcccctaaaaaatacactcgcgaacagatatcaaatcattacatgacctactattaacctcgacagaccccaaacccaaaaaccctcgcccaaatacccagaaacccttgcccaaaccacatgtgggactcgatcgcccattctagaatcgcccaaacccgtcggagcagctaatcaaacgattaaaggtatgctttttttttctttattattttctcctattttgcatttttttccactattttttctgggttcaagaaaata

SEQ ID NO: 392836 - DNA, 1545 bp, Cannabis indica
tttgttcttcaatggctcgtcatcatattgatattagtagttagaaatatataacaagttctctgtgactgaagtagttgtatgtagtgcagttacgtaccttgtacaagagttgagtactcaagttacaaggatgaataaacctactgtaatagtttctactgttgtgtcctctaagcggtagatgaaactgaatacaagtgttcttaaagtaaactctgatgctgcaatcttattaatatgattttatttttaaattttttatctgatgagaattattctgctgattatttagttcgtttttctaattttaatcatggtcatgtctccaataggaaagatgtcccgattagattacagacgattattttaacagattgtgattaataaaatagcatgatttattaaataaaacaataaaatgatatattattatatttatacaaaactttttttttatttgaacactctgagttgtgccacaacaatagtagaattttttggtataaaattaaaataaaaaaataaaaaaaaaatagaattttttatacatattatttatttattgagcaatgtgattagccacaatagtgtctagtacttctaaatatatcgtcttgtgatcggctagcgctacttcttaacaattattatattaaactatattgaactcaaaacttagttagaccaatagagatattagcacatataagggtgctagacacttttagcattttttttaggaaatgtcacttccgcaatgacattttcattgctaagctttcaaaattattactgaatataaatctataaaatgcaatggaataatatttatgtctataaatttatcaacgctataaattgttagtggtgcagttttaaaattggtttttatatttataatttattttttttagattattgttgtgcattgtgtgttgttctgattatatttgttagtatttttttgtaattttttatttggttgactgatgaaattagtttaagttatttttattgtatatcatttatattttgtttcataattgtcattgttgttgtgtgacaaaattagtatttattttgtttcataatgttcgttgttgttgtatgatgaaattgcgatttattttttgtgtttttgttcagatggaatctaactcctcttgtaaaaatgcaattgaagatgttgctaaagattttaagtgttcactcggaggaggaacttcttccatataccaagaaaaaaaaaagtaaattaatccaagttttaagaattcatccttgatacatttttgtttctttttgaagtatgttgtctttttcaatttatcttcttatagttttatacgtttatttgaattttttttcttaggtgtcttatgcctattcaatttcttaattgtttatttataatttttgaaactagttttttttaaataggaaacaagtttgtttaggtatcttatgtatgcttaattttttagtttgttgtactaaataactggtgtctgtgtttaaatgttagtttttttttaaaaaaaa

SEQ ID NO: 392837 - DNA, 764 bp, Cannabis indica
atatgctttattgatgaataaatggtttagaaaagaaatgtagcaaataaaaagggtctttcaaattttgcttatttataattatgatcacctgaaacacacaatttctcagattggctcttccctctatactatatataaatatgtgtcttaaataagaaaaaaaaaatagaccttttgtcttaagttgctaaccaataagtataaccaactttataaaacttatatatctttatcttacatatataaatggaatatataacccacttgttcatattaccaagtctatacttctaataattttgttttgaaaagctagggttttatgattatgatcaataattctcaacaaataatttcaaatatatggcttcgtgccaatgatatatatcttgtcacatgcattttcccaacttatataccttaataattgagctataaatatagcttactcattttttttattgaagtttttatatatatatattacattatatttcataattccccacatatatattcttcgatatttatttggccacttgaccttgttagaatttgaggaataagatgaatgaggttctatttcaaaattaattggcaatggaaggagtagtcttttcatcttatatatcacaatttattttcacacattagcaatgtgtgactaactcttaatacactctcctcacgtttgggcctagaaagtgtgggtataacgaacgacttttaagagaccacaggaccgaacgtgacatttgaaa

SEQ ID NO: 392838 - DNA, 1169 bp, Cannabis indica
tcaaggaagggttcgagattggtgaatcaagtcgtagtgcacctgcccctagatcatatcgtgacaatccaaatatcattcaagacccaactagggttagaacaaaaggaacaggtaatgcacaacgaagggatggagaacctacaaatggcacaggttctagacaaagacaatgcgggctttgctgtgagatgggtcataacagtagaacatgtcctaatcgtggaacaacaccagctaggggaagagggagagccacaaccagacacactttggaacaaaacacaaattcggggaacgagaatgttcaaggagacacaaatatgccttattcgacacagggctcatttcagagtagttattactagaatatgtagtaacaaccgagacctcaagatttaatatttcaaaaacatctataatatgtattgtattaacaattaactaggctgcgctaaaaactatctaatggcacatcattagcttaattatatagttgttttgatgatgtagttagcaaagtatcataggaagctcatcaaaatattcaacatgtttacggcgtacttcatgcaagacacatctttttaaatggatctatatttattttcatcgaacaactattattttttttatttggaaaaatattcttaaaaaaataagacctatataaaaccttcaaattaaagatttgtaattatgataatctcactcatttttataatattcttgatcattgtcaatatttatattattttacaacaatttcaacaaaatataaatatataattaatataaagaagaatttcacatttacacaaatgagattgagaaacgtaattccagcacaagtatctagaatgggagattcaaatctaaaaggagaaaaagtttgaactcctcactctcagcgacactacaagcatcattaataattattaatgcctaccaatttgtaaataaataaataaataaatggtggaactattttagttattgtgttttgtgaatgatgacattataagttgttaaatttagtaattaaattacatgtcttttttctttttttgaaattatgtaatatttatgtatctgccaaataaaaaacttattaaacaaagtaaataataagctagtataaatgatattattttaaaacatttaaataa

SEQ ID NO: 392839 - DNA, 1358 bp, Cannabis indica
tttgtgccgcctcacttacaaaccgagttcgatcaaaactggtaggtggcaggtttgatcatgttcccccttcttcaacgtgtcttgttcttttaggacccattatagcacaatgacaattatttacaaaaaaaccaaaaaaaattggcagcacctccccttaaatttctactttcccaaatttcaaattacaccagaacaattcaaataaacacactcacagtccaaaatcacaatataaacccaataatcccactatcaacaaagaatttctaagataatcactatcttcataaaaattcccaaaatccttaatcaatttctcaaatgtaatagagaatgatacttacaaacccgaagaagccactactccacctccattgttgaatattcttgaaagcttgaggttgaagatgaagaacaatggtattcggatttggggtgaaattgatgatttttggtatgatttttgatggaaagtgaagattgatgagtgaaattaagttttgggatggattgggattgagaaattggtgtggagatgaaaagaattgaacaatgggtaatttgggggtggttttcagctgagaaagcttgggtttcggctgagaagtgtttttgtaggtttagggttaatggggtggaaattggggtattttatagaaatttgtcaccatgggctggtcgcgactaacattaaaccttgtcaggactactggagctgaaaaattcatgtggtttctataattgcccaggtcgcgaccagggtcgtgaccacaaaaaaaggttgcgacccaggaacatggtggtcgcgaccactgggttccgagtcccgaaaaaatatatttttttatttttttcacgtttttcacgatacaattggaaaaatataatgtctggtactttaccaaaaatttaaaatactaaaaacactaaaaaataaactaaaaacaatagcaaaaagtctgaaaaagtaaagaaaaacacttgggttgcctcccaagagcgttgtctttatcgtcatctagccaaacgctgagttgttgttttagagaggcgccagaataatggcggacttggcttggtcaatttgacctcccaagtagagctttaaacgctgtccattaaccttaaaggtttctggaccttctcctttcagttacagctccatagggaaacaccttgaccactgtaaacggtcccgaccatcttgactttaacttgccaggaaacaattttaaccttgaattgaaaagtaaaacttgctgcccaggttgaaattcttttttgactaagcttcggtcttgccacttcttcgttctctccttgtagatcttagcattctcgtaagcctcatt

SEQ ID NO: 392840 - DNA, 808 bp, Cannabis indica
aagaagaagaagaagaagaagagagagagagagagagagagaagaagaagaagaagaagaagaagaagaagaagaagaagaagacttacctgtaagataagaagagtgtttgggaggagagaaagtagtggaaaaatatatatatatcaaaataaaaaatgtgtgattgtgtatatgtatcatatatggtaaagaaataaactttattgtaaaatatttataaataaaatgaattagaaaagaaaaatgagagggagaatatgcttaccagtatgaatgaagagtgtttgggaggtgagaaagtaacggaaaatatatgagggaaaataaaatatataatatatatatatatatatttatgtatgtgtagtcttcgtctataggtcaagtgacaaactttataataaatatattatatataaatataaagaagaagaatagtagttggtagtgtttgggagctgagaaaatgaatatgctgaatttggttgtggaggaaaataaaccacgattggtgaaaggtgagacgcaatttaaggactcttttcccctcattaattaattttcttttttattatcatatataaaataaataaaaaaaattgtgaaattcattaaatgatatactatatacagacaaatataattaaaacctgttttaaatttattcaaaggcttacctatccaaaattagagagcattgttttggttgctaagctacctagcattattttgaattgttttataattggttaaaagttttttatatttttttttttagtaatttgcgatataaatacttaagttt

SEQ ID NO: 392841 - DNA, 1190 bp, Cannabis indica
aaaaattcagaccaaattaattcatgagcactcctacttaatgtacatttaagtacatttttagtatgtgtcaataatattacataatacatatatgtgacacttaagcagggctggccctaggcataggcaggctaggcccgcgcctaaggcccactgattttaaggaccaaaataaaaaaaatactttttacaaaatatacatattttttttaataatttttaaaaatatcaattatctttatatagtaagggaccaaaaaaatatttttgcctatagccaattttaactaagggccgactatgcacttaggttattattaattttaaaaatattaaattattatattttaatacaatgatgaataagaaaagatgaatttaaatttttatgttttatttaattactcaattaaaaaaattacactatattaaaaatatatttatatatacaaaatatttaagtcaaatttaatttttttatctttttttatctaaaaactttttttttcatccgatgtaacaattcaagcctatataatgtaaaaaaaaactttttgtaattagataaaaaaattaggtataaaaactcaaatttttttaatacaatccaaatatgttattgcttgaatttattaatatttatttatatataagtgggtgcaggatttgaggttgcgggaatggcatgttgctcaacggggacatttgagatgagttacctatgtagtgagaaaagtccattgacgtgcactgatgctaataagtacatcttttgggacgctttccatccaactgagaaaacgaatcatattatcacctctcaccttattcctctccttaaaaccaagtttcttcgataatttattatcgaagaagtatattttttgctccatgttgtattaaaaaatatttatacatatatatatacactagcgacatgctacaagtatgtgtttcctctacccatgtatttgattttttttccaatccaagtgtttaccttcttttgattaactattattttttaaaaaaattataaaattttgaatgataagtgaatggatttcattaaatgcatgaggccaaatgtgaactcgggactctagtacgaggccaccaaactttaactccttcaaaggataaggccaatttggccaatgttgttagttgtgaccgttagtattaat

SEQ ID NO: 392842 - DNA, 633 bp, Cannabis indica
aataatcttttattacaattttacctttacaagggtgagacaacttttatacctctttagttattttatttaccaaaatacctcttgtacacataaatcatatgatgttgatgtcaatgttgttcaataacactcactattttccctctattttttattaccatttctccatgttatttagtttttcttttcatttcagtttcattttgaatcttctcaacaaaattaaaagaagtctctccaaaaaattgatttcctacgatcttcaactaccattgaagcttcaacccatatttttttaatcttctataatttttaatgtagatggctatcactcattcctcctcttctccatctccttctatggaaaaacttccagttaaacaccctaaagcttcaaaaatgggtttgaaatctatttccaaaaaaaaaaagaaaagaaaaggaaattagatgaagatttctctgataatgattttgttaggccatacccaaacagagaaagactcctgctaagaaaaaatctaaaagcatgaaaatgagtgaaaattgaggggagtcctattattgttggtaaaaaggggaagaatcaagctccttatttaattgaggtttgtattacatttttttttt

SEQ ID NO: 392843 - DNA, 631 bp, Cannabis indica
tataatagaggtcatatgtatatgtatattcatttaattattttacaaattacaattaatatgtaatatttagttaatatgtgtagacatatgtagatatattcgattgtttggtacatcagctgacactaaagcaatacattaatgaaagtggaaattacacatttatatgtcactacaagaaatgttatttttagcacgttctgttttgtgttagcaaaagtttcaatatcaacatagatttgtcaatctcttttgtcaatacaaaaatgtgttggtaaaaataattttttttgccagcgcaatactcaacctttgccaccataaaaatgctctagcaaaagtcttaatatagttgacgaactttattaaacttgatttaatatagttgattttctagaattttcttgttgctactaagtttctagactattcttatatttactaaagtaggtgcgtctagagtcttcttgtttgtttaagtactcttgaactttctagaattatttttcacttgtgttagtagaaggaattatgtagaaaaatatagaagctagtcatttaataatgtttctagattagtctatagagtcctataaatagagatgtaattctatcattttgtaccaag

SEQ ID NO: 392844 - DNA, 1324 bp, Cannabis indica
ttcttcttcttcttcttcttttcgttcttaatcccaaatccgatttcctcactcccaaatccccatttccaatcaaaacccccatacccattccgcttccacctgtacaattctcccacatttcctccccgttcgtatgatgactgctcgaaacggagtcgcatttggaaaactcgggaagctgcagcagccaattcggaatgtgcggagcatggaatggattcgaagaacgggctttcgacgttggaatcgacgaaatgtgatagctcggcgagaagggccgaggttaaaaggcagtagttggttcggtggagattggaggcacctgagaagccacagtggaattcgaggtcatggagggcgttggcgatgtcaaaaatgttggattgggagcggtttgaggcggcagcaatggaggcggaggacttggctataacttcgatgtactttgtggtgacgagtgtttgggtatcaatggcggagaggcgagtgtattcgaagccctttgcgttgcttatatgagcttcagcgattttggcgatggtgaatgagaagtcagggggtgttgattctgattcaatctctcactctctcaatttgcggcatgaagaagaagaagaaaaaaaagaagaagaagaagaaggaggggcggcgggtaggcaatgagagagagaacgagaagagaagaagattcatgaattactcaaatttaaaacgatactagctgactaaaactaaaaaaaaaaaaataagttttgatatatagatagcgcatataaacttaaatatgatatttacttaaaaaaaaacttaaaaatatgaaaaaaattattttatataaagaggaatgccataaatattttaaaattgcatttctttttcttttttgaaaaataacacttaaataaaaataaaaagatctcaactttagaggctatttgttttctttttttgtttttttagacagtgatgtaatatttaaataattttattaaggtaataaattaataaattaattaattctatatattagaagaaattaattattttattaaaagcagtaaaaaactaatttcattaacatcatactaaaaaaacataatttaaaaatgatacaaactttaaaaactagtttcatcaacaataaaaataaaattaataatttcattaaaagaagcaaacaaaatagtttcatcgacatgataataaaaaaaattataatctaaaaacgatactaactttaaaaactaatttcatcaatattaaaagaaaccaattgcttcattaaaagaggcaaaaaaaaaaaaaattaattttatcaaca

SEQ ID NO: 392845 - DNA, 763 bp, Cannabis indica
tttaaatttaaattaattatgattagttatatagttaaaataaattaattttttaattgaaatatttaataagtttatttaataattaatatttataaatatttttatttttaaaaaataaattactattaaattctggtaatttattaattatgtttaaattaattatagccgttaataataatagaacgataaaaaatgaatggttgttttctaacaaaatatttaggagaatcatttaatatattattttttttataatttaaatttatttttacgtaaatttaggttactatttaaattatgttaataattatgtatatttcataaaaacttccaacatttatgaggagtaatgagtgtgagcaagagagcaacatggatagaaggatggcatgttaggacgcgcgtattggagcgtgtgtaaagtacaaatatgcttatttctttcttggtgtccgtagacgaaagaaacttggggttgatttgctggttcaaagtccttggcttttccactgcctcactcacctcactttataagcaactctttaggcgttgatatcgtaactaaaaagttacttttattttgaaaaacaaaaaattattttttggtcttgatcttgttttttgaaaacattttttagaaaactaagtgcatggttggcatcataactagaaaactgttttttgtttttaaaaacagaaaattgttttttaaaaacaatttagtttgtttggctttgttttttaaaaacagttttca

SEQ ID NO: 392846 - DNA, 869 bp, Cannabis indica
aaaaaaaaaagaaaaagaaaatgcatatcgcttataaaagaaattacaaattaattagatttcaaataaatatttttattgaattaatgtgatatattttggatttaattttatcggaaataacatttgtagcattaaagaaaagagaaatggagaatagcaaaattgtggcccaaacctatgaaaaacaacattttttaaaggtcaaaaaccaaagaaatcaggcccaaaactggcccaaacatccctccaccagtagacatgctcattacgttgcgagctgggattcgttcgctggtaccagtgccaggcacccatgtccccctcaccctccactcgcgtgtgtggcacacgcataacaccccagccgcgggtgctcctcaccgcccaggtgcacgagtggtcccaacagccaaagagacttttgtctcacctcttctgcagccgccatgtgccacatgcaaccaatgagagagtgacacgtggcactccagttgtaagtttgtgtaattgtatttacctacatgcaaattgtaataagtttaattgcacattagtccttttacctttctataaatagaagcttaggttttttagaattcagtacaatttcacagtttcagatagaaaaatctagaaaaaaccctcgaagcggtcagtgttagtttactgcttttcttagttaattttcttatgggtttctaagtttccttattattaaggcagatgatgaaacctagtgtatttacttaactatttatttttattttgattctcaatacaatatatgcctatgattttggcttcttaaaatattttctttcatctttaatatcaagtattttttatagttagaaattattaatgct

SEQ ID NO: 392847 - DNA, 849 bp, Cannabis indica
ggtgtttcaaaactggaatagagccagaaatcacatcgatctattggacttgaaccagtatatatcttagaattgatttctttattttctccatttattgtttttggctttatagactatgtttgtccctattttatttctgattgttgttcttattttgttaatcttgtcattgctaatcgattgattatttaaagtttagttattttgattctccactattagtcataatttttccacaatgtaagggccctaaaatttaattttatcttaggctatccgatacaccttaagatcggccctgcgtaggaccatttaatggttagggtcccaagtcctgcttcccagagggcaataaatgggtcgagtttcgttcttctcttctagaccttagatgagccttgctaattgcatgacctttacatgtggaagccatatgtcatgataggaaaaaataccaccaacaatatatttttagagtggaaatttttaaaaattaattataataaaatattctaattaatacttctttctaattattatatcgaatagaatttctagatattgttgagaattccaaataatatttgaattccccaaacaataccaaaatttgcaaatggtggtggtggcacacacttgctatgatatttcgtaatctgcaagcggtgtagcctatgcactagttaaatctcttacatcctctacatgaaagtttatttaaatatatggttctcatcgtatttttatattttctcaatagtcaattttctgttttaatgaaatttcttctttatagaaaaaaagaggtttttacctcacatactgaaatttctaaattttttactt

SEQ ID NO: 392848 - DNA, 1612 bp, Cannabis indica
ctgattcttcttggttaactttgatatgggcatagagatttggaaatccttacacaaggtaatggtcacaactaactgaatccagaaaacttctaacattgatgactatctttggccttagccaatccttctcagattaattctttctcaaataaattgtgattccatctttacctataacgtgccctaggaaagacactcagaataaaaaatccatacttcttaatttgatatatacagtttatgctgccatagtcgctacaaaaccatatgtagatgttgctcatactctacttctaattgaaagtagacaataatatcatcgatatttactatagcacgtctatcgagaaaatccttaagtaccctgatcaccaaatctataagagctagtggagcattggttagtccccaaagacttaaccagaaattcataatgaccatacctagtatgataggcagcccttaagatgttctccactcagattctaaactaatgatagcccgagcgaagatcagtcttggagaagaccatctttctttgaagtcaatcaaaccaaccatcgatcctaagtagagggtagctattctttattattaacttttttagttcccaataataaatatacaaatgaagtgagccatatttcttcctaaaacaacattagaactttccaggacgatacacaaggtcgggtaaaccctaaatcaagcatcccttgaaatcataacttaattccttaaattttgttggagctattttgtagggttccctagatgccacctctgctccaaatgccaaaataacaacaaagtatatctttgctgtagtggtaatcctgcaagttcttctagaaatacatctaagaactattgtactactcttatatccacgggctgaacaacctcaactaggtggaatgtaataccactttaaagaattctatgcatccattctgcaataggtttccaaattttatcatcatgatacttggagttcaagtaccttgagccaataccataacacaaatggtccttcacctttagttgaaaagttaccatttcttatttgcactcaatacaagcggcttactaggacactactcccattccaagtaatatctcaaattatactatactcaaagctacaagattagtgttcaactttctatcctcaactctaatcggcatagaccgaaactacattttggagataactaattctctactaggtaacaaggttccaaaccttatttcatatttatctcaatgcctacctaatttatcaattatccaaactaccacatattaatgtgtagctccaaaatcaattaacacagagcaaatagagtagttgactaagaactgacctgacaccacaaaagaattatcttcaatactggtttgggtagtggcaaacacctaaacatggtgttggttttgcctcttattatggttcctccttctgcaactgtgggcagtctctcctaaagtgccctaccaaattgtattggaaacatgtcttacagttacactctcctagatgatgcttcttacatcgggggcatttcagataagtataatgacctccaaggccaccctgacctggttt

SEQ ID NO: 392849 - DNA, 3308 bp, Cannabis indica
caacttctccaacaagtactagcgtattttcacagtaatttcaaaaagccctaaggtcaatttgtttccatagggtactagtcccaaactccagaatgttcactagtttttgttttctgcaatcttcggatttgacaatcaatggggttagaaccacaagtagaattaaatatgatggtcaaatgggagggagttttcatagatgaaagtaactactatgctgcatcttaaggaaacacaaataaaaaaatatcaagaatcctgagagcataacatcacacggcatacattataaccctcgtataagcatatgagagattacataatctccatagatcaaagcaaagataaatgtacctcgaacagaagagaatggtgagaccaagcgccccgagactaccagaccgaaacgtgaacaaaattctgaaagcctggaaggtcctagaccatcaatcagagccgtaggcgcggcgacacggcggtcgaaggactcaggcaaaggaaaagagtgggaaaaaagccctagaaattagaaaggcatttctaaaattatgtaaataaaatgaaaaaacaaaacaaaaataataaataaatagatttgtagtgtacgcatcactaattatttattacatttacctacctattttcatttcttgtaagcattcatttatatacttcctaccaataatttgtactactaaattttgatacaaaattcacctttacctactgataataattaatgaatacccaaatagcaaagaagatgtatctgttgttatattatttatttataatatggattatatgagtgttacaaattgacaaaaagaaaattgttctatatagtttattgtggtcaaaatgtaacacatgaagagtgtacaaatttgtaacatttgtaactctctttagttgatcacaaatcaaatgtaataaaaaaagttattacacaaaatatttataggattcaactgcaaggctatgattatatacttgttagaaatttaattaatgcacatttatatgagagaagtgagttgaattggaattaatttggtcgaatgggagttacgaaagataaaaactagtaacctgtaaaatgtggtgacatgtcacctgtaggtgcactgtgaaaatgtatgaaatattttggtgctcgatttcaatatttgtgtaaccactaaatcttcttctttagtctaatttacgcttattaatgtgcttataacagtaataagatgttatagatatttgaacctcaagtataatcacctaaacactataattagtggtttaaaatgatgctcatttggacactagcttccatcagcaaattattttactaaaaaatctaaaggcttgataattctcaaaactatttcttagagagttctcttagtgcttaaagatattaaaaataagtttttagacaaatgtgatatatcttgttcaagttatggtgatactcacttatctatactcaaggttgtgagcgagtgatcatattcttcttcatgttcttacttataatatatattacattatggacttgtttggtacaccgtgttgtattgtactgtatagcattgtgttggattattttagtattatttagtatagcactatattttgtatcgatttatatttatagattgtgtgaagttatactatatttaccataaactcgacctcaatcctgaccccgaccttggaccatgaccccagattcggagctggggtcctaggtagggttcaaggtcggggtttgaggccgaagctggatccaggtctgcgtcgaggtccagatgttagttttgtggtactaaattaggtatgcatcagaagcattttaatatgattatcttcgtaccacactctagaatcctccatatgtataaatattaaattaggaaacaaaaagatgaacaagaatgttacctcttgatgatttatcaattatccttgcaatcttttcagaggtcctatccaaggaacggtatgtctcatactgcaattttcttgatcaacaacaacacacaaggattagtgtgggttaataaaatacattgttatccatgttcccaaatgagttcaacacgaaagttatgaagggtgccacattagattaaacgttgatatcacgaaccttcccctaaacgaggttacggaagatactatagtacccgaaaggatgcttctttagcgaaggctgaggtgattctggggattctcaccttatgctttcgtaatcgggagtaaataagagtcacatacgtcccaggatggttgtgaatggattggtcaaggaagaccttagtcgaacctccctgaaactccttaaggtcgaatccgtagctaggcctgatagttgcatgtcgtttgacatcaaatcagatcttatcccctgcatcagaccgtggttgtacgcgtacgtgcctctatagtgcttcttgtccaacaacttgtctaggtgattacttttaaaggaaaaacctttgaataacacatgtcaagacctttacaagatatctcgcattgatcaagcaccacacaatgggaaagctacctaccaaactagcggtcagatggtcttgttgtgtttttggcatttcttgcgtgttgagtaagaaaccctacgtgggtaaatggtatgcccttgcccgcatgtgtgcctataaatacctccatttttttagtacaaaggagcgataattttttacttacaaaactatgctaaatttccaaagagctttcttctttgagagaaataagaggaatacagagttaccattgtaaacacttgtgatactcaaatacttgccaaaaaggctaatataattgactcgtggactaggaatcattaacgctcgaaccatgtaaaaaaatatatttgtctattatttattattttgctcttccttaagctctttgtaatcagtttctgaaaatctcaataaatattttggttgcttttattgagagacaatgaaagattattagttgttgcctcacttcgactatggtgaatactcgaaagaacaccagcaagaaaactcccttagacacagttatgaaggaagttgactcccacgcctctggcctccaagcgaatagtgttagggaagaacgcacaatccatgccgagaaccgaggaggataccgagaacgtgctcgatgacctcgacgaaggccaaaatcctaaaggtaaggaataggaaggtgttgtgaaaattatatacgcaagtatacgcagtcaaacaagtaataaaagtgaataagtaagatcgtctccacagggattgcaa

SEQ ID NO: 392850 - DNA, 1856 bp, Cannabis indica
ttataccaattaccaaacccaaagtttttttaaataaaaaacctaaataaaaacttttaaatgtaaagacccaaaattaaaagtctaacactatgtacaaatattttaagatttatttagattactttaaaatattttcaataaagatgtaaaaatttttgttatatacaagaaatgagacgtttttgccagcgcattttttatgctgataaagttgagtttttgtgctagcaaaaaagattctacttatgtcaacacatattttgcactttgttaaggggggttggtaaatctgcattggtattagaatttttatgagcataaaataaaagttttggtaaaaatgactttttttcagcgcgtaaatgtactggcaaaagtgatattcttgtagtgttatatttgacataaaaaataaattttgtgatgaatttgtatcaacttaattttgactatgtgctctaatacatgcaaaacatgatgcaaaatttaatgattagtttatgtttttattaaaaatacaaaagataatacaatgattttttttttttctaattttgcactttataacagttttttttgtcatttttagagaattccacacataaatcttataccaactaacggactaaccgaaatcgcaatcaaaatccgtatagcaacccacatagaaaccattggagaaactaccaaaacaaccttaattgtaaatttgaaaaaataaaataaaaaataatatatgagataattctcttaattttattatgtaaaacaataaaaaaaagtataagtactttataattattaattatattaataaaataatacaaaacataaatgtaaataaaaagagtagtgaatttatggtaatgcaaattttcatgataacaaatgttatgcaaaaattgatacaaaatttgttatgtgttaaatttgtatcactttttggcatactattagagttttttttttttgttgctacgtgagctataatttagcttttgatcatttgtatctctattcgaaatactctaaaatgctcaacagttttgaataattaataatttttcataattataattaattaaatgtataaaatttgatattaaattttacagataataatattatatatgttctgaataagcaagttacatttaacatttgtcataaatagtttgacattaatgattggtaagaagcttttaaagattaattaatttaaaaagtcaatcaaagattcaaagttcgagtcatatatatacaagttcacacgaactatgatgtttttcttctttttacccgttcaacttttttattctattaattatagtcccatgtaattattatatctttaataatagagattgttattcttttaataaaaatcaaagttcttcatacaaatgtattaataataattactaatattttataaaaattattatattaaattatattaaactcaatatttaattatatattttttaatatttttcatacagagttatacaataaggtggcatccattccatattttgatagttaatatttacttatatgagaaatattaaaagaaattcatgatatacttaatatatatttgcgagatgtaataccgctagctataatttatacaatttaatattaggtcctatttattttattttaataatattataaaaaaccgttaatcaattataaaatacactgctaatagtgatactaagtaccttcattcataccccatatcaatgctaaatttatattgttattttttttttaattatatgtgaatatatataataaaatttttagttttcttattttttttttatttgtatatacttataata

SEQ ID NO: 392851 - DNA, 848 bp, Cannabis indica
tttcttaaattggtactgaaaatttagagactactcttttagatttaaaacataattcatgacacctacaatttatattttctctttcattcctaagttttctaatatgaaagtgattggttcggtataataataatggtatagtagagaatgtaaatgaaattaataagattttggttgagctaattggtaattaattaggtagtcacatcacatttcacaatggtttattaagctattgaaccacatggacacttgagatggttttaatgtctatacttagtctgactctgccatataacatatagcattgttattagatattggtagcgcttaatattttttataggtggcgtctcacgattggttaacaatattttttaaaaattaattttttaagttatatgagatccgatatttaattatattaatagcaatataacaataaaagaaagtactaaaaacactactaatgtcttctaacaattctctataacatttttttgagagcgtaatgatattttacgatcatttaatagcttaatagtttaaaggtcctaggttcgaacggaactatcaatttttttcatccctccctcaccgctaagctagccttagtggcttacaattctctataacataatatacaaagcattgttattaggcaccagtggtatctagtacctttagatttatcgtcttgcgattggctagcgatactctccaaaagttaattattatattaaattataaggtaaattgcggcataaatacctaatgtttcagattttttatacttaaatacctaatgtttatttttggaggcaaaaatacctaatgttacaatt

SEQ ID NO: 392852 - DNA, 1076 bp, Cannabis indica
atattttaaaattaatgtaattatcgtcttgcattcgctacctacatttaactgttatcattatcgtatctcatcacttatagtcatcattatattcaaagttattgttctaattaattttgtatctcacttatagtcaccactacattcaaagtcattgttgtcattaccgtatttcacttgtagtcacttttatattctaaacatctgtcatcaccgtatttcacttgtagtcactattatattcaaagcatttgtcatcaccgtatctcctttcggcatccaatccaatcaaacataaataatttatttcatgtaagttcttttttaaataatgtgtgtttaagaaattagagtatctttataaatctatactctaaattttgtaaatctgcataaatcttcccatgaaagctagactttaataaataaaagcaaataaaaaaaaatgataagaagacaataaaaaataatctcatattatgttcaggtttgaaacagaataacaaaactttgaatttgtactatattcttctgtgaatgatatagtgatatccttagttatcgccatctaaaaatcgatttaaaaaaattacttataatgtcaaatattaaaaatgaattataaaattataatataatttcaaaaataaagtaatattaattcccaaaaaaattatgtaattatgaaggtgctttattatttctttcgacaacattaaagattgtaaacaacctctaaaagagaattaagaggctagagacttgaaaaataaatggaagaaaatgaacataaaaatataatacatacaaatttatttataaatattttagattagggattagttatatattttaagttttacttttcttgtggctattttaatttttatagtataaagataaatttaaacataagcatcaaaatgtaatcgaaaacatcaaacataacatgtaggtatatattatattcgtttaatattggacatcagggtcggccctgaggtgagacggaggaggcggccaccttaggccccccaccgctcaggccccattttgaaaaataaaataaaata

SEQ ID NO: 392853 - DNA, 807 bp, Cannabis indica
  modified_base (575)..(575): a, c, t, g, unknown or other
  modified_base (661)..(661): a, c, t, g, unknown or other
gctatttagaaccaacaaaataaatttctctttgcagataacaagtctaccggtttggaagtggaaccttttataatttcttatttgtaggagtacaaggttgctcaaactcagatcatatctcctcctaatagtactcagcaagatgtcatctttgaaaatttgggtctgtcttccttacaaccttctccagggatgtataaagttagtgtccagaccaacagacatggatatggtgctatagatcaagattctcaggacagaattattgatggtttctactcttcagcctccttaggtctacctcccatttttgcagaagcagaggtctttcgtctagctctattttggtgtcaacagtttgttttcccattcatcttgtgatttcagattgtcaaaaccttgtcttaagaattttaaagcagcagagagatcgctcagccctttctggtctaattatgaaaatcgtctcctcttgttctttcctagtgcaacaatcagatttgctcccagaactaataataccttgacgcataaacctggctcaagctgcttttggaactggcgaagagtangtttggaacaattgtaattcagatccttgtaacctgtttcttcttgttctcatctttagttatagatcttgtttacttcaaaaatntatatatatatatatatataaaatcgatataaaatagtattaaaaaaaaactcgattgggtggactgtaattttacaataaaattaactaaataaatgtattatctctaaaaaaaaaaaaacaaaaaaactaacaaagaactaaat

SEQ ID NO: 392854 - DNA, 1133 bp, Cannabis indica
tgctgttaaaaattcaaatgcaaaatgttttggtataacaaatctgatacagatttattcatcattaactagcatttcagtgttagtgtgcatttaatcgagctgacttgacggcagtagggttatattttttgatgccttctgcataatcttataaaactatttttgatggtagaaacttgtgactttaagtgttagagcttatgtgctcgattatattttgtttgtgagaaaagtaaaaaatcactaagaatttattgtagttcggcaatttaattctctctctagatttacactaacaagtcataactcaaggattttagtaattgaatcaatgctgagtttgattgaaaatttatccaaaaaaaagattgtgtttgtcctctcatgtgtgagtaatttgtaggatttacattacttatgtgtgagtaatttgtaagatttatattagagtaatttgcggcattaatacttttattttaaagttgcagataaatacccaactaaaaattttggcggtaaaaatacttgattttagaagttccgtagatattttttcgttaagtgacacgtaagtgttcacatgtcattttcgcattggtccacattatttaattattatttttattatttaaaattcatgaaaatatttgaaaatcattttaaaattaaaaattaaattaaataaaattaaaattaaacttgattataaattgaaatttacaaaataaaaataataataattaaaagagtaatttgcggtataaatatctaagtttatcattcggttgcaatttaatacctaagtgaaaattttggcggcataaataccttccgttacattttcaaacattctgtaggtaccttgctgttatcttgcacactagacaacaggtggcatgccacatcatttaaaataatgccacatcatattctaaaattgccacctaatattaactattaaaataaaaaatttaatttgatttaaaactaatatagttacataaaattaattgaataaatttatataatataataaacattaaataataatctgatacctaataataataataataaacattaactaatattaccttaaaaacaaacatacacaaaacaattgaactgtt

SEQ ID NO: 392855 - DNA, 1007 bp, Cannabis indica
tgtagaattttccatatatatatgtatactagttttttatatacttgcaacgcaagtatgttaataataaattattggatgcttctaatacaacaatgcaccccttaaaatggggtatttcaaataatttttgaaaaattctacaatatagttctttaaaatgaatgcacctatgcatctttatttattttggtattaaaaaaatatatattctaatatttttatagtcgtatacgttgtaattatttaagacattggcaaaaattttgagaaattcagaaaaatttaacacattgaaaatagggtttaaaaagtatattgtacgcgagactttttttattttatatacatgtgcaatagacggtttgaacattgatttatatatattgtaaagtattttaaatttcttaaaattttacaagatatcttaaataattataacatacacgaatacgagtataaaaaaacttaagattaaattttttttattagatgtcgaaatcgaaacagttaggagttgtatctctgcaattattatagagcagtgtattgtagaagcactcataactttttattctatttttttcatactcgtgtatattatagttattcaagatattttgtaaaattttgagaaatttaaaataatttataatacaaaaaccattgtttaaatagtttattttacacgcgtaaaaaataaaagagtcacgaatgcaacatactatttgaaccttattttcggcatattaaattttttttttgaatttttttaaaattatacaatatgtcttaaataactacaacgtacacaactattaaaaaaattagactaaaaaattctttcaaatactgaaacagttaggggtacatcatgcgtttctttatatccttcacgatatacatatctcatacaaacgatatatcttagaccaatataaatataccataaacttaaactaatatactattaaatgattttttttttccacgatatacaatagcat

SEQ ID NO: 392856 - DNA, 1694 bp, Cannabis indica
aagcatctgttcatgctaaaaattgtcttcaagtaagttatatgaaagaaaatataaaaaattaagttcatggtgctattttatgttattttggaaaatataaaatccaatttttatttaaataaactgagcatctaatcggtaactttttctaaaatacaaggtcaaaatgatattaatttgaatgatatctctatcttatattaagtgtggctaaataatagaaagtgttgttttattttttttttaaaaaaaattaaactcactacacatatttgtagaggattggtccgtatttctcttttcctttgattgactcatctatttggactcttgtttcatctgaagacttgctagttgcaacaaccaatctaagtccaaggctcaagaatcagctcaacgatttgtaatagaatctgtgaattctgttacaacttactttagctcgtcttctctctttctcaccctatatatattagactttaaacctgatcaatttagagttgagacattgattgtacagtgagatttctagagacaagttcagagagggaacttgtatcaaagagagaaatctatatgggagcttgagtgaggaagattatttctaatatgagtgtgtaacatatttccacataatgaattggacttaaggcagtgccttggagtaggatcagtcacactgacttggatctgagctaagtaaaattggttgtgtgcttatctgtttttacttttcttgcatttatactttttgatcactaagtgtttgaattgtgctgtatttttctggtttgtatttttggattagattgctacttgttttgtgtgtattgcaggtcatgaatgctaacaaatttgtataagagctgggatacctgctgcatcaaagttatttccattggattcaaagatcaagatctccaagagtcaagaaattttgaagttctttcatgatcaagaacttgtacttactgactaggaacaagttcttatcaagatgtcgacatcaaaatttgaggtggagaggtttgatagaaagtatgatttctatttatgaaaagcaaagatgatgacacacgttgaaaatcttgaccatgaagaagccttgaaagaagataacaagatttctagaaaactagaaaagaaggaagaagtgttgaagaaagctaagaacaccattattcttagtttgagtgatcaagtcctaaggaaagtgatgaatgagaagactactcataaaatgtgtgttaagctcgaacaattgtacatgtctaagacccttcctaatcaaatttatctgaagcaaaggttctatgggttcaatatggatgaatccaaatccatagatgaaaacatagatgagattacaaaacttgtttcaaatttggaatccataagggtaaagattgaggaagatgatcagacaatcttcctgttgaattctcttccaagagccttgatgagaatttgagagaaacattgtctctagaagaagttattggagttgcatactccaaggaactagatctgaaagccaatcataagttgttcaagaaaactgcagaaggactaaatgtaagaggcatatcaaagaaaatagataactccaaaggtggaaagggaagaggaaagtcaaaatccaactcaaggggtagaaaaccttgttggacctgtaattaagaaggacactt

SEQ ID NO: 392857 - DNA, 535 bp, Cannabis indica
tcttccatggtggtcaggcacgggtcagttcttcaattgttgcttatgcaaccggtttccaccaggattataacagagcaaaaaatcaaagcaccagtacagctacaacctcaccttctacagatcgtgcagcatcctgtagtcgacaaaaggagcaggttccttggtctgtgcctagatttaatgagtttaaattgaatgttgatgcagctacgaatatagatcagaaaattctgggcataggggccatacttcgggaccataatggtatggttttagctgcactttcaaaaaatgtgcaaggaacttttcgctcagatgaaatggaagcgaaagtacttttccatgctctcgattgggtgtctcagttacagctctctatcacacatattgaaaccgatgcattgagagtttcaactgcaattaattcttcttttgctgatttataatgtttttcagatattatatttgatgttcagtgtctcttgtcctttttccctgatgttttagtttcccatattaaaagaactgctaa

SEQ ID NO: 392858 - DNA, 754 bp, Cannabis indica
aataataattttgattaaaatactaataaaaaaatttaacacaaaaaaaaagcgctcctattcatatttagagaggtcaatatccattctttattatagaaagtcattttttgtaaagttggagctcatttttttaatcacactccctattttatctaaaaagtgtgtttagagagcatggttgaagatactaaatatattttacaataaaaagctcaacaaacaaaactctcttcaagattcatacttcaaaaaaaaaaaatacttgatcgacgagatttgtactcgtttattagggtagtttagagcatgttttagtgtcttttatgtcaatttggttcaattttacgcttgttttcttttgtttcgagaaaatatgataaaaatatatataaaaaaagagaaacaagctaaatttatggaaaagcgagcttaaataaagttatttttcatcttagtgagtttggcgatgttcgggagcaagaatagaccaagaaggaaaaaattagaaaaactaatcaatcggggccatggctccgaaatctggagccatggctctagaagaggaaattaagctgagaatgcctggggttgcggctgttagttttgtgatactaaatcaagtatgcagcggaataataatttctgattatcattgtactttatcctcaagatcaccatatatatatattaaatcagaaataataagatgaaaaagaaaatttacccttttgaagcctatcagggtatcctt

SEQ ID NO: 392859 - DNA, 908 bp, Cannabis indica
gacatatatatatatatatatgagagagagagttataatgtgtggttgttttgttcttactttatatacataagaggatagcaagtgagtttgtggttgtgatatgatatttataaaagttatagtactgatcatatttgttgcaacctcaactttgtaagacattattatgatttttttatgttaatatagactttctagaataagtattgttgcactcatcaaagcaatgcctttgacttgtatatatggcatatatactcatggcttttgcgtacattgcattcatattttatgaagatgagaacaccaaagccattcaaatctctttagaaattaaaaaaaaaataattagaattcttacaaaataatgatttgcataaaattaactaataataacatatgtaggggagggagattgttttccacattattattaatatatattcattacatttttgttattcatttgttattttatagttcatttttttttaatattttagtctaccaaattttcctaaccatccaatttcgtagagaatgtgaagtgtttttctgactttctttcattctatatataatctaattttttttattcatttgttcacatgtgacctttcattataaacataataatatatataaaaaaaaaaaaaaaaaaaaagaagataatttactactcatactaaaaatttaatataaaaactaatttaagctattttttattaaatctattacgatcattatttattatttagtgtgctaatctatttattaatttttttttatgtatataggtgtttatggattgcatatattaatgagcttagtgagtaggttatttctttttattataatttgaggagtgttaccgtcaaccttctcttacaaccttttagtcaacc

SEQ ID NO: 392860 - DNA, 818 bp, Cannabis indica
aaattattaaaactaccaaagaagtaaagaaaaaatttggaccacgtcatttttttttttatataaaaaataaagtggagtctaaataaaataagtggaaagaaagggttgcagtagtagtacaattacaatatgatattacagaataccttaaaataaagactagacgatgaagtacacacacagcaattattaatgttaatccatacagcatattccatacatgtacatcaatatttatatgtaggctagctgagtttaggagcaacttatatatacgacctatgtagggtagctatttgaattgaaatatatcatttagtaatttagtcaaatagtggccgtacaataaaagaatcatttttagtgtaacctaaaatatgattggctgcacatagattaccagaatttctggagtacaatatatacgtacgcccttttctttcattttcatttttgatagcgtataaactcaggattagctcttaattgttaaatactgtgtatatacacccgtggcaaaatatcatgaatcctgctctttatatatagtacatataaatatttatgtacatatgtatggagtatgctgtagttagtacaatgatgctcttaataatgaaatgaaaatgccatacttaagcctgaatcatccatcctgcagattatgtgtcacataaatttatttttatgttaatttattttactagggctgatgaggtgctatcaaaacatgtatgttaatatttgttattttattaattatgtttaaacaattattaaaaacaaatatgtttaaattaagatattttttttag

SEQ ID NO: 392861 - DNA, 1387 bp, Cannabis indica
tattttttgtgctcaccaatcttgaatcatatcagagtggacatggtcactatctgtataggtgcggatcagatagaatcacttggccgcaagggatatggctctgataccatattgagaatcatggggttcaatcttaaaatcaattgatgataagtggagtagccttatatatggctcaatactctactattgattctatgtgggataatgtccacagtagttgctttatctaaatggggagaggagtttactggaaacttttaaaagagaattgctcattatgaaagttagcttttgagatataaggaagggagggataccgagtctctttagaaatacaaggaacattaagatgatttattcgaagttttgcctcaacatgaatttttttggaagcaacgatccaaaccgtcttgacttaattttggtgacaagaatagtaagtatttccatgcataagctagtgaccgtaagagaaatatactattcaaaggcttcaacaaagtgatggtgtttgggtggattgggagggggtttagaaaatgatatgattcattattttgatgatttattcaaggcctcaaattcttattatagttgggtgttggagggggttgtactatcagtttctatggtccgaaatgaggaattattagctctgattgaagaggttgaggtgatggagatcttatttcaaaagcactgtgataagtctctagtgcctaatggtatgggtccatagtttttaccaaaaattttagcatattgtcagttagttttttttattcgggttattttcctaatggtttcaatgacactaattgagtattagttctaaagaagaagagtcctgttaacatgaaggagttagagacttatcactctttgtaatatggtccacaaagtggcgtctaaagtgtaagcaaatcacttataaaggtgctaaattttatcattttagattctcaaagcgcgattattcttggtctttaaattttttgataatatcatggttaattttaaagtaatacactatttgaaaagaaaaactacaggcaagatgggttgcatggcacttaaactagacatgaataatgcgtatgactgtgtggagtggtctttttgaagagctatgttgctaaggatggcctttatggagtgttgggtgaagttggtgatgagatgtgtcgattcagtgtgttatcatatcatgcagtggtataagaatggagtcgatatctcctacttaggagataagacaataaactcgtcgtccctttatttgtttctggtctgtgaggaaggtttctttgctttactttgtagatatgagatgataggtgttgtcgagtgaatttcacaacaccaaaatgtattatttaat

SEQ ID NO: 392862 - DNA, 790 bp, Cannabis indica
ttttttttttttgtaaaaggaacaaaacttgactttttttttgtaatgaacaaaacttgactttgaattctatatgttgttatagatataaatattatatttatatttatatatatatatatgtataacgtactagggccagggctagggctagggctagggccaccacctttacaattatataaagaaataaatatgtacgtatgtacacgtgtgatatgcagattttgtttttgttgaaatccttataacaattaaaatttgattagtcttactataatgattgaaaactatgtatatggttgattaattagactgttataattatgtagattatattaaatgtgtgaaaattattgatttaatggttttttttttcattaaattagtctattaattataattctttttaaattagttttgaatatttaaatttaatttaaaagtatcaataaaattaaataattattttttatataattttaattttaatttgaattagacattaatttaattaattaattaatcatactttatattaaattaattattagttatattatttaaattatctaaacttatttacttattttgttgtttaataaaattagttagatatattattttataaataaatttaaaattagattaaattatatatatatatttaaaaaaatataattgaattatattaaatttaattttattattattatttaaagagcaatttgcggcgaaacccccttatgttttgatttttatacacttaacccccttatctttatttttg

SEQ ID NO: 392863 - DNA, 655 bp, Cannabis indica
aaaaaaaaaaaaaagttaatttaagcgagtttgaaactcacatatctgtaattatgtcggttcgatggaccgacaaatatatattgtacccataaaaaattgaacatcatatgtgattgagaatgatagggttagggttagtacacacgagccaaaaccaaaacaaatgaagcgacagttataaagtaacagaaaaaactctacaccaatgaaaatatgaaaattcaaaaaattaaagatttttttagagcaacaatgggagaagagaaatgcttgtatttcttgaagtgaagttaatgttaatggacaagtgatgtacgcaagcttgacacataatcgagtgacttgcattgtccatgattgagtgacctaggttgaaaccatggccgagtgacctatttaaacaatggttgagtgaccatagttcttcacatggccgagtgacttcaagccatgtttggccaattgactttggtcttcatatggttgagtgacattctttctcacgtggctgaatgactttaagtcatcactactacaaaaagtacaatttccgtcagtttttaattgtcatttaaagaatttgcgtcggttgtgaaaattatatacgcaagtatacgcagtcaaacaagtaataaagtgataagtaagatcg

SEQ ID NO: 392864 - DNA, 1829 bp, Cannabis indica
aaggactaggtgcacgggagaggcattgggacactcgacgtgatcataggaacagagcttcagagtctagggaagaggaagttttggggtgtttgagatttgacgctatgaatggagaagagggtggctactagcgcgtggcttagggatcgaacggagcaacagggaaccatggttgtgggttctggtttaatccaaactgaaaagctaaaataaaattcaaaacccatctccaatcatagagaaaaaatagtagtgataatgtgacgacaaacctttgccaaccacgaagataaactcctgtcagccaccgacacttgtggtatctcttcctcattcgtcaagcctgttctctgcctctaattatgtattgtaagagatagatgtgtccgagtttgaatgagagagcgagggaaaaagaaagaagcggctgaagaataaaaagataagattacttaggttttttgtatatattgggatatttttatggacagagatggagagagtagtaaatggttatattattattattattattaaggaaattaagatttaatgggagagagaaagtgataacgtgggttggtttagacattaatatttaacatctataataataataataattttgaaatctaattttatgaatttaattatatttgatacatagactcttgaaatgagggacgactagtatgcatgaatgtactcttttttagtttgactcacgtccagctggtccactggaccacgtccaccaatgttggacgaaaattatactctaaaatttaaaaaaaatctttaataaacattaaaacatataatgtccctctattttttcatgtcaaacattattggacatgatgcaaatttttttctagtccattaatatcagacataaaatctcctcaaaaaattttcatgtccaacaccatttttgttggacataaaaaagagacataaaaggggttatttgtagtagtgcgaggtctttgagatgccgaaggatgcatggtccctatccgcaaaaaattcaaccttgcaaatgtatgcaagtcagatttggtaacttgcaagactaggtcctcacatgagaagggttcattcagttgagcatcgtcaactgaatctattttactaccctcagcactctcttcctcctccgactcgtggtcaggaaccctgaagtcttctcccatttcttcaacttcaatgtcaggggcatgccatgaaggagtgaggtacttattatagtgagatttttctcacctagaaactcgagaccagactcctttttggaggacacgtgtattcaattttcccaagaaaagctaatatgtcaatgagagactcctcgagttttaacctcgcctaagctagactcggcgagaagatgcgaataagaccgagtctaatcgcattcgtgtgactcgcattatgtaggaccaagaaacggatttaacacgcatatagtaggatatatgcgagtatcctctcgatcctcctgcgaaaacatagagatcgattctctatgatccgagttggtcccgatgacccaacagcctctataaaccaacatagactcgcatgtcttggttctatcagctcgttatacgatgtccgtaaatgtgactatacaagaacgcagacatcttagacccaactaagtgttaggtgtattctaagtccgcgagcttacgcatgaatatgaatagccaactcgcatattagaagtcgtatgcgttgctgtatttagtgaatagaaactgcacttcatttattaatgtttacattttttagcttaattattgtaaatcaatgtgcaaacg

SEQ ID NO: 392865 - DNA, 1176 bp, Cannabis indica
aaaacaaaatataaattttttaataaaagatagttaaactatttatattttttaagcaaaaaaagtctagatagtcttttaaaaataactacatcatcagatacaagatcagttcattaaatttagaaatgatgaactttttcatttattaaagtacatgtaatttctttgttaattttataatctttaatatttttcataaaatcactatctttctatatattttaaaaatagtaaattatatttataatttcaatactattactttgtttataataacacacatcaaaatattatatttgaaattatatcactcagtataattacaatatatatataaagattacaaaaattagataacaccgcgcaaagcgcggcttagttccctagttatttataatttaacatgttgatgtagcaacacaatatcagccattctatttgcttttattgaatcgtgatttttagccattatagagtactgtagctttgcccataaccttactaattattgaataagttttattaggtaacgtctcttaattttaattttaaactttccatatcttaagatcataaatccaagataagaagatattttaattgtgatctgtatctaattttttttatcaacctttttaaactagtacttatataaaattgaattaccaatagtatcgtataagctattctaacatactttaataagattaaatcaccattcaatcctctttataccttataaccctctcataatatgaaaatgttaactaatgatgtcatctatttttttttaagatgagataacaacttcattgaaataagcatttgaaatacaaaaagacttgtaaatcagccgaaatattatgatcaagaatgctacgatcagaaagaaatcgagacttcctagctacatagtgagcaacttgatttattgatcgtctaacaaaacaaagacttacattgtttaaagaaaagtaaagattgacaatccttaacaattagaccaaagacagattgttagactttttatttgggcttacattaagttttattggttttattaaaacttgggttgattggatagttctttgctgtgttagcccatgttgttggtgatcaattgttaatgggcttagcatctgtgtgtaaagtctaggtgaagcagaagtgtgg

SEQ ID NO: 392866 - DNA, 1056 bp, Cannabis indica
ttattatttaaataataataatacggtaaataaagtttaataaaaatcaataaatgataataattagtgtcattataataaatacaaaaatattatttattgtgagctaaatttgacattatatcttgtgtcaaatttagcagtatttttttagaacaaatataatttgttttaagtataatgaatatattttttttttagcactatattagagatgctctagaagaattgttaaagctttggcgagatagtcgtcccggatcaaggtatccttaacgtcacatatatgcatatatatcaagaaactcaaggtttgggacgtaaacccggtttcccaatgataaggagagagacaactctcgcccctatccatgatgtacgtaatgcatgaaaaatccccaaaggtaaggaaaaacacactgtagtatatgtcccctaatatcttgaaaaacagtataaatagactcgaaagcatgtcaacccacgggtattaggccgatatctccattgggttgggattgggtatatcttgtatagtctttgtaattgaatccattactgagttaactaattaaaccatgattaacacatacggctgcatataaatataagtcattaattttccacatagagggatctgattatagtttcttaagccaaaacgttactgaaattcaaacaacatctatatagtaataagcctattaacaccagcatcacataaaaagattgtttaaataatcatcattaatttctcgacgtcatatatatatacatacatattatttatctcttcagtctctatatataatcacttcattattttagattaacgaaaatctcaataaagatatttgaaccctagatataatgtttaatgcacatataaaacagtgaacaaattattaagtaaaaactcctacaatataatctcttacttcacaatataaattaattggataccatcaaaaccatgatgacactagatgcttttaagggaaattgaatatctaattaaatactcaactaactaattaattaataactatatatata

SEQ ID NO: 392867 - DNA, 576 bp, Cannabis indica
tgagatataaaggttttagactcaattttctgtttttattttccaagtactgcttttatttttcttttatatggccattgtaactcatcttggattatggtgtaatgtcaagtaaggtccatgctccgtttgctacatatatgttttatgtttggaattttgtaattgggctatttttgctgaagtttttcttttaaaagctataataaagtaaatttagtttttgacatatatatgcatcaatttattactgtttctttttcaaataaagaaatcaaggtacagcatatatataaatttagacttctatatagatgcaaaatatttgttattagtttacagattttttttttaaggatctttctttaatgggacaatttaaagataagaatgaatatttttttagattgttttaagtttaaattttgcatattaaaaataaaatactaaagtttgtctctcattctaaatgagttgattgaaatatgatgtcgccaaagcaacctctcttgagtagattgctcatgaggaatgttagaggtttgtgtgtgtatgtttttcatgtaagtattgatc

SEQ ID NO: 392868 - DNA, 546 bp, Cannabis indica
aaagtcacatgtgttgataaactcctagtagggactgctaagacacatgtttttgggaccaccaactattaaaatttgtcatccaatccatctaaaacccttacaatttttactttatttactttcttttagaagcaatttggaatttcattggtagaattaatttctcaatcctcatacgaaaagaatcttccaaaacaaatttaaaacaaactaaaaatataaaactagcccactccatagaattaaatatcactagttgataacttgagccacacaagccacatggttttagaattttgcaacaacaaacaaaagattcatcacctttattattttgtatgtttaaaattacagcaatcctattagttactttatccaaggctagaactaaggcttactcagctcataagccaaattttttatttttttatttttgcaaatatagtatgatattttttgaaattactatatttctttaaatacgagtccatttttttaaaaaaattatagtaaatgacctaaacatataagggaaatttgaaa

SEQ ID NO: 392869 - DNA, 1365 bp, Cannabis indica
agaattatatttacagaatttttacctttctaattatctcttgattccttatgtaccattaattcaaatgtgaatagttaatctataacatattatagatttagatccaactattaacacttttagaattaacaatataagggaactaatattcgatcaattaggaaatcttggattttactattatataacatgttcctagccactcatgttattaagctcccaaaataaaagttgtaagaatcttcttctttgaaaaactttaacgagtgaatcaaagaactcaatgaacacatataggagttcacgtatactcaagattcaggttgatctactaatgatcatcattgtgatatgaataactttttacatggtaaacggcaagttaacgtaagatatttattacatatcggtctagtcatgcataatctaattataaacagtacctttagtacatgtccatctacatatgtgatccgaatcaaaattacacacactattccatattaaagattccttgaactttaatacactacccacttgttttattcatatcatataatcttaattctcttgtacatccttacaagataataccttccccatatgaataagtaattttaagatatttaataattatactcttataattaatacatcatttatcttataaatgtatttcatattatcttataaatgtatttcatacattctctaatatgttatccattaattacttgcttttagggcataaatcccaacaactttcctgttaggaaagtcttgggtggcatggcaccctgagtcagcctgctactgacttccctcctatctaggcttgtcagacagcttctgttaattttatgaagcctcaactcgctctaggaactctttcatattattcgttgagatcctcctaatatctttccaaaagtcacttaatggaaggatgacccccaatacggtcgtataacgaccttattcaattaggcctttgaccttagtggcctcggccatgaacctttaaatgtaatccttcaaagtttcaccttatcttttctttacctcgacaaggtcttccaattgtgaccgtatctgcctcagggatgagaattgtgtgtagaattctcgagagaattcattttaagaattgaaccttcctggggctagcttgaaataccattaatggcctattttaaataaagttgttgggaagatccaacattgcacatcctgagtaacttcttagagatttatttgcatctcaaagtactttatgtgtgctaggggatcttctcttccaatatacatcttccatactagcatcttgaacttaggtaggggtatgtgttggaaattatttta

SEQ ID NO: 392870 - DNA, 729 bp, Cannabis indica
atccctattaatctaatactaaaataaacttattaactcaattcttttcagcccacattctaatataagacaaacaaattatttctacaccaaattgacccttttgacccctctaaatctttaagaacaaagtcaactcctaaggtagtttagtcctttctcaccaattccaccaaaccgctaacttaaaattctaatctagtccggtatacctctaacttaatttatcttatgttgtcatgatatttccgatcactccatcgagtttccactgtcgccgaccccgaaaatattttatttcaaaaatagtatctacgatacccacataatctaatataatctccgtaattaataaattgcgctttatttaaccatttattaaattcacactaattaacctaagtaagatcataatcttacttcattaccagaataattacatatttaataaaatatgcccaattaaataacatattattttttttttcagaatattacaattattccctcatagaaatttcttcctcgaaattttcttgaatagctcgggatacttctcttgcatttgcgactctaattcccaagtcgcctcttcaaccttgttattctgccacaacactttaactagcagaatagtcttattctgcaatactttttccttcctgtccaggatctgcactggttgttcttcatatgacaggtccaattgaagctcgatatcttcataac

SEQ ID NO: 392871 - DNA, 835 bp, Cannabis indica
aaatattaaaaaaatgaggatgcatgccattttcatttatgattaataaaatgtcatttttttttttatgaattatcattaatttattgaaaaatactaaaaaagaccagtataaatatatgtcatatcactatcactattgaaataattaagcctgaccttaaatataagcgagttaggaattcaaataaaaatttttcccttttaaaattacatattttttttttgactaattttgaaaaatatcatatttccttctaaataaaggcaaaaaaatatgtttttatagcccattatattttaacgccagccctacaattaaatatcaagtcacacgtactttaatataatagcgtttatagaatatcgctaaccactaaggcaacaccttttagtagaactacatactactgatgcctaataacaatgttctaattaattacattccgttactatttctataccattctaattttattaaagtcactataaaaaaactacttttagtgataaactttcagtcacaacataaattttttgtgatgaaatgtaatttttagtcacaataaaaattgactagtgacaaaaatatagtatttaaatataaattatcattaatttaactttagtttgtgactaaagatacatctagttacaactaattattattttgtaactaataccttcaattacagacctttaattaaggaataattacataaggtactattttttgtaaaatatttacatttttacgttcaaataatgtttttttttttttacatttttacggttttttaaaaaataatacgaaaacaacataaaatcaacaaga

SEQ ID NO: 392872 - DNA, 603 bp, Cannabis indica
attacaggtattttcatgtttttgttcattcgttcattttaagtttcggtacttggtaacttactgaatcttataattgcagatgatccaagtttagctctactgtatgaattacttgccaatgtcttggaaaaccctaatgcagctggtcacttgcagagacacagacaaatggatcccataaaattagaatcagtatggcttttggttatgttatttcttttttaatcaaaaatagaattttttagtctctctatctgttcctttgttctctaatttctgaggtaacttttggggttgctcattacttatgatttaaatgcagcatccgattatttcaccctttagtgctactgctaacgaggagaaggtgatgccatctgtctacccaaataatgtccaagggaatgccattctatctgcttagatgtgtttggtaacaactgccaaggcacagacactgtatatagtgtccgagtacacacatgaccatgtgaagaattagtcttagtctctctgaagtgaaagcttgccaatcaaggtaaatatgatatggtagtttttttttatcatttttgggaagtaggaattttagagggttag

SEQ ID NO: 392873 - DNA, 1076 bp, Cannabis indica
ttcagggatcttgcaggccttcagacttgtacacaacaacaacaacaatatcaggtaaaaactaggtattctctactctgtcaagtccagatcaaagtttattggtctcagcaagtgtgggggcgattaaataccccaaaacactgttttatctcttggttagcaatacagaaaaaacttagaaccaaggatagatttagaagaatgggaatgaatattgatgagccatgtgaattatgctcagcacaggatgagaatgcagagcatttatttttcaattgtagtatctctactgcctgcttacaggggatcaagaactggctttcctggcatgttgcagctgatactatgcttactttaaccaggtggattgggagatcaaagatcagcaagtttaggaagaatgtcctagctgctgctcttgtttgtctgatatacactttgtggaaagctcgcaatctcagcctgtggggaaagaccaagccgactgtagaaaggctaattgaaggaacaaaaaaagatgtactccatagagttgctgtagtatggccgaaaaatgtatctttagaggataccaactggtttcaaaagctgtaaatggtggcaaaggaacatagtatgtacaattttatatagcatataaaaaattataaatgtatagcagttttgcatcttaggccctttggggtgctatttgtttgtacaaagatagtttttgatcaatactgttgacttcgcttttagccaatgacaatgagtttattttataagcgataaacgatatgtagtaacagatatatgataaagcaataataagacacatgaattttatagaggttcagccccgacaagtttggtaatagcctaatcctcgttatttgtattgacttaagatcaaggagaaagattccttttcttataactcttacaacggtatctctgaatgtataattcttagataatggtatagtcttagcttagctgcttttcgaccccccccgtgcccagtgatatgcatcactatttatagggctaggaagcttgaggaggaagagttcctctctcgttacaatgcg

SEQ ID NO: 392874 - DNA, 695 bp, Cannabis indica
ggattatgggagagatcaaaggacacattggaaggacggcaggaactgtaggtgtattgagaaaaagtacaataagaatttacacaacagctttaccaaaaaaaagttgaaccaattatgactacacaacatcccaaataatcaatacctatgactgatcaaacaatgaatcataactaaccgatgccataagtggcgtaaaattcccgtctaaaaagtggtcgttggttattaattattatgctgaaaaaagtgtctctaaaggcttgttttgtagtagtgaggcagtagcaagattgcaaatcaattgtggcttgtaaccccagcggctcggagtcaggaccccgattaacaataactactttgagagggcgacgaagttctataccaatcgagatgtcaatgatttctacttacttgtatcaactatcttctttccatcagtttgcacaataaacaggtcaatctcataatgcctcgtttgctttatagtaaattgtccataggaaatctgcttgcaaagaagttacattcagctttcatattttcagagttcacaaatacttgtatttgattctttgtggaggacaaagatgaagtgaaaaaataacatagtttgtgctaattgcttacaagaaaaaataacaaaacaagatttatctttgaattgaaaaattccttatatatattcaatt

SEQ ID NO: 392875 - DNA, 1274 bp, Cannabis indica
ctgtttttgtctcattgatttgggtgttggactttgtttacttctgtattagatatcaactgcacctttttattctagtaaaaaaatgtaaaagattccttaaaaaatcctaatcagttaaggtggatttattattgtcatagagtagaaaggctttcgaattatttaccttcataacttatttttacttttttaaaactagaaattgtttttaaaacattttttttgaaaactgagttgaaaaacaaaacatcaaaatgttttctattttaaaatatatatatttgtaaaatataattttaaaacattatctcacatacccggggtttggggttcaaaaatttttgtatagtatgtaaaatttcaaataaaaatatataaaagtattaaacaataaatattataaatattgtaaagagagcaaagtaatgtgaaaacaataaaatattaatataaataaatttgaagaaacttgaatgtggagatgatgttaagtatactaatcattttgttcttttaaatagagaagctatctaagtgaagcatctcaaatctcaatgccacaattctatagtttgatttaatgtcaccttttaaagtagctagctattgggattgctctaataattttcaagcatacaaattatctcaattgttttgattttctatttggattcaactttaacatagtaaagggaaactcaaaatttgagtacttttttttagcacttagataatgtaggaaatttaagattgtattttaatattctgcgctacaccaacaaataaactaatcaattttaccaaggtcaatttagacctttcactatccctgacttttcaaagtcagcagagtcaaaacgactccgttttgtctttgaacaaaaccaaagaaggattcgagaaccttctcattcaatccctcactctttgtcttgctcgaaatcctagcagagagtttctctttgagaaactcgaagctagaccttaatcaacccagaaaaccccagaaatcccagattaaacacaaaccaaagattagatctagaatgatctgatctatacacaaccacacatataaaatcacaaagagtagagttagaatacaccagattttctcgaagttcaccaataaattggctacgtctccgtttgagctgctcctcgaatttgagagctcgattccactatcaaagatggttcatgtgacagtcagtagtcctgtgatccgtaaggggaaatactgggtaagctgtgcaatcccacatcgcctg

SEQ ID NO: 392876 - DNA, 725 bp, Cannabis indica
gataatagaaactcttaatgagaactataatctatgtagagtgaagtaccgagctacaggagtacgcttgatagactcaccaacgtgaatgtagaagtggggccgcttcttatgaaatttgtgcaaatttctagagcactcactacactgggatagacgtgcatggccattaaagcacgagcttttggactacacccaagaaaagttgtgtgtggtacatcgttagagatagagttcaagactacgagtcactctagtatattctaagttacattcacaacacaaaggttcaaattgaaatatacatccgtttatgctcaatcttattgcttaggatattgctcaagaaaatattttttaaaaaatttaaggtgggggattgttggaattttgtgaaatcttattaaaaaaataaaatatgaagtgtgtaagtaaatggagtcagcataggatagaaacactttattagaagtgtatataatgtccaagtttggaacttgggttggtgccccaaggggtacccaattttgtgcgcatgggtgaggactcacacaccgaaccaccacacgcatgcgcgtgctgccgctgtctgtccatgtcgtaccgtaccaagctggcgggtgggtgggtgtcactttatttttttagagaaaatttatgtgacagtcagtagtcccgtgagccgtaaggggaaatatcgggtaagctgtgcaatcccacaccgc

SEQ ID NO: 392877 - DNA, 952 bp, Cannabis indica
taataatatttgcagccacaggacatagactggttaaggctatgttaacgatcacttaaatcagtgatctaaaaaaactctaccttctataattatatattttttgtactgaatatatatttgtatacatagattttattattatactttttttgaagtaaagattttaatattatactgaatatatatatataattaatttgcaggttccatttacgtttttgcccaattaacgggagctatatcagcagctttagcgttacgtgaattattgtacccaatacatcatattgggacaacgacaccttctggatctgattctcaagctttaggaatggagattgttgtaacattttccatgatgtttgtcactgcagctgttgcaactgatgccaaagctgtaattaattatttaattattaatacataacatccatccattaattaatcaattattaaatcataactaaattgtatatttatagttaaatattattgttatcattttaattaatggcacaggtaggagagcttgcaggtttagctgtaggttcagccgtgtgcattacttcaatcttagctgggtaagcaaattattataataatattatttaagataataaaaataggacaataattttaagaaaattaaaaatatataatattttatttagaatttattttaaaaatacacaaaaattacaaaaataggattatctaaaattttaaatatttttacgatttttaaaattttatttacataaaataatatatgaattttttatattttctattatttttatgtctaatcttgttattgtgttcttggttttttttattatttatatattattttgatgataaattttatcaaatataatactttgtgtaaacttctcatatttgatttttaaggaaattaaacttaaatatataaatatctattctatat

SEQ ID NO: 392878 - DNA, 682 bp, Cannabis indica
gtggtgagggagcgatagggaaaaaaggaaagatcatgggttgaacccagaacttttaaactattaagctaatatatgattgtaaaataccactacgctacactcaaaaaaaaatattataatgtttctcatatattcttaagtgagacaataattaatacaccccctttaagtttggatttgaaagtatgaatataataaacgatctttcaagagaccacaacaaagtcaaacatgtgacattttgaaataatcccacaaggttaaattaaaaaatttgtaagaatatactttagaaaatttttggatattttttaaataggacaaagacctcaatattagaaattagcatttattggttgaaaggtttcaaataatgtctaactcaccctagctttaggttttcctaaagaaaaaatagtcatttttatgagtttaattcattatttttttttttattgtatttttgtgcttcttatcatatttaaacgtactcatattttattttattttatttttgttagcatacttgaatctatatttatcatatgaaattcaaactcatatttttttcgttaatataccatactcataccttccaagctcgtaatggtttcgttgcgtcccaaaagaaactatataaatgtacaatattagatcttcctattggaaattattttac

SEQ ID NO: 392879 - DNA, 523 bp, Cannabis indica
atagactaagaatattattaatttctttacattatatttgttttacatggctagaagtaatgtcattggtttttttttttttaaacttttggaccgtatatgcatatgcaagatgcccttatagatattcttttgatgtcacttgtaaaatgataattttgtttctttgaatttctgactttgagagagagggattcaatcttgagaactcctttatgcttatgatcattgtttagtgacaatttagaccctatatattttacaaaatggaacataatgtaaactttatttagtgttaggatcatgtattgagattagaatttgggtgacaatagttagatagggttaagagagaaaactttaggactatagttaaaaatgtgtgaccaaaattaatttcaaagtaccattgttttatttgtaaaacaatgaatttaaaattaacatttagcaaaataaaaataattaccggtaacttttacaaaataaatattttaaaattatatttattctattacaaaat

SEQ ID NO: 392880 - DNA, 617 bp, Cannabis indica
tttatttatttttatattttacacacttactttaaagctttttaaaaatgagtggtatgcctattataactaaaataaagatcattatataagaaaaagttaaattataatttttctaaatactagatttaatttggcggttctttggtcatttaattcctattgagatctatgcaactttgattatgcttgatctattgggtctatttatttatttaatttttgacttgtaggattttattcttttaaaccattgaatgatattcttctttaaaaaatataataaaaaagctaaacatcgtaacacctagtttgtaaacctaatttttttcacacttgaatgataatcctcttttgatttcttgtttgattctagttggccattggattttattatttttaatgttggtttggagacctagtgcatgtttgacatcataactaaaaaacaattttttgtttttaaaaacagaaaattattttttgaaaacaacttggcttgtttggtattgttttttgaaaacagttttcagaatataaaattacaaaccaattcacttttagtcaatattatttttaaaaaacactaactaaacatgacttgtttttaaaaactt

SEQ ID NO: 392881 - DNA, 879 bp, Cannabis indica
ttttgtgaacacatgagacatgtacacaaatgtatatataatatagactcttcccacgttgcgttgcatgtagtgtacaatactgctgtgcacgtatgtatacttccttcaaattcacttgtgctatgctatacataatataaataaagaagtagttcttttataatacggtgatagttcatcatatatattattatattttatacaaatataaatgataagccggctgccctccatcgtcggccatctaaatcatgtaattatgtatgtttatattggacctccatttatattagggttatttaatgttatagttaaatttaaataaaatattaaaaatagtgcatatttgatgcaaattttgcatgtcatattgtaatttaaatttagatttagtttcaatgtgagacaaatttaaataaacttttagtatactattattagatcaattttttttacaaaataaattatattttaggaatagatcattaatagagatgttcttattttgttggcaaatattgtgaggtttttttttttttggaaaatgtgagttaattatttttgttttttatttatttattttgaaattaaatttaatcatttttgttagagtattattattgaatattagtagtgtttaatattttttagatgtatcgtcttataacgatatacaccttaaaaattattacaataaactataaagatcactacaaaaaatcttatttttagtcacaacaaaacttttgactaaaagtaaaaaaattatgactaattataaatcataattcctatgtcgtgattaaaaggtccgtggataaagtattaatcacaaaaattacaatttgttgtgactaaatgtatttttagtcacaa

SEQ ID NO: 392882 - DNA, 882 bp, Cannabis indica
attgaatatttcctactgcataactaaaaattggccctgcataattattttcaattcaagtgatacacaagttaattcccagttcacaccatataactatatacatatataaatgatgtttaaaggagggtttaccatggtcaactctccactgtatcaaatggggaaagatggtggaaggccaatgatgaccaatcgaaacgacatcgtaaagtttgtcgtttgtattacaagtagtagtagtcctttttgagcttaactcaagcttgatttttttcatttcagatatatttcccaacagaaaagaaggtaaaggccctccaatcccttgcttttgaagctttgatcttagccttataggttccaacacaaaagaattataaagatataagaacaataatacaaacccaccaactaaaacaccgatgaccacgtttaacatctccattgctcgactctctgtaaatctgtcttttgggtttctggcttcaaaaaacttgaaaacctttgaattgtttaatcatattgtacgatattatcatactattttactcgtactatttaatatttaagagttcggtttggaatctgaagtcatttactcgtactattttaatacaacctttgaattgtttaatcatattgtattttcttacaataaaaaaattaaattgatattgtagtaagagcgtcgttatagctaaccatcagatattaattagaataattatcttttttacccctgtacttgtgacactatactattatgccccttaatctattcagcttgttacaaatagtccttgtataattttatatgcatacatttagtccttctgtttattttgtttaaaaatacagtttgtattgatgatgtggtat

SEQ ID NO: 392883 - DNA, 554 bp, Cannabis indica
tgagtatatgttagtgagtagaattaagaaatgctttgattgaatatctatcagaaacgaatacttaacttgttattaagttaagtcagtggatcagcctaggaggtcccataagagtaataaacagacataattatgaatataatgtgggatcttatgattttgactgagtagtaacggtttgacatatcgagttaatatgttgtctatcagtgtagaatatttatacaataaataagaatagggaattcatacgaaagaatattctaatcttgtgatatcccaaatctgatatcttcagctatatgttaatagttaaagaaaattattgagaattatggagattaaagtgaaaataatatgatattttattcttaaaagatgggtaatctgaaaggatcaatggaatattcgaaacaggttgtgaacatatttgataaaggttagattatcttagaataacctcttcccctgacaaagtgtttgtctaaaggtgataattaatgtaccacgagttaggtgttgggttttgtgccctaaataaaacccattac

SEQ ID NO: 392884 - DNA, 716 bp, Cannabis indica
gtctattccttattgttattgtctaatcttataagttacactacattattagaaccatatattatgtcttatttaattttataaagtttttttttaattaatctatcatcatagtacaattttaacataaggaaacagctctatcttagttgtcatttaaatacaaataaatttcatagggatgtgaaagtctttattaaattgattctcattaatcttttttattctgtaattaaaattaaaatacatctccacactatacatgtgctataattacaaactagctacctaattttatgttataaattataagcatatagatctgtgaaattttcatttaaatatatatatatatattgtagtaataataataattaatcatattatgggttccatttaattactactataattaattaaattagtgaaagaatcagacattaaatcttttgaagattaatttaataggaaattaatattcaatggtatgtacgtagaaatagaagattaatttagggtgtgtgtatggaaaactgtggtgtataatggaggtaattatataatttgatatatttattttatcatttaattatattatcgtaactgtctaattgaaagtaattaaggttttagttacactaattattaaggatcctgagcttaattttttttgactaatttttttttaatataactaacttgaagacaattcctaa

SEQ ID NO: 392885 - DNA, 505 bp, Cannabis indica
tttttttttttaagaaaaaactgttattacaaattacacaaagtcatctacaacaaaagaaaaaaaatggtagaaggaaaatcttctaactaatcacaattattatccaacactaaagcttattttgccaaatcatgagcgacttgattaatatctcgcctaacatgagatacagaaactttgaatataaatgtatcaatatacgaaataatacaatttgataatatttaacgaaattaatattaatataaaagcttaaatttgattttaaatttaagttcaaataatttagaatttagtcaaattttacatgagacgatggtctcatttagttttgcatataggttcgctcatgcatatgtttatataaaatataaagaagaagaaggtatacattactaattataattatgaacaccgatagtttttttttttttatttaagcgtttatatattacaacatgttttacttgggactcgaacccaggacctccaacactcacac

SEQ ID NO: 392886 - DNA, 734 bp, Cannabis indica
aagaattaatgtgatcctaccagttggttattttagttataggggttagttaattattagagttatagcttctctagctcaatgcttgtgtatataagctcgtatctccctttctaaaataataagacatttgtttttatctactctttcaatctctttctctttctttctctctacctttctttattctccagttcatcatggtaagatacaatactagatctaacacatacaaaatattttaaaccgcatgcaatgcatagacaagttattatgagagtcgacggtactttttgaatacccttatcaacaacaacaccaccaacaacaaattcttatcgatgtagtctacatactttgttcattgcacaatgcaaaaagttttctatgttaaacattcacatagattatgaactatccaaacacacattaaacattattgctcataattattaaatccaaaatcaatactttatttagaacatcacaaaaatatgaaaaacacatacctcccatatttggcattttccattattgctatgacaccaaaaaaccttcaatgtgaatgtgtctcggtagaagaagagcttatgaaagcaaacccttttcttatcacacacacactactcttagagaacatacatattaactcttatatattcaacacctaaccttaaggggttttattaggcttattgggctaataagtataattagtggtggactataattta

SEQ ID NO: 392887 - DNA, 1187 bp, Cannabis indica
ggcggacccaaattaaagttcaggaggtgaattttttttcgtaagttaggagggcataatttaattttctacataatataatatataaaagttgatacaaacttatatttatatagtattaaatataattcgaagtaaaaaagtaactacaaaattgttggttttaatggttaaggcgctaaacacatttgaaatccttatcttttcaacaaataaattttaaaattaaaataaaatttctaaattgagatttgaaattttgacctttatattgcatgaagtactttaaccattgaaccaaaactaagtctttgttaatatttacaacatttaattacaaatatatattgtaattagctaaaataatatacattacactaagaaaatgccaaagcgcatgaaatttttttctcatccatcagatgacaatatcaacactgaggatcaagagacatcctacacttccacagaatagaactaatcagggagccactgcttactcacccaccataaataaatatatatatatatatatatatatatattatatatcttggggacaataggtagcttccaacaaaactgccaccaaccttccaggaagctcatattagaacaatcaagctcatgttgcaaagaacgactcaaatgattgccactactaacaataaatttcccattcgaataaggtaatgccatatcaattcatctgcacgagtagtatgaaaatgataaagggaaagcacccaagacacaccatatctttaagaaacaacacttcaaccttaacctcatcccacgatccatccttattatgaggaagaactttaaccgaatgaagaagggtaaaggtactagtagggggatccatcaatcctcattaatatgaacagtagcaccatccttaagagaccaattaaccctatttttaagcagatcacgtcccaacaactaagcaatgcgccactacctgtaggtaaaggaaagactaaagcggaggaactgtaagtttgaggcttggcaatgattgtgcatatcgtgacagtacaacttgatgggtttcggtctaaatatattttggatttagtttttgttgtcactatgtgacatgttaaaaaaatagggaaaaaaacaaaaaatacaaaaaaggaaaaaaattacaaaaatactttgggccggcccattaa

SEQ ID NO: 392888 - DNA, 754 bp, Cannabis indica
tatggtacatcttcattaattcaggaatggtattgcatgttttcttttcttggttcaaaccttaatgataatccaaatataatatgctacgtatatatactatagaaaacattattcttcatatggaaactacatataaatatatcatatatatatatgagaataataacatttacacttttgtggcaccaagaaacctgttgcctttctcactcatacaactttctgggaaatagtttgtaccgccgaaagcccctccttccctgaacagccggaatattttttaaggtgacgaggaggattgtcctcgtcgttaggcaattcccgattctgaacagcttcattcaatacctgcacatgattgaatgcatgataagtatcatgttgaagttgaacaatgatatctaatcttggtactcaaacacaaaattaaacttccaccatataagattgataaagaactcaaatgggatttgagagcaaactcctctcaccacctaaggactggcaatggctatttagtttactcgaaggagactcgaaactcaaaccttctgggagaccaaagcgtggtctcgtggtaaggacgtagggttgggtatctgatccaatctaacattttactcctaatctgattcaatctaattattaattagatttgaaaaatcatcatccgacctaatccaattagatctcaaaatccaatccaattacacacctaatttttaatgttagcttaaaaatatgaagaaaa

SEQ ID NO: 392889 - DNA, 824 bp, Cannabis indica
agagagagagagaaatttatgacaaaaaactaaatgtgttaaagtctctccttaagctctttacttatagtcaaatgtctttaaaaaaaaaaaaattagaatgcttttctcttaaaaaaactattaaataaataaataaaaaaagaaacaaaaaagtctatgcttagtcaccaagcaagcatggtcaaaccctacagtaaaagggctagggttctgtactcttcattatctcaaagtttaatagacttaaataatactctcatttttatttataccatacctaatttatttcttgcatttaaatactagtttatataaaataattgtatcaagataattattttttataaaatattatttaaatacttattattaatttctaacagcaaaatgtctaattaataataaaatctttattatctcttttttttacctacatgctggaatattgtgaaaattgaaaaataataatgtgaatattaatttcgtaaataattaattattgtagtcacttaaacattatcctagatattaagggaaccatggatccataaaatctaggctttcaataagatagattcaaagttgaacaaataaatttcttaacataataattattcatgactccgctacacagaatattttatatattaaatataagtacgttataatattatctattgtttctatcatatcgatcaatgattctccatgtacagtctatacttaatatgaactaaatttaacattttactttttaattatattttacccttaaatctcttagttgacttaatgatattttagaaaactaatataatcac

SEQ ID NO: 392890 - DNA, 1018 bp, Cannabis indica
agggagggagtgctcttctctggctggccatagagacttctacaggagtttgacttgccatggagacttctacagtagtctggccgaccatggagactcctactggtagttggtcggccacaagatggatagaggaggctgttgttgaggtagagatccctagctggccccccatgccactggttgccgagatttagagtttttaccatttgacctttgaggcaaggtttgtccttcctctggatagggaaaatctgtcctagtccctaaggggccaggttggtcagcttgtcgatagaccctccgtaatctatcagctagtcttacttgaagtggatatctaaggagatcatagcctcttacatcggttctctggttgaactgccttgtcagattgttggtctctctgttgcggtgatctaactcttcttggtgagatcgaaggatgtactcttggtcatccatccatctcaggaatttgtgtcgctgctgagtgagcacatcgcaattagtagcacgtgtttcttcaaggaatttgtgtctctactgagcaaatacatcacattctacagcgtgtggttcttcaattaaaccggcttggcagaagacctctctaagtgtggctaacttgagatcttctcctaagtccacatgaggctcgccaattctggtctcgtctctcctgcataataccaagggcaaaactcggttgctgttcttggggggtgccccccgaggattcttccttcagttggaggtgcctgtggagggtcctcccatggaggcagggccctgccacttggatccaccgggatggctgtatcagtttggcagctatagtggccagactcatggtgcttgttgcggtgactggattgaccacatctgctgtgttcatgggaattccaattgtggcaggaccatgaatatcgagatctgtagtttttaggtcttgagggagacccaaagatgcagatggtgcgactggtgttcttctcatgttaaccatggcatttga

SEQ ID NO: 392891 - DNA, 781 bp, Cannabis indica
ttaaataaaatgaagataaacttcattaacctttgtagaattgacaagaagcacttagaatagtatttctttttctcctttgttctcttcggccaacccaaaccaaaagcaccaaaacctccaaaaaaatttatactagagtattttctatagtggttgaagagattgaagctagcatttggatttaattttggaggggagcagctcttgatggtttaaacttagtttttaaggcaagccatatcttgcactttgtttcatcaatttaattatgttttgacatgtttagtgaatttatagcattggttagattttattgagttgggtttgagtttcttggggtgaattatgaattataattgagttgggttgttattttaaagttagaaactaccttaaaattttctaattttaagctcaaagctctaatggaaacttaaaattttatggattagattatgaattatgatattatattgataaccaataaaagattagttagtttgttggttaaaagttttcttttgtgtcaaaacgtaatgaattctataataatagaattcttgattgcattttgtttgttcagacactacataataaaacgttccttgctaagaatgattaagcaagtattcttagtctgaggcttttcttctctctctcttttcattttctaaatactctgttttgagttctgttgttacatggtattggagcaccttgatgttggaatttattttaccaggatcttagatctactcacaagtatgttgtttaaaca

SEQ ID NO: 392892 - DNA, 494 bp, Cannabis indica
ttattattattattattattattattattattatattattgtgggagggattccaatttttgaccactcatttttatatatttatataatgaagtgtgaaactattaaactatatgattaatatgattaaggatcaaggacggagagatatagaaaaaatataagagggggcacaatgtaaaagtaaaaattaaaaggggacgaacatataaatttgtatagaaataaaaaaattacaaatttttaagtaaaaaattggaaaagaaaaagtttggaacctatctatcaccaccttatcatgggcggagggaatagggacttgtgggatatttgcctagttgcctacttcaaatttctataaattaatttttatgataaaatttgaaaatatatatttatttttgcctgcaagaattaatagtttttcatttatatttttatatattttattttttctctaaaatttttatattttctattattattctacatat

SEQ ID NO: 392893 - DNA, 959 bp, Cannabis indica
taaattgaaactcattttctggatttatcttgcatcctaaccgacctctctctctctctcctttctcacttttcttcaatttcactaaactttgaacttggtaaatcaagcttggatttttggagttgttgattcttgtggtgttaaagaagttgaggtagttttctcacctccttaattctgagatttaatgttgaatattgtataaatttatggtactcacgatatccttaggttattgttgcttgatggtgtgaatctatgttgtttagtgttttctttgttgttcttagcttgtagatttttgtgttatgcatctagatttgttgtgggaatttcggagtcgaaattgtggtttaattcatgtataaatactctgattttttgggttttttattgtctaaaatgcttggtgttcaagctagtgaaatggaaaatttatgttgattttagctcaagtttaatgcttgttttgatttttgtggagttggtgttagttgcatatttgggtgttgattaaagcttgtttaggtactttaaactctatgttattgatgattgatgctaattaaatatgtatgtgagttgtgcatgcattgttagagttttggtgcattttcgagttactaaaattgtatttctgggttttcaacccaagctctgcagtgcgctcagggagggcgtcgtggcctgctcacgtgggcatattgcatgttgaacttgtattgttcataacttttcgatccggactccgtttggagtgttctgaatatcgttggaaagctcgttccaagctctgtatgtttatttatatttgaatgccaattatatgattttgtgaaagtggatttagggattaaccctatttgtgaatcccaggaattgtgactaggattactgacacttgtttaggaacacccaaggatttgaaatcttcacgtacttgggacattaggtaa

SEQ ID NO: 392894 - DNA, 1328 bp, Cannabis indica
tacaagaaagaaagaaaaaaaaaaatggataacctatactttgcttaaacaacacccaattcaatttcactaaagttgaacaaaaaatcgaagttttatattaattgattaaatcataaatttggttgaattgttaacgttttgtggatagcatcgaacatgctcaacttcacggattcttgattggtgaagttgcggcttgtctattggttttggagacggtagtttcgttgaagtatctttttgtggtaatagagagtgactcaaaaacggttatcaagacactaaaaggagctttctccacttggggtattaataattatatgcatcaatgtaaattgttctcaaactatttgttaagttgtaatttttcttttatcttaaaaacttgtaattttaccgtccataataaaattaggtagacatttgctattagaggtttagttgatttatcttctatttcaaaaagtgttatctgtaacgtagctaggtgggcgtctcccaagagtattagtagtttagttaatttttcaaagttaacgttttccgtattttgttcctaataatcaagcattgttgtttttatttacttattttgtgttacttgttgtattttaatatggtttagatagtttagatagaatgagaaatgggaagataactactctttttaatatggttttagtattaggtgtaaaaaatttaaggggtatagaaatattttattttagagtattaatgctattggcaccacacccgatacttaattatatctctaaaagttattttcttaagtatatgagactcgataaataattacagcaatagtagtattacacttaaaaaagtactaaataccaatagtactttttaacatttctctttattttattatataattcattaaaaataatatgagtaataaatatgaaaactccatccaaattagttcatcatttactttgagtgtatatactactaattcatgattacaaacatgaattaaggtggttcaaagaaaatttataagtaaaccagtaacattttctaacaacgatcttaattaattcaatacaaataaagaatttcttagagaatacacaaatcaactcgaactatcaatcttgaaaaaatgaagaggaaaaccacacatgcattagaaacaactctaacaccattatcatatctatagcaatcttgaataactccgaaccttcttacaaaataaataaaaataaatttgcatactaaaaataattttttataattcctctctatttgaagggatttaaatttttatgtaaggaacttaggtggtgtttggttgg

SEQ ID NO: 392895 - DNA, 761 bp, Cannabis indica
gtatagtcttacaaattaattaccgtattttgtcctacccaaaaaaacaacaaaatactaggaaatccatatgaaaaaaaaaatagaactaaaaaatgtaaataaaaaaatatttattgatagggaaaaataattaaccaatagagaaaactttgtttaattaccttatgtagctagcatatgtaatgtaagtatttatatataacaaataacaaatattcatgagtttaagcctacactgcaagtggattattaggtaacatgttttgcaaatccaaagttagcatggaaactctcttttgattagtgttgtggctcgtcttactaaaaaataataaatcattaatatcaattaatgatgacttgtctcgtttgtagggaccgagccacttggcgcacatgtattggtaagtcctccatggcgccaagtgcatgttgttatgcttcatgcacattttggccgctaagcacattatgtttatgaccatgtctaatctctctgcttttccaatatacaactcgggaagaagttggactagtcctttgtattcctccgtactcactagtccactactcatttcaaactcactcctcaaatttacctctattatcactcgaacctctttcgttctatttttaccaatattttctaccacatcgacaaatttatgttcacctgtagattattattaattaatacaaatgtgattgttataaatcaaaatattaattaaaaaataataattaatatttattattat

SEQ ID NO: 392896 - DNA, 1331 bp, Cannabis indica
gcaaaaagtatagtagagatatggtggctctttataacaagtcattttcatggcctataattatagtatattatatgtctttatagatcatatttatacatatatatatttatattatatatcaaagaatgtgggagaatcaccaagaggatctgatgaagtgaccccctcttccaccctataaatatatatatatatattttttataaatttaaacatgagagaaaatatataaaataaatataattgaatattgattacatccaattcaatttgtttttttgatatttgggatagacagaacatatagcatggagtagtacaacattctccttcgagttgtgccaaaggaaaagaaaacataaaaatacacacctagggccatcaaccaaacaattgacacctcacataataataataatgggacacgattttgtcctgtgatgtactttcacggaatgtattccgtggtacattagatagatctcaaggtatattagataggtctcaggatacgttaccattttttaaccctaattatccctagatcaaccacaaccctcagatcaaataactccctccatctaacggttgccgtacatcacgatatacattccgtgaaaatacatcacgggacaaaatcttatccctaataataataataataataataatgaaaaatgttaaaataaattagtatccaatcattattagtaattaaatataaattttaaatattttaatttaataactagtattataaaatattgttaactatttacaataattatcatttaatataacagagatatgctaaaatacactcatagtttctaacacttttcttagtatcatatcgctattgatataattatgtattaggtttcatataatttaatttagtaacttaaccaatcgttaagaaacacgtcttaaaggtgttaggtatcactggttcccaatattaatgctcaatctaataatagtgagaaatgctaaaaggaactaaaggtgttatatcgtcattgatgtaattaaatatcgagtctcatataatttaatttaatgactattatagaatatcatctaaggcactacctataaataatgttaggtacaattgatgcctaataataatgcttgatatgttagactttttatttgggcttacattaaattttattggttttattaaaacttgggttgattggatagttctttgctgtattagcccatgttgttggtgatcaattgttaatgggcttagcatctgtgagtaaagtctaggtgaagcagaagtgtgagcttttctagttgactgaagcctttga

SEQ ID NO: 392897 - DNA, 484 bp, Cannabis indica
gtacattgtaaaatcaaccaataataagtataatcagaagaataaaccgtttcaaaataacttgaaattaataatgtgtaagctgtacaaaattattagaaatagagacattgaaagtaattttagtagaattattttgctgttgaattttttgaaattatgacaatcgaaactaacaactatgaatatttttcacatatataaaataatgatcacataccttttcatgattttgatcatatatattcttcgaaaatattcgcatgtcttaaattttcctaaaataatgtataccagaggcgatttggtcgaagtttgcagcaaagaatctgggttggtcggatcatacaatgaagcttcaattgtatctcatgaattgaggaaagatctgttcattgatattcgaaggggttgtaaagactcaaccttagtcgaaacaatcagactcgataactccgatcggagaatgatgagaaagagtatg

SEQ ID NO: 392898 - DNA, 746 bp, Cannabis indica
ctgagttgtagtaattggaacggtattaggatggtctataaagaattgcgggtcatcacgaaggtctagttcgacaaaacaaaaaggaaaaaaaatagagaaaagagaaacattcttgttcatcctattaccataagtttcaccaattctaaacacaatatgataatacttaacaaccaattcttactatgaaatgaaaatgaactatatcatgagaaaagattaatacatgcactatacataaatttctttaaaagaaaatcaaaatggtaagcaatagaaagatgaaaactataccaagctttgttccaacaagaataatgggaatattaggtgcataatgcttcaattcataaatccactgtagatgaaaacaaaaaaagaaagacatcaatagtataaattaattaaaatatatattttataaaaaatgataactacaaacataagaaaacaagacctaaccttcttagaaacattttcatagctaattttgctgatgagagagaatgcaattataaatacattggccccacaataactcaaaggccttaacctactatattcctcttgtcctattttccatagaataaaaaatttagactcataaaaaatattgtctatttaaatttaatcattcaatatttacctgctgtatcccataatgctaaattaacagtggttccatttgtaattacatttgcactgaaattgtcgaaaacagttggcacataatcctgtttttt

SEQ ID NO: 392899 - DNA, 1302 bp, Cannabis indica
ttctttcgtgaagggctatcgaaaaactagatgcaccttgtttatataggtagtactaccaatcaattcatttaagtcctcttcaattgtgtagtctcatacctacacagtctcagaatcatctcacttccccaagcggtgtgggattgcacagcttatccggtatttttcttacggatcacgggactactgactgtcaactttaaacctcaaacattgcatcgcgtcaatcttaggtatcacttgcatttatatagtattttccttatattattttaaaatatgatgtaagaaattagcaattgaatattttctaaaaggtatatatagaaatatataagataataatatgtgaacacaaatatgccaagtacttttggaataaagatggtttgttgaaaatttttgccacatcaattatcaaatttgtgtataattctacataattagtttatgaccatagttggttattagtggaaagcgatagaacgtgaaggcagaaagctatataattaatgtccaacatggctgcttaagtggcgcatatatgcagtgttattacttattaatcaccgtcagaacttgtggtttcgttttattgagctaattaattacaaaatgtagagacatatagttgcaaataaggtttctaattctcactgtagtggctttcccactatgattatttcagctgtttagtaagctttatttatacgatgcaccatccctgacacaatgaaaatatttaataaagcaagaaagggttccttattaggtaggcaatattattatatcccatattctctcttacgtacgtgaataataataatgataataagctagaatatcctctatgtttgcatgccactctataggttatcgtagtggaacatacaccaatgctaattaatcaattcacaacagatgataatgataagtaagatatactacataaagtttgcaccattagttccaaacgccggctatatggaagtctacgtatagttgcattaaacctttttcatttaattttcttgtttgtttgtttttaaattacagtaattatttatgaaaatatttatttagaccaccttagttcgttgttttaatatatatttaatagggattttttcaataatatacattattgttaaactatttacaaaaataaccttacacaaataattacttaatactaacgttccacatcagtaaataagtaccgtgtatatatatatatatatatattcaaacttctttattttgtaaaataaacaacgtgcactccttgcactttattta

SEQ ID NO: 392900 - DNA, 1582 bp, Cannabis indica
atatataaattattagttttactgacactgcttgtttgattattacttacagctgtttatgtttttgaggtttcatagatttgatcaaatgaattgggcctttgggtttggtcttctctctctctgtctctctctctttaatgtggggtcacccacagacgaccttgctaccctttctttacaaagtcagccacttcttttttgttttttttattatttttattctttttcctgtaagaatttaatatttatttttaattttataaaattttatagtgcactctttaaaagagatacactaatacaactctttttttagtatttgaaataattttttagtcaaattttttctcattttcatgtaaattatagttatttaagacatcctgcaaaattttaagaaattcgaaaaaatttaacacgctgaaaattacgttcaagcagtgtgttgcactcgtgattattttattttatacagtgtgaaaatagactgtttgaatattgtttcgtatattttaaatttttctgaattttttaaaattttgtaatatcttaaacaacattatatgaatatgaaaaagatattagactaaattttttttctaagtgtcgaaacaagtagatagtgcattaatacttttaaagattgcattataaaatcacctaaaaatatatatttatttttaataatttttttttttctaagaaccttggttagtccgtttttcttttccaaaatattattcttatcctcacctatgctttattttatctttttaaaatccattaaaatagaggatagtaaattacagttgaagaccacttgtacaaatttttcttttttgaagaagacttgtacaaaaatcatatgatactaataaatgtatttacttaagcttttctttttaattgtggatcaaaacctgaaaaaaaatttatcctgaaattataaaaagaataatattataattgaactgttaatttaataatttgagtaccataataaatgaaaaagtagttatgggatagatagtaaccttttgaattccattgttactttgtcctctttctttgactctttagatttaagggatttaaaatggggttgagatgtaaaatggccctaaatttggtaactaagttagtaaatgtccactttttaaaaaaattaagaaaatggccaaatctaataaattagctaataaaaattataaaaatagatttatcacatattttttaaaaaaatatatatatataataataaaattaagttacataatttttttagtattgcatattattatattgtaacaaaaataaataaatatattagatcatttaaatatatacagcagtattagatatatcgtagtacagaaaattaatataccgtagtaataaaattatataccacaaagaaattataacaatactaaattaatactcaaaaaatatatatatcatgctaacaaaattatatataccaccattaaaatatgaatacataccaaaaaatttatatataataaaatagaaactaaatatcatattaaatataaataatatattatagacaacaaaa

SEQ ID NO: 392901 - DNA, 793 bp, Cannabis indica
tttttttattattatttagattgattgcttttcttatatttgacatttatgaagtaatagataggcaaatttgtaagaacaacttagaagaatttattgctcatcagtttcagacaagtaagtttgtccaacatttttcatattcaataacatcatttattttttaataaaaaaaaagaagaagttataaatattgagttaatgattccattttattaatttgcatttaaaatatttttattaattaaattactattaatagctactgtcatatattttcatatatattatatatagaattcttttgcttctttagacctgtacatgtgattcccatgaccaacccacacccacattcacatgcatatttttattttgtacttgtcataacttttacaaataagttgagatttttaaggtttatttatatatataaaaaaacacctaattaaattaggtgaacaaagatagagataagtgatatatattaaagaataagagaataatttagtcatcaaacaaaaactatataacaatatttatatatatgtatatactttaatgatgttctcttcataagtagggttttgaagatgaaataatactaattaaataaatttaaatgaaataatgataataagcacctatagacagagataatcatgagggagagagatgtgcttagtttaatgtattattatttgttgattaattattattaccattcatgggtgtagagtagagggccccataaataagacaaaccaacataaataaataattttttttaaaa

SEQ ID NO: 392902 - DNA, 746 bp, Cannabis indica
tagttttgtttttttttttttttaaataagtctattgtaaggtccagggtctacacatggcaagcatagaaatatgacctaccaatactgctttaaccagaaaagaaaacctaataataattgtaagacaccctccttgcctttaaacataaaggctgccccacaactctgttattttctaccttatatatacacatatatatatgcctctgaattaaccacaccatacagtcttaaggcccttctatatatatatttatgtagccatgatattttttttgtattgttgtgtgaattttatttatttttttacttttttacgagtaacaactaacaaacagtgtagtgatgtactttaaaacttctccaaagggatgatgaccaaaaacaatgtactgaagaaacttttatttctcttttgtaatcgctatcactcgtgacacatagattgttgggtagtgcttttatttttttccaattgtttgactccatagatgtacatttgtgtatttggtagatacctacgttgaatttaaggacggttctgaactattatagtgaaaatacgaatactatattgtctttgtttttgttaagatgttgatagtgatatatgatcagaacaaaactgacgttctgatctgagattgactctctttattattataacacttgtttttataaggtttggtttggcattctacttaggggtaagttgaaaaatgcctcttttattcatcaattaa

SEQ ID NO: 392903 - DNA, 591 bp, Cannabis indica
ttaataataatgatagtgtaaattgtttaaattgcactggcaatgtgatttttgcaatttttagatctcgctgtgcagttacaatttgagaaattacaaaaactgcatatgtaatttagtttgaaaaaaaatattacaacttgtactatctgcaccgcgaatactcctacctgtatatacttaacactacaacctcaaacctaaagaattaccgaattagtaaaattgaaagaaattagataaaagtctttaaatccaataatctcattacataaatattcacttattgtccatcgactacgcttttttgcctaatcttagaacctgacactctctgtagacgaccttgcagaggaacccttaagttttcagggcattagcttatcactaatgtttgcgttactcaagtcgatattctcactttcgtttcgtctaccactgctcgcgcaagtgcttccctctaggcaaaacgctcttttaccgatgcatttttacatcctaccgctttgacagatcgtttagtcccattcatcttcgagcgttcaatttaggaaaaaaatttaatggctagaaaacttcaaaaaaaaaaaa

SEQ ID NO: 392904 - DNA, 517 bp, Cannabis indica
aaaagtaaccaatccaaaataactgatccagtccacaattttacggattggattgaatttgagttattgtgtggattgaattgaatccaaaatatgaaatccgcatttagtgcggatcaaatgcactataagtaaaatagtgtgaattggattggatgaatacccctaccatcacattctcccccacatcctgttgttcatgtcccaacagtgacaaatttaccaacttcacctgttaccgttgacaactattccctcacaatccccacaaacaaaactaccttcatcctccactaccataaacagttctgaggaacacaatcccaatattgcaatacaacatgaagttgctgctattccaaatacaacatccactattctttctcttgacaaagaaccaggatccaccataataggtaataggaaacatggtatgtgcaccagatcacaatctggcatcttcaagccaaagtcatatatatggatgttagaatttattttaccaggatctatattt

SEQ ID NO: 392905 - DNA, 593 bp, Cannabis indica
taataaagcagcacatgaattagcgaaatatgctcttcgattggataataattgtttctggttgggggaaattccttctccaatccactctgttattgtttttgattctattcaataataataatagtgtttctcaaaaaaaaaaaagacgattgaattttaatgttttgattatatatatatagttatcaagcttttgtttgttaatttttttctcttttcgggtgaagcgtctatacatgtgtatatggtataatgtgaattttttgttgggatgcgttttgctttggcttcagtttgtggctattctaatatatattatcaatatatataattttgtctcctcattatactattgtatgattatgacttgaattgtggattcataatatatatatacagctaagttcatattttttgcctcttcaattttgtacatataatatagaaggtgtagtattatttgtcttttactataatatatattgttgtattatatactttggtttaaataataaaatttaaattttggtattggtttatacctaatatttaataataagttaattgaaacaatatgtcgccaaagtgac

SEQ ID NO: 392906 - DNA, 684 bp, Cannabis indica
tttacatctctaaaaattatcctcatggtcttatatcacattaaaataatgacttgtttggtaaaaagtagtttatattgaacaataatttacataaaattaattttgaaaattagatagcattgcatataagaccactctaaagggcaaccttcattgcatataagaccagcagtgatacttaatattatttaaaggtgacgtctgcagtgatattttataaaaattatattacgtattattttaatatttaattatattgaaaatgatataatattttagaaatgcgacgtattttttattatttatctagttatatgttaaaattgaacacataagataagttatatatcattaatattaatattttcatgcaaatagccaaagtatatagttatattaccaattaatcagatctgccaagagggactttttttattattatttttaaaaaaatgaacaagggtttaatcttttttgaatgtgaattggaattttaataatttgttaaatcaatcaaaaaaaaaacaagactgtaattcactaattcagtaggaatatccctcccactgaaaactcgatttggaaaaaaatatgacgctttagcaaagctgtgcgcagttatattagcagatcgttaataaaaaacaaagaaacattatttaaaatagatagaagctttcg

SEQ ID NO: 392907 - DNA, 281 bp, Cannabis indica
taaaataatttccaacagactctcagcccgttcaaacaaatacattgaacctagataattttgtagcaaatttaccttgtataaataaggaaagatgataaaccctatatctacagcatgtgcacggtttcttgactaagaaatcaaattttaataaataaaatacgtatcaattcttttcctaaaaatacaaagtaaataccaaatatactaaataagaaaatcacatatttattagggatattttcaaaaatatgggaaaaattattaaagttatgata

SEQ ID NO: 392908 - DNA, 1573 bp, Cannabis indica
gatatattttttttttttaaactcatcacaagattaattaagcagtaagcacctccccaactcttaacaaggaaagaatatgaaatcttttgccaccccaacataacggttttatttacttttttgattttgttttttaacagtgtgacaaagacagtataagacaagaataattataacttagatataaaggttactcgttatatgtattgataaaaaaatcaatcgttaattaagattagattttaaagttgcaagcatatatatatatatatataaatatatgttttgcctaaaaaaaacaagcacaagactattgcctccttttcctttctttatttggaagttagcttaattttcacctgtaaagagtaattttttttaataatttatttatcttaaacaagaaactattggggtgtgactttccactttcttcttctgtaaattgcagtttatttatttatttttcaaaaaaagaaacttacacatcacttgctaatcttgcttttctggaagactgacgatttctagctaggctgtatctatttttatttttagttttactttaatttattgaaagaaagaaaaactaacttctgtgaaagtaacatgcattagtcaggattgttgaaatttttgttactagattgtcaaactatcactctttgccctttgacttaaaatatctctcttcagtcttttaaactacccaattgtttttgtctcaagatgttgataattttacatcaattgtacaagaattgagattacaaacaaggatcatttatcattaagaacaaaatgaggtattatatttggataagaatttagcacatgatgtttttgtccaaggccaatgaacctttagttaaggaaacacaaacacacaagtaaacaatatatattttgtctgattagtaacaattaaaataacctaattaagtgattaggtatagaaggagctagagtcccctaaggttgtttttatttttttattttatttcatgagtcttggtgcttgcccccactcctttttcattcttttaatttaatttcttttttgtttctagctattgaattggcaatttatattgccagttagcaaaagctttatccgaaaaataaattgataaaggctttgttgatggctttaattggaaattcgtttttatcatcaattcaatatatgtaatacattatataatgaagcattagtttagatgtctcctcagtcctcagtcctcagtcacactaaagttcattttgattaaattatataatgtggtccattattttgacaaccaattcctctctttttgttaagctgatatgagctaatcttcgcattattagcaacttgatttataagtgctccaattaatctttaattaactgtaatttttttttagggggattgacaaaggacagagatgtaaaattgccattagaaactaagttagtgaatatattttttttcaaaaaaaaaaaatttaaaaataagtttcattataataaatttagctaaaaaacattataaaaatacatttactacatattatttttttaaaaa

SEQ ID NO: 392909 - DNA, 783 bp, Cannabis indica
tatatatcaaatacagagcaaagcaagaacacaaaagggtaccttgacattagtaggagagagcttaattgcatcctcagcatcagtaatagcacgtctgtaattaccaagcaaaatattgacatgtgctctattggaaaggataatagaggtctcagaatcacctaaagctttctgattaatagctctagtgtaacaatcaacagcctctgaataatgctttttccccattttcacaaactcattacccttttcctgtgaatcccaatcaaaaagttttcaacttttcaatacccagaataaaacccatatctaattcagttccaaaaagagagaaaacaagaaaaagacagtacctttagctcaatggcagatgattccttaagtgcggctatggcatcaaggtcagctttttcggtttcagtaaggggttctgaaccaggttccatccatagagccattctgggcacaatacaataaagataatttcagaagttgaggatgatttttggagaagcaacaatggaggagtagattcactcttctctaactccaatatcactctctaaccataacactttttcaatacctacttaattaattaattcattttagtaaaatcccaaaaatagtttttcttttttaaaaaaaaaaaataaataataaaggtattcttatactataataaaataataaagggattattttacaaatatacgaaaaataataaaaaaaaattaaaaaaaaaaaacggttttaacggaattttaaatattttttacg

SEQ ID NO: 392910 - DNA, 1112 bp, Cannabis indica
acaaggcaacaaaacacctcaaccagcacaaaatcacaaaacaccattgaagagcaaagcttgagttcttaaactcgaattttgctcaaaccccacaataactcctaaaaccacctcaattaaacacaaacaaacataatctaactcgaaaaaataaactcaaacaacaacaacaactacagcaccctaaactcacaattcaagcataattttcaacttaaagcttaagaaaataaagggagagattctaggaaccttaccttgagttgagatcacttaaaacttgctggaaattactggaattgttgaagaaaactcagaaccctagcttgttccatggtgttcgaaaaagagagagcgagagtgtgttcttcttttatttgattctgtaaataaatgaataattagaataggttttatttaattagaaataacttaatatcatcatactaatctcaataaaagtccactaaaggacaaaactaatcttagtgaaaaaagaccattttgcccccacctaagtaaaaaagtcataaaatcaccttggggtattttggtcaattctaaaatctcgaccatttccaacattctcaatgtctaactatattgccccgctatactaaaaatactaagatgtgattctaatagccaaacatcgcgttctaatgttgccgggcacaaaacaagtaaaaatatgaaattccatatatgacatataaaatacattctgaattcaaataaatctccgtaaactgataattcataactaatatacaagtttcataataaaaccctatttatctgttaatttccaaattaaaattaagcggtctttacagtaaaacaacctactgtaacctcattagtcactagagttgttggccactagaaagaccaatctctagttaactttttgccactttatttcaacaacttattcttctttcaataatacaatatttccaatttcaatcctataaatgcaaaaaaatatttatttaataattataattaatcatcaaataaaattgacatttattttatttattaataagagcatacaaagtcttttaattaataaatagaccccaaaatctcttttcttcacaatt

SEQ ID NO: 392911 - DNA, 493 bp, Cannabis indica
atcatttaaatattttaaaaattttaaaataattaaagttggcctacatagctatttaattattattttgtttgagtaattatgtcatattggatggaaatgtttgcaaaagtggctttaatagaaaataagatatttgtcaaatcaacttttacttcaaattaatatacgaaattaatttaccttaatgaatcataatagagtgtaaaaatgagatcataagttcatcacgaatgtaacttttataattgttgttgtgaacccatttaatattaaagaattattttatatattattttttaatttttttttctttttaaatttacgatttagattactcctctaccccatccacctttaaccccacactctaaccagctttttctcaaactaccacattaaacatgccctaatgaatcatgcttcattagaattaaaaataattttaaataaaattatttttaaaatatgtgtcattatttcattttatgtt

SEQ ID NO: 392912 - DNA, 705 bp, Cannabis indica
agagagagagagagagtgggagaaggagaggattaattcactaagcacgagaggaaagtagggaaactttctagtatttcttgtttcgacctcttaactttactttatttataatttcagccaatttagtttcttgtcttttcagttatgcccctttatgtacacgtgtggatcacatacattgctgagagagactgtaacccacccaagacagtaggtgagttgttcggatctcaaaggtttttttcttttcttccttaaaaccaaatatctttgcttttgagaaggttaaaaaatattaataatcaaatttgacaatattaataataaaaattaaataatttagcaaactccaaatctaaccaacaatagtgtttttttttcttgaaatgaaacaaacaatagttcatataacatttacaaaagttagttgtgagattgtagttgttttaagttaaaacaaatgcgagtgactctaatttatgattttgtgtggtcttcttaagttaacatgtgtaaaaaaggacattttacctttaaaattttgttattgtttggtagatataatttgtcctattcgagttaatgaagtttctccattagtctaagatgtgatatcaaaggtatttttattttgaaagttttaggtttttgaaatatgaaaactaactattagggcatggggcggacccacatataatcgag

SEQ ID NO: 392913 - DNA, 899 bp, Cannabis indica
tttttttaatgaaaaattatagtttattaaccataaaaatcagttaccaaacaaggtaacaaattggtcggaacattctccaaaccaaacaaccagagtataaatgagaagctgttgcgaaattatgagctactacaattactgatggcttgatgaaaaaaacattaacattatccaactccaacaggaattgtttacattcattaataacttgaccaagtaacgaaaccatgtgaattgaacttcaaagagcttgaactacagttaaacaatcggtttcgatgaccacattttgccaattacggtccgttaatcatgtatttattattgtgctttatgtatagatttttcccgtccgtgagttttgtcactttaatcaatattgcatgattaattctctgaccgcacgcaatattccaaactacataatatatctatatatgatatatataattagtgtatgcacgcatcaaattcaatatattacgtacgtactaatctcaattaataaataataagccattcctatcaactgtatactttaagaacgacacacttatagcaagcagcgggattcatcgtaaagctgtctatataacttttaaagaaaaaaactgtgtatgtgtatatatacatatgtgtcatgacattgatatatacagatggacttatatatattatcattatatcaattcgatactatatatacatagatacgcttaccacataatgaactttgagaggctagttgaaagcctagtcccaacgactggccgatgtatatgacattgatattgaggactgttcatgggctgggcttggattatagcaggctaagctaggtccgtacttagggcttgtcagaccaaaaaatatttatttaaattatacatattttt

SEQ ID NO: 392914 - DNA, 859 bp, Cannabis indica
ttttctgatcatggcggagcaagccattgaatctgctgatttcttatgtaatacgtgtttctgataattgttatgcacatataatttatgctagaataggttgaaatgaaatcacatccgcacccagaaagacccgatcgccttcgagctattgccgccagccttgctatagctggttagtgcatttcaaatatcttcatcttagaaatattttcatacctttcaacttttcaatgacattattaaatcaagaaaattataatgctttgcaggtatatttcctggaagatgctacccaattactgctagagaaattaccaaagaagaacttcagatggtgagagtaataattgttacttggcaatgaatgttgtcagattatcatgaaatattttgtgtggaatctgtcttagggagaaagtgtgccactatgtttgatagtgtttgtatagcttgctgatatatatgtatatataatgcaatgatccttttcattatgatcttttggttgataatgagacaccttcttatgttgctatattataaagtttctgaacccagttgggttttagcttggacatctctttgcagccttctcatggtaattctgcatttactgttgaaattaaaggtccattccttggagcatatcaaagatgttgatcacacaagcaaactttttgctaggtatggatgataattggtgattttctctccattagtttgtgagttggtatctttgtattttaaccttctattactcttaggtggcatttggttggaagtaatgaaatggaaaggaagcaattattatttcattatttttttggttgtattttaaagcattggaatgtcattc

SEQ ID NO: 392915 - DNA, 1014 bp, Cannabis indica
attttggacatctcactccacatgtttgaggctcaatcttcatcagagagaaattttggtggtggtagagcctgcaccttgaatgaaaagaagtaattgattccctttgattgatcagttgctgtttccaaagcaagaaatagtgatcgttgagtttaacaaaaagattatggttgaaaaagatagtgaactgtccaataaatagtggtggagactacattcaccattaacagcaagaacaactctgataccatattaaagtttctagccatagattaagttcaaagattaatcaaaaatcaaagagagtaaaaagagaaagagatagacaacagagagataaatctaagaaatgatccatacaatgatgaactaaaccagctgagaattaatatatacaatgttcatgaatgaagctagttacaataacaaactaaccactcatgacaactcaccaactaacagactaactaacttttaacaatcttaaatcattggttccctactaaatttcaagtcatacatagttttgaatttttgttgataatcatgttatcattaaattttattagttacagaaaaatttatttaaagttattaattttgcatattaatctagagagtagagcccattcattaggtaggaaattgaacaagtttattaggtttggatattttttgaatttaagaaaaaattccaaaccctcccaaatgagggttggattttgatcagtgagattcaaattttgaattggtttaagttgaattttttgttaaattatcttctaattttcccttttaatcaccatttggaaaacattgttaaaattttgaacagagatattgatattgaggtgttggatcttttcattttatttatcttaaggcatattttgtgataaaatactccaatcttcacatacatattggcacgcttaactctttaatttaaaattagggttagttttacaaatgcacaaaaacaacaaaaatacagtttcacggaattttaaa

SEQ ID NO: 392916 - DNA, 1450 bp, Cannabis indica
gtacttgaaatgtcgacatacttagactactcatcattgatcaatcattataaataatttgtttatttttataataaacgtgtacatttaatccaataattatatgacacgcatcaacaataataaaaagtgtttagtgtgttgtctattagataagtgggatgaatagtttggggtggctttcagaaaagttaaaagtacattttcaaaaatttatgacttaaaaagtattcggtaaaataaaaaaaattgtaccgttttttaaaacttaggctaaaattatagtttttagttaaagtgggcccacacaaacttttagatttttgtttttatgagaagctaaaatgtgggttaaatgaattttttagttaacataattacactcattcaaattaaaaaattattattttactgagtctttttttcatttcgtaaaatcaacccagagatatcgtagttaatcgactgtggctcctcatcgtcaatcacaagagtcttctccgtccccgatcacccacgccgccgttccccaactccgtcataaatagctcctgcacaatcaaggtttatctcttaactcttcctttgaatgccatggaaatatattttaattttctttttttttcctgtcaaatcaatttttcttttcttttcaattctcttagtctccgtgtaagagtcaaaagggttctgattaatgagtcacaccttgatctgttccttgaatcaattccaaaataatttgaaattttttctaagctgctcgagcttttccatggcctctggcaaagatagtgacgattcatctgaatctccatcttcatgagcaccaattctttatattctctctctaaattaccctaatagagaaattgtggaaagaaatcgaaagaaattagtaaaaaaaagattgattttttttctctcctttttttagggaatttttcctactctttcatcctcctaccgaaagagcacattacaccacctcctactgaagagcacattacaccacctcctagcgaaggagaacattgcgccacctcctactgaaggagcacattatgccacctcctgtcgagggagcacgatgcgtcacctcctactgaagcagcacatgtaccacttaccaaggaagcacattctgtgtaataagctcctctttatatcaactgccaaggcgcaagagctccctaactaccaagtcacgtccttaaggaccatattggcacaaaccatcaagagactcagctggctgcccacatgtgcccatgaccattctagtttgcttagtgcgaaaggcatgtgctcttagagttattccaaaattcactactacaaaaccccctttagaggcggtttttaagccctttcagtgtcgattttcgcgaaattcgctaccgacgctgatcagggcgacgctaaagggtttatatgaaccgacgccata

SEQ ID NO: 392917 - DNA, 425 bp, Cannabis indica
attgtatatttgagtattgttatttgtttttgataatttgagaatatagaaaataatacaatatattcaaaataaggtagaatgtaattaagtttttttaaaaaaaaatagatcattcattttaattttctatcattataaagtcactttttattgttttttttattcatgttgattttattagtttttactaaagatttttattttgtttttaagaatgtattcttatttgctttttcattatgaagatttgattggttgaaatcatcgggtgagaaatcttctcaaaaaaaatctactaagaaaaaagctcggtctgcttcctctggtactactaatgaacctactactgcatctgcccctacttctgctcctacagaaatagttgaattcaacttgtgtttgggaagaatggagacaagtca

SEQ ID NO: 392918 - DNA, 727 bp, Cannabis indica
aaaaatgagttttaccaaatatgagtgagcccatttaaaataacaaaatctaacaaagtctcaccttaagttttaccaaatagcaaagtctcagcgagttcatcctcaccgatcattcaccccttcgacgttgcagttgagcatactaccggacaggagccggcgcaggcaatcggcattgcaggtactcagtctcgacctgatcatctccttctattctttctttttagggttttattctttcttttttccttttactaaatttttgtatgtgattatatagaacacacaactttagtacaattttaccaattttgtatgaacattacttaatccattaactttgacttggtttcagtttggagtttaaatgttttaaaatgtttctataatgtaatattaatgttgttagcaaatctacagtgttcgagctcaggtttatcaaattggattgcagagacgaattgaattgttcctccgaggacgacgcccggagacgatcgatagtctggattggtatttttcgtatttcaaactctctgttgtgcaatcaattctttaattacaaactctattttctttttctcttttgttctacaattgttatgatttttgtcttgtttgatgatgattttgttgggttttatgccttaaataaaactctttacaatctgattagtaatcaatataagaaatttgaagtgatttatgtttgcatgaattttac

SEQ ID NO: 392919 - DNA, 661 bp, Cannabis indica
gggctgaaggagagggagaagatcttgtgttcggcttagctcatgggcctatcttttttttcctttaatttgcgctgctcatttttttttttggattattttacaaatatacaaaattaataaaaaaaaattataacaatacgattttatagaggatgttggtaaaagaattacatgtgagggaatgtgaaactcaactgtagaaagattttcatatgacccactagaactctatgagactcaccacagtcgaatataaaaaaatgaatattgatattaggtaccttaagttagatacctaacaccatactagtgtgacacattataaatagttggcagttttctattttatttatcaaatcaaaagaatttgatattaaattgcattaatagtggtattggtatgccagatcttgtagagttggacaccttaatgtgcctcttaaaccatctccaaccttaatgtcgaaaattctttttattctaactacaaacactaaaagttacactaaaaatattacaagatatcattaattataaaaatattataaaatttaatagctaacaattatggtatgtaattatgagattattgccttattagcttattatggataaaataatattaattttggctagataaattataaatatgagttta

SEQ ID NO: 392920 - DNA, 617 bp, Cannabis indica
atacaaaaataaaattgtcttaagaaaagggggaaataggtgaaataaaaaagaagaagtttatcaatcaatttgtggaggaagacgaggacccctacgctcggccaagacgacttccaattttttgatcttctcccaaaaccaggctgcaacagcctcaggattggggaagaagtgaaggtgaggtttgaacttgttggccttccagcacataaatgctccatcctcgaagcacttttcacaatgcttataggtaactagagccaataaatcatccatctcggccttggtagcctctttttgggttttgtcccagaactcgcgaagctccttgagtttaatagttaggttggtcattatctccaagtcagtctgatgcagctcctctaaagatttaagcttcacaaggagttcctcgttctcctctcgggaatcccagaggtccttcttacctgaggcgatgatgtcgtccttcactttcagtgccgcctgatgatttcgctccataagggccttgtcctctcaggcttcattgcaaagggcttccatctggtcctctgactccctgagcttcctcatgaccccgtccataccgtcaaactctgacacagtaaacc

SEQ ID NO: 392921 - DNA, 1240 bp, Cannabis indica
aaaggcgatgaggaaaaggcgtgaaatatgtgaggcttgtgtatcccagccttggctctggtgatcataggatgagatggtttaggaaatggggtaggtaattttgcagtggtggagggagattgctggtttgatgagggtgagggaagatgtattagggaaaaaggcaagttaatatgtattggaacattagaatatgaggctgtagaggttcaatttttgtggagtggtggatactgtgtctcatgtttatgacagacaatatgacttgaagattgtgactcttgctgggatgatgatgaaggagctgtatcatcaattaaagcaccatttgcatgttttgaagtccctgttcagaggtatggtagccattgggggtattgacttgggctaagtggtgtgtctatatgtgcagacgaccaaaggtatgtagacagagataacctttgcgacttggactatagcctatgaagacacacttagcagatcgaaattgaagtttattagagttatatggccgaaggtaggggtagcaatcacatccaaaggctttgagaaacttatagttggctgtgagaccaaagagtttttgtataggacacttgtacgtagtacaaaattggtccagcaaggtggttaattaggaaggtttctgtttgaaaagcttcccaccgaaatttttgtggcatgctagaatgggctaagagggtcaagcctgtttcgacaatgtgacgatgtttcctttccaccttgccattttttcgctgagtgtgtgggcatgggtgtctaaacttggtacctatggttttgagataaggctcaaaggtgcgatattatcctccccaatctatttgaacagttttaatggtggcattaagttgttttttgatttgagtttgagtttgaaaggacttgaaggtggaaaaggcttcatctttggttaaaaggggaaagatccatgtgtagcggctgtaattgtctatgaaataaatgtaataacgataataaccatgcctagttattgttggtaattggtccccaaatgtctgagtgtatttattcaagggattgtttggtttcttttagtgttgaagggtatgctttgtgatgtgccttgcctagttgacagctagagcaaaagtacagatgagaaggtaaaagcttcttttcattaagtaaaatatgtttgagtacatttaagaaaggatggcctagcctaagatgccacaaacttgattca

SEQ ID NO: 392922 - DNA, 1800 bp, Cannabis indica
atcgttgtcaatcaaactcatatatagtagtttttagtaatgctagttggtaaaagactctagttagtgcgtggttcaattatttttctttttctatttatacttattttcaaattttgacatatggggcctcaccatgtcaggagtttgtcccttgcgtcaaacccagggagtgcgtgcaccaccaaaagaaaacaagatttttgttaacaaaactcatatattaatttacatgtttataattttcaattaattatattttttaattatttacttgatgaatatttataaattttcaattaattatttttttaattttgaaattatatattaatttttaattaattttattttccactcaacaataattgtagctagaaaaatacaaaatattcaagttatttaatctacaataatcaatacaactaacaatataatcatggtgtaagtgataaagttatcttatatcaagtacaatggcatgagttcaatcatttaaaaagatatgattttttatttatttatttttaatttaagcttttaaattaatttaataatttaattttttttctaaacaataatttaaatttctttaagatttattaatatggaacaattcttatattataaaatttttaaagtttataattattatggtagaaagttttaaatttttatttgttaatatatattgatggttgtactacataaagtataatagtgaacaataaaataacacatacaataataataattaattgaaaaaattgaacaataaatttagtcaaataaaaaactgcatagtaaatagataaaaacttttgcactaaaaagaatcttaacgatctcgattatcgtcgatctcatccaaatttaatagtctatgacaactttggataattataagatgtgtgataatacattgatataatccaaatgtaatagtttattgttgcaaaatttattttctatgtaagtgcacacattggtaatttatttgctatgtacgtgcacgcagtaaaataaaattaaacatatttttatatatataattctttttcttttcttgtgtgtgttgttttttgttttatttcttttaatttgttgttggcgacataaaacaatactaatttatttttattttgttgttatttatgtgaaaaaaataataaatattaagtaattcaatatttaaaactaaccaatttaaaataactgatctaatatgtatttttgcaaattggattggatttgattttagttattatacagattggattagatccaaaatatgaaatccgcacttagtacagatcaaatgcactatgagtaaaaatagtgtggaataaattggatgagcactactactgagaatgataaagaggagataaaaaactcttcaaaaaattaaatgaaattaataaaataggcaaaaaaagggtataaaattatcaaatgaaagcatcaaggattgaactcatgtcacttaacaagagatatgataacttaccaaacatgttagaataactttgttgtataaattaattcttattgatttatattttactttgtgtgaaatataaataaatgcatgtgttttccaatttaataatatgcatttactctttctaactatatatgtatactactaactagttcatgcatgatttatataaataatataattaaaataaataattaatttaatatctagaaattttaaatacattgaacatttaccttgaaataagttgaataataagctatataaaataaactaattaaaataaataattaaat

SEQ ID NO: 392923 - DNA, 1769 bp, Cannabis indica
ctattttcatattttttttagatttactcacttttatagattgtgtctccattagacctcttagattatgtaaattatatataatacttaagtaaagagtgagggtgtattaggcaattcactcaaaaaatgagtatattttaataaaaaaaataatataaaaatatttttgattaatagataaaaaaaaatatattttttaacttatcccttattatttttgctttgataaaaatcataattggaaacttatgatatgtttactaataaaggaatcaatgctcccactatttttttttaagaaatattattaataatttattttatttttcaatattaaataaataatgataattttattttttaaaatatatcttacaaaataattattatacattataatttaatcaatttaaacattctatttatgtttgctgataaaataaacaagatgttgatattaaaaagtagtcaacatcagcttgttaaatttgtgagaatgaataagttattaagtaattagtaagagttacacacaaaatttataatagttcgcccctatgtcgtgataataatgggactacgtctactttgagttttatttctcacgagatggtgactacagcaagtgtttaagtatcaaaaactccaaactctagagagagaagctttgactttatgggtattttctgaatctaaaaaatgaactaagggagcttttctttttataggtgaaagaaagcccacaaaaataggaaataaaatgtaaataaactattttctatcgttgatgataatctaacggtaaaaattagcttatggtaaagaaatttaatttttggtgtctcgcaagtctcgttgactatcaacgccaaagttaacattgcagcacccaagttgacatatgaagtcaaactggacatggtataaatgtgaaaacatccaaggggagtcctttgagatgcctaagtgatgccgacctgaatggaataaagcttgacgatcttgagtcctacgataacaaaactcgatcatcaacttatccaatccccgaaacaaaccctaattaacaactagacaaattctaactcccactggttcaaagttagcttaaacatccttaaacacaccctaatccaagctctgagaaacaccccgagcaaaaccggtttcgaaccaaaaaactagggtttatcctacaggaaaaccggctgaccggtttcacagcacctgtaaaaccggttaaccaatttctcagctgcagaaatgggaaactcgggcttttgcatcaaaatccaaccaaaactccatcgaacttgctcaaactctccagaatagtttaacaatataaaaataataaatccaaacatccaaacttagaattacaatcaaatcacaaaatcaccatgcttgaaccaaaactaggttcataaacttaattttccaattcaaacctcacaactcacaaaaaacatcacaaacacacttgaacaaccttcaatttaacttagaaatacactctgaacttaacttagcactacagccccaaaacatatgaaaacaccacaaaacctaactcaaaacctataaaattaaagagaagaagaaggtgatcttacctccaagcttgaacaatccttaaaccttatcaatcctgctagaaatggttgaatttgaaaagaaaaccccatagcttcagctaggttctaaggcttcgaaggagaagaggagagagagagaaaatgttatgcatgttgggttttatgccc

SEQ ID NO: 392924 - DNA, 1274 bp, Cannabis indica
cgtatgattcggaaggcagtagtgtttattggagataaacccctcgtccaaaagaagtcctctttaaaatctgtcttgttaggaaaactaactatgagcttgcggtcgccagtataggccccaagataatagaagccccccgtagcattctttctcgtaggaacggccttgacagagtaaaagtaggctatctccaaaggagtagggcacaaccagcctaagatgtgatacagaaccttgaggctcacaaggatcctgtatgagctgggatttagctggaatggggaaaccttgaggtagttgcagtagtccttaaagtaatcgttgagggtaagaatcgctccagcattgacatgctaaaggctctaagctccaacacccgaagagttactcgtgctgggaccactacactcctcgcgtattattctttctagaggaaaacagctgaattccccaagtgccactgaccttataacgcacactttacgctgcttaatgcctcaagactgtaggatgccaccaatgtaggccccaatagacctaaccttggactcgataagttctgcctcgaaggtaacattggggtcctgaggggtctttgatttgcggggcttatgagacatgatttcaaactcaagatcacctggttcaaaagtaatagtgacgttgggtaaaacattggtcttgcgagtggaatagaagataaactcatgggttcaagcgaggtcgtgtctcgcaaaaagcgatgcttgtcctcaaaaatttcttgcaagaattgcctatagcgacttgcagtctcttcttggttcaacttaatcaaatggtctctaatcctagcatcatttatttctaatttggactgaggttcgaaatttatgggtttatgtgagcaagctatatgtttaggatactccggtgcgttaaccagattgggacatctctacaaaagaaagacaatcccaatttctggatgaaatttatcaaatgagaggcttaaggaatattaacaaacctaaactatctctaaccctaaaaatcacccaggagatacgaaccttaattgttaaacgaaatgcagtaatggaatgtaagacaagtcataactcaaataaaagaaaagggagaaaaagatacttactatttgaagtcgaaatgctggattctggagacttctgcgaatggagatgtgacgaccgacgggataaggttttttgagcaccgagagtagaaaggcaagtccgagtaaattttgcatgaagaatgtcaaagatagg

SEQ ID NO: 392925 - DNA, 964 bp, Cannabis indica
aaagtctaacatggataaaagtttaataagattgaattgatacatgtcaaaattcgaagagcaatcaaagtctaaaaaatataatttagtagatgacaaatcatagaattagtaaaattaaatccaacaatctcaataattcaggcagaatttttaacgactaatatttttttaaaaaaacataatttaagttcaacaacaaaaatactaattagcctaaacaaaagaacataattaataagacaatgaagtgtcaaaattaattaagcatggtttttggcaggtatgaaggaagtaatctctgttttcccagataaattactttataaacaaacaacaatgtcttgggatttcatgggatttgacaagaaagttagaagaaatccaagtgtggagagtgacactataattggtgttattgactctggaatttggcctgagtctcagagttttagtgatgaaggttttggtccacctcccaacaaatggaaaggtgcttgcaatggtggtcaaaatttcacttgcaacaagtaattttcttttttctttttttcaattcaatgccatttaataacatataatcatataatttgtctgtatttcttcataattttttaatagggttggacatttcataccatttaatattttttttttcaagttagatttggaaattatcatactttgcaatgcaattaggcttacaaagctaatttaattagattggatcggtttgaattgaattttaatttgatatccaaagttttaatattaacgtaagaatttacataaaaaatacataaaaattaaatatcagtgatcttttagtagagatttctttaatcacgtataatagggttaataaaaaattaataaatagcaagtaaaaataaagatttcaatttgatacccaaaattttaatattaattaaaaagggaaatttgaattttcatgcttaataaa

SEQ ID NO: 392926 - DNA, 1106 bp, Cannabis indica
gtaatcataatgattacatatttgatgtaattattaaatcttcatccatatatatatttgatgatgattcattaatttggagtactcccattgccattagtgttatcataatagctaaaacttaaaatttttagctgaaggcttatattaactcttccttaaaatgctttataatttagctacaacagatttgtacaaactccaataaaataaatctttacatgtagttatggagaaagagtgagctctttttttttttttttttttttttttgtaactacctcattgatttttacgttcttaatatatttttattaatatatattatttaaaatatattattttaataatgttgataaaaatataaaaaagttaatatatagtgtaatgtaaatgtgtagtaaaattaaaagaataaaattttaaagtggtattttgaataataaagtaaatactctcacgagagtgcttgatggtttactagttcgatctccttttatcataaagatgttgcacactctttccctttataggtattttttttttggtgaatggattgagatttgagaattatatatagatttagaaatattagtatatctaaaacataaccttttaaaatattatatgaaagataacattgagataattgtgttgtgtatggtattggttgggagacataagtgttaaaatccacgcaggaaagtgagattagattagatgggagaatatgaggaacctgtgagtctattaatgccttggggcatgaaaagtaaactcaccagccaataagtctcagccaagtgatatttcactttaagcccaaaccaaaacaagtcattcatgtcatttcatggtacatttcatggatggtccgtggtagcaaactttacatccaactcagcagatcactatgacttgtcattatctagtggtaaaaataaaaagcactaagtctagttacaaagaatgaattaggaggagggcacaagaaaaattaattgaatatgattttgtaaaatacatttctttaaaggctaattagtaatttttaccccctgaattttgatatgtactaaattgtgccacctgaatttttttggccg

SEQ ID NO: 392927 - DNA, 763 bp, Cannabis indica
ttataaaataacaaaaaaataatgaaaaaaccaactataaataaacatcaaacacaccaataaagaatatcaaattagtttattgaagtttatttttttataaataataaactcaaaccgtaaaataaagtttctccatattaatatatttttattatttttttgaaatttctggtttattatttcacgtaattttattactctatatacaatttttttaattttttttgatttatgatttgggttgctctgatggttgctcagtggtttttatgtggcttgttatgtagattttggttgcgatttaagttgcttcagtagtttatatgtgggttgctatgttgattttagttgcgatttaggttgcttcattggttgctatgtgaatttttgtaaaaataaataaataaaaatagtaatttgcggcataaatacctaagtttaactctcagtagcaaataaatacataagtttaatttttgacgataataatacctaagttataaaaatagattttctataagtatttggttgtacgtgttaagtaaatcgccatttgacaatctttgattggtctatgtcattaatttttttttttaaaaaaataaatgtaccattgagaaaatgacatgtggataatgacttgatatttaacgattaggtatttacagagttacaaaaatataatttaagtattataacttttaaaaattaaatttaaatatttattgttaacgcaaattttcgttaaccaaatgtgagc

SEQ ID NO: 392928 - DNA, 944 bp, Cannabis indica
agggcataaaacccaacaagcgagacttagagaggtcgtttatcgaggccaaactgaagaaccatgtgctgttggctgtgatgtattcgcacaataaagacacaaatttttgagatggatggatgacccagagtacattattcgatctcactagggggagctagaccgctgtaatagagaagttaacaaccttaatatggcagtttaatgaaagaactgctagaagaggttaggatctcattagagatcctctccaagggagagtattagacagatcaggagggtctacaaataaactatccaaccagattcctctggaaccaggatagaccttcccctacccaaaggaggacaagtcttatcacgaagatctggtggcgagaatagccagactctagcagcaagcaacttataggcaaaccagggatctctggcacgacaatacccacgcttggccaacctttggccggccagcccctttctggtgcacctctggcaagaaatctaggtaaactcccatcccagagtattttcgagcaagtcacccaaaggccaatctttaactggctagggccgggaataggtggaaacacccaagacaataataacttgagaagtgagatcaatcacttcaaatacttagacccacctaactccagaaattggtgtgatctaccccctgtcaacacacagactccacaagccaatcaaggaagaacaagcagccagaccctgcctagcacaagcctggttggtaggggtgggtatttaatccaatccaacctttttttcctcatccaatccaatccaattagtaattggatttggaaaatcatcatccgacctaatccaattagacatatccaatacaatccaattactaattggattggatcaattttttaattggatatccaattgtacacctaaattttaatattaac

SEQ ID NO: 392929 - DNA, 1035 bp, Cannabis indica
tgcttagttttttattagaattttatttttaaaaacttacaagagacctattattattatattgaatacagttatgaaaaaaaattagaattaaaatgctttaagatcttcctattaagaatgttcttactagaaattatctatactacctttatttatttatttatttttgaaataaaaacactttatttatttaatcgtgcaacatcttattcttaatacgttcataaaaaattaaaatcaaaacaatacaaagttgagaaaaaaatgttaattgagaaaaatatttaatgctacacaaaccacaagtttgccactgtttgaggttgacacggtacggaataatctttaggaaaacattgttagaaatctgaactttaaccttcaattccgtgtgccgagtttgccgacctcttctagtcttctgtagcctaccttcatttttgttatttatttatttatttattttttagaccaaacacaattttcttttgttataaaaataaggataaatattattttgaacctattttaccaaagttatcgattgaactttttattttgttaaataataaaatggactatgtattttccaaaaaggtataagtaggatctgaactaatttttttgttaaaataaaacttattaataatccaatctagagatgttatgacaaaacgtattaagaattagggatattggcggctaaaccacctgaactttacggtttgtaacacttaaccaccaaaactgaatttttggcggctaaactacctaaactccacttccgttttgctctgcacacctccgtccaaaaatcacagttaagtgccacggtggactgtcctcgtgtacacacttgtacacgtggcaaatttttagtggtccacgtaatattaattttaaaaataattataatatttaaaaaaattaaaaataaaaaaaaattattttttttctttttaacttttttttttaatttaaaaaaattaaaaattaaattttttttttccttttttttttacttttttcttt

SEQ ID NO: 392930 - DNA, 1387 bp, Cannabis indica
atattcctactaagctttctctttctcaagaggaacaaagtggatcggagaaaagtccatcctttctgtatttgcatcaacattcaccggccagcgagcttaataaaatagactcgtggactaaggataattaacgcctgaaccacatagaaatatgttttctatattccttccatttgcatttttattactttcttaagctcgataattattcggtagccaaaaaactcagtaaacacttttgcgattaaactttaccataggaatataaggagttttcacatgaattgggtttataagtcttaaccatattataaactacttaattcaacttattaattgaataagaagatttgggtaattgcattaggaagtacaataaaattggagatcgtaataatccttatctttattattgttattttatattattttcttgctttatttactttctatagaactatagaattaattgattggtaattgataatgaatcctcgtgagaacgatactctatttattattatattacttgatttgattgcgtatacttgtgtattaaatttaccgaacaaataataatatgttcgagatttattagaatttatataataaatatataatcatgaaagtaacatattaactacgcaacataaaataatttttgaccttttattaattagtaaataagtttatattgaaatgagttttatttaatgcattaaatccaaacatggtcttggtccaattttcccacccctcttctctctgtgtttctctctttctatatctttcttccactcgatcacactctctctcaattcagtatgaattgtttcttacattacaagaatgacaaatgcctttacataggcaaagaaagactcaacctaactaccagatgcacttaactaactaaacagaatactacaacatttgaatgaaccaatactgcaacatttaactaacttaataattgttagttataaatgctaaaattcgatattattaccaaacaacaatttcagtatgtagaaaagctttttagtctatttttttgtttgtttatgatcatgtacgttgtagttatttaggaccacaagtcaattttttataaaattttgaataatttacattactaaaaatatgattttttttaaacaccaaaaataagattcaaatagctacgcgtgtaacaaaatattttaatttatttttggcattataaactatttagaattttctaaaaatttataaatagttctaaataactacaccatccaattacattaaaaaaaaaaactctagaaagagataggggttgaaatttggtatttttacacaaaatgactattttgaccaatttttaacatttatattatccttt

SEQ ID NO: 392931 - DNA, 1390 bp, Cannabis indica
aggtcacacaatctccttcataatcccacccacaaccatatccaaagtggagcatttgaatcgcttcccaaagctcataactttctatccaatcacttatcccaacgtggaaggtcttccattgggggctgagaccactaatgatgttcctgtttcctcattacatctcatttccactgccatggacaaaacacaaaacgaaattgaatttcttctacgaaaacttaaaccccatttcatcctttacaattttgcttattgggtttccaagttggctcgtcccttgggcataaaatcgatgcattacacgaatgcgagtgctgctgcaacagcttacaatgtatcctctgctactcaccacaatctcaaaggaatgaagaaaattactaaggctgagttgatgaaacctcccccgggctatcctgattcatcaattcacctccattttcatgaggctcgagaccatcttatgatgagaaatgttaagcctggagccattaatatgtttgatcgcttgtatatgagccttgcagagtgtgatattatagggattaagacttgtagagaaattgatggtttgtttattgatttccttgaaaaagattttgggaagcctattttgcttacaggatcactgccagacccaccaaccgatcctctagagaagaaatggcttgactttctaggccaattcaagcccaactctgtcatatactgttgtttaggaagtgagtcgattttaaccaaatctcaattccaagagttggcgttgggtttggagctttctgggtttccatttttagctgcattaagaacaccttcaggggctgattccattgaagaagctttaccagatggatttcaggagcgaattggagaaagggggtgattcatggtggttggattcaacaaccacaaatcttgaaccacccctctattgggtgctttatcacacattgtggcgggggatctttttctgaggcattggtggccaaatccaaatgtgtgcttgtgctactaccgaatagaggtgatcagattttttatgcgaggatattggagaagacatttaaggctggtattgaggtggagaaaagtgaagaagaagggttgtttactatagaaggtgtcttcaaagccattaagactgccatggaagatgacaatgaggttggtaaagaggttagggccaaccttgccaagttacgacaaccgattcttagtgacaatttccaatcttcttattttgatgatttcgttaacaagctcaaagctctagcttttgggatgaaataataatagatattgattacaaatgttggaatgtgttataaaatattagtattatgtaatattataatttagagaaagaaaatagagaagagatgag

SEQ ID NO: 392932 - DNA, 1230 bp, Cannabis indica
attaaaaggagtatgtggctgcagttcattggattcaatttagagacaagtcaaccaaccccaccaccactccatcacccaaaccactttgactatttgagcttagttttaaagagaaaatttgaaaagacaatgaatcaaaacatgttatctaattcaaaaatccatcattattaccttcaactattaattattttgtaaaatgctacttatttgggctgcttcacgttttgggcccagttaactgtcttgtacattaactttttttggaatgatcctcgtttcaaacaagcctcacacactagtccacgttttttttaaaaaaagaaataaactcttcattaacaacacactaatccacgtttaaattcaatagtatataatataataaataaataaataaaaagctttgcattattggtttgatcaagaatcctttattttaatcacagttgcaatgaatacttatcaccaatgcagtgaataagaacatgaatttctttgtcccgaattagactttctgggtttttcacattatatgaaaatttgaataatgaatagaaataagattgaaatagttaaaaaatatatatcacatgaataataaattgaattataattatatatatttatatatatataattatgtatattttaaaacccttaaaagattggtataattgtaaataataaatatttatttatcacctttaaaccaattaaaataataataaatattcaacttttacttaatttatatgattatttataataatattgaaatattatataaaaataattaaagtttataaaaaaaaaaaaaaaacacaatataatttaatagtgagttcattaatcataataaaaatatcataatgtgaagcaagaattttagcccataaaagaaaatgggctggtttattaaaaaaaaatttacactcattatgtgattttaaaagttatttattaaaataacactttaactaatttatatggtatttttttatttttaagtatttttatagtatttaataagtcatatatatgtaaattagtttttcaaatcctatatttaatgtttttatttgtttaggcaattttatttatcactgatgctggaaaattcgccggagtttgctgccggcaccggaaaaatcactaaagtaactgccggtgccgaaaaaatcgtcggaattgccgctgatgccaaaaaagtcgtcagaattggca

SEQ ID NO: 392933 - DNA, 1834 bp, Cannabis indica
aaccttttaactctttcaactcagcagattaccatttgattacggagctttagatacagactctgcctcaggtatcagatcaatttcaaagtcaatctcccgctttgggagtaaccccagtaactcctctagaagacatccagaaactctcagaatactggaacatgttccgatcccattggtatttctttcgtaccatctaccacactagctaagaaaccgacacatccgtccaaaacacaaatctcttgttctaagcaccgagattattggaaattcaagattcttgagccttgccctatccttgcctacaaacataaatgggtcctctccttctggttcaaaggttaccatctttcttttacaattgatggttgtattatattttgaaagccattccattcccagtataacgtcaaaatcctctaagtttgtgtagatttccaatagctatacttgacacatatgaatgtattgcactagaatcaatttaaaacagtcaacaaagtaccaccaataaaaagttgacttgtcccggtagaaagaccaacatcagcctcggtctgggtcaaagtaaacccttgaacaggaactaaggtgtcatctttcttctgttccggtcgctgtaattgtaggtaatttcttttcagatggcccactaccccacactgggagcaggctttagtttaacatttttttcttgatagcatctctaacacctcatgcactctcgatagatttgcaaactttcgtttccaccttgtcgaaaaccttagtgaccttggaatctcttgtttggtcccgtaattaatggatcattaggccatttcttacaatcgttagggtcaacactcttaccagaaccaacattagatgtttgcttccatgaatctcttctcatactatttctctttcaaatttgatcttttccacccttagcaacaagggcttgctcaactacctgagcataagtgcggacaacccttggttgtttggcagctacaattacatctcaaacaatatattcttccaatcctcgaataaacttggcccttttagccacctcagtggccatttcatcaaaagcaatctttgctaaccaatcaaatttggtggcatactctgacactgccacattaacctgggttagcagtataaattctcccgcttcaggagctcgaataaattcattatagtacttttcatagaacaaagtttggaaagcatcccgggttatattattaagatcatgaccctatgatacaatttcccaccagatgcaggcatcctcacacaacacataaacggtacatccatcccaatcgttactcttaacccgcatgaaatcaaaaatcgatgttatcatactcattcattgctctgcattgagtggatcagcatcaccctcgaacactagcagattctgcttcttgaacgctcgtacaacggctccagacaatttcccgcttcctatggcactaccagaagtgccaaaggatcaggattgagatttggggcaggctgagctcgctgctccttcagttctcgaatctaaataccttcctaccggatgacctcctgcatcacgacatacatctctttcccgtttggtggtggtcgaggattcacaccttcatcgccaaccccaagcccgaaaatctcgcagtaacccctaccaaaccgcctcgggtgcataatctaatacacatgcaatcctaatttttcaccatctaatacatctcaaatcatgagcaaagctaataaacatctccatgtatacacatacacatcaacccttactatgcttttctaataactagcataattcaaataa

SEQ ID NO: 392934 - DNA, 742 bp, Cannabis indica
ctcataaggaaagggaaagcattagtccatcccttttaagaaagagcattgtgaaattttctcatagtagcggtgacaaaaaaaaaagtatttctacaatgtatcctattaaaagtgcactgatgtgaagaaaaacatctgtagctgaatatattgtgtaaaataattgtgttgagtgtttggtaaatatattttaaaatattattaattgtgaagattttaattataatgatagtagtattataatataatttattataatcacaaatatataaaaatttactttatagtttatgcaaaatttcattttatatcattatttattattttattttactaaagtatgaattataattatttgaacaaaaagaattaatttgaaaataatttatagtatttttaaattatataattcacagcaccaaaaataatgtttaaatattttatagcatacagcaccaaaaataatgtttaaatattttatagcatgtctaattattattttttatgtgcttaataagtaactattcggatcttatttttagcatagaattatttgaaatttttaaaaatttataggtgtcatagtcttacataacactacaacattttgactcaataccggcgggagtaataccggcggagccaaactgccggtattaatgggttcattaccggcggaaaaggcatttcgccggtattacttttgaataattaaaaaataattaaatatttatttaat

SEQ ID NO: 392935 - DNA, 618 bp, Cannabis indica
aaaaattataaaattgttcagtatgtcaaaataaatgtatttaataaattctcaatagttgataaactaatcgatcaaactgattttcatcgttgaagttaattgatatctttgtcaagatccttttgtgctcaaatgaatgatgatatgattttttatcattgaaaatacaatagcaataaaaattgggtgatctttaacaaaggaaacaaaattcgtacttaaagaaaggactaatatatagcttggtataatagatactcttttaaattaacgataagatgattaagaaatgcattgtcattaatcactccattccattttctttgacatggacataaagtttggacaattgtgtcacaacacggcattagtaaggaaagaaaaaaaagctaacgagtaagataatattgtttttcacataatctacatcaaataatatgtgtagcatttatattatacaaaaattctttcataggagtatgcctttttctcatctcactggtaggagtgggactgttcatctaatctaatccgtacttttttggtcaaacaatatccaatctgcattaagtgcggattttattttttggatccaatccaatccgcacaataact

SEQ ID NO: 392936 - DNA, 1284 bp, Cannabis indica
cccccgtccccatccccgttaagaattttaatcctcatccccgcttattccccatcggggatgcggcgaggacggggcggggaatcccctaataataaaataaagtttataatgaaatttttaatatacaaaaatattaaactacataaaaattaaaatattacacattaattattattcaataaactaattattatccaaaatataacttaaaattcataaaaaaagatactaatatactaaaaaaatgcaaacataaattataaattataaaatattattaaaaatataagataaaatactaaacgggtccccgtcggggcggggagtgtgatccccgtccccgccccgttccccatttagacgggaaatccccgccccattaggggcgggtccccgcggggccccatccccgtggggaaaatgtgcatccctaatgatgggaatagaaactgaaaaagaaggtataaatgaaaaaatttaaaacagcaggtaaaaataagatgcagtaacttttgtatgggatctaatttgggccattggattatgagtccaaccgaaatttagcatcaaacatgggcttgatatcccaaccctaatccctctccgacataacaaatggggccttatatgatattaatcctcttatatatatatcctgtggttgtgtatccatcttatattttccaacctagctaccctatctgcttctcttacgccgccactgaactattgtttagaaggaactcaactgagcaattcatgctcttcctcacacataccgtgattgagaatgttgagttatgcatcgaattacatgtttgttattgttttgattgatgcatgatattttgatgtatcttctttgtttgtactcgttcttgtgatgtattttcaacatcccgttcccaaccctacttcttttgttgcttttgtttggggccaatgattaaaaaatttagttagacaagcatatgtccgaaattactatgtagattaactaatcttctctatgaggccctataatctatatgcatttatattacattcattgataattttggcgttcggcttgtgtggatttgagaaaagttcgcaattatctaattgatgattcattgtgaatacattataccacctacttccttcctcagtagctatgttctaatttttgttttgttttaattatggtcgtatgatgatttttaatgcatagttcagatgaatctctgtgattatttcatttttagtctttcgctcctatctgacgacctataactttct

SEQ ID NO: 392937 - DNA, 1139 bp, Cannabis indica
tgggatgaggtttgcaggcctcgagaagagggaggtctgggtattaggaacttggagatggggattgaaggtttgcttatgaaatggctgtggagatttcctttagaaccaaactcgttgtggcacaagctggtgttgagtcgatatggtaaggctgataatttatgggacacaaaaaacgaatatagcctatctcctaaaggcctttggagagatatttcagatctgtatgatgaatatcttggactggtacacttcaaaattagtagaggagacaatattcggtttcgagaagatgtttggcttggtgattcttccttaataagtgctttccctaacttagtagagatttctaaggcaaggaatatgactataaagaaactgattgtcgacgagggtttgccaagtgggtgggtagagagttgggatttcagtttagaaggaatttattggagtgggaggtcccaagcctttatgtcgttacttcaaaaggtggaacatgtcaaagtgcttaatatttcgagtgatagccgaatttggaaactggatccgtcaggatttttttcttgtaaattagccttttgttggttcacatcaaacccgaatattggtggaatgtattggacgaggactttatggaaaagttgtgtaccattgaaagttaaagtatttggctggcttgtgtcgttagacaaagtgaacgtccatgataaaatgcaaaagaggaagccttacctatacatttcctctagatggtgcgtctgctatgaagtcagcggggaagatgttggacacttgtttttagaatgcaactttattcgacaattatggattaatttgatagaggaatttcagctaacatgggttatgccaagatatataccacaaatgatagtcagtaagttaattggcagtaagcgtaaaacaaagttatggaaaacgacgattttagcagtaatttgggctgtgtgattggaaagaaatgctagaattttcgaaggggctgaaagttcagaagaggatgggtgggagaaaattaagctctggatggctacatgggtttttaaaaccaaactttttgaggaattgttctttttagatttatgtagagaatgaaattcattgttgtagtggcagta

SEQ ID NO: 392938 - DNA, 566 bp, Cannabis indica
aaaatatatattataactaaaagtagcttattttttatagctgtaaatattatatatgtaaaatttgatcgtaaatatattataagtgctgatgttaattaatttctatatactgcgcgtagtaggtgtggatattccaacacacacgtatataaatatattatgtaagattatatagctttattaacatctatagtataatatattactgatcttgtatgtaatcttacataattatgagatacctaaagatgacaatttttttaagtgtagaagaaagaagactttttcaccaaagctttagaaagaaattaagaataataataataaacacaaatatatatgaggacacttgctgccggcttgggggaggaatccatggaacaccttttcttgtcctgcgatgtggcgatgtatttatggagatcgtcaccttggggcatctatcctatttgcaatactgggattcgaatatgggattgggtcaaatttatttggaatctaaactctagggggatccgagtggaagatgttttcctgtacgtatgcttcgattgttgtcgaaa

SEQ ID NO: 392939 - DNA, 746 bp, Cannabis indica
ttcttatgcctcttttctttttttgtacaaggctttaacttttccctgttgtctactagattactgtagaggtcggtcgtctttcaaattctctgatcaaccacgggtttaccatgtccaagtttggtggtacgaaggaggtgatgaagagtctctgggagtcggaggagcagaagcaagcaatccgggacgaagcccaaaggaagggggccctcattgagcaaaaccatcgggaggtgttggcggggcagggacaagatcattgccgcggccgggagggatcttcgagattccaaagaagaagtccaagaactcacttccaagttacgatctttggaggagctgcaccaaaatgacttaaatacgacagctagtttatctgttgaagtgaaggagctccgtgagtttaagaaacaagctcgcaaggaggcatccaaggctaaaagggatgctctcctgaccctcgtcacctgtcaacactactcaaagcgctttgatgatggagtttttatgttctggaaggttaataactttgacctttgtcttcctttctaccccaagcctgaggaagttttggcccgtttttgggagaaaaataagaggcttgatgcggtactggaggagtgcaggggtccttgtcttcctccccgggctgactaagtgatatttattattttttttggataatttctacgacttttgaatttatttagccttttactttcttatattcatcctgttttttg

SEQ ID NO: 392940 - DNA, 1012 bp, Cannabis indica
ccgatctaatccaattagaatccaacttttagcatccaatccaatccaattgtaattggatatccaactttttataaatggattggattggatcggttcggttcaattggattggattggatgatgtccaccccttgtaagttctattgctacatcaaaaaaaaaaaaaaaaaaaatcttactttcataataaaatttataactaattataaagctccattcttatatatttgtgattaaaaaatctataattaaatgcactagtcacaaaaattataatttattgtgactaaatatatttttagtcgtaatatttattttattgtgactaaaattaaattagtaataacttatatttaaatactatattttagtcacaaataaatttttataataattaaaagtcacaattaattaaaaaaaaattatattatcattaaaatattattactaaaagttttttttttttttgaagtgtcagtgatattaatgtctcactcatagcaatatttttattattattatttgaaaatagctaatttaatatcatctttgtcataatgacaccaaaacactatttgaccaagatgaaatgactgctctgaaagtgaaactcatagatttttgcaaaagaaagttgtacatttttttttgtaaggaagtttgaagatacatttaaattcaattaggaaagtgaggcatgtacttatacaacaacctattaattaattaactaatatgatacaatccaaaccaaatttgaaatcaaaacggaaaattgcactgattatttatttgggtctattaatttgggtcaaaattatctgatgcgtacactataattttttttacttttaatcacaacaaaacttataaataaaagtgaaaaagtgatgactaattataaatcatcattcttatgttgtgactaaaaagttcgtggccaaaggtattagtcacaaaaattacaatttgttgttactaaatatatttttagtcacaatacttgttg

SEQ ID NO: 392941 - DNA, 783 bp, Cannabis indica
taaatttaaatatatcaataagactataacacgtgaataataatgtgatacttaatggatagatacttacggaagttctaaaaatataacttaagtattattactgttaaaaattaaacttagatatttatttgtaaccgatagttaaacttaagtatttacggtacaaatttatcttattttttgaaaggcaaaaattcacttatggttaaaaaagaaataaagccctaaaacggagataaagtcgaacaaattttactaaaagatgaccagactaatggtaagccatgttgaaaacaagacgaacagaaaactcgaagctcatgaaagagttgctagagggacaaacctcacaaaaacgatatgggctaacgttactaaggttaaacacccacgtcgtggccctaattagtttttatgcacaactttatgtcattactcggtttagcatattttctttataatctacttaaaatgccaaattttatattataattacttctaactataaataagagtaaaaatttagctagacatatccacaaattttaatttttattaggtatatctttttcttttcaatacttataataataatataaaagacacattcaaattacacactttttacacattaatgtgtaattagtctcaattatataattaaaactatataattaaaactgtataattaaaagtgatgtggtcactaaaaactcatatatagcaaaaattgaatttttatcacactatgtgtaaaaaattgtgtgcaatttaagtgtg

SEQ ID NO: 392942 - DNA, 1284 bp, Cannabis indica
aagagtgagagagatctgggaatatggtaaaccaatattactttaacaacttattagagcatacttgtcattgagtgtttaaaaagctaagctatgttaccaaattcttactagtacgtgcaatgaaattttaacacatttactaaaagtaagaggtatattttagcaataagaagataaagaagaaagaattgtatttcattgaattgggagagaattacaagagaggatatatatatatacagactcacagaacaaataacagaacagagtcggttaggacactctaactaattccaacagaaataacagccctctaactaacatgacacgtgtacactacatcttacactttaagacacccccttaaggtggagtgtagatgtcatacaaccccattttatctttgagagcttgaaattgagaaggcagcaatgcgttagtgcagatatcagcaattttctctttgctggaagtgtgagatgccttgatgatcccctcttgaaccttttgcctaacaatatgacaatcgattttgatatgcttggtacgctcgtggaaaacgggattggctgctatttgttgcgctgctttattatcacagtgcaatatggcagggctttcatgctcaatccccaactccttgagtaaagatagcaaccaaaccaactcacaagtagtattggccatcgccctatattaagcctatgcagaagatctagacacaatgtgttgtttcttcctcttccaagacacgagagaatcgccaagaaaaacacaaacacctgtgcgagtgttggaaattattttaccaggatcttagatctactcacatgtatgttgattaacaccctaaatatgaacttctaaaacgattataaaattaaacacatataaagtatgagaaaccttacattgggtgcagcggaataatatgtctccttccgttcagatctctaaccattgtatcctttctgttgcagagtattatcaagatctgaacttggatctctttctctccttcctttaatgttgaatctccttcttgttgaatgtctttcttaacgatcttcctcactatgattgaggtactactttctgtgtgtgggcactactctataactaagaggttcgaaatattcaagagggaacaagaggtgaaggtggcagctaggtatagagagagaaggctcaggtttttctctgaaggaaacaagatgtgaaagtctatttttcctcaagccatcactatctatttatcgcatgccacatggggttaggttt

SEQ ID NO: 392943 - DNA, 542 bp, Cannabis indica
agaggtcccactccgagaccttcgaattatgacgaggatattggtggtggtggtggtcctgtttccaccaccgccaacaaaccaagtagatactacagtcacccgcagcctggtggtgttgcgggtggtactggtactactaccactactacttaccctgctcccaaccccgggatgttctcgccaaccgggtcaaaaaacccgaccgctaatgccgccattcccaatgccacaaagaagcccaacggcactaccgcaaccggtacttttcttattccaatatttttgtgcgtctttcaataaaatttctgaatccgtcactgattattcttccgattaatttaaggccaagttcaaaaaggcgaagaaggcggaaaagatcttcacatgtttgtatggagttcaagtgcttcccctgtatctgatgttttcggtagccatgaatatggtcctcatgatcaacaaaaagagatgagactagctgtttctcctggaaaaggtttgtcataatcatttctctcaatttttcttttttcttttca

SEQ ID NO: 392944 - DNA, 1792 bp, Cannabis indica
ctcttgcgcggcagcttcgccagaccacgatggccatttcctcgagcaccatggtggatatcgtagtcctaaagtcactataaaaggaaggcttccttaggtgctcgtaaattttcaaacaagtgttttgtgtgcgatgtacaagtatagagtatcaatttatactcgtgtgttgatcttactgaaatcgtactcacatacgaataaggtaataaaggtctttctaccacccctttcagaaaaattttaatcatattttctttcgagttattcatgttttagtttatctcttaacaatattttttattttgccttaaagcttgcccaagatgaatacacttgcatgtgggaatttttttatttcagatctctttcttttgtatgccatttgtatcatctccattttatggtgtttcgtgaagatgcgcgttctgggatgtgggggtttcatagaggcggaggtcggggtttcatagagttggggttctcagattttggggtttcgtaggaggcagaggtcggggttctcgaagctggagcggtcgccgcacaagaagattgaccttcctttgttttatttctagatttgaaaggttttagtattttttaatttaattattttatttgttttaaataaaaccttatgtaatatatttacttgttgtaatttatatattatactctatatatttattaactataatatgtagttgttgtaatgtgtaacttgtagtatgtaatatttgttgtataataaaaaatctaaatgcattattaaaatttaatttaatttatatttactaatttatttgtataactcattttagtaaatttgtaattattattttaatataaataatatacaacttatgtaatataaaaattaagttttaacttttctttaaaatattccttttattgtggatttaaaatcgacactaaagggaaaaatatatatgtacactaatatcggttgtaaaacgacaccaaaactcattagtctcgatttataatcgacacttaaactctgatttttgtcactgtagaataggtgttggatctatgaactgacactatatgtataataagtgtcagtttaaaaccgacaccgtaagtgcagtttatagtagtatttcatcactgtgatagatgatcgttctatctagaacgtttgagaagtttcaagaattttagacgaatggctaaacaccagtaaggtaaaaatttaaagatcttgggaactagtagaagtggaaaatatgaaaattaagttcaaagatcgtttaattgaacttgatattgtatacattatactttcggtaaacatcagtattgcaccgttatagtaattaagattataattagttactgaattgtcagcatcattctaggaatagccttagagacagcaaatgacattcaaaatgttgtcccatctaagtcaggtccctagatacctttagaatgttgaaataattgtaattatattagtttgcgccattacaaaatataagggtgcaagactcatatctttatcaataagtaatgaaatttagaatagtaaaatatggtttgcatgtttgttggttattaaattttgtctagggtggagtatataatatctaaaaaagaagtgtttgcttctacaaatgttgattttttagaatatgactatatctttaattgttaattctatttttgacatatttaattgacaaaaatattttattatttcttattaatttcggctggtgtgtttaatttggttaccatattttgtgtatctaaactt

SEQ ID NO: 392945 - DNA, 1493 bp, Cannabis indica
aaggctggttcttacatcaattacatgttaataatgctttcctacatggggacttgcatgaagatgtgtttatgactctaccagcagggtatagtcctaagggggagctaccacctattgttgtttgcaaattaaagaaatctatatatggtcttaagcaagcatctaggaaatggtttgcaaaattttctacagccttgattgaagaaggatttcaacactcagcttcagattactcattattcattcaacagaatggatccaccatcatcatacgacttgtttatgtggatgatgtgatcttggatggtaacaacatagcatccctagaagaattaaaagttaattggaataacagattcaaattaaaggatcttggtgagttgaagttgagttgaagtattttcttggtatcgaaatagctagaaccagcaaaggcatttttatatcccaaaggcattaggctctacaatttctagaagatttcggccaattggggtgtaaacctactaacacaccaatggaaattaatctgaaactcaaccaagatgcagaggaaaaacttgctgatcctaagttgtacagaaaaataattgggaagcttcaatacttaaccataactagacctgacttagcttacacattaaataaagtaagttagttcgtagttacatctaaggcttcccacatgaatgctgctcaaagagctttacagtatattaagagttctcctggacaaggattattctatcctgctgatgcagaaatacaacttgaggcttacatagatgcagactgggctgcttgtgttgatacaaggagatcaactacagggttctgtgtgtttcttggaagctcactcatatcctggaaaagtaagaaacagcacacggtttcaaggtcttcaacagaggcagaatatagagctatgtcgaatacaacttgtgagttggtttggcttctttctttgctgaaaaattgaagattgaacatagaggtcctgtcattttgcactgtgataacaaggttgtccaacaaattgttgcaaacccgatttttcacgaaagaaccaagcatatcgagagtgactgtcacctggttagagaaaaagtgcagcaagggacaataagaacagttcatacttcgagtaaggatcaaattgcagacatttgtacaaaaaaagctcttcttcctaatcaatttcagactttaaaagagaaaatgggaatttgtaatgtttacactccaccataagggggagtattaaagtcagttagtaaggtggagtgtcagttaggaagtttttatgtctgttagtaatcagttagaggttgttacttgttagctagttttttccttgctcaaagtgtatataagagaatactcagtattttcaagctataatgaataaaaacttagcatttttttctccttcttgttcttatttcgattctctctctttctcaaaataatataaattaaacaaaatgtga

SEQ ID NO: 392946 - DNA, 1212 bp, Cannabis indica
cttacaaaaataaaagaaaaatgccagaatctcacgtaccccaaaaatcattattggacaacgtacagcgctaataacactatacaaattaagcattacagagactctaatttattgccttttattacttcaaaaaaaaaaatcaaatactaaattattcattaaataaaaaattaaaaatatggtaacatctgaatgcagttaatttccaaaaaaaaaaaaatgccagaatctcagttaccaaaatctaatttattgccttaaaaaacagaatttaaatacaactgtttttaaaattaaattcaaaaacacataaacacaaaagctcagaaacagaacttaaaaacgagtgtttttaaaaactgaatttaaaaacagtgatattgaaatatgggaacatctgaatgcgtaaaactcaattgaaaaatggagtaaaacgccagaatctcagttctcagatttgatttcggcaacgtacagcgctaataacactatttaaaaatcaagtgttacagagactctaatttattgcctttatcaaaaaaaaaaagcaaaaatgaaaaggctcagagattatagttgtgatttgcatcaacaagctaaagctttcaaagtttgatggtataaaatttaatcctcattgccagtaaaagaaaccctaaaaagaaaaaattgacgaggcctcagagagatttgtaagatgaatacatcagaagattcagatggtacggacaaatttgtgaaaatcataggccatggagttgtataaaaatggaaacttggaagagattagaggaagaagatgaagaaattgggggcggctgagattggagagagtgagagaaggaatggtttataagggtttgtgttgatgaagaggttatttatagatagtatatgggcccaatgggcctgtaacgtattgatgggattagtcgagtccttgggtttttgtcgacccatttaagcccaaatccaagcccaatggactgtttcttcttcttctttatttgccttatggggaaattacaccatatacctttttatattgtcctcttttatttttagcctcttttttaaagtctattatttttaactctttttttaaatattgtgtcaattttgcccctgtcttcaagatatgactctcttatgtcagggtattttaagtacaatacatataaaaagaggtatgtttcaaataaatataaa

SEQ ID NO: 392947 - DNA, 670 bp, Cannabis indica
aaaaaaaaatctctaaaaaactaataattttgtattgggaaacaagtcaaatcgcttaccatgcagacaggcggaggctcggaagaacaaacagtgatttcaaaatcaaacaatccatttgaatagtaatgttgttgttacacatcttacttttacttaagatatttatttaatttgtgtttttgtcttttctttcattccctcattttcgaaaggattcaaaataaaagattaggagggagtgttgatacctccatgcatctatcatctccctcctattttcttttctttcttatcaaacaatagaatttcgttgtcctccctcccctcttcctaccctctccatccttatttcctttttgaaaaagaaaaacatactaagtggaagttggcaatgtatagtaaattattggtgttgaaatatatgatggatatccttattaataatgacaaaaatgtagatgatagaaacagaaattttgagaataatcctaagcatttaaaataatggtttttacgaatgagagaaaagataatgtattttttgagagaaagttttacctgagatgttttatttaagattttactataatgaaagatgttttaacaaaaaaaaaaattaaaggtaaattagtcagtatatatacataatgtttcagattttatacac

SEQ ID NO: 392948 - DNA, 2068 bp, Cannabis indica
taaacgggattactaataaaaattagcacagatttaaactttaataacaataaaaatgaaaataaacttgtaatactttaaactttacaaactaaaagttacagtagttgggatcccaaaaacatttataaaatattattacaagtccttttcttttagccgacctaagcggcaaaacagagtctcaaaaatacaacactggtagaccccaacccgcttggtctgatatggcccggacatgtacattcttcgtccaactccagcactcatggctgatcagcaatattcttaccctttcctgcacagtagagcacccgtgagccaaacccagcaaaacagtataaaataataacaatgatatgcttatcatgctacttaaacagtaatgacatatatatatatgtctgtgtgtcacagacctgcatgttgcactcacatgcctatttatgtctacgtggcgtagacctatgtgttgcgctcacacatctatttatgtctacgtggcgtagacctacgttttgctctcacacgtctaaatacaataaggccttagaatagttcatctcggctatggttaccgagtccaacatgattatgtcttaagcgcataatccttgaatctcattacatttaacatggcatggcatttacacacatatatcgctgggggtaataaccctaggttattagaccgttcttattagggtaataaccctaatcctagttattcaacaatcatatatatcattttcaatataagcgccactacgcatgctctacgtgctaaatactgtcttacctcttgtcccgcaataaaagagattctgaatccccaggtgctcctaatcaggtgccggtaatcctagtcacacaatctaagattttcaaacatagagttaacccctaattccatactcataaaatatacacatgacatttaaaacttagataatcacatagagctcggaacgagctttccaacgatatatagagctcccaaatcgaagttcgaaatcaaaagttatggaatttcaaagtttgcactcaaactaccctgaaaatctaccgcggcacctgggaaaaatcccaggttccaccaaaaggggtgggccgcgacatgctcaaaccatgccgcaacacttaggtttcaaacccagaaatcagcagcctgaaacacgaatttcagcaaacaaatccaaccaattcatcccaattcacaaccaaacttataaatcacaacgcaaggtttctaccaattaatagagagtcaaaataacttatttcatgcatcaaaatctaacactaaacccccaaaaatcagattgcaatatcaactcaaaatcatgctcaaacatacaactttcaagctctagaacttgagctaaaatccttcaatttcaaatatatttctagcagcatatcacaaaataaaccattatttccaacctagaaaatacataaaacatattatccaaacccaacaattaacccacaacaacaactagcaatttcacacactaattcatcaaaacaagaccaattctcataacatgcaactacaagatcaacacaacttttccatgcttttacaacaataaaattcagcacgaaaacaaggttaaaaaatctgtaaaatctacctcaaatccttgcacaatcaagctccaagctttcaacacaattttcccaacaatcaagctttaatccttgtttttcaccaaataaacttgaaaaatcaagaggatttagagagggagagagagtcgggtttgagagagagagaacacaccagaaatttccaatttcatttcataaaaatttaatcttcaattcaagtaaatcaataggtcaaaagaccaaaatgcccctagggccaattctcacatattcatacatataagggcataattgtcatttcatgcacatttaatttcaaataaaattcagattatccaatatcaaataaaatgccaaataattcaatccaatttgcatttcgggcccgaacccagttcggcccgaaatacccagttgtgattataccgcgccaacctgtcagaacacacct

SEQ ID NO: 392949 - DNA, 606 bp, Cannabis indica
gcactacccccccaccccccccccccacttgagggcgaggacatactggtcgtttcgcgagggccgcatctcgctaaaaatagtaataattcccacaaaagatatatcaataaagtaaagaatggaaaatcagtatttgctcaagaaccactgaaaagagtaaagttagatgaacctccgattgcctttttggaggaagacacaaaacacgtgcagtatccgcatgtcgatcctctcgttgttacaattcagctcgctaacaagagagtaaaaagggtattggtggataacagaacttcagtgaatatcctttacaaaaatacattaaagaaaacaggattacaagatgcaaaggtaacaccttgcatggtaagcttatgtgggttcacaggaaacagtgtcgccagccaaggcatcattgaaattccattaactgtaggagaaccaccattatcaacgacgctaatgcatgagttcctagttgttgatcttccattagtttataatgtattgataggttgccctgcattgattggactaggggtagtaagttctgttaggttttatgccctaaataaaactccatttcaatgtaatctattttat

SEQ ID NO: 392950 - DNA, 611 bp, Cannabis indica
tcagggccgtggggagagatttagatccgggtctggtcggaatctaaaatattgaataaagaaaaaaaaactagtttaaaaagatattgaaagttgtattttttttttttttgttttaaaaattttgattctcaattactaaaaaattaaaaagtgaaaacagttttatagaacatgtttttaaaatatatttttatttttttaattttaaaaattagaaaactggttgaaaaagtcttaccaaacatcatctatatttatacctatagacattttctatattttcagcttatatttaagttgtaatttcttctttttttttttttacattgataatatttaatgtaattagacctctcaaatttttaagaatataaaatataggagtatgaatatcaaattacaaaagcatatgcaattaaatgattagattatattatacccctatgaaaaaatatataaaattataatttattttcttatcaaaactaataacaatatgaatttttacaactaaactctcacttgcacccaacacggaaagaaggatttataagttgtgtgaggtgaaaattggtagatgcaaattattaattactatagataattat

SEQ ID NO: 392951 - DNA, 622 bp, Cannabis indica
taagattcattttaatttgtgtaagtttgagctttttaccttttgatgcgtcgatttctgtatgttgacgaagcttctaggtgtggctttttgtcagttataatggttttacttcatctcactgtgaatgatgtttattttttgactgttctgtggttgatcgattgtttccgaccgtggtagctgagaacgatgagatttttcttattttggcctatttacaatataaaagaaaaaaattaatggacagtataattgtaaaatttccagtatcacaatatgtgtaaactttactctatttcacactatatatgtaagtttcctagattcttattcttcctctcatttgtaacccaacccacatttgaatatgaatttttgatttcgatccaaaacttttgagtttcttctttattttgggttcttcgacacattattgtctagtgtaatattagtttttaagaagccaatcatggtatcaattaaaaactaacagcttgatcattttcctatatctttatttatttatttattttgatggaattggaaatgtctttatttattatggtgccgtttggtaacacttttttaatcagttttttgtttttaaaagtagaaaagt

SEQ ID NO: 392952 - DNA, 1740 bp, Cannabis indica
agaaaagctttagaatttttcaaggtgttcattgtttcagcagtgcattgaggtgcattatttagcctttccacatgcgattgtgcatctgagatctttttcttcatgttaccatatttatcaacgtgccatttttgtaagttggtagcacattcatccaaattagtaagcacgactgtgatgggatcatggacataagaagtgctccagctagcatagataatgtctttcctttgtgcatcaaagagccacaatttctcaaagcgaaatcgacttcgtcttttttcctgttgaagccgagtgtttactggtgtgaagacaacagaaatggctctatggtctgagcaaaaataatctagatggtgaaccgaaggtgtgttaaaaaagctctcccaaaggtggttcacaaaacaccaatctaaccgctctttgaccgtgttaattcgcgaacagtttttaatccatgtatatgggtcaccttcaaaagaagtttcatgcaacttacaaatagtctaatgactttcgaaaagcttccttttttctttctattcttgaggcagccacccgacttattactgttggagagaatttcattaaagtcaccaatagtcaaccatggtagagaaggggaaacatcagccagtctttgcaaaagaagccaagaatcagctttgttttgagtatccggagcaccatagaaagctgtgaagtggaaagtagcttcattctcagccttaacatgacaatcaaaaaaggttctaccaaagttcagaagagtaacatcaatattttgttgccaaaggagcaccaaccaccactaagaccagctcgtggtgattccaaaccattatcgaaatttaaggattgtcgaaaacgtgaaatagagttttgaggaagttttgtttccatgagaaataaatttggggcgattgttgttttagaagcaatcgacgatgcctgaatgcagatgggttccccaatccctgcgcattccaactcaagattttcataatgaatcgagggattgcaaagcaatcttcgcgaaatcatcaataaagccatccgaatcgatatcaacataggaaacattttgacttgagctttctcccaaggacagtgaagagggagtggaagtagcttggttgcgacatcttttgagaaattgcctcattgtgagcacgtcacagtgtctttcggtgacaagcactggtgggatattctctttgttacttgcagcagcaacaatagaaagggcaaccattgtagtagtgacagcagcgtgttcaatggaagtgtatgtaggttttggtgaaaatggtgtcaaggatggtggatatgttgccacagggatgaagggtcgagtggcagcaccaatatcaggtgtaaaaatgccaggcaacattgtgactgattggggattattgtcatccacaatagaatggtcacggcttgtaagggtggtgagattggctgcaggatgtggtgaagatatattaaagttaggttgttgtgtaaaagtctgtgtggacgatgggtgaaaagtagcagtaggaaggcttactatgtgtcaagtttgaggctggtttgtgatagattaggagttgctggtttgtgatagtggtgttcgacttccagtaagtatggggttgattgtagaaggaggcacagacatatttatggttgattgtggtgttgttggctgattaaacaaagggggtaagtgttgggtttatgccctaa

SEQ ID NO: 392953 - DNA, 1178 bp, Cannabis indica
caaggctataaaccccacaattctcattccaatcaaatgccacataagtttcagatttataagttttccaatcaagtttgagaacacatacaagatgattaagttgtacaatttgtctagttccattaaatatgtttcattctagatttaataatttaaaatttgggctttatatatatgtgccttattttaaacattaatgaagtttgtactaatgaaataggacaaaaattacagtttgtacaaatattaaatatttgtggagttaagaaaaattataagatttatatcacttacaaactcaaactcaaaaatttaagtacttgtattgctatttatcattttaattattatttaatacatatttatataatactaaggctatctttacttaaaggggatgagaaataatgtatgatattgattcctatataattatttactaaattttagaaaagaaaaaagtagtgggcccacataaattaaggagaaaataaaggaaaatattctcccctactttcaaagaaaatacatttctttttcctaacttattttattttaattttattaataaaaaataaaaaagataaatatacattttaaaagtctattaacaataaataattacatgttttaatgattttgtcaaattaatacattctgattatcttttctaattatctaaacaaaataatatcatttgattttctttacaagaagtttattaaacagcataataaaatattatttctgattattttctattttaaaaccgatttatttcttttatagttacaatttagtaaacgcgaatatattaagtttttcttttgctgggtaaatgtaggggtgttcactgtgcggatattgcgggttgtaacattttttccaaactaaactgcattttttctaatttctcaaaccgtaaccgcactgcgagatcttaaaattgcaaaaactacatcacaaaaatacagtgtaatgcggtgtcatttgagcagtttacactatcatcattatcgaatattataataaaaatttaaaaatcaatccataacaatacaaaaaaaaatcttattaaagttttaatatcatgtcatatataataatcatcaaatcattatattgaattgtctctaaaaaaaataatataatatatacatatgttatatatatat

SEQ ID NO: 392954 - DNA, 1023 bp, Cannabis indica
cttcaataaattgttttaaaaaataagtaaaatgtaactgaaagagtaaatttacaattattttttaaattcaagagatatttttatacataaaaaaataattcaaaaagcaaaatcatgataaatttatcaagataatttagtaaaattaaaacattttaataatttttcttagttatgaaaatgtaacaaaatttattctttccgatcaatttttttatttgttttccgaccatcttaataaacaacataataaaataattattctaatatttaatattttattctcttttatttctcctatttattcatttgattacaatttagtaaatgccattaacaaaaagcaaatataagaaataaaagaataatacacagtccactttatttgtttcttttcctgtcatgttttgagattttttttatgaaaatgacaaaaaataaggattattattttcccttcgttgttaaatattagaagcaaattcccctaaaggatatgacaaaagaataattgaacaaaaagaagaatgcctaagataaacaaacaaacatgtaattttcttaggtcttgtatatctttgttaactgtcaaaactgtttttaacaagtatcatcatcagacgacgatgacgacgagagcgagaggtttctcacgcggccatcaacccctcgatcgtgtaagtaagagacttagcccagtcggctttgagtagcagagtttgcagtgtatccatcacattgtagccggggtcgagttttcgttgccaaccctaacaacaccaacaaagattaaaacacattgtaaaccgtggataaataaacccctatcgaattctatacgaagaaattacctcgagaactaatgttgtcaccatgacggtacagacattgccgtcgatgttgactctatgacgcctcactttctcgagcaattgctgcatgcactcggcgggatgtactatgtcaccttctggagtaccccaaaaagtgaatgattcttccacttcctgaaatatacaa

SEQ ID NO: 392955 - DNA, 670 bp, Cannabis indica
acgtgtgataaaacttgacaaaaagattaatttacaacttagtgaatgaaaaattcaagaaatataataatatataaatcataaaaatttatatatatagaaagattctcaaaatattcaagtaaactaaaagtttgcctacatagtcaagacatattttgaggtcatgtaaaatagcataatgatttaatattattattatagcaaagaattaagaaagtgtagtctcaaataaatgatatacgacagtcatctaaataaaacgacatatggagtcaactctatcttctaaaagtcttacggccgattgattatttataataatgtatttggaacaaggaaggaaattacatcaaggatcttatgttatatatatacatatatatatatatatatataacataagatccttgatgttatatatatatattgattataattactaccttaatgattatagtttttctttttcattgaaaaataataattaagagtaaattaatttttgttagctattcctttcattcttcttcttcttcttcttcttctatacctggatttgtaagcatgtgcagtatctctgctactaataatcaccatggtcatttcccatcatctacttttttcttcttctttcttatttatttgaaagaataatatataattgcat

SEQ ID NO: 392956 - DNA, 952 bp, Cannabis indica
taataactaataagtgtttctttaatagaagggtatcctctgtcctaagttgtctcgtttactgtctcccttgttgttttgagaccaggtcacgtctctattaacttgaaaaagctttgtttgtaaataaatctttaaaatcttacaataaataataaactaaaaaaaaaaagaacaattatttgaaaaatatacagtatgctaaaatatgaaagtgtccacatatatttcttgtttggactaagaaataattattgcatatagtttcttgtttggacaaagaaaataactattgcatgcttatataaaattgagggagacgtggccttatataatataaaaattaaaaatataacattcatgcctattgagagatattgttattttaccctaatgtatgtatggcaagaaaaactattatgacagtaaataaaattattgcgacttttggtgctattttgcttttattttattttagtttttttctttcggatccaatctaattaaataattaaaaaaataataatagaactatagaaaacgttacgtatttgtctaaatgtgaaaaaaaaagctatagaccatatattcttgccttgggagaacagaaaatatatagattaatagagagagagagtccggagtcgtaaactcgaaacgcgccgttttggtaagcccgtcaccacccgccggcaacctatttctccgattaagcccttctttctttctcctcttacctctctctgattctgatcctgcgtcgtcctcttccattcagctggtctccgattgctgtaaatttttctcaggtagtattctctttctgtatctctctctaactccatttctctctcttcttctcaatattgaggttgcttgctcaggtttcgtttggtttggttaggttaggttagattaggttgtggtttactttttctttttttttttcttt

SEQ ID NO: 392957 - DNA, 1477 bp, Cannabis indica
taattagacacaatgtgacgttcctgaggtaagtagaattatttgttttacattcattctttgtcttgactttttgttttttttttactctatcccaatgatagtttggaattgaaagagtttgtttaagtatttttggcctgtgttttaattccctcattgaatgagttatcaaacttgcgttacttgccatgactagttattggctggttgaatgaatggtggtgcccgattataatgaaagcaaataagtactatttaagacttcacctattgtatatttatatttataggaggctcctatatttatataaaattatcttatctgtgttcttattcttccataaaataatatagtacaatctcgtgacagccttgactgtagaatcccagagctgtgaaaccaattcaaacagttcatctaattgatatctatatttctttcaataaataatattacttgaaagtttattggatttcggcctcttaaattattgttttcttaaaaattaaaaaaaaaaaaatcccttgaacaatacaaaataattacaaattttttcctcttcaaaaaaaaaaaaaaattacaaatttcctcctttgattgcattccgttaattttgcaaacaatttcttaacataagactgatccaggactaactgaagatattgaaaattgaccaatttggtaaaggagtgcatagataataagatagaaaagaaagtaaaatagacgctacaatttctagtagttcaatccccgtattgtaatgataatagagctacgtctacttcaagtttctattatttataagatcataaattgtgtatcagaaatttagctaagcaaagttctcactcacaagttgtagagagagaaataaagttagttttagagagagaatctctcactttgtgaagagatatgtgtattggtttttagggttcatattagagtcacaaccccggatctcaacactaatacataacttaaaacaaactattagtttaaagatttttacctcttgttgcctatcagggtttctattgacctcaaatttggccaatcgacagcagagtcatattcaatgttgatgcttgccacgtgttacacaataagaacaataaagtaaaagaacacaagattttatagatgttcggctccttcagttagcgggtaatgacatactccccttttaattatattgagactaagaggtaataatactcaaatcactatagatgggatctgaagtagctctcttaaatttacaatgtaggaattagagttggcaaatctcaattaagagaaaaacaatggtgggcgtgtgagagagagatcaaaacttagagcttagggttttcaacttatgacttcacgcttttgacctagggttttagggttttaatcatttattatttaaattaaaagtactaactttttaaaaaaaattaataccactttattacattttaaatt

SEQ ID NO: 392958 - DNA, 747 bp, Cannabis indica
agccatatgcaggattaggtttgccattgatcagggttgatggtggtggaaggccggtgaagagaatttcatctaacgagtcatggccaatcattgtcgaaacaacctacgatttccaagagagaaaattagtacgatcatgtttgattgtcaaagtcgatgttaaagatcaagaaaaaggattttagttggagttcatctggaactgaggagcactggtagcttgagtaaggactgctggagctttgggagctgtggccggatcgatggaggtggattccatagtcaacggtaatcaagggcgatctaataccatgtagaaatttagagtataaattttagagaaacagaaaaaaatttagagagagttcagttgaaaaacaaagctctctttattgatagaagaagatgaatacaaagactagaaaacaagaattacaaaaccagaacagttgcaactgaaaacagttactattacagaaaactaacataatcctaactttgacataaaaataaaagaaaataaaacacattttactctaattttattcgttagtacaatttcacattttaatgtctaatgaccaaattgttacggtaaagacaaaaaaatatttcatgaccatcaaaaagggtcttaactcatttttttaggtaaatactagtttagactttgtgttttgtaaaagttattaattggaccttctgtttcgttaaatgataaaatggatcatgtatttttcaaaa

SEQ ID NO: 392959 - DNA, 1058 bp, Cannabis indica
tacgagtttaagctacgcaaccccgaagctaatttttctcacaaggaggatgcttctttccttaagagtacattggcccaagggaaagcattgtatgggagcatgatggaggcagactagaccatcgtctagccaaaaggatcgtcactggggtagttcaatgaggccatgaccgacccatctactgagggctttgaccaggtggctggctagcctataaaggctatggttggcccacactttggcgatcgagacattgaaacttttgattcagctccacctacacctgcacatatgtactttattagtatttcaactttatgatttgattagcaaagacattttatttcaaattttttacggcgtattggcctttcacttttgaacactacttattttcaatcatagggcattcatgttaatacttttggcctacaggcactctatttttgaacattattactgtttagccctcaagctttttattatggatatgtgaccaatcaagcagtttttgattctagttatctttttattgccttgttctgtaagtatccatttttttttttatgcaaagatgaagtatgcctgtacttgacttagaggcaggtttagtagcttatactcagcgttaaaatttctctgcataggttctctatgctactaacattatggaaaaattagagttttaaaaagaaaaagataaataaaaagtacaagataaaagatcttttctcttcttcttttaagctctaatttttgaatggcatttcaaagtaggattagcctttaaatccaattaatcctagtgccataagaaacacatgaaaattttaagttttcaaaggaaaaaaaatatcatatttttctttgctgcttaatttttgaaaattcccctacacaagaataagggaatttaaagtactaattttattgggaatacttgaagaatagaaaaaattgcttaagattgtaaaaattgatgcccatcttgtacttttgagggaaacgggctcagttcacgtcatcaagtcaactccacacaagtgtaaagttga

SEQ ID NO: 392960 - DNA, 654 bp, Cannabis indica
  modified_base (91)..(91): a, c, t, g, unknown or other
taacgtaaccatagaaattcaaatttccctattattaatacaatactattgattctctaacgacatgatttcttctctttttttttttttnttttttttttttttttttttaagttttaattttggtttgtttttcttaaatacaaaaacttactaatcacctttttttagatttcttttccattttttgttttgtctttttcaatataaaaagatgtatttttttcttatatttatttatttgagtgaaatgactacgtgttactattcttttcaaaacttttttttttcaactttatacctatacatttttaatattaaatattaaaaaaatactctctatttcttttataagtttaaaaaatatttttttactacaataataattatttagcattacattatatttttttttttcttttaaaaaaagtttaaaaaaatttattcaaccacactatttataattttgactcaaaaattgtaccattataatttattttttacgataatcattttagtacgtgggaagcatatattttttttgctgctacaaaaataaatgatttaaaaatataacttttaagtttcttttttatgtattagtcaacaaaaataatcaaactttcattttaaacaaaatttaatatatcaacc

SEQ ID NO: 392961 - DNA, 685 bp, Cannabis indica
atttacccgtcattgccttcgccgtattcaatgtatacgagtttatcaaatatacatgaatgtatcaaataatatgagttatgtattacacttatctaagatgataatctaattgttggtaatataataagtttgtagtctctctcttttgagtgttttatgtatgaaaatatgatagtgtgagtgtccgtacgtcccttgcctttagtttgattgtgagtagtgtatttgatactgatagcttctaagattgttgtggtacgggttgtttggttcctgtgtggttgtatgtgctatggcttctagtagctatgttatgggtgatctggcagaccaatatgaggcttttcagattgatgatgaagaagagggagttcttattgaaggggatgcggatggcgatgaacagaccttcgatgatagatggtgtctcgtcgggaagtttcttacgggaagatctattgatttcgatgctatgcgacatctaatggcatctctatggcagcccggtaaaggtgtttatgttaaagaattggaagctaatttatatcttttccagttttatcatgagattgatattcagatggtaattgatggtagcccatggacctttaataaggttccacttatttttcatcggttgaagagtggggagaatcctcgaatgattcatttgcacaaactt

SEQ ID NO: 392962 - DNA, 1076 bp, Cannabis indica
tattacattgaattatttttaaaagatggacaaaagtaaatatcaattggcaaaataggcatatttattcgttgttcgtttatgaatctactattagccttgtttggtatctcgtataagtataatagttatattgtattaattattacggccaaaatttttaatacaatatatattgtattatttaatacataactaatgatccgtattagtttgtattataatatttataaaaaattcggagtcaaccctaatctccgacctggacttgaacccgaacctgatcccaaactcggtacccggacccgaactcgaatcccggacccgaaccctagatttggacccagatctgggagctagactgagacccaaacacaaacctggacctgagacctagaccgggaccgggactgggactcgaacccagacccgggacatgggacccaaacccaaacctaggacctagacccgaactggacccgtagttggtgttagggtcgagtgcattgaaaatatattaaaactttacacaatctattaatataagttaataccaaacatactgttgtattaaataatactaatacaatacaatacggcgtaccaaacaagcccatagagtataattatacaaaataaataaataaattcttaataattatataaataaagtataaaagggtgtaaggttttcaattcaactgaatttgtattaataaagtgaacgatcattcaataaaagttaagaaaaaacaaattatcattcaaaaattatcaatcaaatatgaaataagtgatataaacatatgaccaactattcttcttttttgttttttaacattttgatttttttcaataaaattttgtttattattccaaaaaaaacatatgaccaactatataaagattgtacttagattttgtcctttctattataattgaaaattacatttctttaaaaaaaaaaaaactaaccttatatttgtattttttagattaattggtttaaagaaagttttcagtctttttaaggataattagataaggtattatcttttaaaaaaaattatattttt

SEQ ID NO: 392963 - DNA, 927 bp, Cannabis indica
aagagagcttgggttgccggggtacgcatcaccccctgacaattccacgataaaagcctcatggcgacggagggggcttgataagggccgcctcctcgcccgaaaacaaatggtttgcttcattaactataatatcaactaacacctcatccaaattagtgctagacgtaccttcaatttgtaacaccccagaagtggtgttcttcttactcttacagttcgaaattccttgttttcctcctcttcggccactacccgaacctccccctcttttacgataacttccccttctcttcgcaccatctccttgccgactgctactcccaggagtaaaagtgttaagctccattgtgggaagaaaagtaataggcgaagctggagacttgtctcccagtgtctcaattttgtcattcgaagtgatgactgggacaatatttagagcagcctatcttttcttagcacccgagaaagagggcccattattagaaaaaactgtactgtcatgagtaaccaccacttgggccttctccttttccatttgggccggatccactaattgcccaacaacttcctctaggctgctttcagtgggccaattaacaaaagtaggttcaggaaattggtgtggcacccttgatttacatatctcctcatggggccggtccaccatttgatccctagtaggcccaatatcagccattaggctggctataatccctgcatctcttgtcctattatcaatattattcaagggatgctttttacagatggacacagccctgttctttaccgaaagaggaaaatttccctgggaattcaaacacattttcttaactccttgttgttgggttttatgccctaaataaaactcatttcaatataatcaaatttacttattaatatagatcagaaataacatttaatgtt

SEQ ID NO: 392964 - DNA, 1358 bp, Cannabis indica
agggagcaaaatactaattagcttttatttgttaaaattttattcttgctatatttgtgtcaaatttagtgcaaatttaatttagatacgtactaaatttagacaactttatacatatcattaaaatttattgttataaaaataagttaaaatatgcatatgtaccacactttttagcacttaattataaataaatatgggacaacaacacttaattaagcatgtgtagatccaccactaattatacctaactatcatctatcattattgagacttgagaattgagagagagacagagagagagaagaaggtaataataacatgtatctatttcccttaactaattaattacgcatttgtagtaactagtaataacatggatatgaaaagattgtttaagaaagtttattgtgaataccacaataaatttactattaatttttatttttatattactaattattttaatataaccgtaaatatagatcaatctcataaatactatgtttaatttattatttattataaaaaaaaggtttttttttttagtagaacaataatagagattttgagttgcaaattacaattttaataatatttaagagttattctctacttccaacaatcaaccaagaataacaatcacaaatattatattttactctacaattgaactattaaccttacagataattacttatcccagtctccctattacaaatttttatacccgaaattctgctggaggacacgtgtcaagataaaataaatgtgaagcggtgcaatatctttttatggaataactcaataaatacgtaagtatcagagtatatttgtaacccgctgactgtaaggtcttaggcgaggaatcaatgtacaaattggcatttagtgtattaacgagaaaccatatgttgctaaaggtgaatagcgaggcactagagaaaagagatacataccttagcttgcaataagcaaactaagtgtaaaagtcagatcgtcttgaagaacaagtatgcgagatgaccatctcgttatgaggagacttcctatagcttcatccaactaacaagagcgaggctcataatcctggcaagtcagaagatttctttatacccgcgatcgacgtaagacatacattgtcgatctcggaaagaagaatgatctcagctcgctatttggatcactacaatgaagtttctatcgagacatctccagattcaacaattaatgacgtgtttaatacaaaatattttttgacccagtaaaagcgggaaaatcacagctatacggttttcaaaatcatacactgcatttacatttcgtgatatgtagtcagatctcacgattttagggat

SEQ ID NO: 392965 - DNA, 833 bp, Cannabis indica
gggcacaaaacccaacaatagtgccctagacgactgctctcacaataaccagtccaaggatgactctatcatcatactggaaaaattcccagctctaccttcacgaccccgtggtcaggaggctgcagccaaacctaagtcaacgaacatttttgatcgacttgggaagtagaaagacatgagtgactctatgaacaagaaacgattgtggaaagtgggagcttctagcagtgtccccatcaacgggaaactaaagttctaattgggatgcaaaccaccacccatggtattaactgggttgagcttgattccttagctaccttggtgaaaggaatcacaactccaaagctttctgagtttgatttggatcgagagcgatactcaccactctcaaatcgaatcaaggctttggagattcttcctaatttcaagaatcccacctagcatcaattcttggaaaaaagactcgttttctcacatctactacttcaaagtgcataccgatctacaaggggcgagagatgacattgttgggctttgtgccctaaataaaactctatttcaatgtaatcttttctattcaattatcaataaagaaacagatttaatttcattacttgttttaatgtgttatttggttcatgtgatcatctatttacttatttgattaataaattcatccaaacccttatcacactgatattcttatttattgtgttctcaacacagtggaaagtaaacaagattatgtgattaaatgtattcctagatttattagtacacatggtttaactgatatgataatctacaacgtagtttacttgcaccttgga

SEQ ID NO: 392966 - DNA, 973 bp, Cannabis indica
tgaggctcttatgagttatgagaatataaagaattgtagcacaagacactagacagcctgctaggcctatcacatatatattcaccaagagataatctagtagactataaacgaaaaaaaaaaaaacaaattcctatattcaacatcatgcttattttcccctaaaaaatatatcatggttattaaatttggatattttaattatccgggccgatttaatgaacctccttagttttctttagaaattgtgaataatttatactataatactagaatttagccaaaggattatgtcaatataatctacggtatcaatggttattcgatctgaatagtgaagaaaataatcattcaaatgggaaaaatgattggagcggagaacaactgcaccgcacatatgcaggtatgttgcgggtacggcattaggatacaccaacccatattcgcttcaatatatacatatatattgaatatattttattaattatataattgatttttaatttattttttttatataattttaataaatttatggttattgtttgatttttgtttttaatattttaatgtgtttactgaatatttttgaataatgaatatatatatttagattttcagtttgaaaagcacttaaaatgttgcttaattcattaaaaaaaagtgttgcttaattaaattatattaaaattaaattaaattattataatttttttcattactattaatgatggagggtaattatgttcatttccaatagatatgcccgactataggtataggcaagttagccttgtgcttagagtccactcatcccttttaaaaagacacattttttactgattttaaaaatatgatattttttttttctaaataagggcctaattttttggggtaagttgaaaaatgcctcttttattaatcaattaaccaaatttgcctctaattttatatttatttgaaacatacctct

SEQ ID NO: 392967 - DNA, 594 bp, Cannabis indica
ataaaaataaaattatttataaaaattatgtttttttaaaaaagatcttgttaaatatctaaattaaaattaattatttaataaatttatttcatatgtcaaataatataattattatggttactataaaattataatgagattacactaatcatatttttttcttttaaaaaaagacaccatatatattaaagaaaataagttatttatttttatttttaaatttcaattgctggtgacattgttgtgatatcaattttggggcaagagatatatttaaaaatttaaagtggtcggtcaagaagacttatagcccttggcaataccctgctgacctccatgaaagaaaaagtttcttctaacctaaataaatttttcatgcccaattatttacaaattatttgacatctaacttaaatatctttaaataaatatctgaatcgtctgaagataacattgccaaccaataaccaaaaacaatgtatcttaatagaataaaatataaacaaaaatatcatagaaatttatcaatatataaaagagactcattaatagttgagatttttacacttgatgccacatttcatcattttt

SEQ ID NO: 392968 - DNA, 1395 bp, Cannabis indica
tgttcctcaggacccaaaataaacaatatttgatttgatgtaataattcttatcctttcttttctaatttctctatttcctattgggaagggtagattctgtgattattttctttttggacaaaattatctttgagtttttatgtttaaaaaaggaaatatcttcaagaaaaaggaaattttatttgtatgaaaatgtaagtataatttaatatttaaaaaaatttagttaaaaataggaaccgttctctctccatgaagaagaaggtcactcgaaagttacaagggctcggattgaggaaattccaacgattcaggaacgttaggaagatgagcaggtaccaaagatgggtggagaggagttattcaaggatctgggcgatttgaactcactcatcgtcgagaagaatctggagttgaatgagtcttcaacaactgcggaaggtgaagattcaggcagggatgaattggcgaacggtgcagaggaagtcgatttccaattttctgctcagcaacactgggccaagcttagggaagggcagaattgaatgttgcaacaaaacttcattatgatgaaccagttgttcaagctgggttcaaagttgcaaaactagatctaacaaaggttgctaaacaggctttagagtggaactcagcgcgcggttgtgggtatggtaatgggggccaatcctccatttgttgtgtttgaaggatttgtgaagcagatttggggatacctgggcattgaacgaatggtcagaatgaaccagggacttataattgttaaattcaaagatgaggccactagaaacgtggtgctcgaattaggggttgtgcaatttgacaagaagtcgatgatagtcaaaccttggacacaggatctcgatactctaaggttagtttgatctgttcccctctggattagattacctaacttaggattgcaatattgggacataaactgtttgagtgctctagtttacacgatttggaaatcgattatggttgataaagtaataaggaagaaatctatgattaaatttgttggggtgctggttgaaatggatataactgatgaccccccatttattctacattttgaaaatgaaaaaggtcaaattcaagagcaatttgttgagtacgaatggctctctattgagtgtaataactgtaaaggatatggccataacatggcgaaatgtaggaatactggtccgaaggtttgggccaagaaaaaccagtaacatgagaagaaattgaaagacaaagatcagcctactagtgtggaaaatttaggggggataaatttgttgggttttatgccctaaataaaactcatttcatataatcagatttatttattaataaagatcaaaattaacattttatgttgcat

SEQ ID NO: 392969 - DNA, 636 bp, Cannabis indica
cacacacacacacacacataggcctcccaccaactttatcctactggttaagaactgaattaacatctctcatgaccacccaatcttccaaaaaggcattcacaatggcattcatttgccccccaaaaaaccatctatgtcttcccttttaggaggtccataaataaagcaacccacctaaggtttaaaatttctattatcgtgaaagtgcacgataatcttgtcaacactcatggagagaacctggatttcccaccccactctccaaaaaagagccactccaccagcagctcccaaagatgacactgccactctcgcatgaaagcccaatctttgccaaatcccctccatatcatccttattgtttttagttttcatgagaaaaaccacatttgggttcacattacaaatcaaggttcgcaatgccttctacaaatcaaggtttgccaagcccccggcagttttatgaaaggactaacatggggagttagggagtggcagttgtggatttgatctctataaatcaatacgtttttcaatctcttttagacttttttgttgtgttgatttatttatttattattattattgttgaccgaggtttttggcaaccgataaaataatataagattagag

SEQ ID NO: 392970 - DNA, 1144 bp, Cannabis indica
caccatcaccaccgaaagaagcaacagaaccctccacatttgacattgtgcccccaacctcaactcttatagctaatgacaccgactacctaggattggcgaagagattggagaaggtcgaagcccacaacttgtgattctggctgcacagagtgagatgaagactacatttaagagtagctagaaagagatgaagaatcttatcatcgatcaaattgagactgtgataagtttattacagaagcaactatcacagccatcagcgccgacacaaccatcagagccgacacaaccatcacaatcggcagacgattgtgatgaggatgatgtgtatctagaagattgggaacccaatgtagataaggttccttctactctagtggatgccactatgatttccatcagtgatacacaatcttaggatgtgcaagagttggatggaccacctcctggagtagaattttttagggctaggagaaaatagaagtcagttttcttgaatgactacacataagggaagaagaaacaacgaacaacgccagttgaagtagatactttaaggccagtagacttacgactgtacaaattttttcaaaagtggattacttacttgagggactatagccgtcctagggatgttcacactggcagtgccaatcaggcttggttcgtgaagttgatggtagaaagaaaatggattgatgatattgcaagttgtttcttaattggtcaaatttagtgttttaaacttttgagggacatatatttatatttatatttatatttatgtgacatgttcacgagtttttgaaatatctaacctatgcatttgcgatgtggtttgtaaaccacaaatacattgcttagacttgcagaaataattgctaaatatgccaatgtttaatgtgtgtgacgtctgtgcaatttgtgtgcgattcctatacgatctacctctatataatttatttgatctttatgcgacatatgtgcgatgtttatgcgattgatatgcaattttacactttgataattagtttcgtgcgatctttgtgtgacctatgtacgacgtttgtgagacatttttctaactttgtttttattttgcaatgcagcaagttgatcccatgatgcacttgttgagaag

SEQ ID NO: 392971 - DNA, 2131 bp, Cannabis indica
tttgcttgaatttttggattaggagaaaatggctgctattttcgaatttgggggggaggggagaaaacagggctttttgaagatgtaattgaaagaagatgaaaaagagaggttaaagggtggaagggtgggctgggcttttcttttaccaatatcggcgggccaatataggccctccgttatcggtaaccacggctggaccaataatgacgggcttatattggcccatcgagattggtcaaattttaagtattacaaaaaaaaaattaaaaaaattaaggcctatctcgacacgcacacgcaagcccgctgagattgctcaaattttaagttttaaaaaataagcaataacggcagccctatataggcccgccgttattgctatgctcagaatatttttttaaaaaaaatctcaacacgcacacgcgagcccactgaaataaggctgccgagataagccatttttttgtagtgctgatcaagtaatgtacgtaagaccaattttacaagaaaatcttctttctaatattgagcattaaattgttttgtccaactttatccttctctttcttatcactgctactctttttctacttataatcctttcgtcatcttcctctaaaaaaataagaaaataaataaagactaagggctcgtttggtacgccgtattgtattgtattgtattgtgttggattgtattgtattgtattagtattatttaatacaataatatatttagtattgacttgtattaatatattgtattgtattatattagtattatttaatccgggtcccggtcccagtctcgtgttcaggtctgggtccagggtcggggttcggtttcgagtcgaattccgggtccgggtctaggttcgagtcccgagttcgggtccgaatctgggttcaggtcagggtacgggtcgaggtcgaggtcggggtcggggtccaggctccgggctccgggttggggtcgggtcctggtcggggtccgggtcgagggtccgggtctggggtcgggtccgggtctggggtccgagtccggggtctggggtccgggtccgggtccgattcgggtctaggttcaaagtccaaattagagattagtgttgaccccgaatcctttataaatattataatacaagctaatactgatcatttgttatgtattaaataatacaacatacattgtattaaaaaatttggtcgtaataattaatacaatacattgctttatccaaacatagtgttatttattatttaatacaatacgaccgttatacggcgtaccaaacgagccctaagaaacctaactaatcaaaacttgtaatgtaaaggtcaccaaaacttcatgtttggtagctaaaaacctatgagaaaatatataaataatcatgcttcttttttagtttacaaagaaatctattaaattatatatcaaaccattcaaatgaaaatatgagccaagtattatatcaatgtttcttcagataatttttctgaaaacaaccccaaaacacaaaaaccgatacactacaaaacgcaacgaaaacacaaattagagttctgcaaatgcaaactcttgtacaaattaatatacaaaaaatttacacaacacaaagagacgagaaaaaaagaactctacaagaagctatttcattaatgtttattcaaaaattaattaaccgatactcaccactaacctactcaaattaccaaatgcttaaaaaagaaaagaaaaatcagtcatggattcagagttcttacagtgctcctccatcgatctttgatatcgagctaaccactacagtaaaacgacaactgaccggcgcttctcaagccctgagaagaagggtgtaacgtccccgcttcaagccttcattgggcctttacacccacggaatgatgactcttatacacgagtacgttactctgactgcttcatggaatgacgactgaccttacagaccaacacgagtgttttcagtatgctttgtcctcactcgcacactttttgggaaaacttctcaagaggtcacccatcctgaaattaccccaagtcaagcacgcttaaccgtggagttctttcgtgatgggctacagaataacaagatgcacctggttgatat

SEQ ID NO: 392972 - DNA, 1579 bp, Cannabis indica
agaaaggaatcaagggctagatatctgaacagaaggagtcatattatttcgctgcaccaatgtaaggtttactaactttatatgtgtttatttcatcgttttagaaagtttcatatttagggtgttaatcaacatacttgtgagtagatctaagatcctagtaaaataatttccaacagtgagggcgtaaatattccatttatttcatattttataaaatatccttataaattaaacataattatatttcaagatattacacttgcactcttcctctggaaaagtgactcacttgcatttttcctcccaaaaagtgtctaaaaaaaagtcttctcccgaagcttgatgaacgatatctaatgtgttcaaccagtaaaatttcaataagaaacaatacagaaataaacaataataaaatactaagaacttttttgtaatatcctgaaaagggtgattatgtttaattaaccatgttttattagatatggaataatatgagtattaggacataatgggtaaaattataatcttactaagctaattatgtaataattggagattattataagaatgaatagataagcgtaatttattaattatagagattttattataatatatgggtactgtacataccatttatggaataaaatattttcgagttaggcagctatggaaattcgatggattggccaaagatgtcacgtcacgacgataataaatatgatatttaattgtaccagaatgttttattagatgttggtgttgttgcaatattttggggtaatttgttatgacctaagtacccctaaacccaagagtttacttagatgccaattaaggggtagaatcaggggcggagctatattgagctccacaggggccatggcccccctcatctttccatatatttatatttatacaactaactaatgtattctagcttgcaaaataaattattgtatttttatgttttgtttttgatgacttttcaaagtttttctttgcagatcaataatataaatgcataattactatataatataatagtatatgtggagatgaatttcttaataaaaaataaaagtacatctaataaaataaatgtgaataactaatataaagagtttagtgtacaatatattcttttttacaccagaaaattatttgttgtactcgtattgagttcaagaaatgttaatttttttaaattttgtagcttattagtaatattaggcgattttaattaaaattttatttgaactcaatgatttctaatgcgatccattaatttcttaagtttataattttgatatgcaatatataaaaaatcatatcattattttaatttattattcaatatatttaaatggtgtcgtattcgactatatattattggatctaaaattatattgatgataataatttttacttatttgatagttgcgtgaaaaatgtaatattttatagggtaaacactattttgaaccttatgtttttcaaaagttaccgattaaaccatctgttttgttaaataataaattgaaccatgtatttttcaaaatggtacaaaatagta

SEQ ID NO: 392973 - DNA, 890 bp, Cannabis indica
gtaattctccttcttattattattagacgattttcaataaaagatataaaaattatagtatatttgacacaaaaaataaatttgtatgtaagctcactatttataattatattccgatgcaaaagatataaaataagtaaaaaataatttattatgttgataattttttaatattttattgagaatatataaaaagtttatgtatattttattgtttaaataataataatgttgtaaataaagaaaatacattttttttaaagtcaattgattataatattatagtaaataaaaaaaatagcttttattgtggatcaaatttgacacaaagttatttcttctactaaatttggcacatgctcaaattttaacacaacttttagcatgtgtcaaatttagtacaatttttaaaaaattcattggagtagtaattttccttaaatgtattaaaatataatagtacaccactttttagcattctattaaagatgatcttagagcactcacaacaacctcttttaaagttgtacatttgggctgggctttttgatacgacatggaaccagcatgagcacgggtgacacgagtacagcacgacatgaaagaatatggatttgggcccatcacaacatgaataaatatgggcccatgctcgacaataaataatatggacttaagcactacacgacacgaaaagtacgaaggaagacacgaaaacatgaatttcttagcacaaaagcacgacataaaatacaaatttaaatccataaaataattttttatttagtaattcttctactctttcatataaaaagtattttatttaaatgtatttttcatttagtaattcatccactctttcatataaaaatatgacacgaacataattt

SEQ ID NO: 392974 - DNA, 1762 bp, Cannabis indica
ctaacttctaattctttctttagaattttatcacggacaaaatgaatgtctatttcaatgtgtttcgtgcgtgcctgataaacgggattggatgccaaggcactggcacttacattgtcgcaccaagtgactgaagttgagggcagagggaagtcgagttctttgagcaatgattccacccaagtaatttcagcagtaacatgggcaagggccctgtattctgactccgtactggacctcgacaccactgcctgtttccttgaagaccatgatatcagtgtatcgccgagatagacacagtatccaccaacggattttctgtcatcagtgcagcatccccaatcagcatcagagtaccctgtgatgttgagtctgtgactgtagcagatgtgaaggccgtgattaagtgtcccttttaggtatctcaaaattcgctttgctgctccccaatgaacggttgtaggagcctttagaaactgactgagtttgttgacagcgaagcttatgtctggccttgtgtgacatagatattggagtgccccaataagactcctgtatgtggttgggttgtgcatagcttcaccatccactaaggagattgttctgtctgtgaccatgggagtggggcacggtttgaggttactcatgtcatgtttgctcaagagttcttcaacatattttcgttgagttaggtacattcccgtgtcgtctcgagtcacttcaattcccaagaagtagtgaagtgatcctagatctttgagagagaagagtgtgtttagtttgttgatgaactctttaaccttagtttcattatttccagtcacaatgatgtcgtcgacgtaaatgaggactaatatgatcaccttgctgtctttgtagaagaatagagaggtgtctgcccttgaattcttgaaattctagtcgagtagtgtacctttgagcttgtcgaaccaagctcttggagcttgttttagtccgtataatgacttgtgcaatttgcacacatggttgggtttggtaggatcttcaaatccttctggctggaccatgtaaacatcttcttctagagtgccgttcaagaaggcgttatttatatcaagttgttggactctccagtttcggttgacagcaatggtaagaacaattcgaaccgtggaagctttaatgaccgggctaaacgtttcaccaaaatcaagaccgggtctttgatgaaaaccttttgcgacaagtcttgctttgtatctttgatgggagccatcagcattcaatttttccttaaaaatccacttgcagcccacaagattatactcatccgaatagggtaccaaggtccaagtattgttggctttgagggctaatatttcagtgtccatagctttgttccaccccttaatcttgagggcttcagcaactgttgtggggagagtaagtgagaggttggtgctgagatgatttaggagggctttgggcttgaaaatacccgccttggctcgggtaatcatgggatgagtgactggtttaggtggttgggaaggggcagcagctgagactgttggtgagggagattcggaggctggtggtagagcttgaggctgagatacaacatcaaaatgatcagtggtagcagaatttagatgtggagaggcatacctgtgttggttgttgttgtgcgaagacaaagtgtaactcggagatgctgcagcaggggatgcatcaggtgttgaattcgcaccagtagctacaccagcagccacaccagcag

SEQ ID NO: 392975 - DNA, 2525 bp, Cannabis indica
aatatcatttccactattttggtggaattattctatttaagaaaatactattttaatgtaacatgagaaaaaatttaatgattcttttactaatttttttttaatatattttaaattttattttattttattcttatccttatccttattatcattctcattctttttttttattatttattaatgttttcattcccccaaccaaaataggttagcattctttaaatgtgtttttttagtttgcatgcaaatgtgaccaagagaatcacatgtgaagaaatgtgaaacttagtgtagaaaggtttttactggaatccaccacattcctacataatagaatacactaaacaaagaattcctataaatgtctccacatcccaacacttctcccccataacaaatacccctttatagtttatatgatttaaaatttgcataaaatacattacaaaagagcataagtagtgtctaacattaccatatgtttgttattaataaaattttatatcgagtctcacatattttaatttaataataactattaaaaaaaaaattattaaccatttataaagtgttatctcatatggtggtacaaagtgtgtagacacgctttttctatatataggtttgagtcatttttagactaacatggactaaaaatatatacacttaatcaggctcgaccttgggtataggcgggctaggctcgtgcttagggcccacctagtcgaagggccctaaaaaaattcgtttctaaaaattatacattattttttattgatttgaaaaatactacatttttctaaataaaggcccaaaaatatttattttcctatggcccactatattttagggtcggctctgcacttaatgttatccgtattttcgacaagggacacatgaactctaggtcagcatccaaagcccactagtcccaagtccaacaagaccttccaggaaaggcatcttcgttcattgctcagacgagcttctgccaatgatagcccgtacccagaagtagtctttgtaccacgttttttgaaaggccaaacaacgtgttcccgaatgcctaacgtagtttccatttttatcagatcacataaaataaggaattaactctccttaaatctcgaccaaaagatcatatcgagttaaaaggagaaattacttaaaacaaagaccaagtaattaattcacaattaattacccacaattatagaacacgataatggcaacttgactgtgttcaatttgcctagtgagcacacttatctcctaataggttgggcctcacgaatataaccctaacttgtatatttttcatgtaaactccccatgagaggaaaagaaaaactaagtgtaattttctttaaactatataaataatcaaaaaaaaaaattcagattaagggttgaacactcttgcagtattttcttaagcaaatacaaagaacatgtactcattgtattcccaaaggcttttctagctaaaatacataataatatcgactcgtggactaaaactatttaacacccaaccacataaaaaactctaagtgttgtcccgttctttctctttgaattatttacttcttcagttctaatttcttataattgattttccaaaaatttcgataaatattttggtactttcattgagagctaaaaaaaacaatgataccatcccaaaattacattcagtaaccatggtactcacccgaaactaatttggtcttcattatattgatcctaacgctaaggctggagatttagaatatccaaatgaggtgaccagtcgccacaaggatcaacgtggtaaagaccaaaatcttgacgatcctataaatgaagacaatgaagtaggagaaatgagttctgatgatgctgaagatgatccccaagacatgtttactggcggtggtgctgagaagaaagacaatctagacgagtcagaccatgtgatcattgtaataccctaaggtttaataaccagattatcaaccctaactaggttaattatgtattaatgagaaattatattattatatgatttaatatgtgaaactgttatgatttattatattttaagactcctttggtgtgctaggagcattttcgtaattttgactcgagaaggataaaatcataattttatgatatacggtccttatggactatattattatatagtatattttctctgtctatctgtaggtattttctgacaagtcggcgcggtatagtcacaaccgggtattttgggctgaattgggttcagggcccaaagtacattttcagaatttatttatggtatttatatgataaatgaaaaaatatgattattgtgatatgtgtgtgtgtgagcagaatgacaaaattaccattgtttatatgtgtatggtaatatatggccttaggggtattttggtcatttgaccacataattctatttcaacaaaaaaaaattaatttttcatttatttttctgggttttgaacctcttagccgacccctctctctctctc

SEQ ID NO: 392976 - DNA, 1109 bp, Cannabis indica
atagtggattgaaattattctaagccactgacactatttctcccttgcatgcaaattcgtgagcaaacgacaaagatcattcgaggaaatgagacttctacaaagtttgggatgaagaataattttagaagaacaatgaagaagtcaactttagtttaaaattatagaaaatttattttagtttaattattttaaattttagttacacatttaaagtttgttttatttaaataattttattttgaacaatttgtcttttctcaataatgtttatttaatttcaaacttatgtgtgcaaagttaggtaaataaaacttcaatactaatagtataattataaaataaagtttaaatgtattaattatttattttgactaaataatacataagtaactatttgcaatagtgacttattagtgtttctataattaagttaaaataattaaaatatgatttaattctataacttatgaattaaataagatataattgaaaggtttgaattactattcaaacatatacatggatagggaattctatcacaatcatgtataatagtgttggaaatattttacaaggatcttagatttactaacaagtatgttgtttaacatcctaaatatgaacttctaaaatgataagaaataaacatatataaagtatgagaaaccttatagtggttgcagcggaatatgatgtctccttccactcagatctctaacacttgtatcctttttgtcgcagagtatcaccaagatcttagcccgaatctctttctgttgaatttggattcttcacgatcttccacactatgattaaggtaccacttgaagtgtgtgggctctcactctatcactcaaggggttcggtttcaatagtgaagaagagggaatgagagtggcggctaggtttaggtaaaaggcactcaggtttttctctgaaggaattaagatgcatcatcttttcctgaagccatcactacctatttataggatgccacctagggttaggttagaattatttggcattaaaataatgaaaaaataaatgataaaatcctacataagtggccggcctgggctttggatattgggccccacttttgtaat

SEQ ID NO: 392977 - DNA, 1150 bp, Cannabis indica
gcaggaactatttgtggaatgggaaggcaatttattagactccaggtgcaatatcatgggaaactatttgccaacccaaatctgttgggggaataggttttaagagtgtggacatatggaatagagctgctatgggcaaatatgtttgggccattacaaacaaagaggattcattatggtttaaatggatcaatagtgtctatttgcatgatgaagaatggggggcctacaaacttcctacccaaagtagttggtattggaagtgtttggttaggctcaaggatcaattcaaagaggcaatgggaggaacactgctgcaataatacacaatatcacaggggtataatattctgaaaccagctggagtaaatttacactggtgcaagcaggtatggaaccgattgaacacaccaaaacacagctttgtgttatggctagcaatgcattagagactgaaaatacgagacaggttatgcaggatggggatcactgacaaccaatcatgtcttttatgtgcagcacaacaggaaaatgtagagcatctcttctttgagtgccctgtcaaccgaagctgtatattgagccttaaaacatggctgtcatggaactctactcatgtttcccttttcaatctcatcaaatggattggtaaagcaaaactgagtaaattctggaaaatggtgatgactgcctcaattgctagccttgtgtacaacatatggaggatgaggaacaactgcttttggaataaagagccgccagatacaacaaaactgcttagagatctcaaatctggagtaatagaaagaattgagatagtttggccaaaaaaagtttcagataaagttagacaatggtaggggtgaaaatcggtcggttatggtcggtttttacaattttataaccgaccggtcggttacggttttattttacgaaaaccgtaactgaccgtttaaaaattataaccgtataaaaccgaccgtacggtttttggcagttttcggtttggcagtttttggcaattttgggcagtttttggcagttttgggcggttttgacagttttttggttaaactatttttttatttcaaaaaccgaaaccgaccgccatgtcaaaaaaaccgaaaccgaaaccgaccgccaaattcgg

SEQ ID NO: 392978 - DNA, 627 bp, Cannabis indica
agtgtacagtaaagcaatgtaacctaatcatttttagttctaacatccccccttaagtgatactgatcattgctgagtatcaacttgttaaaaaagaactgaaaggacattgctggtagaggctttgtaaacaggtctacaatctgattttgtgtttccacatatcaaatgtcaagttgctttgccaagatcctgtctcgaacaaaatacatgtcaacttcaatgtgttttgttcgagcatgaaacacatgattggaggctaaggaagctgctccgagattgtcacaccagagtattggagattgaggagttggaatactgatttcagagagaacagattgaatccacatgatttctgaggtagccaaagcaatggctctatactcagattctatactcgatctagctactacagtttgcttctttgaacaccaactaattatgtttcccccaagaaaaatgcagtagccatatgtagatcttctatcatctaagtaccctgcccaatcaatatcagaataggcagtggtccaatctgtgagctggtttgaagactaaaccagaatcaattgagccagccaagtatctgaaaactcttttgcaggctccccaatgttcagaggtggg

SEQ ID NO: 392979 - DNA, 1728 bp, Cannabis indica
ggttttcgtttcaaagccagaaaaactgctgcgataccatcaacaactcggtcacagaaatgctgcaaatttccagggtctacaacagctggaagcatataagtgtgatttgctggaatgttcagagtgaaatggtaaggatcaagtgcaacaaaatccatgtagtactcctgcatatcaaaagcagaattacatctaatttcaatgcaaaaaattaaaaagttaaacaccaaaccataactaagtattactaaatataatgattgaaaatcaactgatgtataaagctgaattgcaccaaagtaaacattaagcacaattggcctgggtttacatagtctaaacttaaattaaaattatcattttagagaaaaatctcaatgattttttttttcttgttgtgggtctgaaaagtggaccagaagagggggaaaaatccttagacaatgagaattacctgaacttgctggactacttctagttcatctgaatcagctaagatatgaatttgagtatcattcaatatgttggagaaaactgaaaatacggtatggcgtaagaaaggattcaagaatagttacttttccaactgaattcatgcaactaaattcaattttctcaacaaaattagaaaaacttacatagatggtactctccaaatcttggagtagccaactgacgccgcaactgctgaatattttctgaggtgggtcgaaggaagtaaatggctttgagatgagacatggactcttttgacattgcaatagattctatcaactctaccaagaacacctctttctgaagaagctcagactgtgaatacacaacactcactatactaacctgcatctcattaattcaaaatcaaacaaaaatcaattctacaatgtctacaagacaatacatgaaaccgtaattttttcttttcttttcacaattgcatcattagtggcatgatagtataattggtttataaaccaagaacaatgaatagaagagatcatcatgccattacccaatccacatttcagaaagaaaaaaaaagtattaataataaataaatgtttttccttctcaatttcactaattataacgcgctcatcgaaaatacccatggaaatttcacttttcacattagagaatactaaatacagcataaaatgatcccaaatcaacttgtacttaatcaaaatgaatagggaaaaaaacaaaaggtaagttaattgattagatgaacataatcatattcagagaccatcatttttcttgggaaacaaacagaaactaagtagaatgatcataatctattagagaaaaaatgtaatataatggaacttacggtgtgagaatcgaggatgaggactttcatgccggagatgtcttgaagcatccgattgacgtaatcgcgggcggcggaaacgagcaccattgttgctgtgatgatgttttttcacgacgtcgttttgatggagagaatagattcagatctgagagggaaccaaagaaatgaagattttcacttaccagaaaatcaacaacccaacgctgcgttttcttattactcttcttcctcctttctaagacgacaccgtttcggcaattttttcccctctgtccccaacaatatttattgtaaataacggtataaatacttaaaataaaattttaatttttaaaagcagcataaatctaataattattttacctaatatttataaaattataatt

SEQ ID NO: 392980 - DNA, 1471 bp, Cannabis indica
tctctctctctctctttcttttcaaactttgagcaattttggaaaatcaaggcttaattggtgaggatttgtgggggatttgctttagttgaagcttgtgaactttggtagccctttaatctcttttaattatgttattttgaattatatttgaagctttgagcttgtgtttgatgcttgaatttgtgcttgatgttcttgagattttcttaatgcatgttgtaatctttatgtgttattttgatgattttggggtgtttaagcttttgggactatgtagcttgtatctagtgagctttgtatgattttagggttgtagtctggggtttaatttttggggttatcttctgaaatttctgggttattcttgagagattgaagctttgaaagttgagttcaaagcttgttgtttgtgatgattgaaaggcttgactaattacatatcttgaagtttggttttataccctaaattcaatgttgataatggttagggtgattttagttttgattatgagtttgtgtatgatttggaatgagttttgggtttgaaatggttgaaatttgaagttatgaaagatggtagatttttgggttacagggcccctcgccgcggccacggatgggctcgccgcggccatggccttgctcgtcgtgacgaggccctatctttctcgggaattttcaaatttttgtttttaccataacttttgacttgggactgcgtttgggacgttctttatattgttggaaagctcgttccaagctctttatgcatacctataaatgaaatgccagttatgtgattatttgcaattgaattttgggattaaccctatttgtgaaatctcgagaattgtgagtaggaataccagcgcttgctcaggaacacccggaggtttggaatatccacatacttaggataccaggtaagacagtagttagcatgttgagttaagcatggtggcgctcatgtttgatattatgattgtgattaaatgaggaaccaggattagggttattaccctaaagtgagtggttatatggtctaggattattagtctagtgattaaatgattttggatgcaatgacatgctatatatgttgaaacaaagaattatgcgctcaagtcattattaggttagattcggtaatcagaactgagataaactattcttaggccttattgtaattaaatgtgtgagagaaacacgtgggtctatgatttatagacataaatagacgtgtgagcgtaacacgtaggtctatgtctaatagacaatagatgcagtggcatccgtaattaagtgatctttgattattgtgaatattgttattttactgtcttgctgagcttggcccatgggtgctctaccgtgcaggaaagggtatgtaatgtccccgcttcaagcctctattaggcccttacacccacggaatgatggctctcatacaggagtacgtcactctggc

SEQ ID NO: 392981 - DNA, 929 bp, Cannabis indica
gatatttaattaggtaaaagttaaaacaattattttttaatataattaagagaaatattgaaagatattagtggtatttagtacttttttatgtgttaatataactactggtgtaattaagtatggaattttatataatttaataaaataatttttaagaagtgtcactaatcaattgaaaggtgacacatctaaaaggtgttagatatttttaagagttgcccatagagttgtttttgtcacatatgcaatgtgatcattattttcaatgtaattttatcaatagtattgtctatatttaataacacccatgtgatattactttatttttccctttcttttttcatttcaaaaaaattactttatagtatttaataaaacttaatcatttaaattgtgacatataaattgtgacatgtgtatcaactattagagtaatttttgtatgaaaagttatcaaattttatgtaaattgaaaaaaaaataaaaagataatattcaaagataatatatgtacttttgagaattataaatattactctgctcattaattaattttactgcactagcttttagttttagctaatcaaaatttgtcaatcaattaacagtgatactgaatacaatccctaaattaggcacaccttacctaaaatagaaaagtaataataataaaacacatacaagtatacttatacatgatatatatatatatatattagaagaaaattacgtgcaaggcacgtatatttagttttatgttatgtgttctataatttaattaagaaagattcaataaataatcatataatttaaaatgatttaaaaactaattttaattagtgtgtagggttatttgaaaatcaatagtgaaaagtcaaatttaaaatttgcagaaagagaagaggagaatggagattagcttgaaa

SEQ ID NO: 392982 - DNA, 502 bp, Cannabis indica
taaactcaaaatctttcaaaatgtgcttgaaaaataattaagaagagtcattaaaatttttcattcggatagtggaggaggatattatggtcattatttagaatctggacaacacatgagaccttttgttaaaaatttataagaaaatgatatagttgctcaagacactatgcatgtttcatctgagcaaaatggcattgctgaaatgataaatcacactttaatggacatgattagaagcattatgaatagatcaaatctaccagagttcttatggagtgaagcactcatgactgttacttatactttaaatcgtgttccaagtaaatctgttcccaaaactccttttgagtcgtggactaggaaaaagcctagtttgaatcatgtacgtgtatggggtctccaattaaagtaagaatttatgatcacaatttgaaaaagttagatctaagaactagtttaatattttttcattggttacccaaagcaatctaagggctat

SEQ ID NO: 392983 - DNA, 1014 bp, Cannabis indica
ttttttttaatttatttattttgatatttattaaattattttttataatatttaaataattaaatactatacggactactaaaaatttgttatatatgtacacgtgggcagtccactgtgttatttaactaaggtttttggacggcaagataatgaacaaaatggaacttgggttgagtaggttttatagtcaaaatattgatttttgtggttaattaagtgtcaaaaaatatatagtttgggtagttttgccgctaatattttttacataaatagcatgtatagtattcatatattctaataaaatcttcgtaattaataaattacggttatttattcatttctattaaaattcctaatgatcacatagttagattgagatcataatcttacctatttaaccctcaatacacaaattacaccatattttataaaatatgctctaattaatcataattaaatttttagaatattacacctatgtttggaggtgtataagattttatggttattaggatggttgaggcggataataaaatctctatattatgggaacacttaaagagtatcatattactttagttgtgtccaagttcaaagtgggtgccacaaattagttggataccttgaccaaaataatagatggggattaggcgacccgaagagattttaaaaggattttaggaagcaatatttctcttaggatttcaggaagtttggagtctctctctgctacactctctggtcagtgaggaatcaggcttttcacgaacatgttcgaccctccttcttcatcatttttaatcggattaagagtttggtcgctgagctcaattcggtgttcacctctcctctggactcttcgattgatcaatcttcgcagcatgctcgactggaagtgttgcagggagagtttgtggtgtttgctgatgctgcttgcaaagatctcaggtcagtcgcgggtatcatcgttactaaggctaattccgaggttgttgaagccttttctgctca

SEQ ID NO: 392984 - DNA, 738 bp, Cannabis indica
tctctctctctctctctcattaagtgagatggaatgaagccttatatatacatgtgagataagcaactaacttaacctttttaacttttcaaggattcagttatgaaatctacttaacagacgagttgttcaaagaacatttttaccaatctttaacaatcatccacattggtaacatgcttgagatttgcaccttgagatagttatgtttggcaaaccaacaactaagtatgttgagcaagtttagacctgcctaaacttgctataaggaacatacttggttcacatgtttgtattgtcctttgttcccaccatcttaacttcaacttcatttttttcaatgacaaatcttataaaatgaagtttaatgtctatatatttagacctctcatagaatataggattcttcattaagtacaaagcacttgattgtcacatagcacatatatatatatattcagaattgtaaccaaattcactataaatcctctcaactatatgggttctttagttacctcagtggcagctatatctttagcctctgtgcttgacaatgccacaactttctgtatgtttgatttccaattgatgttgttatattatataatatatagattaaatatgtgtaataaactaataatatgtaacatatgactatattagttgtcatctttttgtaacatttggggagttgttactatgagtaacctccaccattatcaccaacattaagagtgt

SEQ ID NO: 392985 - DNA, 776 bp, Cannabis indica
ctgtcagcataccatgtctcatctttaagcatctcaggtgtggaaacaaatgctgcattatttggatttggtttagttccatccacagagtttccagttggagtagtacccatataagattcatcatatctgttgtagcagtaggcagcaaaatggtcatatctcccacaaacttagcaagtaggcttgggaccattagatctaccacctctccttctgccaccactgtcatgattattttgatgaccattgttattacctcctctgcctcgattcccatagttccctggaccatgactaccaccagaaccatgtctattagcaacattagtagaaggagaggagttgttggacaacttactattactaaagagaatgctcaatctttcaatttgctgttagagctaagcataatgtcctgtagagatttccaagtggttttctctcttgcttcaatttgcaaaactattggcaagtactcaatatgaagtcctgatagcacattagacactagcaatgatctagggtagggatcccctataagagctaaaacatctgcccactgtctcttttgtttgagatagtcaggcattgtcattgatcctttcctcactgtttggatcttgaatctgtactcattcattttggctttggaatgagcaccaaacaaggcctctaaggcgctccagacttcagttgaagaagaacatcccatgacctcagtagttatagtttttgtcatcgatccataaaaccaacccatgaggagttggtca

SEQ ID NO: 392986 - DNA, 844 bp, Cannabis indica
aatacactgactaactttctatcaagttttccttcattttacaactaaccacttgtaccatgagaagtaggaaagtgtctacaaaattcatatttttagaaaattaacatcaaccacttttattggtcttttttctactaataagtctattaatttattgtcaagagtttctatcttttatcataaagacaatttatatcatctgcgtcctttaaaaaaaagaaaatcaaatttaaaattcataatttttttttttcagaattctctacataaatcatttatgctttctttatcttttaacttaattcaaattaagaatagtattttatcctgaccatttccttttaattttttatcttcactatttttttatatttatattgtattaaatgtggctatagttttgtctaaatcttataatttaaattaaagtcattacaaatatttatcttatccttttatttctttatttataatttaaaaaaaaaaatttaatgatgtattttaaaaaatagagtaataaaaatgaatctttgtagttataaatatatttattatagttatatagaatatgtacttaaaatgtacatatttttataatggcatgttttctaaaagggaatcagaatcaattgtatgtgattgattccattcatttgtttattaaattttgaaatgggagaaactagtgggacccacacaaattaaagaaaaaataaaagaaaagattcttaaggaataattttttctttccttaactcactttatattaattaaaaataaaaaagacaaatatgcccttcaaaaatatataaataaaaaaataattacatgttctaacaat

SEQ ID NO: 392987 - DNA, 747 bp, Cannabis indica
aaaattaaaaagaaaaagagaacaaactcgtaaaaactgagaaagaagagtaatttgtttttcttttctattgtactctcttcataaatgttactaaaatattttgaaaactatttgactttattttaatttaaatactatttaaatttttttcttaaaaaaaaaaatcatggcatataggggcaggcaagaggcatgattatggcaaatcaaactatacagccatattattgccttgtgagttgtgaccttattatcctaattaaggcacttttagaagatatatttataatgacatagaagatatctaattatattgtggaaattagatatttgaaagaagatgttgattgagttatgtgtatttttaggatgaaatgaaggagcttgcaagaaatgagaggttggcaatctatgcatcgaacgtggctaatttggtgttgttcttggctaaagtgtatgcctctgttgagagtaaatcattggcagtcatagcttccactctcgactcactcttagatctcttgtctggattcattctttggttcacttcttattcaatgagaaaaccaaatgagttttattacccaattggcaagagtcgtatgcaacctgtcgtaagtacccttccttaaacttagatcattgaaataattttcattccattcttttgtttggttgcattttaaagtattggaatgacattccaatggaatgctctttccactattttggtggaatgactat

SEQ ID NO: 392988 - DNA, 931 bp, Cannabis indica
tggttcagaatctatcaatatttcattttatgttatttcattattgaatatgggaatctcatgaagtagctctagctctttcctttttttcactttcaattctctttgataaaaatagatcttaaaggcttattgtagttgttatatatttttcctgttccttttgccataaaatcattagttttgtgctttttggtaggattttaactgatgcagtattatatcaaaaactttcttctaatattattaaatcaagaatatggatttccttggctaatagtgatgtgttgatgttgttgtgaatgtgttgatattgcaaaactaattgggactttttctctctgcttttgtcttgtttggactatggataaattagaggaggagaagaaaaaagaaacagtgtaggaaatctgtaagtgagaaagaaaaaacacattccctgctactttcattagaatagaaacagtgtgataattctaaaattctacaaaataataataataataaataaaaaagaacattttagcagatgaaacaataagtgtacttctcagtcaatgataactgaagaaatttgaagttttaatagtttagtgagttcaaatctttattttattaggtgagaagattaagataataaacggtgtaaggggcaataattttggattgttggctttgaggtaaattttatgattaatgttgaaaattttttcaataatctgtaggttttgatgatgaatttattggtgttttttatttctacaatactaaaagttgagtaaattgtcttttctttaagaattatcaaatcaccttgatgcagaaatgctatgttgaaatctcttatggttggctcagaggttgttagtgatttaactttcattgaatatctgggattgtttttagatatggtcactgagacttgttttca

SEQ ID NO: 392989 - DNA, 1722 bp, Cannabis indica
ataatatatatgtataatagatacatttaatctattaataaaaatgcattacccgaaaagactgttttaatataataataaccacaatattgtattatgacttcttccatgtcttattattctagaaagagaggagaatttcttttcacacataattaaacaaaaagaaatggtaaatttgtaagacaccactttaaatgtaacgtttagtactatttttttatacttattttaactaatttaaaaaaaattaaaatttaattttttttaataataatacatgttgtagttatttaaaactacatataaatatttagataattccgaatagtttaaaaaatatagaaaataatgtttaaataatctattacatgtatgtttgtttttttttatacaagtggtaaaaagttatttaaactttatttttacttttataaattatttaaaattttaaaaaaattatacgcagcgtttataattatgaaaaataaattaattaaaaaattatactatatgcaaaagcgattatatcaaaacatgcttatagtaaatgaaaatcaaaatcaaaaccctttgttactacttaggacaatttgaagaaaataagttggaaattatcaaagctatctagctagctagagagttgatatatagccattattgaaagtaataattagaaacattaacaagagaaaagcaatcatagttaaagtccaaggatatcattgtctattgtctaacctttttagggtgacataatactcaccaaatataataaaccaaaaggaagattataacaacaaataaacttaaatgaaataaatattttagtaacaaatggattaatagaatatgttatttatggttttggaagtaaacaaatgatgaaagattatatattaaaatagtcatatagagcatcacatatatagctggaatagacttctcatttggatgggtgctttggagaaatcggtgtaattgcttatttggtcatattgaatacaactacataatgataaatagactctttttggttaagtatgcaaagcattttttcatttgaacaatttctttaacctttcttaaatggttggggtgaaaggtacttgtagggtttttggtttgtttacattaacaatgttatgaagaaagaaaaaaaaaaggtaaggccgttttttcatgcttttcactaaaagaaacaaaggctataatttgataatacattattcattttttaccccaaaatttcacataaactaattatgtgattgtttgttgtgtaacttgtgttgctaataataattaaggaggttggtatgacatgaaaaccccacatggaatactataaaaaagtacttaagccacttatctctcatatttagttttagttttaggaatccaaaaaattactttttatcatatatatataaatataagtatattaattaggaatatatatattggtcggtttatattacattttattcatctaatataaagatcgggttgcaaaaattaaagtgcaatccacccaattaaaaaaatagtaacccacccaatgaattagtctgtttagttgggttaactcgctcaaaccgacactaatatcttttttttttacattcaattatattattttttttttttttgatgaaatctcaacttcattgaaatattagcattctgagtacaaaagggtttttaaatcagcccaagcat

SEQ ID NO: 392990 - DNA, 834 bp, Cannabis indica
ataattataataaaatcaaatatatgcatgaactaatttttgcctttttttaaatttaattggacataataattaggtatatatgtggagaagctgaagataaatttagaagcttcattaagaagtacttgttctatgaatggtgaacaagaagagttgatcaagtatccatctaactacaccactttggtcagaatttttgcttatctatggaagttcctaaaaattggtatattattatataaaaacctttaatatttgataattgattaattgataaaagtttccaatctatatatacttcaatcaatattggaagagtttaattaaaagcataaaaaattgtgagtttgtagtttttcaaatgacatataattaaggattaatgaagctatatatacaattatataatattgctaggagatcataaaactatcattatgatcacttaattaattggtcatgcatgtctttattgtgaagtgattcctatcatacaatttaagtctagctatagaatctaataaaataaagtctactaaagtgatttttcctagcataaaattgtagcatttttattaagataattaaagtgattaaagtgcataattattaggcactcgtaggaccagaaactttagtgggccataagaaaaaaagaaagttatttaaaccttcatatatttaagaacatcctaatattttcaaaatcattaaaaaaaataattatgtgccttttttagggcttataatttgagtggaccctactagcaagtttacgctgttagaaaattaataatatacccaagatctatttgtatataacatagaaca

SEQ ID NO: 392991 - DNA, 3159 bp, Cannabis indica
gtgttttattaattagagttgtaaaatcaagaaccagctcttgcatgcaaaagataacaatggcaaagttcttttttttttttttttctctaagtactcaaattctcaaatccctttcccaggttatgggtgatcctttatatagaggaaaatgtcgatgcttctcgcttcaggagacgcgaccactttgcaaatatttcaaccatctccttagtttttagaggtggttgaaacccgattcttatgataatatcccactattttttgtggatttataaccatttttgagcttcttacgggatttgaatatttgaattagtcactgacgatgagggtctccccttgaagtgtgaggtagtagccaatacttagggttgacaccccaagacacatcatgaagggggtgacaatgccatctcggggtggtaccctcaagaccctttccacttgatctttaatgttatgggtagccttggtgtcatgaagatgcattcatcaatctttgagtatatcattaaatttgaggtagaggtagtggtatctacccttagactggtttaacctcataggtgtgcagtgatcgtttatcccatctatgagggtgttagttcaccgtccccctggaggtagccaacttgctcaagctagggtgaaaggtgactgtcagacttctcttctaacagtcatgactaacagtccatgccaatagtcatgactttacatatttttcatcaatctagtctcgatatcatcatgccacgtgtcattattcttgccacatcaccatcgtcaaaatttgggtaaatatttgcccctaaagtttttaacgatatgactatacggtagaaattttcttctgaagtctgcactttactctggttgttgacgacttagtggtatggtactaaaaatgccatgcttatactagaatcacatttcaaaaccccaaaaaatatttttgcaatcattatactttttatatttttacatgtattccaatcataatttttcctttacaagcaaaaataaatcactaggaagagcaaattaaattttttacaagagaaataatctaaacatttacaaaggggaataaataaattatttataggaaaaacaaataatttacttacaaataaaataatttaaatacttacaagagagaaaaaagtattcgttgccacaaatcgtagtggagggtcataatagcaaaataggaagaaatgaccctaattttacaaaagaaaagggtttatgtgtgtatggtttagtgaagagtaaaaaccccccaagaatcataaaattaaaaaaaaaatgaaaattttcctctcttccttatatcattttgggtcaaaagagggtttcaccattaaaggagttttttgaagcttgaatcaattcttggaagctttgtggattgcatcttcactttgggtaagttttctatactcctctttgcaatttcttgcttgaaaattgagattccatgaagtttttgaaactttttcttgatgtttcttgctatggtcgaaaatgctacgtgatgattggggtttttgattttttgatgaaatgtgagtatttgatgcttagattttgtagtatatatgatgggtaatgtgtttttagctttgatttgataaaaaaaaaatgaataattttggaacatttcattgggtgtgttcttgagcattgaagtacaccaacaacatgaaaaagtttcattttccctccctttttcttattttgattctgataaaattgagaaaaatgtgtttgtaaaaatagtgtataccgtagaagagattgttgaccatgtattgtgtgttggtggttgggattttgggttcccttgttgattccaagccacaacaccactctaaggggtcaaggtggctacctcgagatgcctccttggggggttgggggggcaccccgagataaatcctttgggcgtccaccttgattgcttgaaacacttgggtataccctgaaataggccttttcttctttttttttattgctagccgaaattgggccgagattaggttggggtaatacccctgagaccaccacttgggggttggggtacaccaccttgaagctcaaaagatccccatgtaacctgagatcatataccccgagataggtggtctcgggttacacccctgagctactcttttttttaaatacaccccaaggccacaccccatgaggcccaagtacactgagataggggattttgagggtataccccgagtttaagaattttttttttgtagatggatgtaggggtgcctcacccccgagactaccaactggaggttgggtgctccaccccgagaccatctcatggaagtcgggggtgtggtaccccaggatgattaaaatgcggcttcattggttggtgatgatttcttcttatccacttctcaggatcttacatatatacactttcatgtattgtttttcttcacacacttagtaaaactttggaatatttaattgtcgctgttgcttctttcatttggctatatagaggtcgtcccttcgttgtaaatttttttttctacactatgaatgttatgcatgtatcccttctcctttcttttgtactagtaggcgagtccatcatggatagcctactagaattacttggtatacttacctccctgctcttccttttttgcagatgcattatggcaactattggggaggtgactatcgagtagacgaagaccttcttcaacttttatttaaagatttttccaagtcaccttcgcataacttgtctggggatgagaattctagtagcgagtctgagacacccacccatctctatcgggagacgataggcagtgaagcgtacactaggcacatctgggagatgagagggggatacacttttatttaccccgtgagtggacatgtattcctccttctagtgaggttaccattatggtaggtgtacccattgaaccatctagggagtgtacttttgctgagactactgtgactttgctcgatcgtcaaacatgttgcccgccatggcctggaccaaagaaagtgctcgagctaaggcttcagtgtccctcgtgcagagggggtgatcactaaaagaagagagtctaatgaccttgaaactgttggaaattattt

SEQ ID NO: 392992 - DNA, 1122 bp, Cannabis indica
aaagagaggattttttctactctgagaagaagaggtgagtggaggcagagccttggggatatggaagctgaaactcatttcagagctgagctttggttattcttttttctctgttttcttatctttttttttttagttcatattttcatggtagccattagctaaggcctttgtggtccctggtttttatggaattaagaatttgaaagaaaagaaaagaaaagactaataagagatgtgttcttatggttgtaacttgtgataattttcatatcaacaatttggagtttgtcatatgtatttattgttgtgattaggaacaaatatttctcgaaattacaatcttttatttaatttttacttttaaaatcacatacggaaatatttttctttttataatggaattttttatagttataatataatccttaatttgaataatttatattatcgaaaataaagtttttaatatttagtttaccacacgtgttcaaataatttcaaacttatttttgacattataaattatttaaaatttttcaaaaatttacaaagatgatgttgtaattataatgaacacatttataaaaaaatgagaaaaatttgttatctggtacgaaaattaactaagaggttgtaataaaaactctcaagaacaaatctttagtttctcctcccataaatttatttacatcaaatacaatatttactcccttcaaagcacttagttattatcaaatattataattattattatttagttttgggaaatattttaaaagtaatttcacattttttaaaggattttttttttggttaaaaaagaaagaaagaaaaaacatgtactagataaagactgttggaagatttactaatagttcagtaactttaaagattttaccgctaaaatttaagtttagggttaagtacaaataaattaataattgagatgactacttggcagaatcgaaatgaatttatttagaataagaagattctaagtgttgaccgaggttttcggcaactaataaaatatgaatataataatgagctgtaagaaagtgagatgaagacttttttacgtggttggggcgttaatgagccttagtccacgagccactg

SEQ ID NO: 392993 - DNA, 1719 bp, Cannabis indica
tagtagatgagagacactttctagtgatttgaacccttcttaattgttctttatccaattcactcatagtgatagagtggcatgcccacacatagcaagttaagtactcaatcatagttggaaagacgttggtaactaactagaaggagagaaagagatccatgctttgaccttgataatactctgcgacagaaagtatcaagggttagagatctgagcggaaggagacattatattcttctgcaatcaatgtaaggttttctaaactcttatatgtttaatctcattgttttagatattcataattttaggatgttaatttaacgtacttgttagtaaatcttgatcttggtaaatattcccaacatctaccttaaaataacaaaaaggaaaaactacttagaattacttccaagagaaaagcaagtgaaattattatctgaagtatttttctttaaaaaattataacatcaagtattaatacaacttcattttttttaaaccaatattaatctaacatctagttacaaaatatttaaatatgtaaactaagagaaataagtcacgtcattctcttcaataattaagccaacaatttcaagctaataattccacttaagaccaccgataaagtagctagatatacataattataatgtatggaactcaagaaaataaaatacatgtatatattatttttccaaaaaaaaaacaaaaaattgggttaaatttctcaaatttgagatttctagaaacaaatttgtttgtgtcttggattgtgtcattgcaaagtgtctttgcaaagactatgtataaaaattcaagaaatcttcaatgaaataaagaaaggaaaaataaggtctttttattgttggccaatagtatctttgtcggattatcttctttggcaagctttgcaacctgcatggtctccacaaaacccttcgtgaatttctttgattatcttgcttgcttctgtggggagcacacaccgtaggagaggtattgaataacccctcctgtataatttgccttctactaccgtgtagcgaggtattgaatacaagagttttcgtgcctcatttttgtctattggaagttgtccgttgagtagatagtcaactatgggtgtcatccatgtgggtctcatttactacgttcatttagaacctcaattggtatcaaattcagtttatcaagttcattttgagaggccagttttgccaatgcttcggcatttgagtaatgttctcttgggatttgttcaattttaatgtaatcaaacttctccaagttcttccgaaccttctccaaatatctagccatttttaaaccctttgcccgatattcgcctagaacttgattcacgattaattgtgagtcactatagcacatcaaattcttaaccttcaaaactttagctattttcaaaccggctattaaagcttcatacttggcctcgttgtttgaggagtcaaattggaatcttagggcatagtgaaacttaaagttgtttggcgagatcagtattacccctacacccgagccattttcattagattctccatccacgtataatttccaagtttctgtgtctcgctggataagtgggttttcatatgttatccctactattaggaaatctgccaaagcctggcccttgatggatgttcttgggtgataagttatgtcgaattgccccagttcgatagaccattt

SEQ ID NO: 392994 - DNA, 860 bp, Cannabis indica
gttttggactattttactcctaggcctctaggtggtttatgtgtgaagccaagagtaaatttagaattttgttatttgaagtaattgtgattttggtagattattccacaagtgaaagctagtcactatttgtttttcctcagttgttttctgagttagttttgagttgtatgatgcttattggttgtgttttaaggtttggttatatattatttaataatataatatgcagattaaaatgtgataatatattattatgaggatactatatattaagtgtttggtaaataaattgtgcaatatatgatttatttaacctataaattgtaacctacgtctttgcatgtagaggagttacaaggttaattacttttataacttcttttggttaatcacattttagtgtaataaaagagatgttatacacaattgatgatatgattcaaagttatgaaatatagttattacaaactatattaatactcatttatatgagagaaatgaggtgttgtgtatttaaattctaagtgtgatcacctacacattataaaagaaggtctttggtgctcatttgaaaagaaccaagtttctatcaacaaagcacttgttggattgtattttaccagatctagatttacaaccatgtatgttatttaacatcctaaatatgaatttctaaaacaatgtaatttaaacacataaaaggtatgagaaaccttacagtggttgtagtggaattaaatgactcattccgcttagatctctaaccctcgtatcatttttgtagcatagtatcaccaagatctgagcacgattctccttctcttgaattttgattcttcacagtcttacacactatg

SEQ ID NO: 392995 - DNA, 624 bp, Cannabis indica
acataaaatattaattttgtaaaatttttatactattacgttcaaaattttctttttttatacatttttatgatattcgttaaaaatacaagaaaataacttaaaattaatgagaaaataacatcaaaacaatattaaaatgacataacaaataatatacagataacaaaaaattaataataaaataataagaatgcaataaaaaaatacaccaaaagtcttctgaaaagtgcttaaaaatgacctttatgtagctaaaaaaaagataaaaccctaaatttctcaaagtttaaaagagacgggtcacgacactgtggcccgtgtctttcatagcgggccgcaacactaacttgtagtgtcgccatgcttgaagcatgatttttggcagagaagaagttcgcttgctatcttgtgttgtctttagaagcttccttcaaactcaacccatttaatttgggcttaattaatatgttttgaacaaataaataggcccaccaaaagagtttaatgtagttgaagtaattatatttgggccatgactttggtgagcaaatggagacttggattaacttcatttccatcaaatatatgagggataatttcataaatacacaaaaataacaa

SEQ ID NO: 392996 - DNA, 1085 bp, Cannabis indica
aaaaaagaattagaagaagaagaggcatgtacctaataaaaaacaaatgcatgctttgttgaaggtcgatcgctccgccgtacctgttcaatgaagagttagaagaacaatcaaaaatcaatttatatacacatttatttatacaacactcaagaaaataacaacataagacccgaaattagcctcttattctaatttcaatctctgcatatacaaaaaagaaccagttcgtctaccaataatatatgagatttggaagccaaaatttacaataccaacaatatttcaacaaaaacccagaaataaaaaataaaataatcaaacaaagaacaaagagactaagggaagaagaataaaaatcgagcatagaacaaagagactaagagaatggccattagtgaaaataataccatgacgcgtcaaggtgcggagatcacagatctggtctttattttggccttcggtcgcagggataacgagtgcatctcgttaatggtggctagagttagtgtttggcatggagtccaccgcacgcgtagcgagaacaaagagactgagagagaaggtcttccctggtccatcctgcgtagagaaaagagagaggagcgacgatggttctggccggtgatgggcggttgtggatggttgtgcacagagagaggctgcgcctattgtgtttgaagaagaagaagaaataaacctaaataaaaatgaaagaatctgaaagggtttttaataaaaatattttatctttaaaaaaataaaagcatttaataaaagcattcagcccaccttgagccgtgggtacatttaatataaacaaataaaataaatattatttaaatttataaattggctttagtgacactccatgtatgttgggatatgtttttgcagtcacgcgtggcgcgtctctataagtcaataattttcatttaataaaaattaaaaaaaaatagatttcactatttagtgacacttcaaatatttagtgacacacattgtatgagattaacaaagagtgattagagtctaattgtgcatgtcactaaaaatcactcccaactctatagtgacatgcacaa

SEQ ID NO: 392997 - DNA, 1233 bp, Cannabis indica
tatatagagagagagagatgaacttgtggaaaaagtgtgccttttacggtaagagtattttgtttaggtattaatgatattatggaatttatttatttatatgatattatatattatatatggtatagttatttaaaattttactatcatttttatttttgtaaaatttcgaataacttttgatgcaaaatcttattccgaaatagcttgttttcacgcttgtagaaaacatgtttcaagttcaaaaaatcatatttcatacttttggcttatgatgaaaaagaattaagattatgatctatatatgctaaaaataagataataatttgttttgaagcttgtacataaaatgaggttactttaaaattatttttaccttgcaaatatttttaagaaaaatcagaaatattgtggaagaccttaaataattacaatgtgtacattcttatatataattaaattataatttactaaaaacaaagacttaattaaatacatatccctacgaaagaaaatttctaacaattattgtgataagcagaaacacagtagagaagtggggacatctgaaatatgttttttttcatgtaataatatcattaatatagcatgtgattttgatattatatgaatagtttaattttataaatatatctctctcctaatttattattttgtttctattttggtccaccagatttaaatttctagctttgccgtgctaatacttatttttctatatattataatcactaccttattttggagcaggtgtaataagatcaagaattaaggaacaaaacaaaatcacacatgatatatggtcgaacacactaatttataataaatggttcattcttagttgtctaccacggtagtatgctataaatatgctgtaaatagttaatattataccttacaatgatgatgttagctagactttactttttattttatttgtccttacattaaattttattagttttattaaaatttaagttgattggataatacttttttgttgtgttagttcatattattggtgatcaatagttaatgtacttagtaaagtctaggtgaaacagaagtatgggcttttctagttaactgaagcttttgataagcagacccaattcaactagagttatgtagttaagtcctatctttaactttataaatacatattgtttcatcacaattgtatactcttgataatcagataaataaactgct

SEQ ID NO: 392998 - DNA, 542 bp, Cannabis indica
tgttaagagtccaacgtttgaatatactcaaagaaaactaatattatcgatgaatctaattttttaagtggacttctgtgggcagtaatagagtttatatagatatatctaagcaataggtcatatctcaagtttaaaaattacgatttttaaatttaaatggcaagtgtaaaagaaaagataattaatttaattatttctttttcaatttaaaaattatattaaattaattaaaatatcagtaaaataatctttttattgtttcttttaaataacaataaaaagatttcaagagtcaatttatcgctaaaagtggtaaaattctaaaaccatacaaaatgacacaaaattccaaatgagctcactaaaattaatcttggaatattaaagaggtcattcgtcttacaaaaatttcaaagaggtcattaacctcacaaaaatttcaaaaatggtaattttacctaaaaattaaaaagtgcactgaaattcaaagtcataacaaattaaatggcattccaaaaagagaggtcattcacctcata

SEQ ID NO: 392999 - DNA, 704 bp, Cannabis indica
gtcgcctattcttgtaattactgttataaaccgtcgaaaatactaatttttctgacagttgtaaacaatactaattttttaagcgacagtcatccaaaaacaccgtttttaggaccgtcgcgaattctgacttttgtaattaatagtgggactaaaccctcaccatctttacttttggacatttttccaaaaatcttaataagtattaatgtagtagtgtccatttttatatacccactatatataatttttttaatgaagaaaaagaagagcaataaaagaaaaactagtagaaaaataacccaatcttgaatctcaaatatgtttcctagctaggtaatttagagttgtgaaagtttagtaaattaaaacataagtttatttagggcactctctctcatatcagtcgcaactttaatgtttaagttcataaattaactaagcatgcccttataatagacaataaactttatagatagaaaaaaacccccacctcttgtgtaacttttattactttaaacttcatcagatacccttacaaaaaaaaactctgatctcgtatttttttaaagagaatgctaagagacgtcaaaccaccacaagaggtagcatattattattagtataaattaatatcgcgtcccacataatttcatttaattaataatgatatagaaattattaatcaatcgcatcatgctacc

SEQ ID NO: 393000 - DNA, 962 bp, Cannabis indica
tatgaagcagcatagtaaagtaaaaggaggaccaagagaagttatcataagtcgcgcatatatcagttatatgcgaagaccaagtgattctcccttgcgtcccacgtaaagattgcatctttacaagcgcatagtcagaatgactaaagtgtgtgacaacttattttgaacacgtaaatttcaatgttgtcagtacatgaacgcccaatatgaccagtatagtcgcaggcgttctatctcataaatgaccccaaggttgtagtcttgagactttgtatgcaagtaacaccaaagaacctgcaagttcatatgttactcgaaaaattgaacaatcattatgcaacttaaagtcacatacgttcgaatattaactaagaacgatcgaaaccgttctttcatttattttgtaaacatttttcatcttaattaatgttgtaatagttatatctgatcagttatgtaacttaaaggatcacttaatttctatataaaggaatgatttaacccaaaataagaataatcacaaaattcttacaaaagtaaactaagcagaccaaactctaactaaaccactataatttatctgtgtcccctttaattacatatacactgttgttgctttatcctttgctattttacattgagtatttaccactaatttaagtgaatatttgtgattctgtaagtgagtattcttatttatcatgagtactcatgatttttgttagtctactttcttcatacaacaagaatgttttagtaaattattcagaaagttatagaaatttacaaataacttcaatgtatttgattattaggattgggcttactttcttatttttatcttgaggaaattacactctataccctttttatattgtcctcttttatttttatcatcttttttaaagtctatcatttttaactctttttttaaacattgtaccaatttgtccctgtca

SEQ ID NO: 393001 - DNA, 736 bp, Cannabis indica
ggaaattggtgactttcataccaaactacctaaaagattaatttttagattattttagtttaatttccaggggtattttgtataaccagattttgttactagtgtgggttgtgaattgcttatagcaaggattagtggattgtatagtacaaattaacagctaggctttcaatatatatagtaacatatattgtttataattaaaaaccttttaaataaatggttggtgtgtatatatatgacatgttttacggctatgtacatttatatatatatttacctattaaataattatacgcaatttgtttgatgagtattaattatatattaacacaaattaagttagtgatgataaaaatatatagatgaaaattagctaggaagacattaactataagaaaaagctctaacgataaatgtagtgcctaaattaaagccttctttttcgtgcctatatatgtctttatggacacaatatgtcgtgcctacttagtcatgtcaaaaattctattttgacacgacaagtagagatgaaaattgggcggttaatatacggggaatgcaatccccgcccccatccccgctacctatttatatctccatcctcgccccatccccgtctaataaccaacggattcggggtaggggaatacccatcggtgatggggaacctatcgggtatccattaaggtaaaatgaaacaaaaattaaaataattgaaaaaaataaattaaac

SEQ ID NO: 393002 - DNA, 741 bp, Cannabis indica
atactgacaaagtacgaattatatgtgtgctgtttgttacaatggttagttaaaaaaattctacttataagaaaatcaatatcaattccaaaattcatctaagaaaaaataattttgtagactacatacatttacggagataataattaaattacaaaaataaaaaattacgaaccgaggtgaaaaagttatgtattaaaatgagaatttttgcacattcaatagatgtgagatatcaactcacacacaataattaattcgtactaaaaaaaaaaaactcacataattcgtgacaaattatttttgaaataaaatctcacatgtatattattatgaaaaatgttaaagggcaacagtagtgcttagcactcttttatatatcagtatcgctattggttcaactaagtatcagatttcatatggtttaataaaatagtttttagggagtatcgctagctaatcgcaacgtgacatgtcaataaaagactagacaccactgatatggctaatagtaatgctctattactatacctcccaccccatccctcttaaaatcttaaaaacaagtgttatatatttacaatttgttagagattttgcataaatataagaaatcaaaaacttacaactaaattataaaataatagaagaacaaatagaggttgattatatatatttctacacactatcaggcccgggcctgggcataggcgggctaggcctgtgcctagggcccaccta

SEQ ID NO: 393003 - DNA, 513 bp, Cannabis indica
gtactagtataattattatgttccattcataattaatttttttacttaaaatcttaaaacaagtttagtacctctcttaatagtttgactcaaattatttatatatctatttatttatttatttatatttgtaaacttataatttattattggtaattattatttatgtgaaaagaaaaattttggtggccaagttttgaagaatcttctaaaagaagttttggaaagtcttagtcctcaagttatcttaatgcccaatttttataactttataaatatatgttttgtgtgtgagaaaaagagtgagttatgaaaagaaaagtaagtgtgagttgtggtgttgtgagagtgaggaagaagcaaatgatatattgagatttgggtagagagattgagatagtgtattagagttagtcccacattgctaatgtgtggaaataaattgtgatatataagatgaatgagctactcctcccattgccaattggttttgggatggaacctcattcatct

SEQ ID NO: 393004 - DNA, 1026 bp, Cannabis indica
taataataataataaagatgatcttaccattcctcttccaatcaaataatgaattgttgtttcaacttttttcatgtcaacacgaccagagagataaagatacttattaagaagatcaccgtgcctattctcttcagcactccaacctcttgcccatatggcccaaggtgtctcatccatgcccgtgcggtcgtggaagaaattgatcccattgatacgtgcatggtaggatggcaatgcttcttccgtgatcatattcccaaccaacaccacaaagtagtcattcggcacttcttttgttctctctctcaactcctttaattgctcatagaactcttctgatgtcggttctggtagaaaatcttgcggttgccaactttgttcaactggcttcaacaaaggtaaaatattttctcttccccattcctccattgatttgaagatttctaccttttttgcacatggtatcatcaacgacgccctgcacacttgccccgaacattttagaacttcatgcatgtgaaagtttatgtatttttatatcgaaattaaaaacaaaatcaagatacttttatttttcgataaccttataccaatcaatcaatcaattgaatgttgattaattaataaaaacatgaagtgtaatccatacaaatataatagtctaaattataagatgagtgtaaatataataattattaaaaactacatatgaaatagataactaaataattaaggtaattttttgtttaaattaaaattctaaattgcaaccgtatactacattgtaaaatgaaaatgtaacctaattcacattgtaagaagtttaaaattacatgaaaaaaaaaaccttaaaacatgtatgtatacataatacatatgtattataactcaattttttatataattataatataaagtagacattaaactaatatttcttttttaaaaaaaaatagttaggggaattatttcatatactattttttttaactttttttttctttcaaatttacggtttgggtt

SEQ ID NO: 393005 - DNA, 666 bp, Cannabis indica
gtggcaagacttgtcctccttcatcttgtggaaggtttgtccttgttccagaggaacttggttggacagattgtctacagatcctccccgatctttcaattattgtcccttgcggaggatctcaaatgagatcctgacctcttctgatagttctttcattaaatcaccttatcagatcacttgcttctctattacggtggtctaatgctgcctaatgagatcaaaggatgtactcttggtcatccatccatatcagaaattcacgtctctgttgtgcaaatgcatagtagccaacaatgtatggttcttcagtttagccgacctgatagacgacctctctaagtctggctaagtcaagatcttctccgaagtctacatgaggttctccaatggatgtctcaccaattcttggccctatcctctagcataatactggggaacagatccaattgtggcactcaagggttgctccatgttggttatttctttaatatgaggcgatagtggagggtcctcctagggcagttgaggttggccattaagaccaaccaggttggtagtgtccacctgactagctgcggtgtccaggtttatggtgtcgagatggaagggttggccacatccatcaagttcgtggagattctagttgtgactagaacacgaaca

SEQ ID NO: 393006 - DNA, 579 bp, Cannabis indica
cctttttgaattctccttggcaatggcgttggatcattcaggcaggtacaatgggtgcgcatgctctgtactatggcatatcgtagggggaaaaatcctcacgccgtacctaaaaaaacttggttactatgtctgtagtctgacatgtacgagcagatcctccgcagaacggggttatagtttagctagatgctttccaaggcaacttcgggcactttgtgagaaattcaaaccctttgcgggagcattcgacttcaatccaatgggattagttggcttcaattctcgcgactgcgagagtcttctggtcgcgaatatcccccacattgttgccttttctttcataaaggcccttttctgcaagctatggctcctatcttcctagaattgtggtaaaaggtgttgaccagctaattagcattgagccttcctaggttagggtccacgtgtcaagcttacaaaaatctagacaacatcgtagaaaaaaacgttaaacaacaaaaaattgtcaaaccaagaaattctattagataaccacttttaatatataaagataaaaataaagataaagataaagat

SEQ ID NO: 393007 - DNA, 1526 bp, Cannabis indica
ctatcttgttgttcgtccacgtcacttaaaccagcagaatagtcttataaaaaaaaaaaaaattaatctctttcatatctaagactaaacatgtttttcttcataagataagtcaaactagatctttaagttctcgtagctcaaaacatttgtagagtatgatacatatactttctaagcatcgagaggtataacacattatggactccagataatgttaaaggtagggctagtcgataggctacctgaccagttctctctaaatggttgaagggactaataatgaaactaggacttgactttcctttcttttcaaatctctgaattcctttcataggtgaaatctaaagaaacacatagtccttgacttgcgattcaacattcctacgctttagatcattgtaattttctatctattttgtgaagcaagcatacgagctataaccttttctatagcttcactcatcctctatactgcctctgtcctaagatacttcatctcacccgcttcatcccaatgaatggatgatatgattccctcccatataatatctcgtatggggcaacaccaattgtagcatggtaactatagttgtacgcaaactcaatcaaatgaaggtacttattccaagatccctcaaagtctagtacacattcccgtaaaatattttccaatatctgaatagttctcttagactattcattagtttgaggatgaaaagttattctaaaatttggctaggttcccattactctctgcaaatcctcctaaaacttggatgtaaatttcatactataagatgaaacaattaactttggagcaccgtgaagttacactatctccttgatgtataaatctgcatactaatccactatataagttattcgcacaggcaaaaagtatgttgacttcgtagacctatactcaatttcccagatagagtcatatagcctcgaagtctttggtaatctaactacaaagtccatagttagatcttctcattttccactctagaatcttcaaaggttgtaaaagttttactggtctctaatgttctaccttaactcgcagacaagttaggaacgttgacacatattccactatttcacttttttattcttgaccactagtgtaaagacttcaaatctctatatatttgtgtttcccctgagtgtagagagtacaatgtcatatgtgattcatcctgaatttctttcttggtctcttcatctgctggaacacatatttggtccttgtatattaacatactactctcagatactgaaaagtcctttgctgaattagcctcaaaattttccttttgcttcagcaatacaggatcacctttctgagctgatttgattcttacatagagtaattccatgtctagatagtaactatcgttctttgaattctccattgaggggtgaaacagtaaatttgtctctacttgatgtaaatcatctataaaggatctttgattattgggattagaacgatgtttaaattttcatagcgtatctat

SEQ ID NO: 393008 - DNA, 1989 bp, Cannabis indica
taagaatagaatatacatttgatctatttaagatttaaaatatatttatattatatgtaatttaaatttttaaattattattttatttacaattaaaatgctaattgtatatattaaattttttaaattattttataaatttagtgtgggattggattggatcggttactttgcatgtcaattaacattcaatccgcagaaatataaattttgaattttctaatccaatataatctgcacaagtgtgggtatctacactttgcggattgaattgagttggatcagttagtttatgaacatctttagttttatctaaatatagtattatttgttatttaatataatacgacttttatacggtttaccaaacgagcttttggagagttaattttaaaaaatagagtagagacacttatgaaagtgctcaaagataaaaatcaagaaattttaaaaaatttaaacaatgtagcttacagaaaatagtgtaatgtgcatattcaaattgaatgcaatttttgcatacaatatagtatttattcaattttcgttatatgtatatagttttaagtttaagccacatcattttttttttttttttgaatttaagagacaatttttattaagagaaaagtctagccattacaatagtaagttattcaagcaataaattattagaagtctgaaaattaacacaatctagagataaacaagagctacacgtcaaccaatcgacaactttattcgtagatcgttcaataaaatataaaaaagcattctaagattatacattattgcgtgtatttgaaaaatattcataatgtgattagttaagcttaataggttgaaaatttgtcaaaagcttttttcgtttggagtcattgatttgtggcaatcacaatgaggatattggtcatctcttctgctggtacatccatatgtgtttgcaacaagctccattaatggagaaactttgttgagtttgttgtggcatgggaaaggggatgtccaaagttagaagaagcgtgtttttggcggtgatagcaactcttgtttatcgaatttggagagaccgaaatgaagctttgtgagaaagtaaatttgttagaattaagtgtatagttaagaaagtaacctcttgtatagataaagattggttgacaaccataatattgtatataagattttagtgttgctctattctttattttcttttgggagttttggttgattggtggttgtaaaagcttagtgcaataatatgttttgcttacaaaaagaaaagtgtataatttaagtgtttgaattgaaatctacatgaaaatcaaataataagattggtaagttaaaaagaaatttgtgtgtgtttgtcctacacgttatttatatttgagtaatttgggtgtttatattacacttagtatagctaccaagctttaattttatgatataattttagtaatagaataaatattatgtttggtgtgatttattaaaaaaaatagtaagttaaaaataaataaacaaataaaaaaattgtaataactccatatataaatgcatggactatccgattgattttgagatagaagatcatcgattttaaccaataaccacacacacttccaaatgctaaacgatataaaaaatgatcaacaacctctcgtacctaagaagagatagaccctttggttacctattttttttccccaaatctaagtagactttgattattatggtttacaaagaaatgagttgttgacattgatttttctaaaaacctaagataatgatcataattcttagttcaatttgaaaataataagctaccttttttgtagggaccaatcgttgtgtgcttttgcttactaacacacacttacatgggctcacagtttgttagcaattatatgattgtgattgtgatgagttatgtaacgtccccgcttcaagcctccattgggccctgtttaacgcccaaatgtgacttcc

SEQ ID NO: 393009 - DNA, 414 bp, Cannabis indica
tatataatatatatatatatatatatattcctctctcttgattctgatgactaagttgttccaatcgttgagttatatatatgtatataataattgaaactttcttttaagcgatatgatcaatgaaattaatgatgcatgtaataataaatgatacttgtacggaatttatattattgagaatcagaaagaaattattaaagaagtggaaaggatcaatgaagtaagttgaccgttgttttgtgtcggtctcggtttaattaattgatatataatttggtcaaaccatgcagttgactgttgagaaaatcttctctaattaactgctatatatatcctcttataatattgactttgtaaagaatatggggaaaagaaagaaaaaaaaaagtatatatatggatgaatattatt

SEQ ID NO: 393010 - DNA, 842 bp, Cannabis indica
tcgagtacctttggagtccaaaagaagcatgctataatgaaatcccaacacaaagcaatatcacctaatgaaaacaaaacccagcttgatccaaccatgctttccacatggtctcatcgcgcatggctcgcatcaggttgcaccactgtgctcctttctctatcttggttagttattggtgttaccaactcaaagaaccataatatttggttggcccttagtagtttggttgcatgtgttgttgggtatgtggtagttgaccttgtatctggattgtaccattgggcagttgacaactacggcagtgcctctacaccaatctttggcaagcaagtaaaggctttccaattgcaccatgagttgccaatgaggattaataagcatgagtttgttaataggacacacccctttgcttccattgtcacctttattgtgctccctatacacatatttttggaccatccgatcatccatggatttgtttttgtcttctttggttgtgctatctttgccaaccaatttcacgtttgggcccatggaacgaaaaatcaacttccgccacttgtggttgctttgcaagatctcggcatctttttagggcgttcgcaacacaacaagcaccataggccgctgtataaatgcaattattgcataataagtggggtttggaatcctttcttggaaaagaataatttttttcaagcattggaaaaactcgtatttctcaaatttggtgtcaaacctaactcttggagctaaaattaatgtaagtagattgcataactttattactatatatgttgataataaaaaaagagaaatgttaaaaggtaccaatagtg

SEQ ID NO: 393011 - DNA, 777 bp, Cannabis indica
tattgaactaacttaaactagcttaaatatagtataatgttcgaaaacattcatacaataactctaaaattatagatatcgactccaattcaataggataattttacatcaagaaacaattttcacaattctataggagttttttaccgttacaattacaattctagtgttgggtttggtttttaaaacattttgaactcgtttagtatgtcgtattgtattgtattgtattgtattatcttggattgtgttgtattatatgtattgttttagtattatttaatgcaatactatgtttggtattaactttttttaataggttgtgtaaagttataatatattttcaatacactcaaccccaacaccaactacgggtccaagtccggagtctaggtctagggtctaggtttaggtgtctgggttggtcttgggtccaagtccgggccccaggtccggtcccggtatggggtctaagtctcgggtccgagtctgggtctggagtccgagtttgagtcctcgtccaagtctcgggtccgagtccgggtcggggtttgggttcggttctgggttcgggtacgggtcctcctaggtcccaggtctgggttccgggtccgggtctcgggtctgggtccgagtccaggtcccaagggatccgagtctggggtctaagtcttgaattaagttttttaaaataaatttaaatcgggttggatcagattcgatccagaaaaaaattaggcggggcggagcggatctgatgcaagatccaataagtat

SEQ ID NO: 393012 - DNA, 1963 bp, Cannabis indica
aatcctctccctcgaagtgtggttgggtcttttgtccatgaaacatatgttgtgatgggtgtgaatgaggaggttccttccaatatagatgaaaatcatgaacaaccagtatttggtcagtttgtaagttcgatggtcccttttacaataatgatcctattttagatctaaataatgatgacaaagatgatttgatagtcgataaaatcgtaaagatacattccttgagattggattgtgcacctagcaactatggtgcagagtgacaatgaacacctcgtaatgaaaattagaatacacctagaactagtagtagtcgataaggcagatcagaagaacatgctccccataatgtactgttctcaacgttctcgttatctgaagtttgtactaagttcaaagctcttacgtggacaaagaaaagtataataaaaaaaattatatgttaactacttcttacaaagtaaggaatcagggaagatacaacttggtaatgtgtacgaaaataaggaagaagtgagataatgggtaggtttgcacttaataattatttttagtggatggtgaagaagtctgtcaccgttgtattgtacattacatgaaaggatccatattgcaaattaagattgtgggagaagaagaatatgcattctcaaaactttaaggttatcgtatttcacaacaaacacacatgtaacttggatgctaaacattccaatcaccgtcaagcagtaccgtgagtggttgacgatcttattaaggggaagtacactcaagatggaactatgtaccaggctaaagacattatgagggatatgtttgataattatgggatccagatgagttatgtgaaagtttggatgtgcagggagaagacacttacgtatattagggatacactggtgttttcctataagaagctaccttgatacttatacatgctacaatagaagaatctaggtaccattactggactgtatgtagaggaggagtgattcaagtactgttttgtctcacttggcgcatgtaggagggggtttactttctattatcctgtgataagtatcaacgacacattcttaaagatgaagtatggtgacgtaatgttagttattttggcatacgatgcaaacaattgtttctgattgcttttagaatagttgacaatgataataataactcttggacatatatcttgcaaaagttaagggaagcaattgggtggttgagaacttagtatttgtgttagatatacatcaaatcataaaccatgttatagcacttgttttacccaaaacatgccactctgcctattattacgatattgttatgaacatgaacgccaagttcaagattaatgcatgtcacaagcaaatatggattgtagcttactcgtggtcaaagactgattgtgatagacagtttgagaagcttagacagatagatcctacttttattgcatatgttgagattataaagtttgaaaatgggctcgtccttattgtttatgtgatcgttacagcataatgaccaacaacgttgtcgaaaacttccatagtgtgatagaagaatttatgaaatatcaaataactactttggttgaatttatcaggttcgtattgcaaacttggttcgttgattgccttgaaaaggcagacaaatatgcaattcctttagcgacccttatttgaaaatgatttggcaagacaacataatggcgcgaggttcaaaagcctccaacgaaatagaatcattttgtttcacgttggtggggtcctactgatgaaagaggaggtgatgtgaacctagttgaaaggccatgaacatgcggtgtgtttacattgctaaaaattccttacactcatgcatgtgccgcgacattaaaaatgaatgtgactgtgtgcgctctatgctctctgtattaatcaaaagattcatggaggaagatttacgatgataccat

SEQ ID NO: 393013 - DNA, 924 bp, Cannabis indica
ctctctctctctctctctctctctctctctctctctctctctctcttaaatttcttaatattatgattgtaatttgtctgtggattcaattttagtttagaattattagttataaagagcctctttataatatatggttcatacatgtattgatcctctttagttcttttgtttgtgtttccttagagaagattatttcttctttgtccttgttttctcatgttctgcggttttctatataaccaattagtaatgtctggtaatccccaaaattaatattctttttttgagaaaagactattacccaaaattaataatttaaatgaaaagacaactgtaaactactttgatactggtaagcatagttgatagatcaaaataatacaatacttatgggcaaaaagattgagcccattaggtgggatggttattctactgggcttcccacccattttccaaattgtgtagtcttgttacatgattaatgatggtcgacttcgagtatttggtattggctccttcaaatttcaaagttaagaatatattgctgcaaataataataataatttattttttttattacaaaaagatattaagtagcactataacagagccaaaatgggtcgaccataacaaccaattaaaaaaaattaatataaaaatattctgacatggtgccaactcttggaatgacaccacacctgatgggataagcacttattattattatgacatccttattttttaaacatcggagatcctattatagggaacattgttttccatttttttttaacaagattacaacatctttcacattagtaggaagtatttatcttttagaaattcaatgtacttctttaaaatggatatattaatgtacccttatctattttagcacccgaaataattttttagttattt

SEQ ID NO: 393014 - DNA, 704 bp, Cannabis indica
ctctctctctctctctctcaacagagacaaaaccaaggaaaacacttaaggttttcatctgatttctaaggttttagcaaagatttgaagaagttctaaccaaggtaagccctagaaactcttacttcttgaattctctaagttctagttggttataacatgtaattttgagctttagaggctgttagggttagaattatttgcagttcagtttctaggttcaatttgagttgaaattgagttcttgatgctagtctttatgtgttatgtggtgaatgaacacgtttgagtttaaacactcaaacttgggtcattaatgacattttccgattaagtgtgcttttcttgatgtggttactttggaaagtattatttgaggttggtacaggtattctagaagttttgatgaggtttggactcaattgggaaagttttgaacttgtttgggttacctggtgcaaactggttaactagttttacaagtcctataaaattgattaaccgaatcaggggtaggtttcccgaacagtttgatttgtcggttcatgttattttaagagccttagatggttgtttcctcgataattagggtattgttatgataattatcgatagcaaaacccttagtaataagtttaggtttcccggattagggttttggcatgttatttatccatttatgtaaatgtgacttagggcatcca

SEQ ID NO: 393015 - DNA, 1119 bp, Cannabis indica
cacatcattatggccggccatgtccaagacctaggttgagatttgagtcttaaatattgactaagaaaaaaaattgttaaaaattgttttaaaagtgagtttttttttttttgttttcgattctcaattaaaaaattaaaaaataaaaacaaatttatagaacatgttttttaaaaaatatttttacttttataaattaaaaaaaaaaaaattactacaaaatgcacaataatacttggctaaactctttaattattttacttacttgatggagcaaattttttaaatttttagatatcatagctaatagcttattgtggatgctttaatagtgttagacactatttatccatgccaaaaactgtaaataaactttttttttttcttgaattattcatttttttttttaactaaaattctcccaaacttttatttggctataaaatgcaaaattttataaattatagcaactattgtaaatatacctattctattctattactattttacttatttttatttttatttttatttttttcatacgacctactatcataattttttttgaaagacatcaagccaaaagattaagatacaaaagatagccaaatttaaacagctaaatgggcaagcccgaccaccacacacaagcctcatctaattctaacgctcgttttgctaaaaaatgagcaacatagttctttgaccgaatacaatgcgacagtgatatgctactgaaagaatttctaatatgattaatattattaataacaataccaaacttattaagacaagaagccctgttattgacaaccaaaatttataattgtagactgattgtagtacgatattttatttaagtgtcaaaataagtaaaatcaaatttgttaaccctaaatgtacagatattagcttttgtgatttttttttatattaaactatactatatatatgtttatatctgctgctaaactcggtggttaaaaagtggacgaaatgcaattaaaaattggctaatttgaattttactctctgaactttgatatgtaccaaatcatgctttctgaattttctgatcgttaaaatcccatctgacttattgagattgttggatttaag

SEQ ID NO: 393016 - DNA, 812 bp, Cannabis indica
cttaaatggtcggttcttatttcagtaacaaacgaccgaaaaaactaaaaccgactgaatttatataaaacataaataaatttatatatgtatactatttaacttaagtttatatataaggtatcttataattatattaatattattaatattaataaataaaaaaatagtttacatatatatactttccaactgctctctctgtctctctcttgctcagtggttctctctctttgtctttgtcaatttttcatttcaaaagccaaagctgctaactaattatgtctcatctcatctcatttcggtctcataaaggataataatagatcatattttcaaaattttatcatctttctctatcttttatattcatacaaaattttctcttttttcgtacattctctcaattttacatatgttaaactattagaggataggaaatcggcaagaaaaaactagccaaaaaatagattccaactatcctttaaatttgataaatattttatagagacaaaaaaaataaaaaatcagtttcgacagtttgaactgaccgaacttcagttctaaagagtttcctatattagcctgttagtttttagattacaccaatccaccaaaaattaaaatctgaattttcaaataaaaaaaaataatactctaactttatttaaaattgaatagtgggttttggtcggttccacagttctacttaggggtgggcattatccaatccaatccaattgaaccgaaccgatccaatccaatccaattacaaaaagttggatatccaattacaattggattggattgga

SEQ ID NO: 393017 - DNA, 862 bp, Cannabis indica
tcaaatcacagtctgatagccgaaagaaagttagatactggatgtgtaggaaaaatggggcatgtcagaaagatgtgtccagagaggttgaagtcaaatgatttgagatctgaaggagatgtagcagtaataagtgacacatgactcaactagtgctttgcttgttacctttgagaattttgattctgaatggatcttgaattctgggtattcatttcatatgacaccaaataaaatcttggttcgaagaatttaaacctgaaaaactatgggactgtgtatcttggtgatataagtcttgtaagatagtgggagttgaaactgtaagatagaaagtttatgatggcatggaaaaggtataggatgtcagattggtaccacatctcaaaagaaatttgatctctgttagaatgctagataatcaaggatttttagtcaaagttgagaatggaatcatgaaagtttatagaggttccatggtggtgatgagaggtaggatttaatgaccacatacttaaataataagaattagcagatatttatgagatttattaatggttatgtggactctgattatgcaggatgtatcaatactcagaagtcactaaccgaatatgtgtttaatatgttcaaaacaactattaattggaaagcaaaccttcaaaaggttgtagcactgttgacaatagaagctgagtacatgaccttgacggaagctatcaatgaggcactttggttgactgaattaatggaagagttaaaactcaactagaaggttattatagtgcattgtgataatcaaagtgaaatttaattaactaagaattttgtgcaccatgaacatactaagcacatagatata

SEQ ID NO: 393018 - DNA, 754 bp, Cannabis indica
gtttaatagataaattatagtaaccgatttttgattcatattattcaataactttttttattacgagtgtatatgtttaaaattaaaagtttcataatgttacattgtttagtgtaataggtggttagtttgtgaaacttcataatctcaatcaatatttattaattcacgtctcattatcaaaaaatacaaaataatataatttttgtctaaaattcatctttaatttatatatatatttatattattatgatcaattttcaaatgcatagtgtatttttttttcatttttttatttatatatttatatatttacctgacattgttatcaccggtattggcagggatgatcagaaagaatttttttttaattgttgattaaaatctttgtatggagcttgatcggtgcttcgagattatgtttgtattgctgccagaagtagagcttttattttttccggtgccgatcttcttatattgctcctgctgttactagaattggtagattttatactgctggagttttgaaattgtcgaatgtggaatcagagaaagaattgtactagagagagagaatcgtaatgtatcatagaagagagagaatcatatatattttgtggaaaacgagaaaaataataaatcttaaattcagattctatttttaatattttatatggctttttcaatttttaaaagggtaaatactattttggaccctgtgttttgtaaaagttacagattggaccctgtgttt

SEQ ID NO: 393019 - DNA, 904 bp, Cannabis indica
tagtgagggattacataaaccccctaaatatatatataaaattacaatattaaaaataaaaataaattaaacttagtcattttcataggaatatttattgactcgtatttaatgaatttaaacttaaacatctaattaaattatttatttcatattagattttgttattcgattcaattcgatatgatccaactgatgtattaaattagattggttctaaccatttgatgcattaattagttttctattgaattagattgaatccatttaatctattttagctactatttaagccgatttcattaatatatatatagaaaaacataatttacaatctaatcatctaatatacataataaatattagtttagtctaatcaaattctcatgatctaataataaaattaccaaaaaataaaacttactcaatacgtattaataattttattagtgtttagaaatatgagaattaatattttagatttaagtttttttttttcttttaatctcatgtgtgcaagtgaccaataagaataaaatccattaatattttttttacataaaatatattaaatgtataaaattataaatgtattttaaaaatatataaatataactggatgataaatggattgggttcgattattcattggattggatgtctcatccaacaactaatccgatctaattagattttcaaaatttacatctgatccgatccaactatgattatatattagatttagggtttttttttttaataaatatgggaaatatagtataattcactttgttatggcataattaatatcatggaattatggattttttttatatatttatatgggcttttttatgccatattttattaaaaaaagtgaaaaattctatatttttaaaacaat

SEQ ID NO: 393020 - DNA, 1613 bp, Cannabis indica
tttaattcttaataatattgtcattactatagttaagtaagaaaaaaaacaaaatacttattgaacatctataattagtacattcaattcaaatttgtttgataaacttttaacaatataataactatattatactaaattaatatttcaaataaaacatagataaaattaattattttctcatcatgacttagaatttgagttcataatactatgttttttttttattattatatatgggttaagacttgatagctcaccaattatttactcataacttaaattactaattatgtatttatttattttttttatgtatacatatactaaaaaaagagaggctatagtggtgtactgtcaagtgtaataaaggaaaggaaaaggaatataaagttttgggggaaagatgtatataataaataatacaattgattaatttaaaatatacaaggccatgtgttagattcttggctatgcctagctagctaggttatattatatatgatccagctttaaacagtataagaattaagaatagtattcacatttatatatgtttttccctcatcaaaaaattccaccctttaattaatttccttctactataagttgctctctagattcactttattataactcacatttcaatttgctctcttacacatttaaagatgaacattcatattttagtactagctagcgttctataattaattagcgatatttttttaaaaattattgtttaaaaattatatgatatctaagaacatctctactaataaagtgctaaagaagtagtatattattaattatattttagcacacttaagaaaaatactattccaataatattctaaaaagtaaattaaatttggcacatgctaaaaattgtattaaatttagcataagatatagcattgtgttaaatttaacctacaattaaattttattttttttatttactatattgtcactaataattataatttattgacttttacataattttatcttctttatttactatattactattatttaagcaaaataaaaaaataaaaaataataatatttatatattttcaataaaatattaaacgataatcaataataataattttttttatatatttacattgtaagctatatatataaatttattttttatatcatgatttagcataaattttatatcttgtatttaaaataatctaatatacctaattatataatggtataacactgaagaaaatactaaatctggtaacttttaacctttctctgcaaagattgatctttttttttttgaaaaatacgtttataaataaaattgaaattaaacttcatggtcattacaaaagatattaacaggtatagtagatatgtctaccatgcccgtgacattattggcaaacgcccatttggccacattatgggccgcaaagtaccagtttctagttatagaaaaaaaattacaattagtcataaaagtagagaggagtttgcagggacgcacatagttctcaatccccctaagtagggttatccctttttaggttcttgattacaatcgctgaatcactctccaccaaaacaaaaggatgatgcaaaga

SEQ ID NO: 393021 - DNA, 796 bp, Cannabis indica
tgtgtaaattttttataaaagtttgaatagtttaaaatgcttagaataaggctcaaatattttgttgcaagcataactatattttttatacgcgtattattttattaattttatttttaacattgtaaacgattcagaattttataaaaatttacatataatcctaaattacttaacatatacaatcatgaaaaaaaaaatagagtttctcttaaataccaaaacaagtagagggatactgaaaatcccttttagaagtgttgtatatacatgtatgttaacaactacaaaaaggtcaattttcgttagttttaaactgtataataaacattaatactgatgtatatacagtagacgcaaaaaaatatttatttttgtcggttatttactgatggtataaaaaatttacatccctttataactgatataaatcatcagttataaactgacactcactaaaaataataaaaaaattgatttgagatatcacatttgaaaaaaaaaaatacaacaacatcctactgcacccaccactacactctcacaccacaatcaatatctcatatctcataacaataacaacaacaaattcaacaatattccatatgtattgtttactaaaatttttagaaaataaattatttaatatttagagctaaagaaaattcaattaaaaggattgaataagaaacactcagagtttttatatattaattgtgcagttcgttgctaatcaacgaatttattgaaaatcgtgaataattaaaattttgcttaattactatcaatattgaaa

SEQ ID NO: 393022 - DNA, 594 bp, Cannabis indica
ttctcgcataattgaggagatatgtagaatgattaatttacttcttggtggtgaatttctgactgcattgcttttttggctcttaatataatgtttgattggaaggaataaaaatgatattctaatacttaaaaataaaaccaaataaagaaatataataaacgttgtttcttttctattccatttcattaccttaaattaaacgtcaccaagtgttttgtttagctttatcactgtcttcactaggttggtccttctagtcatgttgataggttattttaatgttggatatctctcgtaattcggagctgcgtttggtccctcaaattagtgctctttctatgttttagttgataagtggcttgatgttccaacatttgttatatgaacgtgtagataagtagttttaatcgtggatatctctcgaatggatcccaatttaacaccattttttatgtataattctttacgcatgccagtccctctctcgctcacacattccaaaatatatacatcttgtatagttgtatgcatacataccaaaatattatcattttttaaactccattctctcacatgacctgtgtgcagctg

SEQ ID NO: 393023 - DNA, 1151 bp, Cannabis indica
tctctctctctctctcctcaattcacatgccacactctttgtagtgtggtgtgaattttgtaattatccatatctcatcacagtatctcattagttgagaatatactaagatttcataattgtactcacacaatagaatttaatagctcactctcttcctgagtgttgaggctggcttaaaagattgtggtgtgaactcttcatcaaattttgggatttgatattcgataataatacgaaaacatagcaagaatctcctaataagctacaagaggtattgtctctcttttcattagtctagattaatatatatactttatcttaagatccttgagattatggttcatattggattaaattattcttttaatcaaatctacttctgcttttttaactctcatatggaccatacaaactaacaaatggttcttccttgtgtggagaatcattcgtacattggggaccggtgttggagtagggcatgtgttgggtgaaggcttgcacttagtggaccaaatggtcagaggagcaattcgaataacgaagagtgtagaaagagggtgcacgcactaccatggtctgacatagaggacaagatctgatactatctccaaaaaagaataaccatcataaggccatccagctttcccctcataagtggctttcggttctttgtgcgtagtgggcttccgtcctagactctttgcgtggctctctgacatctgcatgtactagtaagtaagttggtcttctcctggtgccaaagtaatggtgggattctcagatcctgaatggttatttgttttgtggcaactttcttatgcctctcctggatcaaacctttcccgggtcagtattaaggagacttaatcagaaatagtcttcatattctcttccattgattgctacgtgtccttcatccaaaaattcagataaaaactaataagtaaataagaagaatttttttaaaaagaagtaaaaaaattgaaaaaacaaacaagagaaaaaagatggtaaaaaatatagaaaagacttaaaacaaatgttttaaaagagaaaatggagtaaaaaaatgagagagattttttaagaaaagggaagaaatatgaggtttacaaaaaaaaaattacaaaaatattaataattggtac

SEQ ID NO: 393024 - DNA, 989 bp, Cannabis indica
gaaagagagtggacaaaacgacacagccctgctataaatagacatattaatactaaactaaagttactcgtaactaatgcagaatactacactagacactagtcatttaatgtcactacaacaaggcaaaacctgaaaagagatacatgcatggattaacatttaaaaccaagaactacaaacattgatgtataaaacattattaagagcgccactagagtagactccttatctccaaatgtaacatcaatgtatggactccttatctcttcattcttgactacaaccctttctggtgcttgatgtctatgcctaacaaaccaaacagaaaaagggacattaaattttagccgtaagaataatttaagctaaagtaatcaaacttattttaactggaagggttttccttaatcttgatgatgtcatttttacttaaagatatattggtttttgtttctaccttgttagccttgtagtatttttatacctgaattatttagaagtgtgacttggaaatattgaataatcatttacatcatatagaagatgtgatggagaatggaataataagctagaaatagtggactttttattcacagatgcttttgtatcagatgcttaattataataattaatgtggtataaatataccggtgtcatttttatttgatgcctattgtagttgtaactctagatattttccaagataaatatctaattaatgacaagtacatctatctaagctttatacctaaatttcctagaaaaactacccccgattagatctttctccggctgctatactttaagattagctcataatttcctaaacttacaatccaaactataaccatctatatctatatagatatattgttggaggaggtttcaatagttatatttttttaactattaaattactattgaatgcttgtaattaatttagaaataaaataaataaaataataattaacttataacctaatagt

SEQ ID NO: 393025 - DNA, 1219 bp, Cannabis indica
ataactgataattagtacgtatagggtaattttataaataaaaggtcatatcaaatatatctctttcattcgcattctttaccataaaaaggactgaccaacttggagttggtagttgatcacaccaaagaaagacaaagaggtatattataatgtaaatatataactctcaaaatttaaataattttactgtgatgcatgtaatatatatataagacaaacgtacgtatatatatgttaaaaattaataataataaattaatgtatatgttatttaatttaaattgagatacatgcattaaaattcggtttggtttgtttaaaccgaccaactgtgaattaaaacagtcggttttctatatttttataatggtaggtcggttttcgaattagaaccataaaaaccaaaaccgaattttggatttttttttgagtaaaaaccgactaaaccgaccgttgctcaatcctaggccctaggcacagccatcagccgcctatactaaataacaagctcctgaaacagtaccccatcaatatctctacaactatcctattctggattaattggatagtctcaagacagtagattaattcaatactgaaactttgaaaatgtcgctgaaatcccacctagaccagcataaatggctaataattcaacctgcaacgattgatattcttgctgcaatgcagtagcagaagcaactaaaattgtttacccattaaagtaaaataaataaaattggcctagctattctcgaaaggtaaaaagtctaacttctttttttttgttagtttgataatatatttataataaaaatatatgatatattaaataataatagtgactacttttaaagtagcttagtattgagtggtagaaccagatgagagggtcaaataaaatatattttcacttaatttttatagtatgtagtattttataaattaatataaaaagttaattagctttatataaaagaaagagaaataataaagggtatcttaaataatattggtgtaaaataataaaaagtggtatatcattattggtgtgaaataatatcgaatcttaaatattttaatttaataaataacataaaaaatcgcttaccacttgtaaaatgccatatattaatatggtattagatacggtaagaatatatatatatcttacaaatatatatgggttaatttcacaaatgcacaaaaataataa

SEQ ID NO: 393026 - DNA, 2153 bp, Cannabis indica
cctttaccatactggggggagtgcattagcactgctacctacataataaataggactcctacacccaatctcaagcataaatccccttttgagatcctaaattctagagttcccaactatgatcatcttaagacatttggatgtcttgcttatgcttccactcttggggctgctagatcaaaaccctaaagccatcccttgtgtttttctaggatatcctatgggaatgaaagcttacaaattacttgaccttgatactaataggattttttgttctagggatgtcatatttcatgaacaatttttgccttttctcaaacatggtcaagtatcacctgatatttttgagttttttttttctgctgatgcatttcaaaccagtattggttttccccacaccagttcgaatgcacaacagcatactccttccagtttgcctcatcccatagttgatcatgatgacattatttttcataatccatctgttcttcacaaatctgattataccagactcgtgcctcctgttcttcaggatgatgttcatgatttaccacagcagactgttaacagtaggcctattcgaaaagtgcaaaaaccttcttatttgcaggattatcactgctatttgtccacaaattctgttcacacacaggagctcaaagcttctactaactattctatttctcagattgttgattatagcaggttgtcacctaaatttcaagccattgtgtcagctatttccagccattatgaacctgaacattttcatcaagctcatggtaaatctgtttgggataatgccatggacactgagattgaggctcttgaagctaatgatacttggattattgtttctttacttgctggacaacatgctattggttgcaagtgggtatataaaatcaagtataatgctgatggtttagtggaaaggttcaaagctcgccttgttgcgaaaggatatagtcaacaagagggtgttgattataatgaaacccttgctcctgttacaaaattggtttctgttaaacctgttcttgccttggctgccattcaactatgggtccttcaccaacttgatgtcaataatacttttctccatggggatttacatgaagaggtgtttatgactctacctcctgagtatagtcctaagagggagttgccacctaatgttgtttgtaaactcaagaaatctctttatggacttaaaagcaagcatcaagacaatggtttgaaaagttttccacaacctttattgaagaagggttctaacattctgcatttgatcactctttgttcatccaacacaaaaggctcaaccatcataattgtaatactcctgaaaattttattgatatttatttggccatatttaattaaatatgtaattatgtggatattagagtaagattttaatattacttaagctatttacgagttaattagtgaaatttgagtaaatgaataaattaagcgtaatttattaattacggagattttattaattttctaacaaaatcttcaaccctaggagctaatcaagttgtggtaagtgttcttcatgtgttcttgatgatttcttaggttttaggtttgatattagttggggttttggtgatttcgggattgaggtattaaactgagattagaacaagtttctaggcttagattggagtttgtttatgtttgatttggttagaatcaaagctgttagtgttgagttaatggaatttttagggtttttaagcttaaactttaattgattatgctattttgattaaatggataaattgttgtgaattgatggttgggttatgttgtattgatgatattggattgatctggaggtgttgggcaggtgtgattcagtatttggttcgagtttggggagaaaactcaaggctgctgcactgccagaaccggtcgaccggtttgcttgctggggaaaaatttcgctttcctgtagggccagttttagggctcggggtgatttccgtgttcgttatagattgtctagaagttgtaaaacttattttggagttattggttatgaaaattagggttattcccggaattatggattaaggtatttatgaatcttattgtcgtgacataggacccgtgtaacaccctaactatcttaggcg

SEQ ID NO: 393027 - DNA, 1067 bp, Cannabis indica
ttgaattttgataagagcataatgttcatcttctgttttaaaacttattgtgtaaggattttaatcatttgtgggtttcagttttatatctctagaaattacaagttcttcagttcaacgttgtattacttactataattccatgcttttaaataacccgcacgagaatttcgcagaaccatgctgcttctgaaatagatttttcttaccaacatctcttcatgaagtaattgtatggatgataagtgctttagtttagtgtttgtgttacttcatactgagttttcgatgacccatttgggaatttttgctgaaacattatcgttctatgatggcttgtgataacatacaatctgggtttatgtggtttgatgtaggtgtaagtataatctgtgtttgtcttacttggtaccaatttttttcaaaccagaatgagaatattgcagacatgttcttctggtacggaaatatggacaataattgtgataatatcatctctggatttctttatttttgatgtaaaagtatgagtgattagtcttagattcagttttaatgatgctcaactgaattgttgatatatgacaattaggtaaccttacacttgatgcttatgaagatgactgtgaatttgccgaccctgcaagctccttcaaggggcttcgcgtttcaaaaggaactgtacgaattttgggtcccttcttgagaggtcgaatatgaagcttatgaagtgggaggacttcgaggtgttcaaactttataatctcttagcctcttcttataatttaccattcccttaattagcctgatgaaataaacttagaattcaatgattctcttcatcacagtacgtaactgaagaatcctctttcatgagcttatgtatgatgtaaaacccattttatttttgtttttgacacaggataagggaattggtcactggagatttagttgtgtgctatcctttccatggaagcccattctttctggcaagtctttcgttgtcttattcaaatggttaaaaaatatataaatggtttgattacaattatcaaaggaagcataat

SEQ ID NO: 393028 - DNA, 542 bp, Cannabis indica
taaaaaaaaaatcatcatacaatctcttatataaaaagaaaacatacaagaaaacatcttcaaaacaactgtcatcaccatatttcatttgtagtcaccactacatttaaaatcgatatcatcatcgtatctcacttgtagtcatcattaatatatacggttatatattttgttaataattttaaattaattaataatctgtattgtttgacaaaattagtgatctttaattaaataaagtagaataaaaaataatttattaatgatctctaaataaataaaaaaaataaaaaaatggaaaaaatgaaaaaattaaggagagaatttaaagtagaataaaaaaattcaaaaaataagagaattaaggagaaattgatagaagtatttgtaagaaaaaatatcttgaaattaataatattttaaaatttaaattcagataaaatttatataataaattttattgttataaatatttttactttagttttagtacatgttgacttcgcttttagccaacaacaatgagtctttttgataagcga

SEQ ID NO: 393029 - DNA, 1009 bp, Cannabis indica
ataacaaagataaatttcctgataaaatttgatcaaaatggatatcctatttatctaaagatatagagaaaggcttcattatgacccaccatgatatgaaacatcattttccatagaatgaaacatcaaataagtgatgtagctttcaactttttgggtttttttatcactttatttattttcttatttctcttatcctcttcacaatcttttccattgtggcataggaaaccaaggcttaaataaattaaccttattcaaagagtattacttcatgaatgtaatgtttttacaaataattagtaatttttttttttaataattcttaaattaaaatgtaggtgcactttagcaattcttttatttaaaaagaaaaataataaaagacagttcaatattattataagatatcatactattattaatgtacttaaatattaaatatgagattttacaaatttaatttaattataaaaagattattataaagtgccaccacctctagatattgttgaatactaatattcaataacaatgtcttattataaatatagggatatgattttgtcccgtaattgtactttcacggaatgcattccgtgatgtacgacagccgtcagatgagggacttatttgatctgacggctgagattgatctaggggtaattagggttaaaaagtagaaacgtaccatgatactcatttaatgtaccatgatacattttttaaagttacacatatattatttatctaactatagtgatgtacggcagccgtcagatgagggacttatttgatctgacggctgagattaatgtagttagataaataatatacatgtaactttaaaaaatgtatttgtaatataattttagtaattgttttagtatttagaagaattttttagtctatttttttataatgatatacgctatagttatagttatacattatatttatttaagacatgttttaaaattttaaaaattttaaaataatttacaatata
